United States Patent Application Publication US 2018/0126003 A1 - sequence listing, part 184

SEQ ID NO: 327598 - DNA, 4524 bp, Artificial Sequence
  derived and/or modified sequence
atgggcacagccctgctgcagagaggaggctgcttcctgctgtgcctgagcctgctgctgctgggctgctgggccgagctgggcagcggcctggagttccctggagctgagggccagtggacccgcttccccaagtggaatgcctgctgtgagagcgagatgtccttccagctgaagaccaggtctgcccggggcctggtgctgtactttgatgatgagggcttctgtgacttcctggagctgatcctgacccggggcggccgcctgcagctgtccttcagcatcttctgtgccgagcccgccaccctgctggccgacacccctgtgaatgatggagcctggcacagcgtgcgcatccggcggcagttcaggaacaccaccctcttcatcgaccaggtggaggccaagtgggtggaggtgaagagcaagaggcgggacatgaccgtcttcagcggcctgtttgtgggcggcctgcccccagagctgcgggctgctgccctgaagctgaccctggcctctgtgcgggagcgggagcccttcaagggctggatcagagatgtgcgggtgaacagcagccaggtgctgcctgtggacagcggggaggtgaagctggatgatgagccccccaacagcggcggcggcagcccctgtgaggccggggaggagggggagggcggcgtgtgcctgaatggaggagtgtgcagcgtggtggatgaccaggccgtgtgtgactgcagcaggacaggcttccggggcaaggactgcagccaggaggacaacaacgtggagggcctggcccacctgatgatgggagaccagggcaagagcaagggcaaggaggagtacatcgccaccttcaagggcagcgagtacttctgctatgacctgagccagaaccccatccagagcagcagtgatgagatcaccctgtccttcaagaccctgcagagaaatggcctgatgctgcacacaggcaagtctgctgactatgtgaacctggccctgaagaatggagctgtgtccctggtgatcaacctgggcagcggggcctttgaggccctggtggagcctgtgaatggcaagttcaatgacaatgcctggcatgatgtgaaggtgaccaggaacctgcggcagcacagcggcatcggccacgccatggtgaccatctctgtggatggcatcctgaccaccaccggctacacccaggaggactacaccatgctgggcagtgatgacttcttctacgtgggcggcagccccagcacagctgacctgcccggcagccctgtgagcaacaacttcatgggctgcctgaaggaggtggtgtacaagaacaatgatgtgcggctggagctgagccggctggccaagcagggcgaccccaagatgaagatccacggcgtggtggccttcaagtgtgaaaatgtggccaccctggaccccatcacctttgagaccccagagagcttcatcagcctgcccaagtggaatgccaagaagacaggcagcatcagctttgacttccgcaccacagagcccaacggcctcatcctcttcagccacggcaagcccaggcaccagaaggatgccaagcacccccagatgatcaaggtggacttctttgccatcgagatgctggatggccacctgtacctgctgctggacatgggcagcggcaccatcaagatcaaggccctgctgaagaaggtgaatgatggagagtggtaccacgtggacttccagagagatggccgcagcggcaccatctctgtgaacaccctgcggaccccctacacagcccctggagagagcgagatcctggacctggatgatgagctgtacctgggcggcctgcctgagaacaaggccggcctggtgttccccacagaggtgtggacagccctgctgaactacggctacgtgggctgcatccgggacctcttcattgatggccagagcaaggacatccggcagatggccgaggtgcagagcacagctggggtgaagcccagctgcagcaaggagacagccaagccctgcctgagcaacccctgcaagaacaacggcatgtgcagagatggctggaaccgctacgtgtgtgactgcagcggcaccggctacctgggccgcagctgtgagcgggaggccaccgtgctgtcctatgatggctccatgttcatgaagatccagctgcctgtggtgatgcacacagaagcagaagatgtgtccctgcgcttccgcagccagagggcctacggcatcctgatggccaccaccagccgggacagcgctgacaccctgcggctggagctggatgctggccgggtgaagctgactgtgaacctggactgcatccgcatcaactgcaacagcagcaaaggacctgagaccctgtttgctggctacaacctgaatgacaatgagtggcacacagtgcgggtggtgcggcggggcaagagcctgaagctgactgtggatgaccagcaggccatgacaggccagatggccggggaccacacccggctggagttccacaacattgaaacaggcatcatcacagaaagacgctacctgagctctgtgcccagcaacttcatcggccacctgcagagcctgaccttcaacggcatggcctacatcgacctgtgcaagaatggagacatcgactactgtgagctgaatgccaggtttggcttcaggaacatcatcgctgaccctgtgaccttcaagaccaagagcagctatgtggccctggccaccctgcaggcctacacctccatgcacctgttcttccagttcaagaccaccagcctggatggcctcatcctgtacaacagcggagatggaaatgacttcatcgtggtggagctggtgaagggctacctgcactacgtgtttgacctgggcaatggagccaacctgatcaagggcagcagcaacaagcccctgaatgacaaccagtggcacaacgtgatgatcagccgggacaccagcaacctgcacacagtgaagattgacaccaagatcaccacccagatcacagctggggccaggaacctggacctgaagagtgacctgtacatcggcggcgtggccaaggagacctacaagagcctgcccaagctggtgcacgccaaggagggcttccagggctgcctggcctctgtggacctgaatggccgcctgcctgacctgatcagtgatgccctcttctgcaatggccagatcgagcggggctgtgagggccccagcaccacctgccaggaggacagctgcagcaaccagggcgtgtgcctgcagcagtgggatggcttcagctgtgactgcagcatgaccagcttcagcggccccctgtgcaatgaccccggcaccacctacatcttcagcaagggcggcggccagatcacctacaagtggcccccaaatgaccggcccagcaccagggctgaccggctggccatcggcttcagcacagtgcagaaggaggccgtgctggtgcgggtggacagcagcagcggcctgggggactacctggagctgcacatccaccagggcaagattggagtgaagttcaacgtgggcacagatgacatcgccatcgaggagagcaatgccatcatcaatgatggcaagtaccacgtggtgcgcttcaccaggtctggaggaaatgccaccctgcaggtggacagctggcctgtgattgaaagatacccagctggcaacaatgacaatgaaaggctggccatcgcccggcagaggatcccctaccgcctgggccgggtggtggatgagtggctgctggacaagggccggcagctgaccatcttcaacagccaggccaccatcatcatcggcggcaaggagcagggccagcccttccagggccagctgagcggcctgtactacaacggcctgaaggtgctgaacatggccgcagaaaatgatgccaacatcgccatcgtgggcaatgtgcggctggtgggggaggtgcccagctccatgaccacagagagcacagccacagccatgcagagcgagatgagcaccagcatcatggagaccaccaccaccctggccaccagcacagcccggcggggcaagccacccaccaaggagcccatcagccagaccacagatgacatcctggtggccagcgcagaatgtcccagtgatgatgaagatattgacccctgtgagcccagcagcggcggcctggccaaccccaccagggctgggggccgggagccctacccaggcagcgctgaggtgatccgggagagcagcagcaccaccggcatggtggtgggcatcgtggccgctgctgccctgtgcatcctgatcctgctgtatgccatgtacaagtacagaaacagagatgagggcagctaccacgtggatgagagcaggaactacatcagcaacagcgcccagagcaatggagctgtggtgaaggagaagcagcccagcagcgccaagagcagcaacaagaacaagaagaacaaggacaaggagtactacgtgtag

SEQ ID NO: 327599 - DNA, 4524 bp, Artificial Sequence
  derived and/or modified sequence
atgggcaccgccctgctgcagcggggcggctgcttcctgctgtgcctcagcctgctgctcctcggctgctgggctgagctgggatctgggttggaattccctggagctgagggccagtggactcgctttccgaaatggaacgcatgctgtgaaagcgagatgtcatttcaactgaaaacccgcagcgcccggggactcgtgctatactttgatgatgaaggattttgcgattttctggagctgattctaaccaggggaggtagacttcagctgtccttcagcatcttctgtgcagagccagccactctcctggccgatacccctgttaatgatggggcctggcactccgttcgaatccggcggcagttcaggaatactactctcttcatcgatcaggtagaagccaaatgggtcgaggtaaaaagcaaacgcagggacatgaccgtgttcagtggactgtttgtgggtggcctgccacctgagctgagggccgcagccctcaaactgacgctggccagtgtgcgcgagagagagcctttcaaaggatggatccgggacgtcagagtgaatagcagccaggtccttccagttgactctggggaggtgaaactggatgacgagccacctaactccggcggaggcagcccgtgcgaggcaggagaggagggcgaagggggcgtgtgtctgaatggaggcgtgtgcagcgtggtcgacgaccaggccgtgtgtgactgcagccggacggggttccgcgggaaggattgctcacaggaggataacaatgttgagggactggcccacttgatgatgggggaccaaggcaaatcaaagggaaaagaggagtatattgcaacattcaaaggatcagagtacttttgctacgatctaagccaaaatccaattcagtcctctagtgatgagattactctgtcattcaagacactgcaaagaaatggactgatgttgcacactggaaagtctgccgactacgtgaatttagctctaaagaatggagcggtctctctggtgatcaatcttggctccggcgcttttgaggcattggtagaacccgtcaatggcaagtttaacgacaacgcctggcatgatgtgaaggtgacccggaacctgcggcagcacagtggcatcggtcacgcaatggtcacaatttccgtggacggaatactgactacgacgggatatactcaggaagactatactatgctagggagcgatgactttttctacgttggtggatccccctcgaccgcagacctgccaggcagtcccgtctctaacaacttcatgggttgcctgaaagaagttgtgtacaaaaataacgacgtcaggctggaactttcacgcctggccaaacagggagacccaaaaatgaagatccatggcgtcgtggcctttaaatgcgaaaacgtagccaccctggatcccattactttcgagacacccgagtctttcatctctcttcccaaatggaacgccaaaaagactggcagcatttctttcgattttaggactactgaacccaatggcctcatcctgttcagtcacggaaaaccccgccatcaaaaggatgcaaaacaccctcagatgattaaagtggactttttcgcaatagagatgctcgatgggcacctgtaccttctgctggacatggggagtggcaccatcaagattaaggcactgctgaaaaaggttaacgatggggaatggtaccacgttgacttccagcgtgacgggagatccgggactatttctgtgaataccttacgaactccatatactgccccgggggagagcgagatcctagatttagacgacgagttgtacttagggggccttccggaaaataaggctgggctagtgttccctactgaagtgtggaccgcgcttctcaattatggctatgtggggtgcatccgggatctctttattgacggacagtcaaaggatattcggcagatggctgaagtgcagagtaccgccggcgtcaaaccttcttgctctaaggaaactgccaaaccctgtctatccaacccatgcaaaaacaacggcatgtgccgggacgggtggaatcgatatgtctgtgactgctctgggacgggctacctgggtagaagttgcgaacgagaggccacagttctatcgtacgatggatctatgttcatgaagatccagcttcccgttgtgatgcatactgaagctgaggatgtgagtctgaggttccgcagccagcgagcctatggcatcctgatggctaccacatcccgcgatagcgcagacacattgcggctggaactggacgccgggagggtgaaattaacagtcaatttagattgtatccggatcaattgcaatagctcgaaggggcccgagacgctatttgccggatataacttgaacgacaatgagtggcataccgtgagagtggtgcgcaggggaaagtcacttaagctgaccgttgatgaccagcaagctatgaccggacagatggcaggggaccacaccagattggaatttcataacatcgagacaggcataatcaccgagcggcgatatttgagtagcgtgccaagtaatttcattggtcatctccaaagtctcacatttaatggaatggcctacattgatctgtgtaaaaatggcgacatcgactactgcgagctgaacgcccgcttcggcttccgcaatatcattgctgatcctgtgaccttcaaaacgaagtcgagttacgtagcgctggcaactcttcaagcctatacaagcatgcacttattttttcagttcaaaacaacatcattagatggcctgatactgtacaactccggggacggtaacgattttatagtggttgagctcgttaaaggctacctccattacgtattcgatcttggaaatggcgccaacttgattaaaggcagttctaacaaaccactaaatgacaaccagtggcataacgtcatgatttctagggatacctccaacctgcacaccgtaaagatagataccaagataactacccagattacggctggcgccaggaacctcgacctgaaaagcgacctgtatattggcggagtggctaaggaaacctataagtcgctgcccaagctggttcatgcaaaggaagggtttcagggctgtctggccagtgtggaccttaacgggaggctcccagacttgatctctgatgctctgttttgcaatggccagatagagcgcggctgcgagggccccagcaccacgtgtcaagaagactcctgtagcaaccagggggtgtgtctccaacagtgggatggttttagctgtgactgcagcatgacatcttttagcggaccgctttgtaacgatccaggcaccacgtacattttcagtaaaggcggcggtcaaattacatacaagtggcctcctaacgatcgcccatcaaccagagctgaccggttggctatcggttttagcacagtccagaaggaggcggtgctggtgcgcgtggattcaagtagcggccttggtgactatctggagttgcatatccaccaaggcaagattggcgtgaaattcaacgtaggcaccgacgacatcgccatcgaagagagcaacgccattataaatgacgggaaataccacgttgtccgttttacccggagcgggggtaacgcgactctgcaggtggacagttggcctgtgattgaaagatatcccgccggaaataacgacaacgaacggctggccattgcacggcaaagaatcccttacaggcttgggagggtggttgacgaatggctgctagacaagggtcggcagctcaccatctttaacagccaggccactataatcattgggggaaaggaacagggtcagcctttccagggccaattgtccggactttactacaatgggctgaaagtgctgaatatggctgcagaaaatgatgctaacatagccatcgtgggcaatgtcagactcgtgggagaggtaccatcctctatgacgaccgaaagtacggccacagcgatgcagagcgagatgtcaacctccatcatggaaacaacaacaacactcgccacttccacggctagaagagggaaaccccctaccaaggaacctatctctcagaccacagatgatatattggttgctagcgccgaatgtccaagcgacgatgaggacatagacccctgcgaaccctcttcaggaggcctggccaatcccaccagagccgggggcagagagccctaccccggctcggctgaggtaatccgagaaagctccagcaccacgggcatggtcgtgggtatcgtcgccgctgcagcgctgtgcattctcatcctgctgtacgcaatgtataaatatcggaaccgggacgaaggatcctatcatgttgatgagagccggaactatattagcaacagcgctcagtccaacggagccgtagtcaaagaaaagcaaccttcaagcgccaagagtagcaacaagaataagaaaaataaggataaagaatactacgtgtag

SEQ ID NO: 327600 - DNA, 5816 bp, Artificial Sequence
  derived and/or modified sequence
cctccttctcctcctcctcctcctcctgctcccctccgttgcctgttctcccctcccgcactcctggagatagacgctcaagcctgacgcctctgaaaaggcagcagcagtcgccttatccatagacctcaggaaattcgctttgaccgatgcatgcttcaggctctggctcgagctgaggggaataaccgggcagatgtctgagtccttaaaaaagacaagataaaaccaaaatgcatcaccaacacacaaccaattgatgtgctggcatcttagcttggccctgcagaggcagagagaaaagaagaggagctgttgcgatttccacatctaacagcttctggctatttcgcaactgctgggtttgagtcctactgttgccgtggctgaaaagagaagtaaaatccaacttgtgagaccacgcacaaggaattaggctttggctgcagcggtgctgaagcccatgctatgacagaagaagcaggcctttgaagctatcctcgggttaagaaatggtgccctaaagaggcaagcatccctttctccgttctgctgtaagacaccacatctgaaggagacagacttgaggcattcacaagcatccaaggatactggctcactgctggcttcctgtactttcttgagaaaagtgttttctttttactgactctcactgcttccttttggcctggtaccactggtggaacctggcagataatgggatttgaggagttaagtatctgttgacactgcagatactcttaaattagttaatcagactcaaatgggtcagtgctttcccttgatcttttgttgaagccttttccagaacgttgtctccaaagtgcatcctccctttggtctggaagttctgtggctaccctgtaccactggggtcaacgttttccagttggaagaggactacagggagagagggcggggttattggaagaagaagaagaaaaaaagaactagataaaggagggcacatccctctcactcccgcctttccccttacctttctgtctctcgggacccttatttcttcgtcacggtgtccaggaccattttgaccctgtcggccccggcacccccccgccgcaccccagccccgagcatggggacggcgctgctccagcgcgggggctgttttcttctgtgcctctcgctgctgctcctgggctgctgggcggagctgggcagcgggctggagtttccgggcgccgagggccaatggacgcgcttccccaagtggaacgcctgctgcgagagcgagatgagcttccagctcaagactcgcagcgcccgcggcctcgtgctctacttcgacgacgagggcttctgcgacttcctggagctgattctgacgcgcggcggccgcctgcagctcagcttctccatcttctgcgctgagcctgcgacgctcctggccgacacgccggttaacgacggcgcctggcacagcgtgcgcatccgccgccagttccgcaacaccacgctcttcatcgaccaggtggaggccaagtgggtggaggtcaagtccaagcgcagggacatgacggtgttcagcggccttttcgtcggggggctgcccccggaactgcgcgccgcggcgctcaagctcaccctggcctcggtgagggagcgggagcccttcaaggggtggattcgtgacgtgagggtcaactcctcgcaggtcctgcccgtggacagcggcgaggtgaagctggacgatgagccgcccaacagcggcgggggaagcccgtgcgaggcgggcgaggagggcgagggcggggtgtgcctcaacggaggtgtgtgctccgtggtggacgaccaggccgtgtgcgactgctcgcgaaccggcttccgcggcaaggactgcagccaagaagacaacaatgtggaaggtctggcgcacctgatgatgggcgaccaaggtaaaagtaaaggaaaagaagaatatattgccacgttcaaaggatctgaatacttctgctacgacttgtctcaaaaccccattcaaagcagcagtgatgaaataactctgtcatttaaaacccttcagaggaatggactgatgcttcacactgggaaatcggctgattatgtcaatcttgccctgaaaaatggagctgtctctctggtcattaatttgggatcaggggcctttgaagcactagtggagcctgtgaatggaaagtttaatgataatgcctggcatgatgtgaaagtcaccaggaatctgcgtcagcactcaggcattggacacgctatggtgacaatatcagtggatgggattcttaccacaacgggctacacgcaagaagattataccatgctggggtctgatgactttttctatgttggaggcagtcccagcacagccgaccttccagggtcaccagtcagtaacaactttatgggctgtctcaaagaggttgtatataaaaataatgatgtgaggctggaattatctcgacttgccaagcaaggagatcctaagatgaagatccatggagtggtggcatttaaatgtgagaatgttgcaactttagacccaatcacctttgaaaccccagagtctttcatctctttgcctaaatggaatgcaaagaaaactggctccatatcatttgatttccgtacaacagagccaaatggcctcatcttatttagccatggcaagccaagacatcagaaagatgccaagcacccacagatgataaaggtggacttctttgctattgagatgctagatggccacctctacctcctcctggacatggggtcaggtactataaaaataaaagccctgttgaagaaagtgaatgatggagaatggtatcatgtggacttccagagagacggacggtcaggtaccatttctgtcaacacgttgcgtactccctacactgctcctggtgagagtgagattctggacctggatgatgagttgtacctgggggggctgccagaaaataaagctggccttgtcttccccaccgaggtgtggactgctctgctcaactatggctacgtgggctgcatcagggatttgttcatcgatggccaaagcaaagatatccggcaaatggctgaagttcaaagtactgctggagtgaagccttcctgctcaaaggaaacagcaaaaccgtgccttagcaacccttgcaaaaacaatggcatgtgcagggatgggtggaacagatatgtctgtgattgttccggaacaggctatcttggcaggtcctgtgagagagaggcaacggttttgagctatgatgggagcatgtttatgaaaattcagctccccgtagtcatgcatacggaggctgaggatgtttccttacggttccgatcccagcgtgcatatggcattctgatggcaaccacttctagagactctgctgacaccctccgcctggagctagacgcaggacgtgtgaaactgacggtcaatctagattgtatcaggattaactgtaattccagcaaaggtcccgagactctttttgctggctataacctcaatgataacgagtggcacacagtgcgtgtagttcggcgtggaaaaagtttaaagttaacagtggatgaccaacaggccatgacaggtcaaatggcaggtgatcatactaggctggagttccataacatagagactggcatcatcacagaacgacggtatctttcttctgtcccctccaacttcattggacacctgcagagcttgacatttaatggaatggcatacattgacctgtgtaaaaatggcgacatagattactgtgagcttaatgccagatttggcttcaggaacatcatagcagatcctgtcaccttcaagaccaaatcgagctatgttgccttagctaccttgcaagcctacacttctatgcatctttttttccagttcaagacaacatccctagatggattaattctatataacagtggggatggaaatgactttattgtggttgaattagttaaagggtacttacattacgtgtttgatttgggaaatggtgctaacctcatcaaaggaagctcaaataaacctctcaatgacaatcagtggcacaacgtgatgatatcaagggacaccagcaacctccacactgtaaagattgacacaaaaatcacaacgcaaatcaccgccggagccaggaacttagacctcaagagtgacttatatataggaggagtagctaaagaaacatacaaatccttaccaaaacttgtacatgccaaagaaggctttcaaggctgcctggcatcagttgatttaaatggacggcttccggacctcatctccgatgctcttttctgcaacggacagatcgagagaggatgtgaagggcccagcacaacctgccaagaggactcatgttccaatcaaggtgtgtgcttgcaacaatgggatggcttcagctgtgactgtagtatgacttccttcagtggaccactctgcaatgaccctgggacgacatatatctttagcaaaggtggtggacaaatcacgtataagtggcctcctaatgaccgacccagtacacgagcagacagactggccataggttttagcactgttcagaaagaagccgtattggtgcgagtggacagttcttcaggcttgggtgactacctagaactgcatatacaccagggaaaaattggagttaagtttaatgttgggacagatgacatcgccattgaagaatccaatgcaatcattaatgatgggaaataccatgtagttcgtttcacgaggagtggtggcaatgccacgttgcaggtggacagctggccagtgatcgagcgctaccctgcaggaaacaatgataacgagcgcctggcgattgctagacagcgaattccatatcgacttggtcgagtagttgatgaatggctactcgacaaagggcgtcagctcacaatcttcaatagccaagcaaccataataattggcgggaaagagcagggccagcccttccagggccagctctctgggctgtactacaatggcttgaaagttctgaatatggcagccgaaaacgatgccaacatcgccatagtgggaaatgtgagactggttggtgaagtgccttcctctatgacaactgagtcaacagccactgccatgcaatcagagatgtccacatcaattatggagactaccacgaccctggctactagcacagccagaagaggaaagcccccgacaaaagaacccattagccagaccacagatgacatccttgtggcctcagcagagtgtcccagcgatgatgaggacattgacccctgtgagccgagctcaggtgggttagccaacccaacccgagcaggcggcagagagccgtatccaggctcagcagaagtgatccgggagtccagcagcaccacgggtatggtcgttgggatagtagccgctgccgccctgtgcatccttatcctcctctatgccatgtacaagtacagaaaccgggatgaaggctcataccatgtggacgagagtcgaaactacatcagtaactcagcacagtccaatggggctgttgtaaaggagaaacaacccagcagtgcgaaaagctccaacaaaaataagaaaaacaaggataaagagtattatgtctgatcccaagatcttaaatggacacttgtatagaaatagtcttcattttatctgagacataatataaacttatttactttcctttttatgaagcacatacaaaagaagacagggaatgcaatcaggaaggaaagactttttaaaaaataaaaacaagtatctcatgctcttgtttctc

SEQ ID NO: 327601 - DNA, 4524 bp, Artificial Sequence
  derived and/or modified sequence
atggggaccgctctcttgcaacgagggggttgttttctcctatgtctgagcctgttgctcctgggatgttgggctgaacttgggtccggcctcgaatttcctggggcagaggggcaatggacccggtttcctaaatggaacgcttgctgtgagtcggaaatgtcttttcagctgaagacccggtctgcccgtggattggtgctgtatttcgacgatgaaggattttgcgattttcttgaactaatattaacccggggagggcgtttgcagctatcctttagtatcttttgtgccgaacccgctacactcttagcagataccccagtgaatgatggggcttggcactctgttagaatcagaagacaatttagaaatacaacgctgttcatcgatcaggtggaggcaaaatgggtggaagtaaagtcaaagagaagagatatgacggtgttttccggcttattcgtaggtggactgcctcctgagctcagagcagccgcactcaaactaacactagcctccgtgcgggaaagagagccgttcaaagggtggatccgggacgttagagtgaacagttcccaggtcctgccagtggattccggcgaagtaaagctggatgacgagcctcccaattccggcggtggctctccctgcgaagctggcgaggaaggtgaagggggagtgtgtctgaatggaggagtgtgttctgttgtggacgaccaggctgtctgtgactgttctaggacgggattccgcggaaaagactgctcacaggaggataacaacgttgagggacttgcgcacttgatgatgggtgaccagggaaagagtaagggcaaagaagaatatatcgctacatttaagggatcggaatacttctgttatgacctgtcacagaatcctatccagagcagtagcgatgaaataactctcagctttaagacgctccagaggaatggactgatgctccacacaggaaagtccgccgactatgtcaatctggcccttaagaacggggctgtgtctctggtcattaatttggggagcggcgcatttgaggccctagttgagcccgtgaatgggaagttcaatgataacgcctggcatgacgtcaaggtgacacggaacctgagacagcatagcgggattggtcatgcaatggttacaattagtgtcgacggcatcctcactaccactggctatacacaggaagactacaccatgcttgggagcgacgatttcttttatgtgggaggaagtccgtctacggcagatctgccaggcagtcccgtctctaacaatttcatggggtgcctgaaggaggtggtctacaaaaataatgatgtcagactggagctatcccggcttgccaagcaaggcgatcccaaaatgaaaattcacggagtggtggcgtttaaatgcgaaaatgtggcgaccctggaccccatcacattcgagacgccggaatctttcatctctctgcctaaatggaacgccaagaaaaccggaagcattagcttcgatttcaggaccactgagcctaacggtctgatcctattttcccacggtaagccgaggcatcaaaaagatgctaaacatcctcagatgatcaaagtggacttcttcgcaatcgagatgctcgacggccacctgtacctcctcctcgacatgggctctggcaccattaagataaaggctttgttgaaaaaggttaacgacggggaatggtaccatgtagactttcagagagatggacgctccggaacgatatctgtgaacaccctccgcacgccatatacagcgcctggcgaaagcgaaatccttgacctggacgatgagctttatctgggcggattaccagagaacaaagctggattagtgtttccaaccgaggtgtggacagcgttgcttaattatggctacgttgggtgtattagagatctctttatagatggccaaagcaaagacattcgccaaatggccgaagtgcaatcaacagcaggagtgaagccatcttgtagcaaagagactgccaagccgtgtctgtcaaatccttgcaagaataatggaatgtgcagggacggttggaacaggtatgtctgtgactgttccggtaccggatacttggggaggtcttgcgagagagaagcaacagttctgagctatgatggcagcatgtttatgaagatacagttaccagttgtgatgcacacggaagccgaagatgtttctctcaggtttagatcgcaacgagcatatggtattctaatggcaacaacttccagggatagcgccgacactcttcggcttgagctcgatgccggaagggtgaaactaacagtcaacttggattgcatccgtatcaattgcaactcatccaagggtccagagacattgtttgccggatacaatctgaacgacaacgagtggcatacagtgcgggtagtgagacgaggaaaaagccttaagctgaccgtggacgatcagcaggccatgaccgggcagatggctggggaccatactcggttagagttccacaatattgagaccggtattattacagagcgacggtacctgagtagcgtcccctctaactttattggacatttgcaaagcctcacatttaacggtatggcttatatcgacctgtgcaagaatggggacattgactattgtgagctgaacgcgcgattcggattcaggaatatcatagccgatccagtgaccttcaaaaccaaaagtagctacgttgcactggcaactctgcaggcatacacaagtatgcacctcttctttcaatttaaaaccacttctctggacggcctcattctgtacaattcaggtgacggaaacgattttatagtggtcgagctggtcaagggttatcttcattacgtatttgatctcggcaatggtgccaatctcatcaagggcagctccaataagcccctcaacgacaaccaatggcataatgttatgatttctcgggatacgtctaacctccacaccgtcaagatagatactaaaatcactacccaaatcaccgccggtgcccgaaatcttgacctcaaaagcgacctttatatcgggggtgtggcaaaggagacttacaagtctcttccaaagctggtccatgccaaagagggcttccaggggtgtctagcctctgtcgaccttaatggcaggcttccagacttgattagcgacgcactgttttgcaatggccagatcgagcggggttgtgaaggaccatccactacttgccaggaggatagttgctcaaatcagggagtgtgccttcagcagtgggatggattctcctgcgactgttcgatgacatcgttctcagggccactgtgtaatgatcctggcaccacatatatcttttctaaagggggaggccagatcacgtataagtggcccccaaacgacagaccatcgactagggccgaccgtttagctatcggcttcagcaccgtgcagaaggaggcagtactagttagagtagatagctcatccgggctgggggactaccttgaactacatatccaccaggggaagattggggtgaagtttaatgtggggacagatgacatcgccatcgaggaaagcaatgccatcatcaatgacggaaagtaccacgttgttcggttcacaagatccggagggaacgctactcttcaggtcgatagctggcctgttattgagcgctatcctgctggaaacaatgacaacgaaagacttgccattgcgagacagcggattccctaccggctggggagggtggtcgacgagtggcttcttgacaagggtcgccagctcactattttcaattcccaggccactatcattattggcggaaaggagcagggccaacccttccagggccagctcagcgggctctactataatggactcaaggtgcttaatatggctgcagagaatgatgcaaatatcgcgatagttggtaacgttaggctggtgggcgaggttccatccagtatgacaacagaatccacggccactgcgatgcagagcgaaatgagtacttcaatcatggagacaactaccaccctggcgacctccacagctagacgcggaaagccaccaaccaaagaacccatctcccagaccacagacgacattctggtggcctccgcggaatgtccctctgatgacgaggacatagatccatgcgaaccaagttcggggggattggctaatccaaccagagccggaggtcgagagccgtaccccggtagtgccgaggtaatacgagagtcgtcctctacaacgggcatggtcgttggaattgtggcggctgccgctctgtgtatcttgatcctcttgtacgccatgtacaagtacagaaatcgcgacgaggggagttaccatgttgatgagtctaggaactatataagcaattccgcccagtccaatggagccgtggtgaaagagaagcagccctcgtctgccaagagttcaaataaaaacaaaaaaaacaaagacaaggaatactacgtttag

SEQ ID NO: 327602 - DNA, 4524 bp, Artificial Sequence
  derived and/or modified sequence
atgggcaccgccctgctgcagagaggcggctgcttcctgctgtgcctgagcctgctgctgctgggctgctgggccgagctgggcagcggcctggagttccccggcgccgagggccagtggaccagattccccaagtggaacgcctgctgcgagagcgagatgagcttccagctgaagaccagaagcgccagaggcctggtgctgtacttcgacgacgagggcttctgcgacttcctggagctgatcctgaccagaggcggcagactgcagctgagcttcagcatcttctgcgccgagcccgccaccctgctggccgacacccccgtgaacgacggcgcctggcacagcgtgagaatcagaagacagttcagaaacaccaccctgttcatcgaccaggtggaggccaagtgggtggaggtgaagagcaagagaagagacatgaccgtgttcagcggcctgttcgtgggcggcctgccccccgagctgagagccgccgccctgaagctgaccctggccagcgtgagagagagagagcccttcaagggctggatcagagacgtgagagtgaacagcagccaggtgctgcccgtggacagcggcgaggtgaagctggacgacgagccccccaacagcggcggcggcagcccctgcgaggccggcgaggagggcgagggcggcgtgtgcctgaacggcggcgtgtgcagcgtggtggacgaccaggccgtgtgcgactgcagcagaaccggcttcagaggcaaggactgcagccaggaggacaacaacgtggagggcctggcccacctgatgatgggcgaccagggcaagagcaagggcaaggaggagtacatcgccaccttcaagggcagcgagtacttctgctacgacctgagccagaaccccatccagagcagcagcgacgagatcaccctgagcttcaagaccctgcagagaaacggcctgatgctgcacaccggcaagagcgccgactacgtgaacctggccctgaagaacggcgccgtgagcctggtgatcaacctgggcagcggcgccttcgaggccctggtggagcccgtgaacggcaagttcaacgacaacgcctggcacgacgtgaaggtgaccagaaacctgagacagcacagcggcatcggccacgccatggtgaccatcagcgtggacggcatcctgaccaccaccggctacacccaggaggactacaccatgctgggcagcgacgacttcttctacgtgggcggcagccccagcaccgccgacctgcccggcagccccgtgagcaacaacttcatgggctgcctgaaggaggtggtgtacaagaacaacgacgtgagactggagctgagcagactggccaagcagggcgaccccaagatgaagatccacggcgtggtggccttcaagtgcgagaacgtggccaccctggaccccatcaccttcgagacccccgagagcttcatcagcctgcccaagtggaacgccaagaagaccggcagcatcagcttcgacttcagaaccaccgagcccaacggcctgatcctgttcagccacggcaagcccagacaccagaaggacgccaagcacccccagatgatcaaggtggacttcttcgccatcgagatgctggacggccacctgtacctgctgctggacatgggcagcggcaccatcaagatcaaggccctgctgaagaaggtgaacgacggcgagtggtaccacgtggacttccagagagacggcagaagcggcaccatcagcgtgaacaccctgagaaccccctacaccgcccccggcgagagcgagatcctggacctggacgacgagctgtacctgggcggcctgcccgagaacaaggccggcctggtgttccccaccgaggtgtggaccgccctgctgaactacggctacgtgggctgcatcagagacctgttcatcgacggccagagcaaggacatcagacagatggccgaggtgcagagcaccgccggcgtgaagcccagctgcagcaaggagaccgccaagccctgcctgagcaacccctgcaagaacaacggcatgtgcagagacggctggaacagatacgtgtgcgactgcagcggcaccggctacctgggcagaagctgcgagagagaggccaccgtgctgagctacgacggcagcatgttcatgaagatccagctgcccgtggtgatgcacaccgaggccgaggacgtgagcctgagattcagaagccagagagcctacggcatcctgatggccaccaccagcagagacagcgccgacaccctgagactggagctggacgccggcagagtgaagctgaccgtgaacctggactgcatcagaatcaactgcaacagcagcaagggccccgagaccctgttcgccggctacaacctgaacgacaacgagtggcacaccgtgagagtggtgagaagaggcaagagcctgaagctgaccgtggacgaccagcaggccatgaccggccagatggccggcgaccacaccagactggagttccacaacatcgagaccggcatcatcaccgagagaagatacctgagcagcgtgcccagcaacttcatcggccacctgcagagcctgaccttcaacggcatggcctacatcgacctgtgcaagaacggcgacatcgactactgcgagctgaacgccagattcggcttcagaaacatcatcgccgaccccgtgaccttcaagaccaagagcagctacgtggccctggccaccctgcaggcctacaccagcatgcacctgttcttccagttcaagaccaccagcctggacggcctgatcctgtacaacagcggcgacggcaacgacttcatcgtggtggagctggtgaagggctacctgcactacgtgttcgacctgggcaacggcgccaacctgatcaagggcagcagcaacaagcccctgaacgacaaccagtggcacaacgtgatgatcagcagagacaccagcaacctgcacaccgtgaagatcgacaccaagatcaccacccagatcaccgccggcgccagaaacctggacctgaagagcgacctgtacatcggcggcgtggccaaggagacctacaagagcctgcccaagctggtgcacgccaaggagggcttccagggctgcctggccagcgtggacctgaacggcagactgcccgacctgatcagcgacgccctgttctgcaacggccagatcgagagaggctgcgagggccccagcaccacctgccaggaggacagctgcagcaaccagggcgtgtgcctgcagcagtgggacggcttcagctgcgactgcagcatgaccagcttcagcggccccctgtgcaacgaccccggcaccacctacatcttcagcaagggcggcggccagatcacctacaagtggccccccaacgacagacccagcaccagagccgacagactggccatcggcttcagcaccgtgcagaaggaggccgtgctggtgagagtggacagcagcagcggcctgggcgactacctggagctgcacatccaccagggcaagatcggcgtgaagttcaacgtgggcaccgacgacatcgccatcgaggagagcaacgccatcatcaacgacggcaagtaccacgtggtgagattcaccagaagcggcggcaacgccaccctgcaggtggacagctggcccgtgatcgagagataccccgccggcaacaacgacaacgagagactggccatcgccagacagagaatcccctacagactgggcagagtggtggacgagtggctgctggacaagggcagacagctgaccatcttcaacagccaggccaccatcatcatcggcggcaaggagcagggccagcccttccagggccagctgagcggcctgtactacaacggcctgaaggtgctgaacatggccgccgagaacgacgccaacatcgccatcgtgggcaacgtgagactggtgggcgaggtgcccagcagcatgaccaccgagagcaccgccaccgccatgcagagcgagatgagcaccagcatcatggagaccaccaccaccctggccaccagcaccgccagaagaggcaagccccccaccaaggagcccatcagccagaccaccgacgacatcctggtggccagcgccgagtgccccagcgacgacgaggacatcgacccctgcgagcccagcagcggcggcctggccaaccccaccagagccggcggcagagagccctaccccggcagcgccgaggtgatcagagagagcagcagcaccaccggcatggtggtgggcatcgtggccgccgccgccctgtgcatcctgatcctgctgtacgccatgtacaagtacagaaacagagacgagggcagctaccacgtggacgagagcagaaactacatcagcaacagcgcccagagcaacggcgccgtggtgaaggagaagcagcccagcagcgccaagagcagcaacaagaacaagaagaacaaggacaaggagtactacgtgtag

SEQ ID NO: 327603 - protein, 1499 aa, Artificial Sequence
  derived and/or modified sequence
MGTALLQRGGCFLLCLSLLLLGCWAELGSGLEFPGAEGQWTRFPKWNACCESEMSFQLKTRSARGLVLYFDDEGFCDFLELILTRGGRLQLSFSIFCAEPATLLADTPVNDGAWHSVRIRRQFRNTTLFIDQVEAKWVEVKSKRRDMTVFSGLFVGGLPPELRAAALKLTLASVREREPFKGWIRDVRVNSSQVLPVDSGEVKLDDEPPNSGGGSPCEAGEEGEGGVCLNGGVCSVVDDQAVCDCSRTGFRGKDCSQADTNLEGLAHLMMGDQAKSKRKEEYIATFKGSEYFCYDLSQNPIQSSSDEITLSFKTLQRNGLMLHTGKSADYVNLALKNGAVSLVINLGSGAFEALVEPVNGKFNDNAWHDVKVTRNLRQVTISVDGILTTTGYTQEDYTMLGSDDFFYVGGSPSTADLPGSPVSNNFMGCLKEVVYKNNDVRLELSRLAKQGDPKMKIHGVVAFKCENVATLDPITFETPESFISLPKWNAKKTGSISFDFRTTEPNGLILFSHGKPRHQKDAKHPQMIKVDFFAIEMLDGHLYLLLDMGSGTIKIKALLKKVNDGEWYHVDFQRDGRSGTISVNTLRTPYTAPGESEILDLDDELYLGGLPENKAGLVFPTEVWTALLNYGYVGCIRDLFIDGQSKDIRQMAEVQSTAGVKPSCSKETAKPCLSNPCKNNGMCRDGWNRYVCDCSGTGYLGRSCEREATVLSYDGSMFMKIQLPVVMHTEAEDVSLRFRSQRAYGILMATTSRDSADTLRLELDAGRVKLTVNLDCIRINCNSSKGPETLFAGYNLNDNEWHTVRVVRRGKSLKLTVDDQQAMTGQMAGDHTRLEFHNIETGIITERRYLSSVPSNFIGHLQSLTFNGMAYIDLCKNGDIDYCELNARFGFRNIIADPVTFKTKSSYVALATLQAYTSMHLFFQFKTTSLDGLILYNSGDGNDFIVVELVKGYLHYVFDLGNGANLIKGSSNKPLNDNQWHNVMISRDTSNLHTVKIDTKITTQITAGARNLDLKSDLYIGGVAKETYKSLPKLVHAKEGFQGCLASVDLNGRLPDLISDALFCNGQIERGCEGPSTTCQEDSCSNQGVCLQQWDGFSCDCSMTSFSGPLCNDPGTTYIFSKGGGQITYKWPPNDRPSTRADRLAIGFSTVQKEAVLVRVDSSSGLGDYLELHIHQGKIGVKFNVGTDDIAIEESNAIINDGKYHVVRFTRSGGNATLQVDSWPVIERYPAGNNDNERLAIARQRIPYRLGRVVDEWLLDKGRQLTIFNSQATIIIGGKEQGQPFQGQLSGLYYNGLKVLNMAAENDANIAIVGNVRLVGEVPSSMTTESTATAMQSEMSTSIMETTTTLATSTARRGKPPTKEPISQTTDDILVASAECPSDDEDIDPCEPSSGGLANPTRAGGREPYPGSAEVIRESSSTTGMVVGIVAAAALCILILLYAMYKYRNRDEGSYHVDESRNYISNSAQSNGAVVKEKQPSSAKSSNKNKKNKDKEYYV

SEQ ID NO: 327604 - DNA, 4500 bp, Artificial Sequence
  derived and/or modified sequence
atgggcacagccctccttcagaggggcgggtgtttcttgttatgtctgagcttgctgctgctcggctgctgggctgaactggggtctggacttgagtttcccggagcggaaggacaatggacccgcttcccgaaatggaacgcttgttgtgaatcagagatgtcgttccagcttaaaacgcggagcgcacgaggtctcgtcctatactttgacgatgaagggttttgtgatttcctggagctgatactgacccgcggaggccgccttcagttgtcattttcaatattttgcgctgaacctgctactctgctagccgatacccccgtgaacgatggtgcttggcactccgtccggatccgcaggcagttccgcaataccacactgtttatcgaccaagttgaggcaaagtgggtggaagtgaagtctaagcgcagggacatgaccgtttttagcgggctatttgttggggggctgccaccggaactgcgggctgcggccttaaaactcacacttgcttctgtgcgggagagagaaccgttcaaggggtggatacgggatgtgcgggtcaattcttcacaagtgctccccgtcgacagcggtgaggtcaaactcgacgacgaaccgcctaactccggcgggggctctccttgtgaggccggggaagagggcgaggggggtgtctgcctgaacggaggtgtgtgtagcgtggttgacgaccaggccgtttgtgattgctctcgcactggtttccgggggaaggattgttcgcaagctgacacgaacttggagggcctggctcacctgatgatgggagatcaggcgaagagcaaaagaaaggaagagtacattgccacgtttaagggttctgaatacttttgctacgacttgtctcagaatcctatccagagttcttctgacgagatcactctcagtttcaaaacactgcaaagaaacgggctaatgctccatacaggcaagagtgcagactacgttaatctcgcattgaaaaacggggcggtttctctcgtgatcaatctgggtagcggggcattcgaagctctcgtggagccagtcaatggtaagttcaatgacaacgcctggcatgacgtgaaggtgacacggaacctgcgacaggtcactataagtgtggatggcatactgaccactactgggtatacccaggaggattatacgatgctaggaagcgatgatttcttctacgttggtggtagcccatctactgctgacctccctggatcccccgtctctaataatttcatgggttgcctgaaggaagtggtctacaagaataatgacgtccggctcgagctatctcgattagccaagcagggagacccgaaaatgaaaatacatggggtggtggcgtttaagtgtgagaatgtggcaaccctggaccctattacatttgagaccccggagtcatttatcagcttgccaaagtggaatgccaaaaagacaggctctattagcttcgactttcggactacagaaccaaacggccttatcctgttctcacatggaaagcctcggcatcaaaaggatgccaaacacccccaaatgattaaagtggattttttcgccattgagatgctcgacggtcacctgtatctgcttctggacatggggtctgggaccattaagattaaagccctgctcaagaaggttaatgacggggaatggtaccacgtcgactttcaacgagacggacggagtggcaccatcagcgtgaacaccttgagaacaccatataccgcgccgggtgagtcagaaatcctcgacttggacgacgaactgtacctcggggggctcccagaaaataaggcgggcctggtgtttcccaccgaagtttggacggctttgctcaattatggttacgttggttgtattagggatttgttcattgacggacaaagtaaggacattagacaaatggcagaggtccagtcaacggccggggtgaagcctagctgctctaaagaaaccgccaagccatgcttatccaacccttgtaagaacaacggcatgtgtcgagacggctggaatcgctacgtctgcgactgctccggaacaggataccttggcagaagctgcgagagagaagctactgtgctctcctacgatggcagtatgttcatgaagattcagttgcccgtggtgatgcacacagaagcagaggacgtgagcctcaggttcaggagtcaaagggcctatggtatactcatggctacaacctctcgagactccgccgacactctccggcttgagcttgatgctgggcgggtaaagcttaccgtgaatctggactgtatcaggattaattgcaacagctcaaagggcccagaaacactttttgcgggctacaaccttaacgacaacgagtggcatacagtcagagtggtgagacggggaaagtccctcaagctgacggtcgacgatcaacaggctatgacaggacagatggctggggatcatacacggctcgagttccacaatatagagaccggcattattactgagcgccggtacctgtccagcgtgccttccaactttatagggcatctgcaaagcctcacatttaacggaatggcttacatcgatctctgtaagaacggcgatatcgattactgtgagctgaacgccaggtttggtttccggaatataatagccgaccctgttacattcaaaacgaagtctagctatgttgccctggccacgctccaggcctacacctctatgcatcttttcttccaattcaagacgacaagtctggatggcctcatcctgtacaattctggggacggcaacgacttcattgtagtcgaactggtgaagggctatctccactacgtttttgacctgggaaatggcgcgaacttgatcaagggaagcagtaacaaacccctcaacgataaccagtggcataacgttatgatctcaagggatacttcaaacctgcacacagtgaaaatcgacacgaaaattacaactcagataactgccggcgcccgcaatctggatctgaagtctgacctttatatcggtggggtcgctaaagagacctacaagagtcttcccaagctcgtgcacgcaaaagagggattccaggggtgtctggcatccgtggacctgaatgggcggctgcccgatctcatttctgatgctctattctgtaacgggcaaatagaacgaggatgtgaaggcccttcaacaacctgccaggaggacagttgcagcaatcaaggcgtctgtttacaacaatgggacggattttcgtgcgattgtagtatgacttcattctctgggcccctgtgtaacgatccgggcacgacttacattttttcaaaagggggggggcaaatcacatacaagtggccgcccaacgatcggccttccacacgagccgaccgcctcgcaattgggttttcgacggttcagaaagaggccgttctggtgcgtgtggattcttcgagtggtctcggcgactacctggaattgcacatccatcagggcaaaattggggtgaagttcaatgtgggtacggatgacattgccatcgaggagagtaatgcgataatcaacgacggaaaataccacgtggtccgattcacaagatcaggcggtaacgcaaccttgcaggtggattcatggcctgtgatcgagcgataccccgccggtaacaatgataacgaaagactcgctatcgcgcgccaacggattccctataggttgggacgggtcgtggacgagtggctgctagacaagggccgacagctgacaattttcaatagtcaggctaccatcatcataggggggaaggaacagggccagccatttcagggtcagctctccggtctgtactataacggtctgaaagtcttgaacatggcggctgaaaacgacgccaacatagccatagtgggcaacgttcgacttgtgggcgaagtccccagctcaatgaccactgaaagcactgccacagccatgcaaagcgaaatgtccacgagcataatggagaccacaaccacgcttgctactagcacggctcgcaggggaaagcccccaactaaggagcctatcagtcagactacagatgatattttagtcgcttcagcagagtgcccatccgacgacgaggatattgatccttgtgaaccttcgagtggcggacttgccaatcctactagggccggaggccgggagccctacccagggtcagccgaagtcatacgtgaatcatccagtactaccggtatggtcgtcggcattgtcgccgcagctgctctatgcattcttattctgctgtacgctatgtacaaatatcggaatagggatgagggatcttaccacgtcgatgaaagccgaaactatatatccaatagtgcccagagtaacggggccgttgtcaaagaaaagcagccctcctcagctaagagctcaaacaagaataagaagaataaagacaaagagtattatgtgtag

SEQ ID NO: 327605 - DNA, 4500 bp, Artificial Sequence
  derived and/or modified sequence
atgggcacagccctgctgcagagaggaggctgcttcctgctgtgcctgagcctgctgctgctgggctgctgggccgagctgggcagcggcctggagttccctggagctgagggccagtggacccgcttccccaagtggaatgcctgctgtgagagcgagatgtccttccagctgaagaccaggtctgcccggggcctggtgctgtactttgatgatgagggcttctgtgacttcctggagctgatcctgacccggggcggccgcctgcagctgtccttcagcatcttctgtgccgagcccgccaccctgctggccgacacccctgtgaatgatggagcctggcacagcgtgcgcatccggcggcagttcaggaacaccaccctcttcatcgaccaggtggaggccaagtgggtggaggtgaagagcaagaggcgggacatgaccgtcttcagcggcctgtttgtgggcggcctgcccccagagctgcgggctgctgccctgaagctgaccctggcctctgtgcgggagcgggagcccttcaagggctggatcagagatgtgcgggtgaacagcagccaggtgctgcctgtggacagcggggaggtgaagctggatgatgagccccccaacagcggcggcggcagcccctgtgaggccggggaggagggggagggcggcgtgtgcctgaatggaggagtgtgcagcgtggtggatgaccaggccgtgtgtgactgcagcaggacaggcttccggggcaaggactgcagccaggccgacaccaacctggagggcctggcccacctgatgatgggagaccaggccaagagcaagaggaaggaggagtacatcgccaccttcaagggcagcgagtacttctgctatgacctgagccagaaccccatccagagcagcagtgatgagatcaccctgtccttcaagaccctgcagagaaatggcctgatgctgcacacaggcaagtctgctgactatgtgaacctggccctgaagaatggagctgtgtccctggtgatcaacctgggcagcggggcctttgaggccctggtggagcctgtgaatggcaagttcaatgacaatgcctggcatgatgtgaaggtgaccaggaacctgcggcaggtgaccatctctgtggatggcatcctgaccaccaccggctacacccaggaggactacaccatgctgggcagtgatgacttcttctacgtgggcggcagccccagcacagctgacctgcccggcagccctgtgagcaacaacttcatgggctgcctgaaggaggtggtgtacaagaacaatgatgtgcggctggagctgagccggctggccaagcagggcgaccccaagatgaagatccacggcgtggtggccttcaagtgtgaaaatgtggccaccctggaccccatcacctttgagaccccagagagcttcatcagcctgcccaagtggaatgccaagaagacaggcagcatcagctttgacttccgcaccacagagcccaacggcctcatcctcttcagccacggcaagcccaggcaccagaaggatgccaagcacccccagatgatcaaggtggacttctttgccatcgagatgctggatggccacctgtacctgctgctggacatgggcagcggcaccatcaagatcaaggccctgctgaagaaggtgaatgatggagagtggtaccacgtggacttccagagagatggccgcagcggcaccatctctgtgaacaccctgcggaccccctacacagcccctggagagagcgagatcctggacctggatgatgagctgtacctgggcggcctgcctgagaacaaggccggcctggtgttccccacagaggtgtggacagccctgctgaactacggctacgtgggctgcatccgggacctcttcattgatggccagagcaaggacatccggcagatggccgaggtgcagagcacagctggggtgaagcccagctgcagcaaggagacagccaagccctgcctgagcaacccctgcaagaacaacggcatgtgcagagatggctggaaccgctacgtgtgtgactgcagcggcaccggctacctgggccgcagctgtgagcgggaggccaccgtgctgtcctatgatggctccatgttcatgaagatccagctgcctgtggtgatgcacacagaagcagaagatgtgtccctgcgcttccgcagccagagggcctacggcatcctgatggccaccaccagccgggacagcgctgacaccctgcggctggagctggatgctggccgggtgaagctgactgtgaacctggactgcatccgcatcaactgcaacagcagcaaaggacctgagaccctgtttgctggctacaacctgaatgacaatgagtggcacacagtgcgggtggtgcggcggggcaagagcctgaagctgactgtggatgaccagcaggccatgacaggccagatggccggggaccacacccggctggagttccacaacattgaaacaggcatcatcacagaaagacgctacctgagctctgtgcccagcaacttcatcggccacctgcagagcctgaccttcaacggcatggcctacatcgacctgtgcaagaatggagacatcgactactgtgagctgaatgccaggtttggcttcaggaacatcatcgctgaccctgtgaccttcaagaccaagagcagctatgtggccctggccaccctgcaggcctacacctccatgcacctgttcttccagttcaagaccaccagcctggatggcctcatcctgtacaacagcggagatggaaatgacttcatcgtggtggagctggtgaagggctacctgcactacgtgtttgacctgggcaatggagccaacctgatcaagggcagcagcaacaagcccctgaatgacaaccagtggcacaacgtgatgatcagccgggacaccagcaacctgcacacagtgaagattgacaccaagatcaccacccagatcacagctggggccaggaacctggacctgaagagtgacctgtacatcggcggcgtggccaaggagacctacaagagcctgcccaagctggtgcacgccaaggagggcttccagggctgcctggcctctgtggacctgaatggccgcctgcctgacctgatcagtgatgccctcttctgcaatggccagatcgagcggggctgtgagggccccagcaccacctgccaggaggacagctgcagcaaccagggcgtgtgcctgcagcagtgggatggcttcagctgtgactgcagcatgaccagcttcagcggccccctgtgcaatgaccccggcaccacctacatcttcagcaagggcggcggccagatcacctacaagtggcccccaaatgaccggcccagcaccagggctgaccggctggccatcggcttcagcacagtgcagaaggaggccgtgctggtgcgggtggacagcagcagcggcctgggggactacctggagctgcacatccaccagggcaagattggagtgaagttcaacgtgggcacagatgacatcgccatcgaggagagcaatgccatcatcaatgatggcaagtaccacgtggtgcgcttcaccaggtctggaggaaatgccaccctgcaggtggacagctggcctgtgattgaaagatacccagctggcaacaatgacaatgaaaggctggccatcgcccggcagaggatcccctaccgcctgggccgggtggtggatgagtggctgctggacaagggccggcagctgaccatcttcaacagccaggccaccatcatcatcggcggcaaggagcagggccagcccttccagggccagctgagcggcctgtactacaacggcctgaaggtgctgaacatggccgcagaaaatgatgccaacatcgccatcgtgggcaatgtgcggctggtgggggaggtgcccagctccatgaccacagagagcacagccacagccatgcagagcgagatgagcaccagcatcatggagaccaccaccaccctggccaccagcacagcccggcggggcaagccacccaccaaggagcccatcagccagaccacagatgacatcctggtggccagcgcagaatgtcccagtgatgatgaagatattgacccctgtgagcccagcagcggcggcctggccaaccccaccagggctgggggccgggagccctacccaggcagcgctgaggtgatccgggagagcagcagcaccaccggcatggtggtgggcatcgtggccgctgctgccctgtgcatcctgatcctgctgtatgccatgtacaagtacagaaacagagatgagggcagctaccacgtggatgagagcaggaactacatcagcaacagcgcccagagcaatggagctgtggtgaaggagaagcagcccagcagcgccaagagcagcaacaagaacaagaagaacaaggacaaggagtactacgtgtag

SEQ ID NO: 327606 - DNA, 4500 bp, Artificial Sequence
  derived and/or modified sequence
atgggcaccgccctgctgcagcggggcggctgcttcctgctgtgcctgtctttgttattacttggatgttgggcggaactgggcagcgggttagagtttcctggagcagaagggcaatggaccagatttccaaaatggaatgcttgctgtgagtcagaaatgtcctttcaactgaaaactcggtctgccaggggtttggtcctttacttcgacgacgaggggttttgcgatttcctcgagctgatcttgacaaggggtgggaggcttcaactgtcttttagcattttctgtgctgagcctgcgacactgttggctgacacccctgtcaacgacggggcgtggcacagcgttcggatccgccgacagtttcggaacaccactctgtttattgaccaagtagaggcaaaatgggtcgaagttaagtccaaaagaagagacatgactgtattttccggcttgtttgtaggtggactaccgccggagttgcgagcggccgcactgaaactcacacttgctagcgtgagagagcgggagcccttcaaagggtggatccgagatgttcgtgtgaactccagccaagtgcttcctgtggattccggcgaggtgaaattagacgacgagccacccaattccgggggagggagcccctgcgaggccggagaggaaggggaagggggcgtgtgcctgaatggcggggtgtgcagtgtagttgatgaccaggccgtgtgcgattgttcacggacaggttttaggggaaaggattgtagccaggccgacactaacctggagggcctggcccatttgatgatgggggatcaggccaaaagcaagcggaaggaggagtatatcgcaacttttaagggcagcgagtacttttgctacgatctgtcccagaacccgatccagtcctcaagcgacgaaatcaccttgagcttcaagacgttgcagcgcaacggcctgatgctgcacaccggcaagtctgcggactatgtaaacttggccctgaagaacggcgccgtgtcacttgtgataaacctaggaagcggggcgttcgaagctctggtcgagcccgtcaacggtaagttcaacgacaatgcctggcacgatgtcaaggtcacacgcaacctgaggcaggtgactatctcagtggatggaatcttgacaactacgggatacacacaggaggactatacaatgttgggtagcgacgattttttctacgttggtgggtcaccatcgaccgctgacctgcctggctctcctgtgtcgaataactttatggggtgtctgaaggaggtagtttacaagaacaacgacgtcagactggaactgagcagactcgcgaaacaaggcgatcctaagatgaaaatccatggggtggttgcctttaagtgcgaaaacgttgccacactcgaccctatcaccttcgaaaccccagagagttttatcagcctcccgaaatggaacgctaagaagacagggtccataagctttgacttcaggacaacggagccaaacggcctaatcctattttcacatggcaagccccggcatcaaaaagatgcaaaacaccctcaaatgattaaagtcgatttttttgctatagagatgctggatggacatctgtatctgctccttgatatgggaagcgggaccataaaaatcaaggctctactgaaaaaagtcaacgacggagagtggtatcatgttgatttccagcgagacggtagaagcggaacgattagtgtgaacaccctgcggacaccatataccgctccgggggagagtgagatcctcgatctggacgatgaactgtacctgggtggactgcctgaaaataaagccggtttggttttccctacagaagtgtggactgcactgttgaactatggctatgtgggttgcattagagacttatttatagatgggcagtccaaagacatccgccagatggccgaagtccagagcaccgctggcgtcaaaccttcttgctctaaggagaccgctaagccgtgccttagcaatccttgcaaaaacaacggcatgtgtcgggatggctggaatcgatatgtgtgcgactgtagcggtacaggttatctcggacgatcatgcgaaagagaagctaccgttttatcatacgatggttctatgttcatgaagatacagctgcctgtcgtcatgcacaccgaggctgaagatgtgtctctgcgatttcgctcccaacgtgcttacggtatcctaatggccaccaccagcagggactccgccgacacattacggctggagctggacgccggcagggtcaagctgaccgtaaacctggactgtattaggatcaactgtaattccagtaaggggcctgagacattattcgctgggtacaacctcaacgacaatgaatggcacactgtgcgggtcgtgagaagaggaaagtccctgaaactcactgtggacgaccaacaggccatgactgggcagatggcaggggatcacactcgcctagaatttcataacatagaaacaggtataattaccgagagacggtacttatcctccgtgccgtctaactttattggccacctgcagtcactgacgttcaatggcatggcatatatcgacctctgcaaaaacggcgatatcgactactgcgagctcaacgcgcgctttgggtttcggaacataattgcggatccggtaacgtttaaaaccaagtcgtcctatgttgcactggctaccctgcaagcgtatacatctatgcatctgttttttcagtttaagaccacatcactggatgggctgatcctttataattcaggcgatgggaacgacttcattgtagttgaattggtgaagggatacctccactacgtcttcgatctcggcaatggcgcaaatctcatcaaggggtcaagcaataaaccattgaacgataaccagtggcacaatgtgatgatctcaagagacactagcaacctccacacagttaagatcgataccaagattacaactcaaattaccgccggcgctaggaatctggacttgaagagcgacctctacatcggtggcgtcgctaaagaaacctacaaatcacttcctaaactggtgcatgcaaaagaaggattccagggctgcctggcatcagttgacctcaatggccggctgcccgaccttatttctgatgcccttttttgcaacggccagattgagcgcggctgcgagggtccctcgactacctgccaagaagattcttgctccaatcagggagtgtgcctgcaacaatgggacggatttagttgtgactgttcaatgacatccttctctggtcccctgtgcaacgatcccggcacaacctatatcttcagcaaagggggcggacagatcacgtacaaatggcctcctaacgatcggcccagcacgagagccgatagactggcaataggcttcagcactgtacagaaagaagccgtgctggtccgcgtggattccagctccggtctcggggactacctcgagctgcatatccaccagggtaagatcggagttaagttcaacgtgggtacagatgatatcgcgatcgaagaatcaaacgctattattaatgatgggaagtaccacgtagttcgcttcactcgaagcggaggtaatgcaacacttcaggtcgatagctggcccgttatcgagcggtatccagctgggaacaacgacaacgaaaggttggcaattgctaggcagcggatcccttatagattgggtcgcgtggtcgacgagtggctgctggataaaggcaggcagttgacaattttcaactcacaggcaactatcatcattggaggcaaagagcagggtcagccattccagggccaattgagtgggctgtactacaatggactaaaggtactgaatatggctgccgagaacgacgctaacatcgccattgtgggcaatgtccgcctcgtcggtgaggtgccgtcctctatgacaactgagtcaactgccacggcgatgcagagcgagatgtcaacttctatcatggagaccactaccacgcttgctactagcaccgcccgaagaggcaagccccccacaaaggagccaataagccagacaactgacgatatcctcgtcgccagtgccgagtgtccttctgacgatgaagacatagacccctgcgagccgagcagtggggggctggcaaatcctacaagggcaggaggcagggagccctatccgggctccgccgaggtgatccgggagagcagttcaaccaccggaatggtggttggcatcgtcgctgctgcggctttgtgcattttgattctgctgtatgcaatgtataagtaccggaatcgggatgaggggagctatcatgttgatgagtccagaaactacattagtaattccgctcagagcaacggtgcagtcgtgaaggagaagcaaccatcctcagctaagtcttctaacaagaacaaaaagaataaagacaaggaatactacgtgtag

SEQ ID NO: 327607 - DNA, 4500 bp, Artificial Sequence
  derived and/or modified sequence
atggggacggcgctgctccagcgcgggggctgttttcttctgtgcctctcgctgctgctcctgggctgctgggcggagctgggcagcgggctggagtttccgggcgccgagggccaatggacgcgcttccccaagtggaacgcctgctgcgagagcgagatgagcttccagctcaagactcgcagcgcccgcggcctcgtgctctacttcgacgacgagggcttctgcgacttcctggagctgattctgacgcgcggcggccgcctgcagctcagcttctccatcttctgcgctgagcctgcgacgctcctggccgacacgccggttaacgacggcgcctggcacagcgtgcgcatccgccgccagttccgcaacaccacgctcttcatcgaccaggtggaggccaagtgggtggaggtcaagtccaagcgcagggacatgacggtgttcagcggccttttcgtcggggggctgcccccggaactgcgcgccgcggcgctcaagctcaccctggcctcggtgagggagcgggagcccttcaaggggtggattcgtgacgtgagggtcaactcctcgcaggtcctgcccgtggacagcggcgaggtgaagctggacgatgagccgcccaacagcggcgggggaagcccgtgcgaggcgggcgaggagggcgagggcggggtgtgcctcaacggaggtgtgtgctccgtggtggacgaccaggccgtgtgcgactgctcgcgaaccggcttccgcggcaaggactgcagccaagctgatactaacttagagggtctggcgcacctgatgatgggcgaccaagcaaagtcaaaaagaaaagaagaatatattgccacgttcaaaggatctgaatacttctgctacgacttgtctcaaaaccccattcaaagcagcagtgatgaaataactctgtcatttaaaacccttcagaggaatggactgatgcttcacactgggaaatcggctgattatgtcaatcttgccctgaaaaatggagctgtctctctggtcattaatttgggatcaggggcctttgaagcactagtggagcctgtgaatggaaagtttaatgataatgcctggcatgatgtgaaagtcaccaggaatctgcgtcaggtgacaatatcagtggatgggattcttaccacaacgggctacacgcaagaagattataccatgctggggtctgatgactttttctatgttggaggcagtcccagcacagccgaccttccagggtcaccagtcagtaacaactttatgggctgtctcaaagaggttgtatataaaaataatgatgtgaggctggaattatctcgacttgccaagcaaggagatcctaagatgaagatccatggagtggtggcatttaaatgtgagaatgttgcaactttagacccaatcacctttgaaaccccagagtctttcatctctttgcctaaatggaatgcaaagaaaactggctccatatcatttgatttccgtacaacagagccaaatggcctcatcttatttagccatggcaagccaagacatcagaaagatgccaagcacccacagatgataaaggtggacttctttgctattgagatgctagatggccacctctacctcctcctggacatggggtcaggtactataaaaataaaagccctgttgaagaaagtgaatgatggagaatggtatcatgtggacttccagagagacggacggtcaggtaccatttctgtcaacacgttgcgtactccctacactgctcctggtgagagtgagattctggacctggatgatgagttgtacctgggggggctgccagaaaataaagctggccttgtcttccccaccgaggtgtggactgctctgctcaactatggctacgtgggctgcatcagggatttgttcatcgatggccaaagcaaagatatccggcaaatggctgaagttcaaagtactgctggagtgaagccttcctgctcaaaggaaacagcaaaaccgtgccttagcaacccttgcaaaaacaatggcatgtgcagggatgggtggaacagatatgtctgtgattgttccggaacaggctatcttggcaggtcctgtgagagagaggcaacggttttgagctatgatgggagcatgtttatgaaaattcagctccccgtagtcatgcatacggaggctgaggatgtttccttacggttccgatcccagcgtgcatatggcattctgatggcaaccacttctagagactctgctgacaccctccgcctggagctagacgcaggacgtgtgaaactgacggtcaatctagattgtatcaggattaactgtaattccagcaaaggtcccgagactctttttgctggctataacctcaatgataacgagtggcacacagtgcgtgtagttcggcgtggaaaaagtttaaagttaacagtggatgaccaacaggccatgacaggtcaaatggcaggtgatcatactaggctggagttccataacatagagactggcatcatcacagaacgacggtatctttcttctgtcccctccaacttcattggacacctgcagagcttgacatttaatggaatggcatacattgacctgtgtaaaaatggcgacatagattactgtgagcttaatgccagatttggcttcaggaacatcatagcagatcctgtcaccttcaagaccaaatcgagctatgttgccttagctaccttgcaagcctacacttctatgcatctttttttccagttcaagacaacatccctagatggattaattctatataacagtggggatggaaatgactttattgtggttgaattagttaaagggtacttacattacgtgtttgatttgggaaatggtgctaacctcatcaaaggaagctcaaataaacctctcaatgacaatcagtggcacaacgtgatgatatcaagggacaccagcaacctccacactgtaaagattgacacaaaaatcacaacgcaaatcaccgccggagccaggaacttagacctcaagagtgacttatatataggaggagtagctaaagaaacatacaaatccttaccaaaacttgtacatgccaaagaaggctttcaaggctgcctggcatcagttgatttaaatggacggcttccggacctcatctccgatgctcttttctgcaacggacagatcgagagaggatgtgaagggcccagcacaacctgccaagaggactcatgttccaatcaaggtgtgtgcttgcaacaatgggatggcttcagctgtgactgtagtatgacttccttcagtggaccactctgcaatgaccctgggacgacatatatctttagcaaaggtggtggacaaatcacgtataagtggcctcctaatgaccgacccagtacacgagcagacagactggccataggttttagcactgttcagaaagaagccgtattggtgcgagtggacagttcttcaggcttgggtgactacctagaactgcatatacaccagggaaaaattggagttaagtttaatgttgggacagatgacatcgccattgaagaatccaatgcaatcattaatgatgggaaataccatgtagttcgtttcacgaggagtggtggcaatgccacgttgcaggtggacagctggccagtgatcgagcgctaccctgcaggaaacaatgataacgagcgcctggcgattgctagacagcgaattccatatcgacttggtcgagtagttgatgaatggctactcgacaaagggcgtcagctcacaatcttcaatagccaagcaaccataataattggcgggaaagagcagggccagcccttccagggccagctctctgggctgtactacaatggcttgaaagttctgaatatggcagccgaaaacgatgccaacatcgccatagtgggaaatgtgagactggttggtgaagtgccttcctctatgacaactgagtcaacagccactgccatgcaatcagagatgtccacatcaattatggagactaccacgaccctggctactagcacagccagaagaggaaagcccccgacaaaagaacccattagccagaccacagatgacatccttgtggcctcagcagagtgtcccagcgatgatgaggacattgacccctgtgagccgagctcaggtgggttagccaacccaacccgagcaggcggcagagagccgtatccaggctcagcagaagtgatccgggagtccagcagcaccacgggtatggtcgttgggatagtagccgctgccgccctgtgcatccttatcctcctctatgccatgtacaagtacagaaaccgggatgaaggctcataccatgtggacgagagtcgaaactacatcagtaactcagcacagtccaatggggctgttgtaaaggagaaacaacccagcagtgcgaaaagctccaacaaaaataagaaaaacaaggataaagagtattatgtctga

SEQ ID NO: 327608 - DNA, 4500 bp, Artificial Sequence
  derived and/or modified sequence
atgggtactgcattactgcagcgtggcggatgctttctgctgtgtctctcgctcctactgctgggttgttgggccgagctgggatccgggttggaattccctggggcagaaggtcagtggacgcgatttcctaagtggaacgcctgttgcgaatccgagatgagtttccagcttaagacaaggtcggctcgcggactcgtcttgtactttgatgatgaagggttctgcgattttctggaactgattttgacgaggggagggcgactccagctcagcttttctatcttctgtgcagaaccagctacactgcttgccgatactcccgtcaatgacggtgcctggcatagcgtgaggatcaggaggcagtttaggaacaccacactgtttatagatcaagtcgaagccaagtgggtcgaagtcaaaagcaagaggcgtgacatgaccgtgttttccggtcttttcgtggggggactgcctcccgaattgcgagccgcagcactgaagctgacattagcctctgtgcgcgaacgcgagccgtttaaaggttggattcgggatgtcagagtgaatagctctcaggtgcttccggtcgacagcggggaggtgaagctggatgacgagccaccgaactcggggggtggttcgccgtgcgaagccggtgaagagggcgaagggggagtatgtctcaacgggggagtttgcagtgttgttgatgatcaagctgtatgcgactgctctagaacaggatttaggggaaaggattgctcgcaggctgacaccaatctggaaggtctggcgcaccttatgatgggagatcaggccaagtctaagcggaaggaggagtacattgcaacttttaaggggtctgagtatttttgctacgatctctcgcagaacccaatacaaagctcaagtgatgaaattacgctgagctttaaaaccctacagcggaacgggctcatgctgcacaccgggaagagcgctgactatgtgaatttagcattgaagaacggcgctgtgtctctcgtgattaacctaggctcaggagctttcgaggcactggtagagcccgttaatgggaagttcaatgataatgcgtggcacgatgtcaaggtgactagaaacctgagacaggtcacaatcagcgttgacggcatcttgaccaccaccggctacacacaggaagattataccatgctggggtccgacgactttttctacgtagggggaagtccttccacagcggacctgcccggttccccagtgtcaaacaactttatgggttgcttgaaggaagtggtatacaagaacaatgacgttaggctggagttgagtcgtcttgccaaacagggggatcccaagatgaaaatccacggagtcgtagcctttaaatgtgagaatgtggccacactggaccccataaccttcgagactcccgaaagcttcatctctctgccaaagtggaacgccaagaagacagggtcgatatcatttgacttcaggactaccgaacctaatggcttgatactgttctctcatggtaagccccgacatcagaaggacgctaagcaccctcagatgatcaaggtcgatttctttgccatcgaaatgcttgacgggcacctgtaccttttacttgatatggggagcgggaccattaagatcaaagccctgctgaagaaggtcaatgatggcgagtggtaccacgtggacttccaacgagacggacgatctggcacaatcagcgtgaatacattgaggacgccatatactgccccaggtgagagcgagattctcgatctcgacgacgaactttatctcggtggattgcccgagaacaaggccggtcttgtcttccccactgaagtatggacagccttattaaattacggttatgttggatgtatccgcgacctttttatcgatggacagtcgaaggacatacgccagatggccgaagttcagtctacggccggagtcaagccctcttgctctaaagagaccgccaaaccctgcctgagcaacccctgtaagaataacggtatgtgtcgtgacggatggaaccgatatgtatgcgactgtagcggcactggctacctcggcagaagttgcgagagagaggctactgtgctctcatatgatgggagcatgttcatgaagattcagctgccggtggtcatgcacactgaagccgaggacgtgagcctgcgttttcggagtcagcgggcttacggcatcctgatggccacaacatcacgcgattcagccgacaccctgaggctcgagcttgacgccggacgcgtcaagctgacagtgaatctggactgcatacgcataaattgtaacagcagtaaaggcccagaaaccctgttcgcgggttacaatttaaatgataacgagtggcacacagtgcgagtcgtacggcgaggcaagagcctaaagcttacagttgacgatcagcaagcgatgaccggacagatggccggagatcacacgaggcttgagttccataacatcgagactggcataatcacagagcgccgatatcttagctctgtgccatccaacttcatcgggcatctccaatctcttacgttcaacgggatggcttacatcgatctctgtaagaacggggacatcgactactgtgagctaaacgctaggttcggattcaggaatatcatcgctgaccctgtcacattcaaaaccaagtcctcctacgtggcactcgccacactgcaggcgtacacatctatgcacctgtttttccaatttaaaaccacaagcttagacggacttattctgtacaactccggggatgggaacgacttcatcgtcgtggagctggtcaaggggtatctccactacgtattcgacttgggaaacggcgctaacctgatcaaaggcagcagcaataagccgctgaatgacaaccagtggcacaacgtaatgatctcccgggatacatcaaatctccacactgtgaagattgacactaagatcacgacccagatcacagctggcgctagaaacttagacttgaagagcgatctctacattggtggggtagctaaggaaacctataaatccctacccaaactagtgcacgctaaagagggatttcagggctgtttagccagcgtcgacctaaatggcaggctgccagacctgataagcgatgcgctgttttgcaatggccaaattgagcgcggatgcgagggcccaagcaccacatgccaagaagactcttgttccaatcagggtgtctgcctgcaacaatgggatggtttctcatgtgactgttcaatgaccagcttctctggacctctgtgcaacgaccccggtactacatacatcttttccaagggtggaggtcagataacatacaagtggccgccaaatgaccggccatcaacgcgtgccgaccggctagcaattgggtttagtacagtccagaaagaagctgtgctggtgagagtggattcttcttcggggctaggggattacctggagttgcatatccaccagggcaaaatcggggtgaagtttaacgtggggacagacgatattgccatcgaggaaagtaatgcaattataaatgatggcaagtaccatgttgtgcgcttcacacgcagcggaggtaatgccaccctgcaggttgactcctggccagttatcgagagatatccagccggaaacaatgataacgagcgtctggcgatcgccaggcaacggattccatatagactaggacgcgttgtcgacgagtggctccttgacaaaggtcggcaactgaccatttttaactcacaggccaccatcatcattggcggaaaagagcagggccaaccctttcagggacaactgagcggattgtactataatggtctgaaagtgctgaatatggccgcagaaaacgacgcaaatatcgccattgtgggtaatgtgagattggtcggcgaggttcctagcagcatgactactgaatcgacagcaactgccatgcaatcagagatgtctacatcaatcatggaaacaactacaacacttgccactagtactgcaaggcgaggcaaaccacccacgaaggagcccatctcacagacaactgatgatatcttagtggcatcggctgagtgcccgtcggacgacgaagatattgacccatgcgaaccgtccagtggaggcctagccaaccctacaagagctggaggcagggagccatatccaggcagcgcagaagtgatcagagaatcatccagcaccaccgggatggtggtcgggatcgtcgccgctgcagcgttgtgtatccttatccttctctacgcgatgtacaaatataggaacagggatgagggctcctatcacgtcgacgaatcgcggaattacataagcaattccgctcagagcaacggtgccgtcgtcaaagaaaaacagccttcatccgcgaagtcctctaacaagaacaagaagaacaaggataaggagtactacgtgtag

SEQ ID NO: 327609 - DNA, 4500 bp, Artificial Sequence
  derived and/or modified sequence
atgggcaccgccctgctgcagagaggcggctgcttcctgctgtgcctgagcctgctgctgctgggctgctgggccgagctgggcagcggcctggagttccccggcgccgagggccagtggaccagattccccaagtggaacgcctgctgcgagagcgagatgagcttccagctgaagaccagaagcgccagaggcctggtgctgtacttcgacgacgagggcttctgcgacttcctggagctgatcctgaccagaggcggcagactgcagctgagcttcagcatcttctgcgccgagcccgccaccctgctggccgacacccccgtgaacgacggcgcctggcacagcgtgagaatcagaagacagttcagaaacaccaccctgttcatcgaccaggtggaggccaagtgggtggaggtgaagagcaagagaagagacatgaccgtgttcagcggcctgttcgtgggcggcctgccccccgagctgagagccgccgccctgaagctgaccctggccagcgtgagagagagagagcccttcaagggctggatcagagacgtgagagtgaacagcagccaggtgctgcccgtggacagcggcgaggtgaagctggacgacgagccccccaacagcggcggcggcagcccctgcgaggccggcgaggagggcgagggcggcgtgtgcctgaacggcggcgtgtgcagcgtggtggacgaccaggccgtgtgcgactgcagcagaaccggcttcagaggcaaggactgcagccaggccgacaccaacctggagggcctggcccacctgatgatgggcgaccaggccaagagcaagagaaaggaggagtacatcgccaccttcaagggcagcgagtacttctgctacgacctgagccagaaccccatccagagcagcagcgacgagatcaccctgagcttcaagaccctgcagagaaacggcctgatgctgcacaccggcaagagcgccgactacgtgaacctggccctgaagaacggcgccgtgagcctggtgatcaacctgggcagcggcgccttcgaggccctggtggagcccgtgaacggcaagttcaacgacaacgcctggcacgacgtgaaggtgaccagaaacctgagacaggtgaccatcagcgtggacggcatcctgaccaccaccggctacacccaggaggactacaccatgctgggcagcgacgacttcttctacgtgggcggcagccccagcaccgccgacctgcccggcagccccgtgagcaacaacttcatgggctgcctgaaggaggtggtgtacaagaacaacgacgtgagactggagctgagcagactggccaagcagggcgaccccaagatgaagatccacggcgtggtggccttcaagtgcgagaacgtggccaccctggaccccatcaccttcgagacccccgagagcttcatcagcctgcccaagtggaacgccaagaagaccggcagcatcagcttcgacttcagaaccaccgagcccaacggcctgatcctgttcagccacggcaagcccagacaccagaaggacgccaagcacccccagatgatcaaggtggacttcttcgccatcgagatgctggacggccacctgtacctgctgctggacatgggcagcggcaccatcaagatcaaggccctgctgaagaaggtgaacgacggcgagtggtaccacgtggacttccagagagacggcagaagcggcaccatcagcgtgaacaccctgagaaccccctacaccgcccccggcgagagcgagatcctggacctggacgacgagctgtacctgggcggcctgcccgagaacaaggccggcctggtgttccccaccgaggtgtggaccgccctgctgaactacggctacgtgggctgcatcagagacctgttcatcgacggccagagcaaggacatcagacagatggccgaggtgcagagcaccgccggcgtgaagcccagctgcagcaaggagaccgccaagccctgcctgagcaacccctgcaagaacaacggcatgtgcagagacggctggaacagatacgtgtgcgactgcagcggcaccggctacctgggcagaagctgcgagagagaggccaccgtgctgagctacgacggcagcatgttcatgaagatccagctgcccgtggtgatgcacaccgaggccgaggacgtgagcctgagattcagaagccagagagcctacggcatcctgatggccaccaccagcagagacagcgccgacaccctgagactggagctggacgccggcagagtgaagctgaccgtgaacctggactgcatcagaatcaactgcaacagcagcaagggccccgagaccctgttcgccggctacaacctgaacgacaacgagtggcacaccgtgagagtggtgagaagaggcaagagcctgaagctgaccgtggacgaccagcaggccatgaccggccagatggccggcgaccacaccagactggagttccacaacatcgagaccggcatcatcaccgagagaagatacctgagcagcgtgcccagcaacttcatcggccacctgcagagcctgaccttcaacggcatggcctacatcgacctgtgcaagaacggcgacatcgactactgcgagctgaacgccagattcggcttcagaaacatcatcgccgaccccgtgaccttcaagaccaagagcagctacgtggccctggccaccctgcaggcctacaccagcatgcacctgttcttccagttcaagaccaccagcctggacggcctgatcctgtacaacagcggcgacggcaacgacttcatcgtggtggagctggtgaagggctacctgcactacgtgttcgacctgggcaacggcgccaacctgatcaagggcagcagcaacaagcccctgaacgacaaccagtggcacaacgtgatgatcagcagagacaccagcaacctgcacaccgtgaagatcgacaccaagatcaccacccagatcaccgccggcgccagaaacctggacctgaagagcgacctgtacatcggcggcgtggccaaggagacctacaagagcctgcccaagctggtgcacgccaaggagggcttccagggctgcctggccagcgtggacctgaacggcagactgcccgacctgatcagcgacgccctgttctgcaacggccagatcgagagaggctgcgagggccccagcaccacctgccaggaggacagctgcagcaaccagggcgtgtgcctgcagcagtgggacggcttcagctgcgactgcagcatgaccagcttcagcggccccctgtgcaacgaccccggcaccacctacatcttcagcaagggcggcggccagatcacctacaagtggccccccaacgacagacccagcaccagagccgacagactggccatcggcttcagcaccgtgcagaaggaggccgtgctggtgagagtggacagcagcagcggcctgggcgactacctggagctgcacatccaccagggcaagatcggcgtgaagttcaacgtgggcaccgacgacatcgccatcgaggagagcaacgccatcatcaacgacggcaagtaccacgtggtgagattcaccagaagcggcggcaacgccaccctgcaggtggacagctggcccgtgatcgagagataccccgccggcaacaacgacaacgagagactggccatcgccagacagagaatcccctacagactgggcagagtggtggacgagtggctgctggacaagggcagacagctgaccatcttcaacagccaggccaccatcatcatcggcggcaaggagcagggccagcccttccagggccagctgagcggcctgtactacaacggcctgaaggtgctgaacatggccgccgagaacgacgccaacatcgccatcgtgggcaacgtgagactggtgggcgaggtgcccagcagcatgaccaccgagagcaccgccaccgccatgcagagcgagatgagcaccagcatcatggagaccaccaccaccctggccaccagcaccgccagaagaggcaagccccccaccaaggagcccatcagccagaccaccgacgacatcctggtggccagcgccgagtgccccagcgacgacgaggacatcgacccctgcgagcccagcagcggcggcctggccaaccccaccagagccggcggcagagagccctaccccggcagcgccgaggtgatcagagagagcagcagcaccaccggcatggtggtgggcatcgtggccgccgccgccctgtgcatcctgatcctgctgtacgccatgtacaagtacagaaacagagacgagggcagctaccacgtggacgagagcagaaactacatcagcaacagcgcccagagcaacggcgccgtggtgaaggagaagcagcccagcagcgccaagagcagcaacaagaacaagaagaacaaggacaaggagtactacgtgtag

SEQ ID NO: 327610 - protein, 495 aa, Artificial Sequence
  derived and/or modified sequence
MISRDTSNLHTVKIDTKITTQITAGARNLDLKSDLYIGGVAKETYKSLPKLVHAKEGFQGCLASVDLNGRLPDLISDALFCNGQIERGCEVALMKADLQGPSTTCQEDSCSNQGVCLQQWDGFSCDCSMTSFSGPLCNDPGTTYIFSKGGGQITYKWPPNDRPSTRADRLAIGFSTVQKEAVLVRVDSSSGLGDYLELHIHQGKIGVKFNVGTDDIAIEESNAIINDGKYHVVRFTRSGGNATLQVDSWPVIERYPAGRQLTIFNSQATIIIGGKEQGQPFQGQLSGLYYNGLKVLNMAAENDANIAIVGNVRLVGEVPSSMTTESTATAMQSEMSTSIMETTTTLATSTARRGKPPTKEPISQTTDDILVASAECPSDDEDIDPCEPSSGGLANPTRAGGREPYPGSAEVIRESSSTTGMVVGIVAAAALCILILLYAMYKYRNRDEGSYHVDESRNYISNSAQSNGAVVKEKQPSSAKSSNKNKKNKDKEYYV

SEQ ID NO: 327611 - DNA, 1488 bp, Artificial Sequence
  derived and/or modified sequence
atgatctcccgagacacttctaatctccacactgtgaaaatcgacactaagatcaccacacaaattactgcgggagccagaaatctggacctgaaatccgacctgtatatcggtggcgtcgctaaggagacatacaagagcttacccaagcttgtgcatgccaaggaagggttccagggttgtctggcatccgtggatctcaacggcaggctacccgatctcatctccgacgcactgttttgtaacggacagatcgagcgtggctgtgaagtggctttaatgaaggctgatctacagggacctagtacgacatgtcaggaagatagctgttcgaaccagggcgtatgtttgcaacagtgggatggtttttcctgcgattgttctatgacttcgttcagcgggccactgtgcaatgaccccggtactacttacatattttccaaaggagggggccagatcacatataagtggcctcctaatgaccgacccagcaccagagccgatcgactggctattgggtttagcacagtgcagaaggaagccgtgctggtgagggttgacagtagttcgggtttaggtgactatctagaattacacatccaccagggaaaaattggcgtcaaattcaacgtcggcacagatgacatagctatcgaggagagcaatgccataattaatgacggaaaataccatgtggtgaggtttacaaggagtggtggcaacgctactctgcaggttgacagctggccggtgatcgagaggtatccagcaggcaggcaactcaccattttcaatagtcaggccaccattattatcgggggcaaagagcagggacagccatttcaaggacagctatctggtctctactataatggcctgaaagtgctgaacatggccgccgaaaatgacgccaatatagcaatcgtcgggaacgtgaggcttgtaggcgaggtgccctcctcaatgactaccgaatcaacagcaacggccatgcagagcgaaatgagcacctccattatggagaccacaactacactagctacaagtaccgctcgtagaggcaaaccgccgactaaagaacctatttcccagaccactgatgatattctcgttgctagtgcagaatgtccaagcgatgatgaggatatcgacccgtgcgaaccatctagtggcgggctcgccaatcccacgcgtgccggtggacgggagccttaccccggcagcgcagaagtgatccgcgaatcgtccagcacaaccggcatggttgtggggatcgtcgcagccgctgcactctgtatcctgatcctgttgtatgccatgtacaaatataggaatcgagatgaggggagttaccacgttgacgaatcaaggaactacatctctaatagcgctcagtcaaacggagccgtcgtgaaggaaaagcagccatcatccgccaaaagcagtaataaaaacaagaaaaataaggataaggagtactatgtctag

SEQ ID NO: 327612 - DNA, 1488 bp, Artificial Sequence
  derived and/or modified sequence
atgatcagccgggacaccagcaacctgcacacagtgaagattgacaccaagatcaccacccagatcacagctggggccaggaacctggacctgaagagtgacctgtacatcggcggcgtggccaaggagacctacaagagcctgcccaagctggtgcacgccaaggagggcttccagggctgcctggcctctgtggacctgaatggccgcctgcctgacctgatcagtgatgccctcttctgcaatggccagatcgagcggggctgtgaggtggccctgatgaaggctgacctgcagggccccagcaccacctgccaggaggacagctgcagcaaccagggcgtgtgcctgcagcagtgggatggcttcagctgtgactgcagcatgaccagcttcagcggccccctgtgcaatgaccccggcaccacctacatcttcagcaagggcggcggccagatcacctacaagtggcccccaaatgaccggcccagcaccagggctgaccggctggccatcggcttcagcacagtgcagaaggaggccgtgctggtgcgggtggacagcagcagcggcctgggggactacctggagctgcacatccaccagggcaagattggagtgaagttcaacgtgggcacagatgacatcgccatcgaggagagcaatgccatcatcaatgatggcaagtaccacgtggtgcgcttcaccaggtctggaggaaatgccaccctgcaggtggacagctggcctgtgattgaaagatacccagctggccggcagctgaccatcttcaacagccaggccaccatcatcatcggcggcaaggagcagggccagcccttccagggccagctgagcggcctgtactacaacggcctgaaggtgctgaacatggccgcagaaaatgatgccaacatcgccatcgtgggcaatgtgcggctggtgggggaggtgcccagctccatgaccacagagagcacagccacagccatgcagagcgagatgagcaccagcatcatggagaccaccaccaccctggccaccagcacagcccggcggggcaagccacccaccaaggagcccatcagccagaccacagatgacatcctggtggccagcgcagaatgtcccagtgatgatgaagatattgacccctgtgagcccagcagcggcggcctggccaaccccaccagggctgggggccgggagccctacccaggcagcgctgaggtgatccgggagagcagcagcaccaccggcatggtggtgggcatcgtggccgctgctgccctgtgcatcctgatcctgctgtatgccatgtacaagtacagaaacagagatgagggcagctaccacgtggatgagagcaggaactacatcagcaacagcgcccagagcaatggagctgtggtgaaggagaagcagcccagcagcgccaagagcagcaacaagaacaagaagaacaaggacaaggagtactacgtgtag

SEQ ID NO: 327613 - DNA, 1488 bp, Artificial Sequence
  derived and/or modified sequence
atgatcagccgggacaccagcaacctgcacaccgtgaagatcgacaccaaaatcaccacacagattaccgccggtgcaaggaacctcgatttgaagtccgacttgtatatcggcggagtggctaaggagacctataagtccctccctaaactggttcatgcaaaagagggattccagggttgtctggcgtccgtagatctgaatggacgacttcccgacctgatctctgacgccctcttttgcaacggacagattgaacgcggttgcgaagttgctcttatgaaagctgacctgcagggcccgtctaccacttgtcaggaggattcatgttccaaccagggagtgtgcctgcagcagtgggacgggtttagctgtgattgctctatgacatctttttctggccccctctgcaacgacccagggaccacttacattttctccaaaggcgggggccaaatcacctacaagtggccaccgaatgacaggccctctactagggccgatcgtcttgccatagggttttctacagtgcaaaaggaggcagtgctggtgcgtgttgactctagcagcggcctgggggactacctggaacttcatattcaccagggcaagatcggcgtgaagtttaacgtcggcaccgacgacatcgccattgaggagtctaacgccataatcaacgatggcaaatatcacgtcgtgaggttcacacgatccggggggaacgctaccctgcaagtggactcatggcccgtgatcgagcgatacccggctggtcgtcaactgactatcttcaattcacaggccacaattatcattgggggaaaggagcagggccagccctttcaggggcagctgagtggtctgtattataatgggctgaaggtcctgaacatggccgccgagaatgatgcgaatattgcgatcgtcggaaacgtgagactggtgggcgaggtgccctccagcatgacaaccgagagtaccgccaccgctatgcagagtgaaatgagcacatccattatggagacaaccaccacgcttgctacttctacggctaggcgcggtaagccccccactaaggaacctatctcacagacgacggatgacatactggtcgcatctgccgagtgtccttcggacgacgaggatattgatccatgtgaaccctcttctggcggtttagcgaatcctactagagccgggggaagagaaccctacccaggctccgccgaagttatccgggagtcctccagcaccaccggcatggttgtggggatcgttgccgctgcagctctctgtatcctgatcctcctttacgctatgtacaaatataggaaccgagatgagggatcttaccatgtggatgagagcaggaactacataagtaattcagcacagtctaatggcgcagttgttaaggagaagcagccttcgtctgccaaatccagcaataagaataaaaaaaataaggacaaggagtattacgtctag

SEQ ID NO: 327614 - DNA, 3157 bp, Artificial Sequence
  derived and/or modified sequence
gatttgggaaatggtgctaacctcatcaaaggaagctcaaataaacctctcaatgacaatcagtggcacaacgtgatgatatcaagggacaccagcaacctccacactgtaaagattgacacaaaaatcacaacgcaaatcaccgccggagccaggaacttagacctcaagagtgacttatatataggaggagtagctaaagaaacatacaaatccttaccaaaacttgtacatgccaaagaaggctttcaaggctgcctggcatcagttgatttaaatggacggcttccggacctcatctccgatgctcttttctgcaacggacagatcgagagaggatgtgaagttgcattgatgaaagctgacttgcaagggcccagcacaacctgccaagaggactcatgttccaatcaaggtgtgtgcttgcaacaatgggatggcttcagctgtgactgtagtatgacttccttcagtggaccactctgcaatgaccctgggacgacatatatctttagcaaaggtggtggacaaatcacgtataagtggcctcctaatgaccgacccagtacacgagcagacagactggccataggttttagcactgttcagaaagaagccgtattggtgcgagtggacagttcttcaggcttgggtgactacctagaactgcatatacaccagggaaaaattggagttaagtttaatgttgggacagatgacatcgccattgaagaatccaatgcaatcattaatgatgggaaataccatgtagttcgtttcacgaggagtggtggcaatgccacgttgcaggtggacagctggccagtgatcgagcgctaccctgcagggcgtcagctcacaatcttcaatagccaagcaaccataataattggcgggaaagagcagggccagcccttccagggccagctctctgggctgtactacaatggcttgaaagttctgaatatggcagccgaaaacgatgccaacatcgccatagtgggaaatgtgagactggttggtgaagtgccttcctctatgacaactgagtcaacagccactgccatgcaatcagagatgtccacatcaattatggagactaccacgaccctggctactagcacagccagaagaggaaagcccccgacaaaagaacccattagccagaccacagatgacatccttgtggcctcagcagagtgtcccagcgatgatgaggacattgacccctgtgagccgagctcaggtgggttagccaacccaacccgagcaggcggcagagagccgtatccaggctcagcagaagtgatccgggagtccagcagcaccacgggtatggtcgttgggatagtagccgctgccgccctgtgcatccttatcctcctctatgccatgtacaagtacagaaaccgggatgaaggctcataccatgtggacgagagtcgaaactacatcagtaactcagcacagtccaatggggctgttgtaaaggagaaacaacccagcagtgcgaaaagctccaacaaaaataagaaaaacaaggataaagagtattatgtctgatcccaagatcttaaatggacacttgtatagaaatagtcttcattttatctgagacataatataaacttatttactttcctttttatgaagcacatacaaaagaagacagggaatgcaatcaggaaggaaagactttttaaaaaataaaaacaagtatctcatgctcttgtttctcaaaaaagaaaaacaaaaaacaaaaaacaggggccaataaattccctaacatccacagtgttttcatttactctgcttgtctttatgttgctggaacatttctaaaagacagtgatgaccgcacgcattcataaagcaaaggagtactacagcatcaaggcacaacacaaaaaccaacacaaaacataacacaaaaaagaagctacctatgatcctggatttagccaaagtgctagcgctttcctgagaagtcagtccaattgccagagaagactgtccttttgagtgactcaacctgcaaacctttaagagtttgccgcctggtgcaactggagcagtggttggaacttgcatttgaaacaaagtgctggcttttttgaagacttgtgtaggaacacattcaaaaagcccctttctggttgtgagagaggaaaaaaaagtatggaggccttattttcaaaaatgtgaaatataaggcacgttttcacacaaaatttcaaaacaaaaacaagagggcatagatgcaatcattgggaaattttcatgcacgcttattatgttattacatatgtttatataaaatccatctctgtgtgctttctggactgtgataagtgacgttttatagcctgttgtatagaaaatgcaaaatatatctctgctcttcagccatttttggtaaattcaatgttataagtgttgctaagtatagggagttttatgacatcagagcaacaattatttcagttgggtttttctttttttttgccaccattataaattgccacaattacttttattttttaaagaaattacagtgtagtgtttattctaaggaagatatgtatgaatgtatatacaaagactcagctacttcttttcttatatgtacagccttcattctgttgcaattaagttttagtacttgtatgaaaggtgtgaattagaaagtcacatatatacatatgtatcttataatcttttctccctgaaatactcacattcccacatacattcactattttcacacacacacacacacacacacacacacacacacacacacacacacgaatccacagcaatccatcagatatgctggaagatccaaacgtgcatacagtagcaaatatttattgacaaattgaaaagcaggaaggaagagggttgtgccaaggtattgatgacaaatggggtgatttgcttcattgagatcttgctcccaggtaaccttaagaagattttagtccctaaagaaatgaacctttccttatcaaatagaatatcactgatatactgctgcatgaataagaaccattatgtgggcaggttatggaagcaaaattggttaatctacaccttaactctggctgctgcaattgaaaactttctttctaataaaataatatatatatctctg

SEQ ID NO: 327615 - DNA, 1488 bp, Artificial Sequence
  derived and/or modified sequence
atgatatccagagatactagcaacctgcataccgttaaaatagacaccaagattacaacgcagatcacggccggagcaaggaatctggaccttaaatccgacctatatatcgggggtgttgccaaggagacttacaaaagcctgccgaagttagtccatgctaaggagggctttcagggctgtttagcatccgtcgaccttaatggcaggcttcccgatctgatttccgacgcactgttttgtaacggacagatagagcgcggttgtgaggtcgccttgatgaaagctgatcttcaggggccatcgaccacatgccaggaggacagttgcagtaaccagggggtttgcctccagcaatgggatggcttctcatgcgactgttcaatgacctcattctccgggccactctgtaacgaccccggaacaacgtacatcttcagcaagggcggaggacagatcacctacaaatggccccctaatgaccgaccatcaactcgagccgaccgcctggctatcggtttctctaccgttcaaaaagaggcggttttggtgagagtagattcaagctctggtctgggcgactacctggagctgcacattcaccaggggaaaatcggcgttaagttcaacgtgggcacagatgacatagcaatcgaggaatccaacgccattatcaacgacgggaagtaccacgtagtccgcttcacgcgctccgggggtaacgctaccttgcaggtggacagttggccagttatcgagagatatccggctggcaggcagcttactatctttaattctcaggccacaatcatcatcgggggtaaggagcaagggcagccctttcagggacagctctcaggcttatactacaacggcctcaaggtgttaaatatggcagcggaaaatgatgctaatatcgctattgtcggcaatgtccgcctagtcggtgaggtgccatcctcgatgactaccgaaagcactgccacagccatgcaatcggagatgagcacatctattatggaaacaactaccacattggctacctcaaccgcaagaagaggaaaaccacctaccaaggagccgatctcccaaacgactgacgatatcctggtcgcttctgctgagtgcccttctgacgatgaagatatcgacccttgcgagccatcctcaggagggctagcaaacccaacgcgtgccggtggtagagagccctaccccggttcagccgaagtgatccgcgagagctctagcacaacaggcatggtggtggggatcgtcgctgcggctgccctgtgtattctgattttgctctatgccatgtataagtatcgcaaccgtgatgagggctcctatcacgtggacgaaagcagaaattacatctccaattctgcccaaagcaacggagccgtcgtgaaggagaaacagcccagctccgccaaaagcagcaataaaaacaaaaagaataaagataaagaatactacgtttag

SEQ ID NO: 327616 - DNA, 1488 bp, Artificial Sequence
  derived and/or modified sequence
atgatcagcagagacaccagcaacctgcacaccgtgaagatcgacaccaagatcaccacccagatcaccgccggcgccagaaacctggacctgaagagcgacctgtacatcggcggcgtggccaaggagacctacaagagcctgcccaagctggtgcacgccaaggagggcttccagggctgcctggccagcgtggacctgaacggcagactgcccgacctgatcagcgacgccctgttctgcaacggccagatcgagagaggctgcgaggtggccctgatgaaggccgacctgcagggccccagcaccacctgccaggaggacagctgcagcaaccagggcgtgtgcctgcagcagtgggacggcttcagctgcgactgcagcatgaccagcttcagcggccccctgtgcaacgaccccggcaccacctacatcttcagcaagggcggcggccagatcacctacaagtggccccccaacgacagacccagcaccagagccgacagactggccatcggcttcagcaccgtgcagaaggaggccgtgctggtgagagtggacagcagcagcggcctgggcgactacctggagctgcacatccaccagggcaagatcggcgtgaagttcaacgtgggcaccgacgacatcgccatcgaggagagcaacgccatcatcaacgacggcaagtaccacgtggtgagattcaccagaagcggcggcaacgccaccctgcaggtggacagctggcccgtgatcgagagataccccgccggcagacagctgaccatcttcaacagccaggccaccatcatcatcggcggcaaggagcagggccagcccttccagggccagctgagcggcctgtactacaacggcctgaaggtgctgaacatggccgccgagaacgacgccaacatcgccatcgtgggcaacgtgagactggtgggcgaggtgcccagcagcatgaccaccgagagcaccgccaccgccatgcagagcgagatgagcaccagcatcatggagaccaccaccaccctggccaccagcaccgccagaagaggcaagccccccaccaaggagcccatcagccagaccaccgacgacatcctggtggccagcgccgagtgccccagcgacgacgaggacatcgacccctgcgagcccagcagcggcggcctggccaaccccaccagagccggcggcagagagccctaccccggcagcgccgaggtgatcagagagagcagcagcaccaccggcatggtggtgggcatcgtggccgccgccgccctgtgcatcctgatcctgctgtacgccatgtacaagtacagaaacagagacgagggcagctaccacgtggacgagagcagaaactacatcagcaacagcgcccagagcaacggcgccgtggtgaaggagaagcagcccagcagcgccaagagcagcaacaagaacaagaagaacaaggacaaggagtactacgtgtag

SEQ ID NO: 327617 - protein, 77 aa, Artificial Sequence
  derived and/or modified sequence
EAEKNPVGLARNEPDPLEKPNRPDTAFVWFLNPLKSIKYLICTRYKWLIIKIVLALGCSCWGPLQPPWLHGQKAPWG

SEQ ID NO: 327618 - protein, 113 aa, Artificial Sequence
  derived and/or modified sequence
DFLGDESLQEEEKDSQETDGLLPGSRPSSRPPGEKSFRSKGREKTKGGRDDEHKAGRSVFSAMKLGKNRSHKEEPQRPDEPAVLEMEDLDHLAIRLGDGLDPDSVSLASVTAL

SEQ ID NO: 327619 - DNA, 342 bp, Artificial Sequence
  derived and/or modified sequence
gacttcctaggcgacgaatctctgcaggaagaagagaaagattcacaggagacagatggcctgctgcctgggtcacggcccagctctcggccacccggggaaaaaagtttccggagcaagggtagagagaaaacgaagggggggcgggatgatgaacataaggcaggccgtagcgtcttttccgcgatgaaactcgggaagaatcgctcgcataaggaagagccgcagagaccggatgagcccgcggtgctggagatggaagatctggatcatcttgctatacggttgggtgatggactagatcccgacagtgtgtctttagcttctgttactgcactctag

SEQ ID NO: 327620 - DNA, 342 bp, Artificial Sequence
  derived and/or modified sequence
gacttcctgggagatgagagcctgcaggaggaggagaaggacagccaggagacagatggcctgctgcccggcagccggcccagcagcaggcctcctggagagaagagcttccgcagcaagggccgggagaagaccaagggcggcagagatgatgagcacaaggccggccgcagcgtcttcagcgccatgaagctgggcaagaacagaagccacaaggaggagccccagaggccagatgagcctgctgtgctggagatggaggacctggaccacctggccatccggctgggagatggcctggaccctgacagcgtgtccctggcctctgtgacagccctgtag

SEQ ID NO: 327621 - DNA, 342 bp, Artificial Sequence
  derived and/or modified sequence
gacttcctgggcgacgagagcctgcaggaggaggagaaggacagccaagagaccgacggattgctgcccggctcgcggccatcatccagacctccgggcgagaagagctttaggagcaagggtagggaaaagactaagggaggacgcgatgatgagcataaggccgggcggagcgtatttagcgcaatgaaactcggcaaaaatcgaagtcataaggaggaaccgcagagacctgacgaacctgcggtgctggagatggaagatctggatcacctcgctattagacttggcgacggattagatcccgactccgtgtctcttgcctctgtcacagcactgtag

SEQ ID NO: 327622 - DNA, 340 bp, Artificial Sequence
  derived and/or modified sequence
ggacttcctgggagatgagtctcttcaagaggaagagaaggacagccaagagacggatggactgctcccaggctcccggcccagctcccggcccccaggagagaagagcttccggagcaaaggcagagagaagaccaagggaggcagagatgacgagcacaaagccgggaggagcgtgttctccgccatgaagctcggcaaaaaccggtctcacaaggaggagccccaaagaccagatgaaccggcggtgctggagatggaagaccttgaccatctggccattcggctaggagatggactggatcccgactcggtgtctctagcctcagtcacagctctc

SEQ ID NO: 327623 - DNA, 342 bp, Artificial Sequence
  derived and/or modified sequence
gattttctgggcgatgagtccttacaggaggaggaaaaagactcccaagaaacagatgggctcttgccaggatcccgcccatcctctcgccctccaggcgaaaagtccttcaggtccaaaggtcgcgagaagacgaagggaggtcgggacgacgaacacaaggccggaaggtccgtcttctccgcgatgaagctcgggaaaaacaggagccacaaagaggaaccacagaggcctgatgagcccgctgtactggaaatggaagacctggaccatttagccattcggttaggcgacgggctggatcctgattcagtctctctggctagtgtgacagcattgtag

SEQ ID NO: 327624 - DNA, 342 bp, Artificial Sequence
  derived and/or modified sequence
gacttcctgggcgacgagagcctgcaggaggaggagaaggacagccaggagaccgacggcctgctgcccggcagcagacccagcagcagaccccccggcgagaagagcttcagaagcaagggcagagagaagaccaagggcggcagagacgacgagcacaaggccggcagaagcgtgttcagcgccatgaagctgggcaagaacagaagccacaaggaggagccccagagacccgacgagcccgccgtgctggagatggaggacctggaccacctggccatcagactgggcgacggcctggaccccgacagcgtgagcctggccagcgtgaccgccctgtag

SEQ ID NO: 327625 - protein, 727 aa, Artificial Sequence
  derived and/or modified sequence
MQQKTKLFLQALKYSIPHLGKCMQKQHLNHYNFADHCYNRIKLKKYHLTKCLQNKPKISELARNIPSRSFSCKDLQPVKQENEKPLPENMDAFEKVRTKLETQPQEEYEIINVEVKHGGFVYYQEGCCLVRSKDEEADNDNYEVLFNLEELKLDQPFIDCIRVAPDEKYVAAKIRTEDSEASTCVIIKLSDQPVMEASFPNVSSFEWVKDEEDEDVLFYTFQRNLRCHDVYRATFGDNKRNERFYTEKDPSYFVFLYLTKDSRFLTINIMNKTTSEVWLIDGLSPWDPPVLIQKRIHGVLYYVEHRDDELYILTNVGEPTEFKLMRTAADTPAIMNWDLFFTMKRNTKVIDLDMFKDHCVLFLKHSNLLYVNVIGLADDSVRSLKLPPWACGFIMDTNSDPKNCPFQLCSPIRPPKYYTYKFAEGKLFEETGHEDPITKTSRVLRLEAKSKDGKLVPMTVFHKTDSEDLQKKPLLVHVYGAYGMDLKMNFRPERRVLVDDGWILAYCHVRGGGELGLQWHADGRLTKKLNGLADLEACIKTLHGQGFSQPSLTTLTAFSAGGVLAGALCNSNPELVRAVTLEAPFLDVLNTMMDTTLPLTLEELEEWGNPSSDEKHKNYIKRYCPYQNIKPQHYPSIHITAYENDERVPLKGIVSYTEKLKEAIAEHAKDTGEGYQTPNIILDIQPGGNHVIEDSHKKITAQIKFLYEELGLDSTSVFEDLKKYLKF

SEQ ID NO: 327626 - protein, 638 aa, Artificial Sequence
  derived and/or modified sequence
MDAFEKVRTKLETQPQEEYEIINVEVKHGGFVYYQEGCCLVRSKDEEADNDNYEVLFNLEELKLDQPFIDCIRVAPDEKYVAAKIRTEDSEASTCVIIKLSDQPVMEASFPNVSSFEWVKDEEDEDVLFYTFQRNLRCHDVYRATFGDNKRNERFYTEKDPSYFVFLYLTKDSRFLTINIMNKTTSEVWLIDGLSPWDPPVLIQKRIHGVLYYVEHRDDELYILTNVGEPTEFKLMRTAADTPAIMNWDLFFTMKRNTKVIDLDMFKDHCVLFLKHSNLLYVNVIGLADDSVRSLKLPPWACGFIMDTNSDPKNCPFQLCSPIRPPKYYTYKFAEGKLFEETGHEDPITKTSRVLRLEAKSKDGKLVPMTVFHKTDSEDLQKKPLLVHVYGAYGMDLKMNFRPERRVLVDDGWILAYCHVRGGGELGLQWHADGRLTKKLNGLADLEACIKTLHGQGFSQPSLTTLTAFSAGGVLAGALCNSNPELVRAVTLEAPFLDVLNTMMDTTLPLTLEELEEWGNPSSDEKHKNYIKRYCPYQNIKPQHYPSIHITAYENDERVPLKGIVSYTEKLKEAIAEHAKDTGEGYQTPNIILDIQPGGNHVIEDSHKKITAQIKFLYEELGLDSTSVFEDLKKYLKF

SEQ ID NO: 327627 - DNA, 2184 bp, Artificial Sequence
  derived and/or modified sequence
atgcagcagaaaactaaactattcctgcaggctttgaagtactccataccccacctggggaaatgtatgcagaaacagcaccttaaccattacaattttgccgatcactgctacaaccgaatcaagctgaagaaatatcacctcactaaatgcctccagaataagcccaaaatatctgagctcgccaggaacataccgagccgcagcttctcatgcaaagatctgcagccagtgaaacaagagaacgaaaaaccccttccagagaacatggacgcctttgagaaggtgcgtacaaagctggaaacccaacctcaggaggagtacgaaatcatcaacgtggaagtaaaacacgggggattcgtctattatcaggagggctgctgtctagttagatctaaggacgaggaggccgacaatgacaattacgaggttttgttcaacctggaggagctaaaattagaccagccattcatcgactgcattagagtagcgcccgatgagaagtacgtggccgccaagatccgaaccgaagatagcgaagcatccacctgtgtgatcatcaagctcagcgatcagccagtgatggaggctagcttccctaatgtatcctcctttgagtgggtcaaggatgaagaggatgaagatgtgctcttttatacttttcaacgcaatctccggtgtcatgacgtgtatagagccacgttcggagacaacaagaggaatgaacgattctacactgagaaggatcctagctattttgtgttcctgtacttgactaaggattccagattcctgaccatcaacattatgaataaaactacctctgaggtgtggctgatcgacggactaagtccatgggatcctccagttctgattcagaagagaatccacggggtgctgtactacgtggagcatagagatgacgagctgtacatcctgacgaacgtgggagagcccacagaatttaagttgatgagaacagctgctgatactcccgctatcatgaactgggatctgtttttcacaatgaaaaggaataccaaggtgatcgaccttgacatgtttaaggatcattgtgtgctgtttctgaagcactctaatctgctgtatgttaatgtgattggcttggcagacgactcagtccggagcctgaagcttccaccctgggcttgtggcttcatcatggacaccaatagcgatcccaaaaactgtccattccagctgtgttctccaattaggcctcccaagtactacacatataaattcgccgaaggaaagctattcgaggaaaccggccatgaggaccccatcactaaaacaagtcgcgtgctgcggcttgaagcaaagtccaaggacgggaagctagtgccaatgaccgtgttccacaaaaccgactccgaggatctgcagaaaaaacccctgctcgtccatgtatacggcgcatatggcatggacttgaaaatgaactttcggcctgagaggagggttctggttgacgatggatggatcctggcatattgtcatgttaggggcgggggcgagcttgggttacagtggcacgcagacgggaggctgacaaagaagctcaatgggctggctgacctcgaggcttgcattaagacactgcatggccaaggattctctcagccctctcttaccacactgaccgccttctctgccgggggggttttagctggcgccctttgtaattcaaatccagagttagtcagagcagtaacattagaggcgccatttttggatgtcctgaacaccatgatggacacaacattgcctctgacgctggaggagttggaggaatgggggaacccaagcagcgacgaaaagcataaaaattatatcaagagatattgcccataccagaatattaaacctcagcactatcccagcatacacatcacagcttacgagaatgacgagcgcgtgcccttaaaggggatcgtatcctacaccgagaagctgaaggaggcgatcgctgagcatgcaaaagatacaggcgagggctatcagacacccaacataatcctcgatatacagccaggcgggaaccacgtgatcgaagacagtcataagaagatcactgctcaaatcaagttcctatatgaggagctggggctggactctacctctgtctttgaggatctaaagaagtatcttaagttctag

SEQ ID NO: 327628 - DNA, 2184 bp, Artificial Sequence
  derived and/or modified sequence
atgcagcagaaaaccaagctatttctccaagctctcaaatactccatcccccacctggggaagtgtatgcaaaagcagcacttgaatcattacaacttcgccgaccactgctacaaccggataaaactcaagaaataccatcttacgaaatgccttcaaaacaagccaaaaatctccgagctggctcgcaacatcccgagccggagcttctcgtgcaaagacctgcagccggtcaaacaggagaacgagaagccactgcctgaaaacatggatgctttcgaaaaggttaggacaaaactggaaacccaaccacaggaggagtacgaaatcatcaacgtcgaggtcaaacacgggggcttcgtgtattaccaggaaggttgctgtctggtgcgatccaaggatgaagaggcggataacgataactatgaggtactgtttaaccttgaagagttgaagctcgaccaaccttttattgactgcatccgcgtagcgccagatgagaagtacgtcgccgccaagataagaactgaggattctgaagcttcgacttgtgtcataatcaagctcagtgaccagcccgtgatggaggcctccttccccaacgtctctagtttcgaatgggtgaaagatgaagaggatgaagacgtactcttttatactttccaaagaaacctgcgttgccacgacgtctaccgggccactttcggggataacaaacgtaatgagcggttttacacagagaaggacccctcttacttcgtatttttatacttaaccaaggacagcaggttcttgacaattaatataatgaataagaccacgagtgaggtgtggctcatagatggactatccccttgggatcctcccgtattgatccagaagcgaattcatggtgtgttgtactacgtggaacatcgtgacgacgagttgtacatcctgactaatgtaggagagcccaccgaattcaagctgatgaggactgctgccgatacccccgccataatgaactgggatctcttctttaccatgaagcgtaacaccaaagtcatagacttagatatgttcaaggaccattgcgttctgtttttaaaacactcaaatttactctacgtgaacgttatagggcttgccgacgactctgtccggtcactgaaattacctccctgggcttgtggcttcatcatggatacaaacagtgatccaaaaaattgcccattccagttatgcagcccaattcggcctccgaaatattatacctataagtttgctgagggcaagctgtttgaagagactggacacgaggatccgattaccaagacctctcgggtgcttcggctcgaggcaaagagtaaggacggaaaattggttccaatgacagttttccacaaaacagattcagaggatttacaaaagaaaccgcttctggttcatgtctacggggcatacgggatggatctgaagatgaattttcggcccgagcgcagagtgcttgtggatgacggatggatcctcgcgtactgccacgttcggggaggaggtgaattgggcctgcaatggcatgctgatggtaggttgacaaaaaaattaaacggactggcggatcttgaggcatgcattaaaactctgcacggccaggggtttagccagccaagcttgacgaccttgacagccttttcagcagggggagtcttggccggcgctctgtgtaactctaaccctgagctggtgcgagcagtgacactggaggcaccctttctagatgttctgaacaccatgatggataccactctgcctttgacactcgaggagttagaggagtgggggaatccctcctctgatgaaaaacacaagaactacatcaaaaggtattgcccataccagaatatcaagccacagcactacccatccatccacatcacagcttatgagaatgatgaacgtgtgcccctcaagggcatagtctcttacaccgaaaaactgaaagaagccatagcagagcatgcaaaggacacgggggaaggttatcagacgcccaacatcattctggacattcagcccggcgggaatcacgtgatcgaagacagccacaagaaaatcactgcacagatcaaattcctctacgaggaactgggcctagactctactagcgtgtttgaagatctcaaaaaatatcttaagttttag

SEQ ID NO: 327629 - DNA, 2184 bp, Artificial Sequence
  derived and/or modified sequence
atgcagcagaaaaccaagctcttcctgcaggccttgaaatacagtatccctcacttgggtaagtgtatgcagaaacagcacttaaatcattacaactttgccgatcactgctacaacagaatcaagctgaaaaagtaccatctgacaaagtgcctgcagaataagccgaagatttccgaactcgctcgaaatatcccgtcaagaagctttagctgtaaggacctccaaccagtaaagcaagagaatgagaagcccctacctgagaacatggacgcttttgaaaaggtccggaccaaacttgagacacaaccccaggaggaatatgaaatcatcaatgtagaggtaaaacacggaggtttcgtgtattatcaggaaggctgctgcctagtaaggtccaaagacgaggaggccgacaacgacaactacgaggtactgttcaacctcgaggagctgaaactggaccagccatttatagactgcattagggttgccccagacgagaagtacgtggcagccaagatacgcacagaggatagcgaggcgagtacttgtgttattataaaactatcggaccaacctgtaatggaggcgagtttccccaacgtgtcctcgttcgaatgggttaaagacgaggaggatgaggatgtcttgttctacacttttcaaagaaatctgcggtgccacgatgtctatcgcgccaccttcggagataacaagaggaacgaacgcttctacacagagaaagatccctcatactttgtgttcctttacttgacgaaggactcccggttcttaacaatcaacataatgaataaaacaacaagcgaagtgtggttgatcgacggtctaagcccttgggacccacccgttctgatacagaaaaggatccatggcgtcttatattacgtggagcatagagacgatgagctgtatattctcaccaacgttggcgagcccacagagttcaagctcatgaggactgccgccgatacacccgccataatgaattgggatctgttctttacaatgaagaggaatactaaagtcattgacctcgacatgttcaaggatcattgtgtcttatttctgaagcatagtaacctactgtacgtcaatgttattgggctggccgatgatagcgtgcgcagcctgaagctgcccccctgggcatgcgggtttatcatggatacaaattctgaccccaaaaattgtccttttcagctatgctcccccataaggccccccaaatactatacctacaagttcgccgaagggaaactgtttgaagaaacaggccacgaggatcccataactaagacctcccgcgtcctgcgcctggaagccaagagcaaggacgggaagcttgtgccaatgactgtttttcacaaaaccgacagcgaggacctgcagaaaaagcctttactagtgcacgtgtatggagcttatgggatggacttgaaaatgaattttagaccagaacgaagggtgctggtagacgatggctggatcctggcctattgtcacgtgcggggcgggggagaattagggctgcaatggcatgcggacggccgtctgacaaaaaagttgaacggactggcagatctcgaggcctgtataaaaaccctgcacggccaaggatttagtcagccctcccttaccactttgacagccttttcagccggcggagttttggcgggtgccctctgtaactccaaccccgagctcgtgcgcgccgttacactagaggccccattcctagacgttttaaacactatgatggacacaaccctgcctttgacattggaggagctcgaggagtggggcaatccttccagtgatgagaaacataagaactacatcaaacgctactgtccctatcagaacattaaacctcagcattacccctccattcacatcacagcctatgagaacgatgaacgggttccactgaaggggatcgttagttacacagagaaactaaaggaggctattgcagaacacgcaaaggataccggggaggggtaccagacaccgaatattatcctggacatccagccagggggcaatcacgtgattgaggattcccacaagaagattaccgcgcagataaaatttttatatgaggaactcggtctggacagcaccagtgtctttgaggatttgaagaagtatctgaagttctag

SEQ ID NO: 327630 - DNA, 2184 bp, Artificial Sequence
  derived and/or modified sequence
atgcaacagaagaccaagttattcctgcaggccctaaagtactcaattcctcacctgggaaaatgtatgcagaaacagcacctcaaccattacaatttcgccgatcattgttataatcgtattaagctaaaaaaataccatctgacaaaatgtttacaaaacaagcctaaaattagtgaattggcccggaacatcccttcccgttcatttagctgtaaggatctgcagccagttaagcaggaaaacgagaagccactccctgagaacatggacgctttcgagaaagtgcgtaccaaactggagacacagcctcaggaagaatatgagattattaatgtagaggtgaagcatggcgggttcgtttattaccaagagggctgttgtctcgtgagatccaaagacgaggaggccgacaatgataactatgaggttctctttaacctggaggagctgaagctggaccagccttttatcgattgtatcagagttgcacctgatgagaagtatgtggcggccaagatccggactgaggactccgaagctagtacgtgcgtaatcatcaagttgagtgaccagcctgtgatggaagcgagcttcccaaatgtcagctcatttgaatgggtcaaggacgaggaggatgaagacgtgctattctatacgttccaacgcaatctgcggtgtcacgacgtttacagggccacctttggggacaacaagcgcaatgaacgattttacacagagaaagacccttcttacttcgtctttctgtacttgaccaaagacagcagattcctgaccattaatatcatgaataagactacttcagaggtctggcttatcgacggccttagcccttgggatccaccagtccttattcaaaagagaattcatggagtgctctactacgtggaacatagggacgacgagctatatatccttactaatgttggtgaaccaacagaatttaagttaatgcgaacggcagccgatacccctgccatcatgaattgggatctcttttttacaatgaagcgaaacacaaaggtcatcgacttggatatgttcaaagaccactgtgttctgttcctgaagcacagtaacctgctctatgtcaacgtgattggcctggccgatgacagtgtgaggagcctcaagctcccaccttgggcatgcggcttcattatggacactaactctgacccaaagaactgtccattccagctgtgtagccctattaggcctcctaaatattatacttataaattcgctgagggtaagctctttgaggagaccggacacgaggaccccataactaaaacatccagggtcctacggctggaagctaagtcgaaggacggcaaattggttccaatgactgtgtttcataagactgattccgaggatttacagaaaaagcccctgctcgtgcatgtgtatggcgcatatggaatggacctgaaaatgaatttccgaccggagagaagggtgctggtggatgacggatggatattggcttactgtcacgtgaggggcggcggtgagctgggcctgcaatggcacgctgatggcagactgactaagaagttgaatgggctagcagacctggaagcctgcataaagacacttcatgggcaaggcttcagccagcccagtcttaccaccttaactgctttttcagctggaggcgtgctggccggggctctttgcaattccaatccagaattagtgcgcgctgtcacactagaagcccccttcctcgatgtactaaataccatgatggacactaccctgcctcttaccttagaggaattagaagaatggggcaacccttcatccgatgaaaagcacaagaactatatcaaaaggtactgcccctatcagaatataaaaccacaacactacccctcaatccatattactgcgtacgaaaacgatgaacgcgttccattgaaaggcatcgtctcctatacagagaagctcaaagaggccatcgcggagcatgcaaaggacacgggagaaggatatcagaccccgaatataatattggacatccaaccaggcggtaatcacgtgattgaagactcgcataagaagatcacagctcaaattaaatttctgtacgaagaactcggcctggactccacttccgtattcgaggatctcaagaaatatcttaagttttag

SEQ ID NO: 327631 - DNA, 2184 bp, Artificial Sequence
  derived and/or modified sequence
atgcaacagaaaacgaagttgttcttgcaggcactgaagtattccatccctcatttgggcaagtgtatgcagaaacaacatttgaatcactataactttgcggatcattgctataataggatcaagctcaaaaagtatcatttaactaaatgtctccaaaataagcctaaaatttcagagttggcgcggaacattccttcacgaagcttctcatgtaaggatcttcagccagtgaagcaggaaaacgagaagcccctgccagagaatatggatgccttcgaaaaagtcaggactaagctggagacacaacctcaagaagagtacgagattatcaacgttgaagtaaaacatggtggctttgtctactatcaggagggctgttgtcttgtgagatctaaagatgaagaggccgacaacgataactacgaggtgctcttcaaccttgaagagctcaagcttgatcagccgtttattgactgcatacgggtcgcgcctgacgagaaatatgtcgccgctaagattcggacggaggactccgaagcctccacttgcgttatcattaaactgagcgaccaacccgtcatggaagcctcttttccaaacgtgtcgtctttcgagtgggtgaaggatgaagaggacgaagacgtgcttttctataccttccagcgcaatctgcgctgccacgacgtgtatagagcaacattcggagacaacaaaagaaacgagaggttctacactgaaaaggacccctcctactttgtcttcctctatctgaccaaggactccagatttctgacaattaatataatgaacaagaccacaagcgaagtgtggctcatagacgggctgagtccatgggacccaccagtgctgatccagaagcgaatccacggagtattatattacgtggagcaccgcgatgacgaactctatatactcaccaatgtgggtgagcctaccgaattcaagctgatgcgcactgctgccgacacccctgccatcatgaactgggatctcttttttactatgaagcggaacacaaaggtgattgacctggacatgttcaaagaccattgtgtgttgtttctgaagcattcgaatctgctatatgttaatgtaataggtctcgctgatgatagcgttcgatcattaaaacttcctccctgggcctgtggcttcattatggataccaactctgaccctaagaactgccccttccagctttgctcacccattagaccgcccaaatactacacctacaagtttgcagagggcaagctttttgaagaaacgggccacgaggatcccataacgaagacatccagggtgttgcgtctggaggccaagtctaaagacggtaagcttgtgcccatgactgtttttcataagacagacagcgaggacttgcagaagaaaccactcctagtgcacgtctacggagcttatggcatggatctgaaaatgaacttccggccggaacggagggtcctcgttgacgatggctggattttagcatactgccacgttagggggggcggcgagttggggctacagtggcatgccgacggaaggttgactaagaaactcaatggtctggccgatttggaggcttgcataaaaacattgcatggccaggggttctcacagccatctctgaccaccctcactgctttctcggctggcggtgtgctagcaggagcactgtgtaacagcaacccagaactggtgcgtgccgtgacactcgaggcccctttcttggatgtgctgaatacgatgatggacactactctccctctgactcttgaggagctggaggaatgggggaatccatcttctgacgaaaagcataagaactatataaaacgctattgtccctatcaaaatataaaaccgcagcattacccatcaattcacatcaccgcatatgagaacgatgaaagagtaccacttaagggcatcgtctcgtacacagaaaagcttaaggaggctattgccgagcacgccaaagacaccggggagggttaccagactcctaatattattctcgacattcaacccggcggaaaccacgtgatcgaggatagtcacaaaaaaatcactgcccagatcaagttcctgtatgaagagctcggattagattctaccagtgtctttgaggacctcaaaaagtacctcaaattctag

SEQ ID NO: 327632 - DNA, 2184 bp, Artificial Sequence
  derived and/or modified sequence
atgcagcagaagaccaagctgttcctccaggcccttaaatattctattccacatctcgggaaatgtatgcagaagcagcacttaaaccattataacttcgcagaccactgttacaataggatcaagctaaagaagtaccatctgacaaaatgtctgcagaacaaacccaaaatttcagagctggcccggaacatcccttctcgatctttcagttgtaaagacctgcaacctgtgaagcaagaaaacgaaaaacctcttcccgagaacatggacgcatttgagaaggtccggactaagctggaaacacaaccacaagaagagtatgaaattatcaatgtggaagtcaaacacggtggcttcgtctactaccaggagggctgctgcttggtacgatcaaaagacgaggaggcagataatgataactacgaggtgctgttcaaccttgaggaactgaaactggatcagccttttatagattgtatccgagtagcaccagatgagaaatatgtcgccgccaagataagaaccgaggattcggaggcctctacctgcgttataataaagctgtccgaccagcccgtaatggaggcttcttttcccaacgtttcaagctttgagtgggttaaggacgaggaagatgaggatgtcctgttttatacctttcaaaggaatctgcgctgccacgacgtttatagagctaccttcggtgacaataaacggaatgagaggttttacacagagaaagatccctcttacttcgttttcctatacctcacaaaagactccagattcctcactatcaacataatgaacaagactacatctgaggtatggctgatcgacggtctgtccccatgggacccccctgtactcattcagaagaggattcacggggtgctgtactatgtcgagcaccgagatgatgagctgtacattctgaccaatgtgggcgagcccactgagttcaaactcatgcgcaccgctgccgatacaccggcaatcatgaactgggatctgttcttcacaatgaaacgcaatacaaaagttattgatctcgatatgtttaaggatcactgtgtgttgttcctgaaacacagtaatctcctgtacgtgaatgtaatcgggctcgcagacgatagcgttcgctctctaaagcttcctccttgggcgtgtggattcatcatggacactaacagcgaccctaaaaattgcccgtttcagctatgtagtcctatacggccccccaaatactacacctacaagtttgcagagggtaaactgttcgaagagactggccatgaagaccctattactaagacatcccgagtgctccgacttgaggctaagtccaaggatggcaaattggtccccatgactgtgttccacaaaacagattctgaggacctgcaaaagaaacctttgttggttcacgtttatggcgcctatgggatggatctgaagatgaactttcgcccagaacggcgcgttctcgtggacgatggctggatcctagcatattgtcacgtcagagggggtggcgagctgggactgcagtggcatgcagacggtcgcctgacaaaaaaactgaacggccttgccgatctggaagcctgtataaagaccctgcacggacagggcttctcgcaacccagccttacaaccctgaccgcttttagcgcggggggggtattggcaggcgcactgtgtaacagcaaccccgaattggttcgcgccgtgactctggaagcacccttcctagatgtgcttaatacaatgatggacaccaccctgcctctgaccttggaggagcttgaggagtggggcaacccttcatcagatgaaaaacacaaaaattatatcaaaaggtattgtccataccaaaatattaaaccccagcattatcccagcatacacattactgcttacgagaacgacgaacgcgtgcctttgaaaggaatagtctcttacacagaaaagctcaaggaggctattgccgagcacgctaaggacacaggagaggggtaccagacccccaatataatactcgacattcagcctggagggaatcacgtgatcgaggattcccataagaagataactgctcaaataaaatttctgtacgaagaactaggcctcgacagtacctcggtgtttgaagaccttaagaaatacctaaagttttag

SEQ ID NO: 327633 - DNA, 2184 bp, Artificial Sequence
  derived and/or modified sequence
atgcagcagaagaccaagctgttcctgcaggccctgaagtacagcatcccccacctgggcaagtgcatgcagaagcagcacctgaaccactacaactttgctgaccactgctacaaccgcatcaagctgaagaagtaccacctgaccaagtgcctgcagaacaagcccaagatcagcgagctggccaggaacatccccagccgctccttcagctgcaaggacctgcagcctgtgaagcaggagaatgagaagcccctgcctgagaacatggatgcctttgagaaggtgaggaccaagctggagacccagccccaggaggagtatgagatcatcaacgtggaggtgaagcatggaggctttgtgtactaccaggagggctgctgcctggtgcgcagcaaggatgaggaggccgacaatgacaactatgaggtgctcttcaacctggaggagctgaagctggaccagcccttcatcgactgcatccgggtggccccagatgagaagtatgtggccgccaagatcagaacagaagattctgaggccagcacctgtgtgatcatcaagctgagtgaccagcctgtgatggaggccagcttccccaacgtgagcagctttgagtgggtgaaggatgaggaggatgaagatgtgctcttctacaccttccagaggaacctgcgctgccatgatgtgtaccgggccacctttggagacaacaagagaaatgaacgcttctacacagagaaggaccccagctactttgtgttcctgtacctgaccaaggacagccgcttcctgaccatcaacatcatgaacaagaccaccagcgaggtgtggctgattgatggcctgagcccctgggacccccctgtgctgatccagaagagaattcatggagtgctgtactacgtggagcacagagatgatgagctgtacatcctgaccaacgtgggggagcccacagagttcaagctgatgaggacagctgctgacaccccagccatcatgaactgggacctcttcttcaccatgaagaggaacaccaaggtgattgacctggacatgttcaaggaccactgtgtgctcttcctgaagcacagcaacctgctgtatgtgaatgtcatcggcctggctgatgacagcgtgcgcagcctgaagctgcccccctgggcctgtggcttcatcatggacaccaacagcgaccccaagaactgccccttccagctgtgcagccccatccggccccccaagtactacacctacaagtttgctgagggcaagctgtttgaggagactggacatgaggaccccatcaccaagaccagccgggtgctgcggctggaggccaagagcaaggatggcaagctggtgcccatgacagtgttccacaagacagacagcgaggacctgcagaagaagcccctgctggtgcacgtgtatggagcctacggcatggacctgaagatgaacttccggcctgagcggcgggtgctggtggatgatggctggatcctggcctactgccacgtgcggggcggcggggagctgggcctgcagtggcatgctgatggccgcctgaccaagaagctgaatggcctggccgacctggaggcctgcatcaagaccctgcacggccagggcttcagccagcccagcctgaccaccctgacagccttctctgctgggggcgtgctggccggggccctgtgcaacagcaaccctgagctggtgcgggctgtgaccctggaggcccccttcctggatgtgctgaacaccatgatggacaccaccctgcccctgaccctggaggagctggaggagtggggcaaccccagcagtgatgagaagcacaagaactacatcaagcgctactgcccctaccagaacatcaagccccagcactaccccagcatccacatcacagcctatgaaaatgatgagcgggtgcccctgaagggcatcgtgtcctacacagagaagctgaaggaggccatcgccgagcacgccaaggacacaggagagggctaccagacccccaacatcatcctggacatccagcccggcggcaaccacgtgattgaggacagccacaagaagatcacagcccagatcaagttcctgtatgaggagctgggcctggacagcacctctgtgtttgaggacctgaagaagtacctgaagttctag

SEQ ID NO: 327634 - DNA, 2184 bp, Artificial Sequence
  derived and/or modified sequence
atgcagcagaagaccaagctgttcctgcaggccctgaagtacagcatcccacacttagggaaatgcatgcaaaaacagcatttgaatcattacaatttcgccgatcattgctacaataggattaaactgaagaagtaccatctgacaaagtgcctgcagaataagcctaagatttccgaacttgcgcgcaacattccaagcaggagcttttcatgcaaggacctgcagcctgttaagcaggaaaatgagaagcccttaccagaaaatatggatgcattcgagaaggtccgtacaaaactagaaacgcagccccaggaggaatacgagatcatcaatgtggaggttaagcacggcgggtttgtatactaccaggagggatgttgtttagtccggtccaaagacgaggaggccgataatgacaattacgaggtgctgtttaacctggaagagttgaagctggaccaacctttcatcgactgcattcgggtggcacccgacgaaaagtacgtcgctgccaagataagaacagaagattccgaggccagcacgtgtgtcattattaaactgtccgaccagcctgttatggaagcgtcattcccaaacgtgtcatcgttcgagtgggtgaaagatgaagaggacgaagacgtactgttctacacctttcagcgaaatctgcgttgccacgacgtgtatcgggctaccttcggagataataagcgcaatgagcggttctacacagagaaggacccaagctattttgtattcctatatcttaccaaggacagccggttcctgaccattaacataatgaacaagacaacgagcgaagtctggctcatcgatggactgtccccttgggatccccccgtcttgatccagaaaaggatacacggggtactgtactacgtggaacaccgtgacgacgagctgtatatcttgaccaatgtgggggagcccacggaatttaaactgatgcgaaccgcagctgatacgccggcaataatgaactgggacctcttttttactatgaagagaaacaccaaagtcattgatctggatatgtttaaagaccattgcgtgctgttcctgaagcactcaaacctgctctatgtcaacgtgatcggactggccgatgactccgtaaggagcttgaaacttccgccatgggcctgcgggtttattatggacacgaacagtgatccaaagaactgtccattccagctctgttcacctatccgaccacctaagtattacacctataagtttgccgagggcaagctctttgaggagaccggacacgaggaccccataaccaagacatctcgcgtgttaagactagaagccaaatccaaagacggaaaactggttccaatgactgtgttccataaaaccgatagcgaagatctgcagaagaaaccactcctcgtccatgtctacggcgcatacggcatggaccttaaaatgaactttagacccgagcgcagggtgctagtagacgatggctggattctggcctattgtcacgttagaggaggaggcgaattaggactacaatggcacgccgacggcagactcaccaagaaattgaacgggctcgcagacctcgaggcctgcattaaaacactgcatggccaaggcttttcacaaccctcattaaccactctgacagccttttctgcagggggtgtactcgcaggggcactctgcaactccaatcccgaactcgtgcgcgccgtgacactggaagcaccttttctggatgttctgaatacaatgatggatacaacattgcccctgaccctggaggaattggaagagtggggcaacccctcctctgacgagaaacataaaaactacattaaacggtattgtccgtatcagaacatcaagccgcagcactacccatcaatccacattaccgcttatgaaaacgatgagagagtgcctctgaagggcatcgtcagctataccgagaagctcaaggaagcgatcgctgagcacgctaaagatacaggcgaaggataccagacacctaatatcattctcgacatacagcccgggggtaatcatgtgatcgaggactcccacaagaaaattacagctcagattaagttcctgtacgaggagcttgggcttgacagtacctccgtgtttgaggacctcaaaaagtacctgaaattctag

SEQ ID NO: 327635 - DNA, 2184 bp, Artificial Sequence
  derived and/or modified sequence
atgcagcagaagaccaagctgttcctgcaggccctgaagtacagcatacctcatctgggtaagtgtatgcagaagcaacacctcaaccactataactttgccgaccattgctataatcgcataaagctgaaaaaataccacctgacaaagtgcctgcagaataagccaaaaatcagcgaactagcccgaaatattccgtctcggagcttcagctgcaaggatctccagcccgtgaagcaggaaaacgagaagccactcccggagaacatggacgcctttgaaaaggtgcgcacgaaactggagacccaaccacaggaggagtacgaaataattaacgtagaagtcaaacatggggggttcgtgtattatcaggaagggtgttgcctcgtcagatcaaaggatgaggaggctgataacgacaactacgaggttctgttcaacctcgaagaactcaagctggaccagccatttattgactgcatccgcgttgccccggatgagaaatatgtcgcagcaaagatccggacagaggatagcgaagcctcaacatgtgtgattatcaagctctccgatcagcccgtgatggaggccagctttccgaacgtttcttccttcgaatgggtaaaagacgaggaggacgaggacgtactcttctatacattccagagaaatctccggtgtcatgatgtgtacagggctacattcggtgataataagcggaacgagaggttttacactgagaaagatccctcatacttcgtgttcctgtatctcaccaaggactctcgctttcttactatcaacatcatgaacaagacaacttcagaggtgtggcttattgatggcctcagcccctgggatccgcccgtgttgattcagaaacgaattcacggagtgctgtactacgtcgaacaccgagacgatgagttgtacatcttgaccaatgtgggcgagcccacagaattcaagttaatgcgtactgccgctgacactccggcgatcatgaactgggatctcttcttcacaatgaaacgcaatacaaaagtcatcgatctcgatatgttcaaagatcattgcgtgctgtttttgaagcactctaacctgctgtatgtcaatgtgatcggtcttgctgatgatagcgtaagatctctcaaactgccaccctgggcttgcgggtttatcatggacactaatagtgacccaaaaaactgcccgttccaactgtgttctcctatccgcccaccaaagtactacacttataaattcgctgaggggaagctttttgaggagaccggacacgaggacccaataactaagacaagtagagtgctacgcctggaagccaaaagcaaggacgggaaattggtgcccatgactgtgttccataagactgactctgaagacctccagaaaaaaccactcctagtgcacgtgtacggcgcctacgggatggacctcaaaatgaactttaggcccgaaaggagggtgttggttgatgatggatggattctcgcttactgccacgttagaggggggggcgaactgggtttgcagtggcatgcagacggtcgcttaacaaaaaaactgaacggtctggcggacctggaggcatgtattaaaacactacacggccaggggttttcgcagccttccttgacaaccctcactgcattctctgctggaggggttctggccggcgcactctgcaattccaatcctgagctcgttagagccgtgacactggaggccccctttctggacgtgcttaacaccatgatggacactacattacctctcacactggaagaactggaagagtgggggaacccatcgtcagacgagaagcacaaaaattatatcaagcgttactgtccttatcagaatattaagccacagcattatccaagtatccatatcactgcatacgaaaatgatgaacgggtgcctctgaagggtatcgtgtcatataccgagaaacttaaggaagctatcgccgaacacgccaaagatactggggagggataccaaacacctaacatcatcctggatatccagcctggcggcaaccatgtgatcgaggattcacataaaaaaattaccgcccaaatcaagtttttatacgaagaactggggctcgatagtacaagcgtgttcgaggacctcaagaagtatctaaagttttag

SEQ ID NO: 327636 - DNA, 2184 bp, Artificial Sequence
  derived and/or modified sequence
atgcagcagaagaccaagctgttcctgcaggccctgaagtacagcataccacaccttggcaagtgtatgcagaaacagcacctcaaccactataattttgccgatcattgttataaccggattaagctgaaaaaataccacttgaccaaatgcctccagaataaacctaaaatatccgagctcgctcgaaatatcccgagcagatctttttcatgcaaggacctccaacctgtaaaacaggagaacgaaaaacctctccccgagaatatggacgccttcgagaaagtgcggaccaaactagagactcagcctcaagaagagtatgagattatcaacgtcgaagtgaaacatggaggctttgtgtactaccaggagggttgttgtctggtgagatctaaggacgaagaggcagacaatgacaattacgaagttctgttcaatctggaagagctcaaactggaccagcccttcatcgattgtattcgcgttgcaccggacgaaaaatacgttgcagcaaaaatcagaaccgaggacagtgaggcatctacttgtgtgatcattaagctctctgatcaacctgttatggaagcaagctttcctaacgtgtcctctttcgagtgggtaaaggacgaagaagacgaggacgtcttattttataccttccagcgtaaccttcgttgccacgacgtttacagagccacattcggtgataacaagcggaatgagcggttttatacagagaaggacccctcctacttcgtctttctgtacctcaccaaggactcacgctttctcactattaatattatgaataagactacttctgaggtgtggttgattgatggcctgtctccatgggaccctcctgtcctcatccagaagcgcattcatggtgtcttatattacgtggagcatcgtgacgacgagttatacattctgaccaacgtgggcgagccgacggagttcaaattgatgcggactgccgcagacactcccgcaataatgaactgggatttattcttcacgatgaagagaaatactaaggtgatagatcttgacatgtttaaagaccattgcgtcttgtttctaaagcacagcaacctgctttatgtgaacgtgatcgggctggccgatgactctgtgcggtccctcaagctgccaccttgggcttgcggcttcattatggataccaacagcgatccaaagaattgccccttccagctgtgttctcctatacggccccctaagtattacacttataagttcgccgagggtaagctgtttgaggaaacagggcatgaggaccctatcacgaagaccagccgcgtcctgcgcctagaagccaaatccaaggacggtaaattggtacctatgaccgtctttcataaaactgattcagaagacttgcagaaaaaacctctcttagtccacgtatatggagcttatggaatggacctgaagatgaattttcggccggaaagacgcgtgctcgttgacgatggatggattttagcttactgccatgtgaggggaggaggggagctcggcctccagtggcatgccgacggtagattaacaaaaaaactgaatggcctggcagaccttgaagcttgtatcaaaactctgcacggccagggcttctcccagccctcattaactacccttacagcttttagcgcaggtggagtactggcaggcgccttgtgcaattccaacccagaactggtgcgagcagtgacactcgaagctcccttcctagacgtgctcaacaccatgatggataccactctgcccctaaccctagaggagctggaagagtggggaaacccttcgtccgacgagaaacacaaaaactacatcaagcgttattgtccgtatcagaacattaagccacaacactatccttccatacatattacagcatatgaaaacgacgaacgagtaccgctgaaaggaatagtgtcatatactgagaaattgaaggaagccattgccgaacacgccaaagatacaggagaaggataccagactccaaatatcattctggatatacagccaggcggtaaccatgtgatcgaagattctcacaaaaagatcaccgcacagattaaatttctgtatgaggaactcggcctggatagcacatccgtttttgaagacctcaagaaatacctcaaattttag

SEQ ID NO: 327637 - DNA, 2184 bp, Artificial Sequence
  derived and/or modified sequence
atgcagcagaagaccaagctgttcctgcaggccctgaagtacagcatacctcacctcggaaagtgcatgcagaaacaacacctgaatcattacaattttgctgaccactgctataaccgcattaagcttaaaaagtaccacctcaccaagtgcttgcagaataaaccgaagatttccgagctggccagaaatattccatctcgctctttcagttgtaaggacctccaacccgttaagcaagaaaacgagaaacccttaccggagaatatggacgcctttgagaaggtgagaaccaaattagagacgcagcctcaggaggaatacgagatcatcaatgtagaagtcaagcatggcggcttcgtttattaccaagaaggatgttgcctcgtcaggagtaaagacgaagaggccgacaatgacaactacgaggttctatttaacctggaggagctcaagttagaccagccgttcattgattgcatcagggtcgctccggatgagaagtacgtggccgctaagatcagaaccgaagattctgaggccagcacatgcgttattattaaactcagcgaccaacctgtgatggaagcttccttccctaacgtcagctcgtttgagtgggttaaggatgaagaggacgaggacgtgctattttacactttccagaggaacctcagatgtcacgacgtgtacagagctacctttggagacaacaagaggaatgagcggttttacacggagaaagaccctagctacttcgtatttctttacctgactaaggattccagattcctgaccatcaacatcatgaacaaaaccacatccgaggtctggttaatcgatggactgtcaccttgggatcctccagttctgatccagaagcgaattcacggggtgctgtattatgtcgagcacagagatgatgagctctatatcttaactaatgtgggggagcccacagaatttaagctgatgcgaactgctgcggatacccccgccattatgaactgggatttgttcttcacaatgaagagaaacacgaaggtgatcgatctggacatgttcaaggaccactgtgtgctttttctgaaacattctaatcttctatacgtgaatgtgatcggcctggcagacgacagcgtacgttctctgaaattgcctccttgggcctgtggctttatcatggacacaaactctgaccccaaaaattgtcctttccagttgtgcagccctatacgccctccgaagtattatacctataagtttgcagagggcaagttgttcgaggaaacaggtcatgaagatcctataaccaagactagccgcgtcctcagactggaggccaagagcaaggatggcaaactagtgcccatgacagtgttccataaaaccgactcagaggatctgcagaagaagcctctcctagtccacgtatacggggcttatggaatggacctgaagatgaacttcaggcctgaaagacgggtcttggtagacgacggatggattttagcttactgtcacgtccgtggggggggggagttagggcttcaatggcacgccgacggcagactgactaaaaaattaaacggcctagctgacttagaggcctgtatcaagacactgcacggccagggcttttcccagccatccctgacaaccttgacagcatttagcgcgggtggcgtgctggctggtgccctgtgcaactcaaatcccgaattagtaagagcagtgacgttagaggcaccttttctcgacgtcctgaacacaatgatggatacaactttacccctgaccctcgaggagctggaggagtggggcaatccatccagcgatgagaagcacaagaattatatcaagcgttattgcccataccagaatatcaaaccgcaacattatccatccatacacatcacagcatacgagaacgatgaaagagtgccactgaaaggcatcgtgtcctacaccgagaaactgaaagaagcaatagctgagcatgctaaggataccggagaaggatatcagactcctaatattattcttgacatccagccaggcgggaatcacgtgatcgaggattctcataagaagataaccgcacagatcaaattcctgtacgaggagctaggcctggacagtacctcagtgttcgaggatttgaaaaagtacctgaagttttag

SEQ ID NO: 327638 - DNA, 2184 bp, Artificial Sequence
  derived and/or modified sequence
atgcagcagaagaccaagctgttcctgcaggccctgaagtacagcattccacaccttgggaaatgtatgcaaaagcagcacctgaaccattataactttgctgatcactgttataaccgcatcaagctgaaaaagtaccatttgacaaagtgcctgcagaataagcccaaaatcagcgagcttgcaaggaacatcccatctcggagtttttcgtgcaaggatctgcagccagttaagcaggagaatgagaagcccctgcctgaaaatatggacgcttttgagaaggtgcgaactaagctggaaactcagccccaggaggaatatgagatcatcaacgtggaagtgaagcacgggggattcgtatactaccaggagggttgctgtttggtcaggtccaaagatgaggaggcagacaacgacaactacgaggttctgtttaatctggaagagctcaaactggaccagcccttcattgattgcatacgtgtggcaccagacgaaaaatatgtagcggcaaaaatcagaaccgaagactccgaggcatctacctgtgtcattattaaactgtctgaccagcctgtgatggaggcctcttttcccaacgtatctagtttcgagtgggtgaaggatgaagaggacgaagacgttctgttctacactttccaaagaaacctccgatgtcacgacgtgtatagagcaaccttcggagataacaagagaaatgaacgcttctatacggaaaaagatccaagttactttgttttcctttacctgacaaaagactcccgctttctgaccattaacattatgaacaaaacaacctcagaagtttggttaattgatggactatccccttgggacccgcctgtgcttattcagaagaggattcacggagtgctgtattatgtggagcatcgagatgacgagttatatatcctgacgaacgtgggagagccaactgagttcaagctgatgagaaccgcagcggatacccctgctattatgaattgggatttgttttttacaatgaagaggaatacaaaggtcatcgacctcgacatgttcaaggaccattgtgttctgttcttgaaacattccaaccttttgtacgtcaacgtaatcggcttggctgatgacagtgttagatcactgaagctgccaccgtgggcttgcggtttcatcatggacactaattccgacccgaaaaattgccccttccagctctgttcgcctattagaccaccaaaatattacacttacaaattcgcagaagggaagctttttgaggagactggccacgaggaccctatcacaaagactagcagagtgctccggctcgaggcaaagtcaaaagacggaaagctagtgcccatgactgtgtttcataaaactgattccgaggacctgcagaagaagccattgctcgtgcatgtgtacggcgcatacgggatggatttaaagatgaacttccgcccggagaggcgggtgctcgtggatgacggatggatcctcgcctactgccacgtccgcggtggcggcgagcttggactccagtggcacgcggatggcagactgactaaaaagcttaatggcctggcagatctggaggcctgcatcaagactctgcacggacagggattttcgcagcctagcctgaccactctcactgccttcagcgctggaggtgtcctagccggtgcactgtgcaacagtaacccggaactggtgagagcggtaacgctggaagccccctttttggatgtgctaaataccatgatggacacaactctgcctcttaccctggaagaactggaggagtggggtaacccatcttccgacgaaaaacacaagaattatattaaaaggtactgcccgtaccaaaatataaaaccccagcactacccctccatccatatcaccgcttacgagaacgacgaacgggtaccactcaagggcatcgtttcttataccgagaagcttaaagaggcgattgcggagcacgccaaggatacgggcgaaggctatcagacccccaatataattctcgatatccaacctggggggaatcatgtcattgaagacagccacaaaaaaatcacagctcagattaagttcctgtacgaagaactggggttagacagtacttccgttttcgaggatctcaagaagtacctgaaattctag

SEQ ID NO: 327639 - DNA, 2184 bp, Artificial Sequence
  derived and/or modified sequence
atgcagcagaagaccaagctgttcctgcaggccctgaagtacagcatccctcacttaggcaagtgcatgcagaagcagcatttgaaccactacaatttcgctgatcattgttataatagaatcaagctcaagaagtaccacttaaccaaatgtctgcagaacaaacctaagatttcagaattggcaagaaatattcccagcaggagcttcagttgcaaggacctccagcccgtgaaacaggagaacgagaaaccgctccccgagaacatggatgcttttgaaaaggtaaggaccaagcttgagacccagccgcaggaagaatatgaaatcataaatgttgaggtgaaacacggagggttcgtctattaccaggagggttgttgcctggtgaggagtaaagacgaagaggccgataatgataactacgaagttctgtttaatctcgaggaactgaaactggatcaacccttcatagactgcattcgggtggcaccagatgaaaagtatgttgcagcaaagatcaggactgaagacagcgaggccagtacttgcgtgattatcaagctcagcgaccagccagtgatggaagcttcttttcccaatgtatcctcttttgaatgggttaaggatgaggaagacgaagacgtgctgttctacacctttcaaagaaacttaagatgtcatgatgtgtaccgagctactttcggggataataagagaaatgagcggttctacacagagaaggaccctagttacttcgtgttcctgtatctaactaaagacagccggttcctcaccattaatatcatgaataagaccacatcggaggtttggctgattgacgggctgagtccctgggacccccctgtcctgatccagaaaaggattcacggggtgctctattatgtggagcatcgtgacgatgagctgtatattttaactaacgtgggggaacctaccgagttcaaacttatgcgaacagccgccgatactccggctattatgaactgggaccttttcttcactatgaagcgaaatacaaaggtgatcgaccttgacatgtttaaggaccattgtgtgctgtttctgaaacacagcaatctgttatatgtaaacgtcatcggactagctgacgactctgtgagaagccttaagctgccaccgtgggcctgcggcttcatcatggacacaaactccgatcccaaaaactgcccttttcagctctgttcaccgatccgaccccctaaatactacacctacaagttcgctgaaggcaagctatttgaggagaccggtcacgaggaccctattaccaagaccagtcgcgtactgcgcctggaggctaagtcgaaggatgggaaattagtgccaatgacagttttccataagaccgactctgaagatctgcagaagaagccactcttggtccatgtctatggagcctatgggatggatctgaaaatgaattttagacctgaacgcagagtgctcgtagacgacggatggattctggcctattgtcacgtgcgggggggcggcgagctggggttgcagtggcatgcagacgggcgacttacaaagaagctgaatggccttgccgatctagaagcttgcatcaagacactccatgggcagggattttcacagcccagcctgactacactcaccgctttcagcgccggaggcgttctggccggggctttgtgcaacagcaaccccgaactggtacgagctgtcaccctggaagctccctttctagatgtgctgaacaccatgatggacacaactctgccgctcactctggaggagctagaggagtggggcaatcctagctctgacgagaagcacaagaattacattaaacgctattgcccttatcagaacataaaaccacagcattacccctctatccatatcaccgcatatgaaaacgacgagcgggttccattgaagggcatagtgtcttacactgaaaagctgaaggaagctatcgcggaacacgccaaggataccggggaaggatatcagactccaaacataatcttagacatccagcctgggggaaaccacgtgatcgaggactcgcataagaaaattacagcgcagatcaaatttctatacgaagaactgggactcgactccacctctgtgtttgaggatcttaagaagtacctgaagttctag

SEQ ID NO: 327640 - DNA, 2184 bp, Artificial Sequence
  derived and/or modified sequence
atgcagcaaaaaacaaagcttttcctacaagccttgaagtattccatcccgcatctcggcaagtgcatgcagaaacagcatctgaaccactataacttcgccgaccactgctataatcggatcaaactgaagaagtaccatttaaccaaatgtctgcagaataaaccaaagattagcgagctggctagaaacattcccagtaggtcattctcgtgtaaggatttgcagcctgtaaagcaggaaaatgaaaaacccttgcctgagaacatggacgcctttgagaaggtccgcaccaagcttgagacacagccacaggaagaatacgaaatcattaacgtggaggtaaagcacggaggatttgtctattatcaggagggctgctgcctcgttcgttccaaggatgaggaggccgataatgacaactatgaagtgcttttcaatctggaagagctgaagctggaccaacccttcattgactgcatacgagtggccccagatgagaaatatgtggcagccaaaatcagaaccgaggacagcgaagcttccacttgcgtgataattaaacttagcgaccagcctgtgatggaggcctcattccccaacgtctcctcatttgaatgggtgaaggacgaggaggacgaagacgttttattctacacctttcagaggaacctcagatgtcacgatgtatatcgggctactttcggcgacaataagcgcaatgaacgcttttacaccgaaaaggatccttcctactttgtctttctgtatcttactaaagatagtcggtttctgaccattaacattatgaacaaaactacctcagaggtttggctcattgacggcttatccccctgggatccccctgtcctgattcaaaaacgaattcatggagtcttatattacgtggaacacagagatgatgagctgtacatcctgaccaacgttggtgagccaactgaatttaagttgatgcggaccgcggcagacacccctgctatcatgaattgggaccttttctttactatgaagcggaacactaaagttatagatttggacatgttcaaggatcattgtgtccttttcttgaagcacagtaacctcctgtatgtcaacgtcatcgggctcgctgatgactctgtgcgctcactgaaactgcccccttgggcctgtggctttatcatggataccaattccgacccaaaaaactgtccatttcagctgtgttcgccaatccgtcccccaaaatattatacgtataagttcgctgagggcaagctgtttgaagaaacagggcacgaagaccctattacaaaaacgtctagagtgctgagacttgaagccaaatccaaggacgggaaactcgtgcccatgaccgtcttccacaaaacggacagcgaagacttgcagaagaaacccctgctggtgcacgtgtacggagcctacggcatggatctcaagatgaattttcggcctgaacgacgcgtgcttgtggacgacggttggatccttgcctactgccacgttcgcggaggcggagaactgggccttcagtggcacgctgacggtcgtttaaccaagaagttgaatggtctagccgatctcgaagcctgcatcaaaaccctgcacggacagggattctctcagccctcgctaacaaccctgacagctttctcggccggaggggtgctggccggagccttgtgcaacagcaatcctgagcttgtccgcgcagtgactctggaggcccctttcctagatgttctgaatactatgatggatacaactctgccactcaccctggaagagctggaggagtggggaaacccctctagtgatgaaaagcataagaattacattaagagatactgtccatatcagaatattaaacctcagcactatccttccatccatattaccgcctacgagaacgacgaacgggtgccccttaagggcattgtgagctacactgaaaaactgaaggaggcgattgcggaacatgcaaaggatacaggagaggggtatcaaacgccaaatataatactcgacatccagcccggaggtaaccatgtaatcgaggactcgcacaaaaagataacagctcagatcaagtttctgtatgaagagttaggtctggattctacgtccgtgtttgaagatctgaaaaagtatctgaagttttag

SEQ ID NO: 327641 - DNA, 2184 bp, Artificial Sequence
  derived and/or modified sequence
atgcagcagaaaactaaactgtttctccaagctctgaagtactccataccacatctaggcaaatgcatgcagaagcagcaccttaatcattacaatttcgcagaccactgctataaccgcattaaactgaaaaagtaccatctgactaaatgtttgcagaataagcccaagatctctgaattggcacggaacatcccctcaagaagtttctcctgcaaggaccttcaacccgtaaagcaggaaaacgagaaacccctgcccgagaatatggatgcctttgagaaagtaaggaccaagctggaaacgcaaccacaggaagagtacgagatcataaatgttgaagtaaaacatggaggattcgtttattaccaggaaggttgctgtctggtcaggtcaaaggatgaagaagcagacaacgacaactacgaggttctatttaatctggaggagctgaagctggatcagccctttattgactgtatcagagtggccccagatgagaagtacgtagctgctaaaatccgcacggaggactccgaagctagtacatgtgtgattatcaagctgagtgatcagccagttatggaggctagctttcctaacgtgtcttcttttgagtgggtgaaagacgaagaagacgaggacgttctcttctacacattccagaggaatctcagatgccatgacgtgtaccgcgctaccttcggcgacaacaagagaaacgagcgtttttacactgaaaaggatccgagctactttgtgttcttatatctgacgaaggattccagattccttactatcaacattatgaacaaaaccacgtctgaggtgtggctcattgacggcctgagcccctgggatccccctgtgctcatccaaaaaagaatacacggcgtgttatattacgtggagcaccgggacgacgagctgtatatactgactaacgtcggtgaaccgaccgaattcaagttgatgcgtaccgctgccgacacacccgcaataatgaactgggacctcttctttaccatgaagaggaacacaaaggtgatagacctggacatgttcaaagatcattgtgtcctcttcctaaaacactcgaatctcctgtacgtcaacgtgatcggtctcgcagatgatagcgttcgctcactcaagctccccccatgggcgtgcggatttatcatggatacaaattctgatccaaagaattgtcctttccagctgtgttccccaattcggccaccgaaatactatacttataagttcgccgagggcaagctctttgaggagacgggccacgaggatcccattaccaaaacgagccgcgtgctgcgtctggaagccaaaagcaaggatggtaagttggttcctatgacagtgtttcacaagaccgacagtgaagacctccagaagaagccactgttggtgcacgtgtatggagcgtatggcatggacttgaagatgaacttccgaccagagaggcgcgtactggtggacgacggctggatactggcatactgccatgtaagaggcggaggtgagcttggccttcagtggcacgctgatgggcgtttgaccaaaaagctgaatggtctggcagatctggaagcatgtattaaaactctgcacgggcaggggttctctcaaccatctctgaccaccttaaccgccttcagcgcgggaggggtccttgcaggagccttgtgcaactccaatccggagttagtgagagccgtaactcttgaagcaccttttctcgacgtgttgaacactatgatggataccacactgccgctaaccctcgaggaactcgaggagtggggcaaccccagcagtgacgaaaagcataaaaattacattaagcgatattgcccctaccaaaatataaaacctcaacactacccatctattcacattactgcctacgagaatgacgaacgtgtgcctcttaaggggattgtgagctacactgaaaagttaaaagaagcaatcgccgaacatgccaaggatacgggtgaggggtaccaaaccccaaatatcattctggatattcagcctggcggtaaccatgttattgaggattcccacaagaaaattaccgctcaaataaaattcctgtacgaagaactgggtttagattccacaagcgtgttcgaggatttaaagaagtatctcaaattctag

SEQ ID NO: 327642 - DNA, 2184 bp, Artificial Sequence
  derived and/or modified sequence
atgcaacagaagacaaagctgttcctacaggctctgaaatacagcatcccgcacctgggcaaatgtatgcagaagcagcatctgaatcactataactttgccgaccactgctacaaccgtattaaactgaaaaaatatcacctgaccaagtgcttgcagaataaaccaaaaataagcgaactggcccgtaacattccttctcgctcattttcctgtaaggatctgcagccagtcaaacaggaaaatgagaagcctctgcctgagaatatggatgcctttgaaaaagtgcggacaaagctggagactcagcctcaggaagaatacgagattattaacgtcgaggtgaaacatggcggatttgtgtactaccaagagggttgctgccttgtaaggagtaaggacgaggaggcagataatgacaactacgaagtcttgttcaacctggaagagctgaagttggatcagccctttattgattgcatacgtgtggctcccgacgaaaagtatgtagctgctaaaatccggacagaggactccgaggcttcgacgtgcgtaattatcaaactgagtgaccagcctgtcatggaggcgtccttccccaacgtgtcttcctttgagtgggtaaaagatgaggaggacgaggatgtgctgttctacacctttcaacgtaatctccgatgtcacgatgtgtatagagctacttttggggacaataagcggaatgagaggttttacacagaaaaagacccctcttacttcgtctttttgtatttgacaaaggacagtcggttccttaccattaatatcatgaataaaactacaagcgaggtttggttgatcgacgggctcagcccgtgggacccacctgtcctgatccagaaacggatccatggtgtcctctactacgtcgagcatcgggatgatgagctctacattcttactaatgtcggcgagcctaccgagtttaagctaatgcgcacggcagccgatactcccgctataatgaactgggatctgttctttaccatgaagaggaatactaaggttatcgacctggacatgtttaaagatcattgtgtacttttcctgaaacactctaatctcctgtacgtcaacgtaatcggtctggctgatgactcagtccgaagcctgaaattgcctccctgggcttgcggtttcatcatggatactaacagcgaccctaaaaactgcccatttcagctctgttcaccaattaggcctccaaaatactacacctataaattcgccgagggcaagcttttcgaggaaacaggacatgaggacccaattacaaagacatctcgcgttctgcggctcgaagcaaagagcaaagacggtaagctcgttcctatgaccgtgttccacaaaaccgacagcgaggacttacagaaaaagcctctcttggttcatgtttacggcgcttacgggatggaccttaaaatgaactttcgaccagagaggcgagtcctcgttgacgacggttggattctcgcatattgccacgttcgcggaggaggcgagctgggcctccagtggcacgctgacgggagactcacgaagaagcttaacgggctggcagacttggaggcgtgtattaagaccttgcacgggcaggggtttagccaaccctctctgacgaccctgacagccttcagcgctggcggtgtgttggcaggcgcactctgtaactctaaccctgaactcgtgagggccgtcaccctggaggctccattcctggacgtactcaatactatgatggataccacattaccactaacgctggaagaacttgaagagtggggcaacccctcatccgacgagaagcacaagaattacattaagcgctactgcccataccaaaacatcaaaccccagcactatcccagcatccacataacagcctatgaaaacgatgaaagagtgcctcttaaaggtatcgtgagttacacagagaaactcaaagaagctattgcagagcacgcaaaggacacaggagaagggtaccagacccctaatataattcttgacatccaaccgggagggaaccatgtgatcgaagattcgcacaagaaaattaccgcccagatcaagtttctttatgaagaacttggtctggactccacttccgtttttgaggacttgaaaaaatatttgaagttttag

SEQ ID NO: 327643 - DNA, 2184 bp, Artificial Sequence
  derived and/or modified sequence
atgcagcagaagaccaaactgttcctacaggctctgaagtacagcatcccacatctgggcaagtgtatgcagaaacagcacctcaatcactacaacttcgcagatcactgttacaaccgaattaagctaaagaagtaccacctcactaaatgcctgcagaacaagcctaaaataagcgagctcgcgcgaaacataccatctaggtccttctcctgtaaagacctgcagcccgtgaagcaggagaacgaaaaacctcttccagaaaatatggatgcttttgaaaaggtcaggactaagctggagacacagccacaagaagaatatgagataatcaatgtcgaggtgaagcacggcggattcgtgtattaccaggagggctgctgtctagtgcggtccaaggatgaggaggccgataacgataactacgaagttctttttaatctggaggagctaaagctcgaccaacccttcattgattgtatcagggtggcaccggatgaaaaatatgtggccgcaaagatccggaccgaggattcggaggcatcgacatgcgtgattatcaagttaagcgatcagcctgttatggaggcatccttccccaatgtgtccagcttcgaatgggtgaaagatgaagaggatgaggatgttctgttctacactttccagcggaatctccggtgccacgatgtctaccgagccacttttggggacaacaaacgtaatgaacggttttatacagaaaaggacccatcctatttcgtattcctgtacttgactaaggacagcagattcctgacaatcaatattatgaataagactacctctgaagtgtggctaattgacggactgtcaccctgggaccctccggtcctgatacaaaagcgtattcacggggtgctgtactacgtggaacaccgcgatgatgagctgtacattctgacaaacgtcggggagcccacagaatttaagttaatgcggacagccgctgacacacccgcaattatgaattgggatctgttcttcacgatgaagcgtaatacaaaggtgatagatctggatatgttcaaggatcattgtgtactcttcctcaagcactccaatttgctgtatgtaaatgtgatcggcctagctgacgacagtgtgcgatccctcaagcttcccccttgggcttgtggttttatcatggataccaatagtgatccaaaaaactgccccttccagctgtgctctcctatccggcctcctaaatactacacctacaagtttgccgagggcaagctgttcgaagagacaggtcacgaggatccaataactaaaacctccagagtgctccgtctcgaggcgaaaagtaaagatgggaaactagtgcctatgacggtatttcacaaaacagatagcgaggatctacagaaaaagcctcttctggtccatgtgtacggagcatatggcatggacttaaagatgaactttcggccagagcgtagggtgcttgtggatgatggctggatactcgcatattgtcatgttcgaggcggtggggaactagggcttcagtggcatgcagacggacgactcacgaagaagctgaacgggctggcggatcttgaggcctgtattaagacccttcatggccagggtttctctcagcctagtttaaccacactcacagcattctcagccggtggcgtactggccggagccctttgcaacagtaaccccgagctggtacgggctgtaacactggaggccccttttctggatgtgttgaatacaatgatggacactacactgccacttactcttgaggaattggaagagtggggaaacccaagttccgatgagaagcataagaattatatcaaacgctattgcccctatcaaaatataaaaccccagcactacccctccatacacatcactgcatacgagaacgatgagcgagtcccattgaagggcatagttagttatacagagaaactgaaagaggctatcgccgagcacgcaaaagataccggtgagggctatcagactccaaacataatccttgatatccagcctggcggaaaccacgtgattgaagacagccataagaagattaccgcccagatcaaatttctttacgaggagcttgggttggatagcacatccgtgtttgaggacctaaagaagtacctgaagttttag

SEQ ID NO: 327644 - DNA, 2184 bp, Artificial Sequence
  derived and/or modified sequence
atgcagcagaaaaccaaactttttctgcaggccctgaaatactctatcccgcacctgggcaagtgtatgcaaaagcagcatctgaatcattacaacttcgctgatcactgctacaatagaatcaagctcaagaagtaccacctgactaaatgtctgcagaacaaacccaagatttccgagctcgcaagaaatattccgtcacggtcctttagctgcaaagatctgcagcctgtgaaacaagaaaacgaaaagcccttgcccgaaaacatggatgcctttgagaaggtccggaccaagttagaaacacagccgcaggaagaatatgagattatcaatgtggaagtgaagcacggcggattcgtgtattaccaagagggatgctgcctcgtgcgatctaaggacgaagaagctgataacgacaattacgaggtcctgtttaacctggaagaacttaagttggatcaaccttttatagactgcatcagagtagccccagatgagaagtacgtggccgcaaaaatccggactgaagactcagaggcctctacctgcgttattattaagctcagcgaccagccagtgatggaggcctcattcccgaatgtatctagttttgagtgggtgaaagacgaggaggacgaggacgttctgttttacaccttccagcggaacctgaggtgccacgacgtgtaccgagctacctttggcgataacaagagaaatgagcggttttataccgaaaaagacccttcctattttgtttttttatacctcaccaaggacagtcggtttttaaccattaacatcatgaataaaacaacatcggaggtctggctgattgacgggctgtccccttgggaccctcccgtgctcatacagaaacgaatccatggtgtcctgtattatgtggaacatcgggatgatgagctgtacatcttgacaaacgtcggcgagccaaccgagtttaaactgatgcgcacagcagcggacacaccagcaattatgaactgggatctcttcttcactatgaagagaaacactaaagtgatagacctcgacatgttcaaagaccattgcgtgctttttctcaagcattctaacctcttgtatgttaacgtcattgggctggctgacgacagcgttcgcagcctgaaactgcccccatgggcatgtggctttattatggacactaatagcgatcctaaaaattgcccgttccaattatgcagccctatacggcctccaaaatattacacttacaaatttgcggagggcaaactcttcgaagaaactggacatgaggacccaattacaaagacatcaagggtattgaggctcgaggctaaatctaaagatggcaaactcgtgccaatgacagtgtttcacaagaccgattctgaagatctgcagaagaagccactcctggtccatgtttatggcgcatacggcatggatcttaagatgaatttcaggcccgaaaggagggtgcttgtggatgatggctggattctcgcatattgccatgtgcgtggcggaggagagctgggcttgcaatggcatgctgacggcaggctcacaaaaaagcttaatggcttggccgatctggaggcgtgcattaaaaccttgcacggtcaagggttttcacaaccaagtctcacgacattaacagcctttagtgcaggcggagtgctagcaggggctctttgtaactcaaacccagaattagtccgcgctgttaccctcgaggccccatttctagacgtgttgaatacaatgatggacacgactctgcctctaaccttagaagaactcgaggagtggggcaacccatccagtgacgagaagcataaaaactatatcaagcgttactgcccatatcagaatatcaaaccccagcactatccttcaattcacatcaccgcatatgagaatgatgagcgggttccactgaaaggtattgtgtcctacactgagaaactgaaagaagcaattgctgagcacgctaaggatactggcgaggggtaccaaacacctaatatcatactggatatccaaccaggcggaaatcacgtgatcgaggatagccacaagaagatcaccgctcaaattaagttcctctacgaagaattgggcttggatagtacctccgtcttcgaagatctaaagaagtatctgaaattttag

SEQ ID NO: 327645 - DNA, 2184 bp, Artificial Sequence
  derived and/or modified sequence
atgcagcaaaagaccaagctctttctgcaggcattgaaatatagtatcccacatcttggcaagtgcatgcagaagcagcacctgaatcactataacttcgcagaccattgttacaaccgaattaaactgaagaagtatcacttaaccaagtgcctgcagaataagccgaagatcagcgaactcgcgagaaatataccaagccgtagcttctcctgtaaagaccttcagcccgtgaagcaagaaaatgaaaagccactgcctgaaaacatggacgcctttgagaaggtgcggaccaaactagaaacgcagccccaagaggagtatgaaataattaacgtggaggtgaaacatggtggattcgtctactaccaggaaggatgttgcctggtgcgatcaaaggacgaagaggccgataacgataactacgaagtcctcttcaatctcgaagagctcaagctggaccagccctttatagactgcatccgcgtcgcccctgatgaaaagtacgtcgccgctaagattagaacggaggactctgaggctagcacatgcgtaattatcaaattgtccgatcagccagtgatggaagcttcttttccaaacgtatctagctttgagtgggttaaggacgaagaagatgaggacgtgctcttttacactttccagagaaatcttaggtgtcacgacgtttaccgtgcaacatttggtgataacaagagaaatgagcgcttctataccgagaaagatccttcatacttcgtttttttatacctgaccaaggacagtcgatttctaacaataaacatcatgaacaagaccacaagcgaagtctggttaatcgacggtctctcaccttgggaccccccagttctcattcaaaagagaatccatggcgtgctctattacgtggagcatagagacgatgagctgtacatcttgaccaacgtgggtgaacccactgagttcaaactgatgagaaccgcagccgacacacctgccattatgaattgggacttgttcttcacaatgaagagaaataccaaagtcattgacctcgacatgttcaaggaccattgcgtcttatttctgaaacacagcaacttactttatgttaacgtaattgggctggcagatgactccgttagatccttaaagctgccaccttgggcttgcgggtttatcatggataccaattccgatccgaaaaattgcccattccaactgtgttccccgatccgacctcccaaatattacacctacaagttcgccgaggggaaactgtttgaggaaactgggcatgaagaccctatcactaagacctcccgggtcctgcgtcttgaagcgaagtcaaaagatggaaaactggtccccatgacggtgttccataagactgactcggaggacttgcagaagaagcccctgctcgtccacgtctatggtgcctacggcatggaccttaaaatgaatttcagaccggaacgccgagttctcgtggacgacggctggatcctggcatactgtcacgtgcgcggaggcggagagctcggcctgcaatggcacgccgatggaaggttgaccaagaagttgaacggcctcgcagacctggaggcctgcatcaagactctgcatggtcagggcttttcccagcctagcttaacaactctcaccgcgttctctgccggaggggtgttggcaggcgctctttgcaactcgaatccagaacttgtcagagcggtaacgctggaggctcccttcctcgatgtcctgaacaccatgatggacaccacactcccattgacactggaggagctggaagagtggggaaacccttcatccgacgaaaaacacaaaaattacattaaaaggtactgtccttatcaaaatatcaaaccacagcactacccctctatccatattacagcctacgaaaacgatgagcgggtccctttaaagggcatagtgtcttatactgaaaaactgaaagaagctattgccgaacatgctaaggatactggcgaaggatatcagaccccaaacatcatcttggatattcagccaggtggaaaccacgtgattgaggactctcacaagaagattaccgcgcagatcaaatttctctatgaggagctgggactcgactccacttccgttttcgaggacctgaaaaagtatctgaaattttag

SEQ ID NO: 327646 - DNA, 3672 bp, Artificial Sequence
  derived and/or modified sequence
gaagaaactgaggcccggagacacagttaagtgtaggagctaagacctcaacccaggtctctctgactcttaactacttattagcaatcaaggttaataaaagctacctcctgacaaaccagagatggccttacattttatttgtgcatcttgcaggggttttttgttgtttttaattaaagcgctaaatacctttttaacattaaaaatccgaagttgagtatgtccagtatttggaaccgaaccaaattggattttttgctatacagcttactgtacaagtgacctggaacagttgcttagaacctcccacagccacagtttggcaacctgtaaaatgtgcatggtaatatctactttattaagtccatataaaatttaaattagacaaacaagataaaagcacctggcagttagttaacactcaacaataattaatcttccctcccccacctttattaaataattaggcttttccagtttatcttccacatatataccaaagatacgttcataattatgtaagaccaaagggctttttaccttttacagccctgagttcctgagataccccattaagtctgtgtacttatttgcaaatttatattttgtttcttgttttgttttttgttttagtttaacccctatgtgtgccagagtcagtgctgcatagtttgagcctgataggattaactttacaaatgagacatttaagtcacatctgccaagaattatgatttgaatgaaactttaacttacacaggtttttagatttagttagcctaagttatcagctgtctgaagttattcataacctaagtggggcatggccctgaaaaggagggatgagaactgctgatcttagttactctgagaacccactactctgtaatcatacctataaaatcattcgtgtgctggcagccccaaaaggagcataaaccagggactttgatatcatgcagcagaagaccaaattatttctccaagctttgaagtatagtattcctcaccttggaaaatgcatgcagaaacagcatttgaatcactataacttcgctgatcattgttacaatagaataaaattgaaaaaatatcacctaaccaagtgtcttcagaataaacccaagatatcagagttagcaagaaacatcccaagtcggagcttctcatgtaaggatcttcagcctgttaaacaagaaaacgaaaaaccccttccagaaaacatggatgcatttgaaaaagtgagaacaaaattagaaacacagccacaagaagaatatgaaatcatcaatgtggaagttaaacatggtggttttgtttattaccaagaaggttgttgcttggttcgttccaaagatgaagaagcagacaatgataattatgaagttttattcaatttggaggaacttaagttagaccagcccttcattgattgtatcagagttgctccagatgaaaaatatgtggctgccaagataagaactgaagattctgaagcatctacctgtgtaattataaagctcagcgatcagcccgtaatggaagcttctttcccgaatgtgtccagttttgaatgggtaaaggacgaggaagatgaagatgttttattctacaccttccagaggaaccttcgctgtcatgacgtatatcgagccacttttggtgataacaaacgtaatgaacgcttttacacagaaaaagacccaagctactttgttttcctttatcttacaaaagacagtcgtttcctcaccataaatattatgaacaagactacttctgaagtgtggttgatagatggcctgagcccttgggacccaccagtacttatccagaagcgaatacatggggtcctttactatgttgaacacagagatgatgaattatacattctcactaatgttggagaacctacagaatttaagctaatgagaacagcggctgatacccctgcaattatgaattgggatttattttttacaatgaagagaaatacaaaagtgatagacttggacatgtttaaggatcactgtgttctatttctgaagcacagcaatctcctttatgttaatgtgattggtctggctgatgattcagttcggtctctaaagctccctccttgggcctgtggattcataatggatacaaattctgacccaaagaactgcccctttcaactttgctctccaatacgtcccccaaaatattacacatacaagtttgcagaaggcaaactgtttgaggaaactgggcatgaagacccaatcacaaagactagtcgcgttttacgtctagaagccaaaagcaaggatggaaaattagtgccaatgactgttttccacaaaactgactctgaggacttgcagaagaaacctctcttggtacatgtatatggagcttatggaatggatttgaaaatgaatttcaggcctgagaggcgggtcctggtggatgatggatggatattagcatactgccatgttcgaggtggtggtgagttaggcctccagtggcacgctgatggccgcctaactaaaaaactcaatggccttgctgatttagaggcttgcattaagacgcttcatggccaaggcttttctcagccaagtctaacaaccctgactgctttcagtgctggaggggtgcttgcaggagcattgtgtaattctaatccagagctggtgagagcggtgactttggaggcacctttcttggatgttctcaacaccatgatggacactacacttcctctgacattagaagaattagaagaatgggggaatccttcatctgatgaaaaacacaagaactacataaaacgttactgtccctatcaaaatattaaacctcagcattatccttcaattcacataacggcatatgaaaacgatgaacgggtacctctgaaaggaattgtaagttatactgagaaactcaaggaagccatcgcggagcatgctaaggacacaggtgaaggctatcagacccctaatattattctagatattcagcctggaggcaatcatgtaattgaggattctcacaaaaagattacagcccaaattaaattcctgtacgaggaacttggacttgacagcaccagtgttttcgaggatcttaagaaatacctgaaattctgaaacactgcattcaactgggaattggaaacacactgaaatatttcatagtcttacttccaattgagttagcaaaaaaaaaattaataacttgagacttttaagttattaattttttaaaatgtgcttctccatctaaattttgcttagtctacatctcacttgcttatactattctctccattgatgcacatgcccattaacctaggaaagtaattttcaaatcatgctccttagaaggatgtggagtagagggaagggaaggattggtgatagcagagctccaggcctcccttccagtcagaacagttgagcagtttacaaattagtgtcctgcctctttgctagcaaatgcttttagacactgtggcagtgagtcatcctctaatttctatgactgcattttaagggaaaagataaaattcttccccttaaaattcgttaaagtttttgaataatctggggtcctaatgtgttctggtcatccctgattgatgctatctgaataaagttataagctcctataagccat

SEQ ID NO: 327647 - DNA, 3030 bp, Artificial Sequence
  derived and/or modified sequence
attcttgctggtagccatcttgagtgagggcggaccagaggatgagagagctgtggcagggctactggaacgctgtccctcattgttttagccttctgtgcttcatctcgagctcagaagactagcgaagaacgaaaagtcttatatatttcgagactaaagaacccaggaacccaagaagactccttgaccacaacaaagatggcgaaatctgcctgttgctcgtgctagattgaggttacgtagattggcgtgctgcaaaccagctctaggcggctctggccccaaaaggagcataaaccagggactttgatatcatgcagcagaagaccaaattatttctccaagctttgaagtatagtattcctcaccttggaaaatgcatgcagaaacagcatttgaatcactataacttcgctgatcattgttacaatagaataaaattgaaaaaatatcacctaaccaagtgtcttcagaataaacccaagatatcagagttagcaagaaacatcccaagtcggagcttctcatgtaaggatcttcagcctgttaaacaagaaaacgaaaaaccccttccagaaaacatggatgcatttgaaaaagtgagaacaaaattagaaacacagccacaagaagaatatgaaatcatcaatgtggaagttaaacatggtggttttgtttattaccaagaaggttgttgcttggttcgttccaaagatgaagaagcagacaatgataattatgaagttttattcaatttggaggaacttaagttagaccagcccttcattgattgtatcagagttgctccagatgaaaaatatgtggctgccaagataagaactgaagattctgaagcatctacctgtgtaattataaagctcagcgatcagcccgtaatggaagcttctttcccgaatgtgtccagttttgaatgggtaaaggacgaggaagatgaagatgttttattctacaccttccagaggaaccttcgctgtcatgacgtatatcgagccacttttggtgataacaaacgtaatgaacgcttttacacagaaaaagacccaagctactttgttttcctttatcttacaaaagacagtcgtttcctcaccataaatattatgaacaagactacttctgaagtgtggttgatagatggcctgagcccttgggacccaccagtacttatccagaagcgaatacatggggtcctttactatgttgaacacagagatgatgaattatacattctcactaatgttggagaacctacagaatttaagctaatgagaacagcggctgatacccctgcaattatgaattgggatttattttttacaatgaagagaaatacaaaagtgatagacttggacatgtttaaggatcactgtgttctatttctgaagcacagcaatctcctttatgttaatgtgattggtctggctgatgattcagttcggtctctaaagctccctccttgggcctgtggattcataatggatacaaattctgacccaaagaactgcccctttcaactttgctctccaatacgtcccccaaaatattacacatacaagtttgcagaaggcaaactgtttgaggaaactgggcatgaagacccaatcacaaagactagtcgcgttttacgtctagaagccaaaagcaaggatggaaaattagtgccaatgactgttttccacaaaactgactctgaggacttgcagaagaaacctctcttggtacatgtatatggagcttatggaatggatttgaaaatgaatttcaggcctgagaggcgggtcctggtggatgatggatggatattagcatactgccatgttcgaggtggtggtgagttaggcctccagtggcacgctgatggccgcctaactaaaaaactcaatggccttgctgatttagaggcttgcattaagacgcttcatggccaaggcttttctcagccaagtctaacaaccctgactgctttcagtgctggaggggtgcttgcaggagcattgtgtaattctaatccagagctggtgagagcggtgactttggaggcacctttcttggatgttctcaacaccatgatggacactacacttcctctgacattagaagaattagaagaatgggggaatccttcatctgatgaaaaacacaagaactacataaaacgttactgtccctatcaaaatattaaacctcagcattatccttcaattcacataacggcatatgaaaacgatgaacgggtacctctgaaaggaattgtaagttatactgagaaactcaaggaagccatcgcggagcatgctaaggacacaggtgaaggctatcagacccctaatattattctagatattcagcctggaggcaatcatgtaattgaggattctcacaaaaagattacagcccaaattaaattcctgtacgaggaacttggacttgacagcaccagtgttttcgaggatcttaagaaatacctgaaattctgaaacactgcattcaactgggaattggaaacacactgaaatatttcatagtcttacttccaattgagttagcaaaaaaaaaattaataacttgagacttttaagttattaattttttaaaatgtgcttctccatctaaattttgcttagtctacatctcacttgcttatactattctctccattgatgcacatgcccattaacctaggaaagtaattttcaaatcatgctccttagaaggatgtggagtagagggaagggaaggattggtgatagcagagctccaggcctcccttccagtcagaacagttgagcagtttacaaattagtgtcctgcctctttgctagcaaatgcttttagacactgtggcagtgagtcatcctctaatttctatgactgcattttaagggaaaagataaaattcttccccttaaaattcgttaaagtttttgaataatctggggtcctaatgtgttctggtcatccctgattgatgctatctgaataaagttataagctcctataagccat

SEQ ID NO: 327648 - DNA, 5212 bp, Artificial Sequence
  derived and/or modified sequence
gcagacttcggctggacttgcctgcggtgacacctgctcccctctgagagcttcaggttctccggcctgccttcactggtttgtgtccagagccggactgattctctcaatttgctttaacccctatgtgtgccagagtcagtgctgcatagtttgagcctgataggattaactttacaaatgagacatttaagtcacatctgccaagaattatgatttgaatgaaactttaacttacacaggtttttagatttagttagcctaagttatcagctgtctgaagttattcataacctaagtggggcatggccctgaaaaggagggatgagaactgctgatcttagttactctgagaacccactactctgtaatcatacctataaaatcattcgtgtgctggcagccccaaaaggagcataaaccagggactttgatatcatgcagcagaagaccaaattatttctccaagctttgaagtatagtattcctcaccttggaaaatgcatgcagaaacagcatttgaatcactataacttcgctgatcattgttacaatagaataaaattgaaaaaatatcacctaaccaagtgtcttcagaataaacccaagatatcagagttagcaagaaacatcccaagtcggagcttctcatgtaaggatcttcagcctgttaaacaagaaaacgaaaaaccccttccagaaaacatggatgcatttgaaaaagtgagaacaaaattagaaacacagccacaagaagaatatgaaatcatcaatgtggaagttaaacatggtggttttgtttattaccaagaaggttgttgcttggttcgttccaaagatgaagaagcagacaatgataattatgaagttttattcaatttggaggaacttaagttagaccagcccttcattgattgtatcagagttgctccagatgaaaaatatgtggctgccaagataagaactgaagattctgaagcatctacctgtgtaattataaagctcagcgatcagcccgtaatggaagcttctttcccgaatgtgtccagttttgaatgggtaaaggacgaggaagatgaagatgttttattctacaccttccagaggaaccttcgctgtcatgacgtatatcgagccacttttggtgataacaaacgtaatgaacgcttttacacagaaaaagacccaagctactttgttttcctttatcttacaaaagacagtcgtttcctcaccataaatattatgaacaagactacttctgaagtgtggttgatagatggcctgagcccttgggacccaccagtacttatccagaagcgaatacatggggtcctttactatgttgaacacagagatgatgaattatacattctcactaatgttggagaacctacagaatttaagctaatgagaacagcggctgatacccctgcaattatgaattgggatttattttttacaatgaagagaaatacaaaagtgatagacttggacatgtttaaggatcactgtgttctatttctgaagcacagcaatctcctttatgttaatgtgattggtctggctgatgattcagttcggtctctaaagctccctccttgggcctgtggattcataatggatacaaattctgacccaaagaactgcccctttcaactttgctctccaatacgtcccccaaaatattacacatacaagtttgcagaaggcaaactgtttgaggaaactgggcatgaagacccaatcacaaagactagtcgcgttttacgtctagaagccaaaagcaaggatggaaaattagtgccaatgactgttttccacaaaactgactctgaggacttgcagaagaaacctctcttggtacatgtatatggagcttatggaatggatttgaaaatgaatttcaggcctgagaggcgggtcctggtggatgatggatggatattagcatactgccatgttcgaggtggtggtgagttaggcctccagtggcacgctgatggccgcctaactaaaaaactcaatggccttgctgatttagaggcttgcattaagacgcttcatggccaaggcttttctcagccaagtctaacaaccctgactgctttcagtgctggaggggtgcttgcaggagcattgtgtaattctaatccagagctggtgagagcggtgactttggaggcacctttcttggatgttctcaacaccatgatggacactacacttcctctgacattagaagaattagaagaatgggggaatccttcatctgatgaaaaacacaagaactacataaaacgttactgtccctatcaaaatattaaacctcagcattatccttcaattcacataacggcatatgaaaacgatgaacgggtacctctgaaaggaattgtaagttatactgagaaactcaaggaagccatcgcggagcatgctaaggacacaggtgaaggctatcagacccctaatattattctagatattcagcctggaggcaatcatgtaattgaggattctcacaaaaagattacagcccaaattaaattcctgtacgaggaacttggacttgacagcaccagtgttttcgaggatcttaagaaatacctgaaattctgaaacactgcattcaactgggaattggaaacacactgaaatatttcatagtcttacttccaattgagttagcaaaaaaaaaattaataacttgagacttttaagttattaattttttaaaatgtgcttctccatctaaattttgcttagtctacatctcacttgcttatactattctctccattgatgcacatgcccattaacctaggaaagtaattttcaaatcatgctccttagaaggatgtggagtagagggaagggaaggattggtgatagcagagctccaggcctcccttccagtcagaacagttgagcagtttacaaattagtgtcctgcctctttgctagcaaatgcttttagacactgtggcagtgagtcatcctctaatttctatgactgcattttaagggaaaagataaaattcttccccttaaaattcgttaaagtttttgaataatctggggtcctaatgtgttctggtcatccctgattgatgctatctgaataaagttataagctcctataagccataatttacttttaaacattttatttttttcaaaacatttgagaacctttcttaaagcagttacattcaagctacagaaatatcgaagaattaatgattgttcaccaagcagcatgctgtacatgaagctattacaaatgcttacaatcccactgaaatgccagtgtcttcatctcttcataaaggtgcctaacacgaggtatacagtatgttcagtacactggaatagcatgctcgattggaaacaaagcatctatctctgaaagctgtttggcgatgaaggagattcttcgtgttgtgttcaaagatgagtccctctcccttgtccagaaaaatgccacttgtatcaactttactgcctttgtcggcagaattggtacttaaccttattctcattttagcgggaaggcccgaaatcatattatgtagatttaacagtgttgattctccaaaattcagaaccacgataaagattctgtcgatgccatccagctctcttgtgtacacaacatagtggctgtcattcctcaaatggcaaaaccagcccctgttgaggagtagctcattggcatgaagtagacttaaatcttgatataacttcaaagccgatctgggctgagtcttttggacctatttttttaaaaaagtatttacgtaagtgtttgattctaagaattgtttgtaagtatttttaatatattgtaaggagttatttacccaaaacacttgctccaattttgccccttataattgccaaattgtaagcatcaataagtaggtaagaacaatttatataaaaactgatagaaatgacaaattcggggtttcggcttgtctgggagtcaataagtacgcacagtgctctgctacattgtagagtttctgtagagatcaaatttgactccactttaggagtcccaaagcaaatgtccatgtctaagatgaatatttaacttgcatagtcattctgtgctatattgtaactgccagatggccagaaagaaggcaacagtggactcagacttctgaggaatttgggtttgttcccctttgtagactaatgtgtaggttgctgttgtgcgaagatcgtgtaactttagcagacatgtatttcttgcacagctaatagaagacaaagttgaaaaaaaggatgcaaaataaaaagctgcctaaggtgaaagttagaaattgtagacttttttttaccataatagtatgtgttcattaaagatgatttgggtttattttacagctatataaaacataatttgatgatgtacttctaacctttcaagcattttctgttattgactatataatatagcctccataaatgtttttaatgacaatattctgttgaacggttgtaccatactcagccatgccctttcattttgacgatagtgtttctaatattttgtatttttattcccctccccccatttttgtattacttaagatagattatcagaaagacagttactttgtcaaagagtatgggcacttgatacataatgccaaattattcttcataagagctgttgccaaatcagtgataatgttcatttaattgtattcttgccagccatgtttactggggtgatagttgttattgtggttgttattgttctttaggggtaggttcccaatatgtggtctttaaataattatctaatggtgtttaaaaagatgtttattctgtttgtcaggtacaaagatatttatgatacatgtatgacttgtctaagttattaacattttctctagccttaggtaatgcatgaaagcacatgtttcagtgccactcacataagaagtgcccggtaagtgttagctattattgtctacttgagttactactttctaaaagtatgttgaagtctttttctgtaattgcagatttgttgattttgcatttgagtattttctatattttgaagctgttagatgcgtagtcatgatttttggtggaatgttttatcaatttttgaaaattgcctttgtctcatataatgcttttcatattgaactatattttgtctgctattaaatacttccaagcc

SEQ ID NO: 327649 - DNA, 3080 bp, Artificial Sequence
  derived and/or modified sequence
cattcttgctggtagccatcttgagtgagggcggaccagaggatgagagagctgtggcagggctactggaacgctgtccctcattgttttagccttctgtgcttcatctcgagctcagaagactagcgaagaacgaaaagtcttatatatttcgagactaaagaacccaggaacccaagaagactccttgaccacaacaaagatggcgaaatctgcctgttgctcgtgctagattgaggttacgtagattggcgtgctgcaaaccagctctaggcggctctgggtaagttgtcgttctgtgggctgcggaacgcagacttcggctggacttgcctgcggtgacacctgctcccctctgagagcttcaggttctccggcctgccttcactggtttgtgtccagagccggactgattctctcaatttgcccccaaaaggagcataaaccagggactttgatatcatgcagcagaagaccaaattatttctccaagctttgaagtatagtattcctcaccttggaaaatgcatgcagaaacagcatttgaatcactataacttcgctgatcattgttacaatagaataaaattgaaaaaatatcacctaaccaagtgtcttcagaataaacccaagatatcagagttagcaagaaacatcccaagtcggagcttctcatgtaaggatcttcagcctgttaaacaagaaaacgaaaaaccccttccagaaaacatggatgcatttgaaaaagtgagaacaaaattagaaacacagccacaagaagaatatgaaatcatcaatgtggaagttaaacatggtggttttgtttattaccaagaaggttgttgcttggttcgttccaaagatgaagaagcagacaatgataattatgaagttttattcaatttggaggaacttaagttagaccagcccttcattgattgtatcagagttgctccagatgaaaaatatgtggctgccaagataagaactgaagattctgaagcatctacctgtgtaattataaagctcagcgatcagcccgtaatggaagcttctttcccgaatgtgtccagttttgaatgggtaaaggacgaggaagatgaagatgttttattctacaccttccagaggaaccttcgctgtcatgacgtatatcgagccacttttggtgataacaaacgtaatgaacgcttttacacagaaaaagacccaagctactttgttttcctttatcttacaaaagacagtcgtttcctcaccataaatattatgaacaagactacttctgaagtgtggttgatagatggcctgagcccttgggacccaccagtacttatccagaagcgaatacatggggtcctttactatgttgaacacagagatgatgaattatacattctcactaatgttggagaacctacagaatttaagctaatgagaacagcggctgatacccctgcaattatgaattgggatttattttttacaatgaagagaaatacaaaagtgatagacttggacatgtttaaggatcactgtgttctatttctgaagcacagcaatctcctttatgttaatgtgattggtctggctgatgattcagttcggtctctaaagctccctccttgggcctgtggattcataatggatacaaattctgacccaaagaactgcccctttcaactttgctctccaatacgtcccccaaaatattacacatacaagtttgcagaaggcaaactgtttgaggaaactgggcatgaagacccaatcacaaagactagtcgcgttttacgtctagaagccaaaagcaaggatggaaaattagtgccaatgactgttttccacaaaactgactctgaggacttgcagaagaaacctctcttggtacatgtatatggagcttatggaatggatttgaaaatgaatttcaggcctgagaggcgggtcctggtggatgatggatggatattagcatactgccatgttcgaggtggtggtgagttaggcctccagtggcacgctgatggccgcctaactaaaaaactcaatggccttgctgatttagaggcttgcattaagacgcttcatggccaaggcttttctcagccaagtctaacaaccctgactgctttcagtgctggaggggtgcttgcaggagcattgtgtaattctaatccagagctggtgagagcggtgactttggaggcacctttcttggatgttctcaacaccatgatggacactacacttcctctgacattagaagaattagaagaatgggggaatccttcatctgatgaaaaacacaagaactacataaaacgttactgtccctatcaaaatattaaacctcagcattatccttcaattcacataacggcatatgaaaacgatgaacgggtacctctgaaaggaattgtaagttatactgagaaactcaaggaagccatcgcggagcatgctaaggacacaggtgaaggctatcagacccctaatattattctagatattcagcctggaggcaatcatgtaattgaggattctcacaaaaagattacagcccaaattaaattcctgtacgaggaacttggacttgacagcaccagtgttttcgaggatcttaagaaatacctgaaattctgaaacactgcattcaactgggaattggaaacacactgaaatatttcatagtcttacttccaattgagttagcaaaaaaaaaattaataacttgagacttttaagttattaattttttaaaatgtgcttctccatctaaattttgcttagtctacatctcacttgcttatactattctctccattgatgcacatgcccattaacctaggaaagtaattttcaaatcatgctccttagaaggatgtggagtagagggaagggaaggattggtgatagcagagctccaggcctcccttccagtcagaacagttgagcagtttacaaattagtgtcctgcctctttgctagcaaatgcttttagacactgtggcagtgagtcatcctctaatttctatgactgcattttaagggaaaagataaaattcttccccttaaaa

SEQ ID NO: 327650 - DNA, 5657 bp, Artificial Sequence
  derived and/or modified sequence
gaagaaactgaggcccggagacacagttaagtgtaggagctaagacctcaacccaggtctctctgactcttaactacttattagcaatcaaggttaataaaagctacctcctgacaaaccagagatggccttacattttatttgtgcatcttgcaggggttttttgttgtttttaattaaagcgctaaatacctttttaacattaaaaatccgaagttgagtatgtccagtatttggaaccgaaccaaattggattttttgctatacagcttactgtacaagtgacctggaacagttgcttagaacctcccacagccacagtttggcaacctgtaaaatgtgcatggtaatatctactttattaagtccatataaaatttaaattagacaaacaagataaaagcacctggcagttagttaacactcaacaataattaatcttccctcccccacctttattaaataattaggcttttccagtttatcttccacatatataccaaagatacgttcataattatgtaagaccaaagggctttttaccttttacagccctgagttcctgagataccccattaagtctgtgtacttatttgcaaatttatattttgtttcttgttttgttttttgttttagtttaacccctatgtgtgccagagtcagtgctgcatagtttgagcctgataggattaactttacaaatgagacatttaagtcacatctgccaagaattatgatttgaatgaaactttaacttacacaggtttttagatttagttagcctaagttatcagctgtctgaagttattcataacctaagtggggcatggccctgaaaaggagggatgagaactgctgatcttagttactctgagaacccactactctgtaatcatacctataaaatcattcgtgtgctggcagccccaaaaggagcataaaccagggactttgatatcatgcagcagaagaccaaattatttctccaagctttgaagtatagtattcctcaccttggaaaatgcatgcagaaacagcatttgaatcactataacttcgctgatcattgttacaatagaataaaattgaaaaaatatcacctaaccaagtgtcttcagaataaacccaagatatcagagttagcaagaaacatcccaagtcggagcttctcatgtaaggatcttcagcctgttaaacaagaaaacgaaaaaccccttccagaaaacatggatgcatttgaaaaagtgagaacaaaattagaaacacagccacaagaagaatatgaaatcatcaatgtggaagttaaacatggtggttttgtttattaccaagaaggttgttgcttggttcgttccaaagatgaagaagcagacaatgataattatgaagttttattcaatttggaggaacttaagttagaccagcccttcattgattgtatcagagttgctccagatgaaaaatatgtggctgccaagataagaactgaagattctgaagcatctacctgtgtaattataaagctcagcgatcagcccgtaatggaagcttctttcccgaatgtgtccagttttgaatgggtaaaggacgaggaagatgaagatgttttattctacaccttccagaggaaccttcgctgtcatgacgtatatcgagccacttttggtgataacaaacgtaatgaacgcttttacacagaaaaagacccaagctactttgttttcctttatcttacaaaagacagtcgtttcctcaccataaatattatgaacaagactacttctgaagtgtggttgatagatggcctgagcccttgggacccaccagtacttatccagaagcgaatacatggggtcctttactatgttgaacacagagatgatgaattatacattctcactaatgttggagaacctacagaatttaagctaatgagaacagcggctgatacccctgcaattatgaattgggatttattttttacaatgaagagaaatacaaaagtgatagacttggacatgtttaaggatcactgtgttctatttctgaagcacagcaatctcctttatgttaatgtgattggtctggctgatgattcagttcggtctctaaagctccctccttgggcctgtggattcataatggatacaaattctgacccaaagaactgcccctttcaactttgctctccaatacgtcccccaaaatattacacatacaagtttgcagaaggcaaactgtttgaggaaactgggcatgaagacccaatcacaaagactagtcgcgttttacgtctagaagccaaaagcaaggatggaaaattagtgccaatgactgttttccacaaaactgactctgaggacttgcagaagaaacctctcttggtacatgtatatggagcttatggaatggatttgaaaatgaatttcaggcctgagaggcgggtcctggtggatgatggatggatattagcatactgccatgttcgaggtggtggtgagttaggcctccagtggcacgctgatggccgcctaactaaaaaactcaatggccttgctgatttagaggcttgcattaagacgcttcatggccaaggcttttctcagccaagtctaacaaccctgactgctttcagtgctggaggggtgcttgcaggagcattgtgtaattctaatccagagctggtgagagcggtgactttggaggcacctttcttggatgttctcaacaccatgatggacactacacttcctctgacattagaagaattagaagaatgggggaatccttcatctgatgaaaaacacaagaactacataaaacgttactgtccctatcaaaatattaaacctcagcattatccttcaattcacataacggcatatgaaaacgatgaacgggtacctctgaaaggaattgtaagttatactgagaaactcaaggaagccatcgcggagcatgctaaggacacaggtgaaggctatcagacccctaatattattctagatattcagcctggaggcaatcatgtaattgaggattctcacaaaaagattacagcccaaattaaattcctgtacgaggaacttggacttgacagcaccagtgttttcgaggatcttaagaaatacctgaaattctgaaacactgcattcaactgggaattggaaacacactgaaatatttcatagtcttacttccaattgagttagcaaaaaaaaaattaataacttgagacttttaagttattaattttttaaaatgtgcttctccatctaaattttgcttagtctacatctcacttgcttatactattctctccattgatgcacatgcccattaacctaggaaagtaattttcaaatcatgctccttagaaggatgtggagtagagggaagggaaggattggtgatagcagagctccaggcctcccttccagtcagaacagttgagcagtttacaaattagtgtcctgcctctttgctagcaaatgcttttagacactgtggcagtgagtcatcctctaatttctatgactgcattttaagggaaaagataaaattcttccccttaaaattcgttaaagtttttgaataatctggggtcctaatgtgttctggtcatccctgattgatgctatctgaataaagttataagctcctataagccataatttacttttaaacattttatttttttcaaaacatttgagaacctttcttaaagcagttacattcaagctacagaaatatcgaagaattaatgattgttcaccaagcagcatgctgtacatgaagctattacaaatgcttacaatcccactgaaatgccagtgtcttcatctcttcataaaggtgcctaacacgaggtatacagtatgttcagtacactggaatagcatgctcgattggaaacaaagcatctatctctgaaagctgtttggcgatgaaggagattcttcgtgttgtgttcaaagatgagtccctctcccttgtccagaaaaatgccacttgtatcaactttactgcctttgtcggcagaattggtacttaaccttattctcattttagcgggaaggcccgaaatcatattatgtagatttaacagtgttgattctccaaaattcagaaccacgataaagattctgtcgatgccatccagctctcttgtgtacacaacatagtggctgtcattcctcaaatggcaaaaccagcccctgttgaggagtagctcattggcatgaagtagacttaaatcttgatataacttcaaagccgatctgggctgagtcttttggacctatttttttaaaaaagtatttacgtaagtgtttgattctaagaattgtttgtaagtatttttaatatattgtaaggagttatttacccaaaacacttgctccaattttgccccttataattgccaaattgtaagcatcaataagtaggtaagaacaatttatataaaaactgatagaaatgacaaattcggggtttcggcttgtctgggagtcaataagtacgcacagtgctctgctacattgtagagtttctgtagagatcaaatttgactccactttaggagtcccaaagcaaatgtccatgtctaagatgaatatttaacttgcatagtcattctgtgctatattgtaactgccagatggccagaaagaaggcaacagtggactcagacttctgaggaatttgggtttgttcccctttgtagactaatgtgtaggttgctgttgtgcgaagatcgtgtaactttagcagacatgtatttcttgcacagctaatagaagacaaagttgaaaaaaaggatgcaaaataaaaagctgcctaaggtgaaagttagaaattgtagacttttttttaccataatagtatgtgttcattaaagatgatttgggtttattttacagctatataaaacataatttgatgatgtacttctaacctttcaagcattttctgttattgactatataatatagcctccataaatgtttttaatgacaatattctgttgaacggttgtaccatactcagccatgccctttcattttgacgatagtgtttctaatattttgtatttttattcccctccccccatttttgtattacttaagatagattatcagaaagacagttactttgtcaaagagtatgggcacttgatacataatgccaaattattcttcataagagctgttgccaaatcagtgataatgttcatttaattgtattcttgccagccatgtttactggggtgatagttgttattgtggttgttattgttctttaggggtaggttcccaatatgtggtctttaaataattatctaatggtgtttaaaaagatgtttattctgtttgtcaggtacaaagatatttatgatacatgtatgacttgtctaagttattaacattttctctagccttaggtaatgcatgaaagcacatgtttcagtgccactcacataagaagtgcccgtacgttctggacaagcccctggatcaatttttcagcacactaattagcacttatgttctattttatttcattgtttgacagtcttttatacttctgagagatctaatcacttcttgaaagaatgtcaaggagctccattaaacagcaatctactgggggtattt

SEQ ID NO: 327651 - DNA, 6273 bp, Artificial Sequence
  derived and/or modified sequence
gaagaaactgaggcccggagacacagttaagtgtaggagctaagacctcaacccaggtctctctgactcttaactacttattagcaatcaaggttaataaaagctacctcctgacaaaccagagatggccttacattttatttgtgcatcttgcaggggttttttgttgtttttaattaaagcgctaaatacctttttaacattaaaaatccgaagttgagtatgtccagtatttggaaccgaaccaaattggattttttgctatacagcttactgtacaagtgacctggaacagttgcttagaacctcccacagccacagtttggcaacctgtaaaatgtgcatggtaatatctactttattaagtccatataaaatttaaattagacaaacaagataaaagcacctggcagttagttaacactcaacaataattaatcttccctcccccacctttattaaataattaggcttttccagtttatcttccacatatataccaaagatacgttcataattatgtaagaccaaagggctttttaccttttacagccctgagttcctgagataccccattaagtctgtgtacttatttgcaaatttatattttgtttcttgttttgttttttgttttagtttaacccctatgtgtgccagagtcagtgctgcatagtttgagcctgataggattaactttacaaatgagacatttaagtcacatctgccaagaattatgatttgaatgaaactttaacttacacaggtttttagatttagttagcctaagttatcagctgtctgaagttattcataacctaagtggggcatggccctgaaaaggagggatgagaactgctgatcttagttactctgagaacccactactctgtaatcatacctataaaatcattcgtgtgctggcagccccaaaaggagcataaaccagggactttgatatcatgcagcagaagaccaaattatttctccaagctttgaagtatagtattcctcaccttggaaaatgcatgcagaaacagcatttgaatcactataacttcgctgatcattgttacaatagaataaaattgaaaaaatatcacctaaccaagtgtcttcagaataaacccaagatatcagagttagcaagaaacatcccaagtcggagcttctcatgtaaggatcttcagcctgttaaacaagaaaacgaaaaaccccttccagaaaacatggatgcatttgaaaaagtgagaacaaaattagaaacacagccacaagaagaatatgaaatcatcaatgtggaagttaaacatggtggttttgtttattaccaagaaggttgttgcttggttcgttccaaagatgaagaagcagacaatgataattatgaagttttattcaatttggaggaacttaagttagaccagcccttcattgattgtatcagagttgctccagatgaaaaatatgtggctgccaagataagaactgaagattctgaagcatctacctgtgtaattataaagctcagcgatcagcccgtaatggaagcttctttcccgaatgtgtccagttttgaatgggtaaaggacgaggaagatgaagatgttttattctacaccttccagaggaaccttcgctgtcatgacgtatatcgagccacttttggtgataacaaacgtaatgaacgcttttacacagaaaaagacccaagctactttgttttcctttatcttacaaaagacagtcgtttcctcaccataaatattatgaacaagactacttctgaagtgtggttgatagatggcctgagcccttgggacccaccagtacttatccagaagcgaatacatggggtcctttactatgttgaacacagagatgatgaattatacattctcactaatgttggagaacctacagaatttaagctaatgagaacagcggctgatacccctgcaattatgaattgggatttattttttacaatgaagagaaatacaaaagtgatagacttggacatgtttaaggatcactgtgttctatttctgaagcacagcaatctcctttatgttaatgtgattggtctggctgatgattcagttcggtctctaaagctccctccttgggcctgtggattcataatggatacaaattctgacccaaagaactgcccctttcaactttgctctccaatacgtcccccaaaatattacacatacaagtttgcagaaggcaaactgtttgaggaaactgggcatgaagacccaatcacaaagactagtcgcgttttacgtctagaagccaaaagcaaggatggaaaattagtgccaatgactgttttccacaaaactgactctgaggacttgcagaagaaacctctcttggtacatgtatatggagcttatggaatggatttgaaaatgaatttcaggcctgagaggcgggtcctggtggatgatggatggatattagcatactgccatgttcgaggtggtggtgagttaggcctccagtggcacgctgatggccgcctaactaaaaaactcaatggccttgctgatttagaggcttgcattaagacgcttcatggccaaggcttttctcagccaagtctaacaaccctgactgctttcagtgctggaggggtgcttgcaggagcattgtgtaattctaatccagagctggtgagagcggtgactttggaggcacctttcttggatgttctcaacaccatgatggacactacacttcctctgacattagaagaattagaagaatgggggaatccttcatctgatgaaaaacacaagaactacataaaacgttactgtccctatcaaaatattaaacctcagcattatccttcaattcacataacggcatatgaaaacgatgaacgggtacctctgaaaggaattgtaagttatactgagaaactcaaggaagccatcgcggagcatgctaaggacacaggtgaaggctatcagacccctaatattattctagatattcagcctggaggcaatcatgtaattgaggattctcacaaaaagattacagcccaaattaaattcctgtacgaggaacttggacttgacagcaccagtgttttcgaggatcttaagaaatacctgaaattctgaaacactgcattcaactgggaattggaaacacactgaaatatttcatagtcttacttccaattgagttagcaaaaaaaaaattaataacttgagacttttaagttattaattttttaaaatgtgcttctccatctaaattttgcttagtctacatctcacttgcttatactattctctccattgatgcacatgcccattaacctaggaaagtaattttcaaatcatgctccttagaaggatgtggagtagagggaagggaaggattggtgatagcagagctccaggcctcccttccagtcagaacagttgagcagtttacaaattagtgtcctgcctctttgctagcaaatgcttttagacactgtggcagtgagtcatcctctaatttctatgactgcattttaagggaaaagataaaattcttccccttaaaattcgttaaagtttttgaataatctggggtcctaatgtgttctggtcatccctgattgatgctatctgaataaagttataagctcctataagccataatttacttttaaacattttatttttttcaaaacatttgagaacctttcttaaagcagttacattcaagctacagaaatatcgaagaattaatgattgttcaccaagcagcatgctgtacatgaagctattacaaatgcttacaatcccactgaaatgccagtgtcttcatctcttcataaaggtgcctaacacgaggtatacagtatgttcagtacactggaatagcatgctcgattggaaacaaagcatctatctctgaaagctgtttggcgatgaaggagattcttcgtgttgtgttcaaagatgagtccctctcccttgtccagaaaaatgccacttgtatcaactttactgcctttgtcggcagaattggtacttaaccttattctcattttagcgggaaggcccgaaatcatattatgtagatttaacagtgttgattctccaaaattcagaaccacgataaagattctgtcgatgccatccagctctcttgtgtacacaacatagtggctgtcattcctcaaatggcaaaaccagcccctgttgaggagtagctcattggcatgaagtagacttaaatcttgatataacttcaaagccgatctgggctgagtcttttggacctatttttttaaaaaagtatttacgtaagtgtttgattctaagaattgtttgtaagtatttttaatatattgtaaggagttatttacccaaaacacttgctccaattttgccccttataattgccaaattgtaagcatcaataagtaggtaagaacaatttatataaaaactgatagaaatgacaaattcggggtttcggcttgtctgggagtcaataagtacgcacagtgctctgctacattgtagagtttctgtagagatcaaatttgactccactttaggagtcccaaagcaaatgtccatgtctaagatgaatatttaacttgcatagtcattctgtgctatattgtaactgccagatggccagaaagaaggcaacagtggactcagacttctgaggaatttgggtttgttcccctttgtagactaatgtgtaggttgctgttgtgcgaagatcgtgtaactttagcagacatgtatttcttgcacagctaatagaagacaaagttgaaaaaaaggatgcaaaataaaaagctgcctaaggtgaaagttagaaattgtagacttttttttaccataatagtatgtgttcattaaagatgatttgggtttattttacagctatataaaacataatttgatgatgtacttctaacctttcaagcattttctgttattgactatataatatagcctccataaatgtttttaatgacaatattctgttgaacggttgtaccatactcagccatgccctttcattttgacgatagtgtttctaatattttgtatttttattcccctccccccatttttgtattacttaagatagattatcagaaagacagttactttgtcaaagagtatgggcacttgatacataatgccaaattattcttcataagagctgttgccaaatcagtgataatgttcatttaattgtattcttgccagccatgtttactggggtgatagttgttattgtggttgttattgttctttaggggtaggttcccaatatgtggtctttaaataattatctaatggtgtttaaaaagatgtttattctgtttgtcaggtacaaagatatttatgatacatgtatgacttgtctaagttattaacattttctctagccttaggtaatgcatgaaagcacatgtttcagtgccactcacataagaagtgcccggccaggcaaggtggctcaggcccgtaatcctagcactttgggaggcaaggcagacagatcaccagaggtcaggagttcaagaccagcctggccaacatggtgaaacaccatctctactaaaaaatacagaaattacccgggcataatgacgtgcacctgtaatcccagctacttgggaggctgcagcaggagaatcacttgaacccaggaagcagaggctgcagtgtgccgagatcacgccactgcactcgagcatgggtgacggagcaagactgtctcaaaaaaaaaaaaaaacagtgttgagatcctttaagtattattgtgcacatgtgcaaatatttctaagtattaggaatggaattattaggtcaaaagataacttcattttttgtgtttatagctatagctgggttgcaagctttctattatttgcttgctatatcttcattttaattctttgtgttttatgttagtgtttcttatgtctgtttttgttatctgagtggttttatcttttaataggctaatttaacccattcatatttgtaattattgtattatttagacataattcggaagccctattttatttgtagttatactattgtttagggtttttttctattaagctttttgttggattgactgtataatttttttcttctagtattctttgaaaatttgaaaattgttatattttatgtctagtgttctttgaaaataattctttgaaaattatttttatgtcctaattttaccattaaaattatgaccacttga

SEQ ID NO: 327652 - DNA, 6049 bp, Artificial Sequence
  derived and/or modified sequence
atttccggtactcgcatctccttggcaaccagggccgagctgtcacgccattgcaccattcttgctggtagccatcttgagtgagggcggaccagaggatgagagagctgtggcagggctactggaacgctgtccctcattgttttagccttctgtgcttcatctcgagctcagaagactagcgaagaacgaaaagtcttatatatttcgagactaaagaacccaggaacccaagaagactccttgaccacaacaaagatggcgaaatctgcctgttgctcgtgctagattgaggttacgtagattggcgtgctgcaaaccagctctaggcggctctgggatcttcagcctgttaaacaagaaaacgaaaaaccccttccagaaaacatggatgcatttgaaaaagtgagaacaaaattagaaacacagccacaagaagaatatgaaatcatcaatgtggaagttaaacatggtggttttgtttattaccaagaaggttgttgcttggttcgttccaaagatgaagaagcagacaatgataattatgaagttttattcaatttggaggaacttaagttagaccagcccttcattgattgtatcagagttgctccagatgaaaaatatgtggctgccaagataagaactgaagattctgaagcatctacctgtgtaattataaagctcagcgatcagcccgtaatggaagcttctttcccgaatgtgtccagttttgaatgggtaaaggacgaggaagatgaagatgttttattctacaccttccagaggaaccttcgctgtcatgacgtatatcgagccacttttggtgataacaaacgtaatgaacgcttttacacagaaaaagacccaagctactttgttttcctttatcttacaaaagacagtcgtttcctcaccataaatattatgaacaagactacttctgaagtgtggttgatagatggcctgagcccttgggacccaccagtacttatccagaagcgaatacatggggtcctttactatgttgaacacagagatgatgaattatacattctcactaatgttggagaacctacagaatttaagctaatgagaacagcggctgatacccctgcaattatgaattgggatttattttttacaatgaagagaaatacaaaagtgatagacttggacatgtttaaggatcactgtgttctatttctgaagcacagcaatctcctttatgttaatgtgattggtctggctgatgattcagttcggtctctaaagctccctccttgggcctgtggattcataatggatacaaattctgacccaaagaactgcccctttcaactttgctctccaatacgtcccccaaaatattacacatacaagtttgcagaaggcaaactgtttgaggaaactgggcatgaagacccaatcacaaagactagtcgcgttttacgtctagaagccaaaagcaaggatggaaaattagtgccaatgactgttttccacaaaactgactctgaggacttgcagaagaaacctctcttggtacatgtatatggagcttatggaatggatttgaaaatgaatttcaggcctgagaggcgggtcctggtggatgatggatggatattagcatactgccatgttcgaggtggtggtgagttaggcctccagtggcacgctgatggccgcctaactaaaaaactcaatggccttgctgatttagaggcttgcattaagacgcttcatggccaaggcttttctcagccaagtctaacaaccctgactgctttcagtgctggaggggtgcttgcaggagcattgtgtaattctaatccagagctggtgagagcggtgactttggaggcacctttcttggatgttctcaacaccatgatggacactacacttcctctgacattagaagaattagaagaatgggggaatccttcatctgatgaaaaacacaagaactacataaaacgttactgtccctatcaaaatattaaacctcagcattatccttcaattcacataacggcatatgaaaacgatgaacgggtacctctgaaaggaattgtaagttatactgagaaactcaaggaagccatcgcggagcatgctaaggacacaggtgaaggctatcagacccctaatattattctagatattcagcctggaggcaatcatgtaattgaggattctcacaaaaagattacagcccaaattaaattcctgtacgaggaacttggacttgacagcaccagtgttttcgaggatcttaagaaatacctgaaattctgaaacactgcattcaactgggaattggaaacacactgaaatatttcatagtcttacttccaattgagttagcaaaaaaaaaattaataacttgagacttttaagttattaattttttaaaatgtgcttctccatctaaattttgcttagtctacatctcacttgcttatactattctctccattgatgcacatgcccattaacctaggaaagtaattttcaaatcatgctccttagaaggatgtggagtagagggaagggaaggattggtgatagcagagctccaggcctcccttccagtcagaacagttgagcagtttacaaattagtgtcctgcctctttgctagcaaatgcttttagacactgtggcagtgagtcatcctctaatttctatgactgcattttaagggaaaagataaaattcttccccttaaaattcgttaaagtttttgaataatctggggtcctaatgtgttctggtcatccctgattgatgctatctgaataaagttataagctcctataagccataatttacttttaaacattttatttttttcaaaacatttgagaacctttcttaaagcagttacattcaagctacagaaatatcgaagaattaatgattgttcaccaagcagcatgctgtacatgaagctattacaaatgcttacaatcccactgaaatgccagtgtcttcatctcttcataaaggtgcctaacacgaggtatacagtatgttcagtacactggaatagcatgctcgattggaaacaaagcatctatctctgaaagctgtttggcgatgaaggagattcttcgtgttgtgttcaaagatgagtccctctcccttgtccagaaaaatgccacttgtatcaactttactgcctttgtcggcagaattggtacttaaccttattctcattttagcgggaaggcccgaaatcatattatgtagatttaacagtgttgattctccaaaattcagaaccacgataaagattctgtcgatgccatccagctctcttgtgtacacaacatagtggctgtcattcctcaaatggcaaaaccagcccctgttgaggagtagctcattggcatgaagtagacttaaatcttgatataacttcaaagccgatctgggctgagtcttttggacctatttttttaaaaaagtatttacgtaagtgtttgattctaagaattgtttgtaagtatttttaatatattgtaaggagttatttacccaaaacacttgctccaattttgccccttataattgccaaattgtaagcatcaataagtaggtaagaacaatttatataaaaactgatagaaatgacaaattcggggtttcggcttgtctgggagtcaataagtacgcacagtgctctgctacattgtagagtttctgtagagatcaaatttgactccactttaggagtcccaaagcaaatgtccatgtctaagatgaatatttaacttgcatagtcattctgtgctatattgtaactgccagatggccagaaagaaggcaacagtggactcagacttctgaggaatttgggtttgttcccctttgtagactaatgtgtaggttgctgttgtgcgaagatcgtgtaactttagcagacatgtatttcttgcacagctaatagaagacaaagttgaaaaaaaggatgcaaaataaaaagctgcctaaggtgaaagttagaaattgtagacttttttttaccataatagtatgtgttcattaaagatgatttgggtttattttacagctatataaaacataatttgatgatgtacttctaacctttcaagcattttctgttattgactatataatatagcctccataaatgtttttaatgacaatattctgttgaacggttgtaccatactcagccatgccctttcattttgacgatagtgtttctaatattttgtatttttattcccctccccccatttttgtattacttaagatagattatcagaaagacagttactttgtcaaagagtatgggcacttgatacataatgccaaattattcttcataagagctgttgccaaatcagtgataatgttcatttaattgtattcttgccagccatgtttactggggtgatagttgttattgtggttgttattgttctttaggggtaggttcccaatatgtggtctttaaataattatctaatggtgtttaaaaagatgtttattctgtttgtcaggtacaaagatatttatgatacatgtatgacttgtctaagttattaacattttctctagccttaggtaatgcatgaaagcacatgtttcagtgccactcacataagaagtgcccggtaagtgttagctattattgtctacttgagttactactttctaaaagtatgttgaagtctttttctgtaattgcagatttgttgattttgcatttgagtattttctatattttgaagctgttagatgcgtagtcatgatttttggtggaatgttttatcaatttttgaaaattgcctttgtctcatataatgcttttcatattgaactatattttgtctgctattaaatacttccaagcctgatttttgtaattttattttttattcaattacaagaatacatactataaaaaggttttcttcaacacctttccatagcttcacagttcccctcagagacaggcactatatgttcttttgtttttaatgtatcatatgtttgcataggcacagaatgtatcatttcatatgtttatatatttttctttacacagttggtgatatgttaccattctatactttattgaatacctgtttgaaatggtctcatatcaatgtatatagaactgtcatttttaaaagctgcatactgggcccatagttgatagaactggttttctgttgataaaatatttaaatcatttcttgtgtcttctattaaaaacaaattttgcaggccaggcaaggtggctcaggcccgtaatcctagcactttgggaggcaaggcagacagatcaccagaggtcaggagttcaagaccagcctggccaacatggtgaaacaccatctctactaaaaaatacagaaattacccgggcataatgacgtgcacctgtaatcccagctacttgggaggctgcagcaggagaatcacttgaacccaggaagcagaggctgcagtgtgccgagatcacgccactgcactcgagcatgggtgacggagcaagactgtctcaaaaaaaaaaaaaaacagtgttgagatcctttaagtattattgtgcacatgtgcaaatatttctaagtattaggaatggaattattaggtcaaaagataacttcattttttgtgtttatagctatagctgggttgcaagctttctattatttgcttgctatatcttcattttaattctttgtgttttatgttagtgtttcttatgtctgtttttgttatctgagtggttttatcttttaataggctaatttaacccattcatatttgtaattattgtattatttagacataattcggaagccctattttatttgtagttatactattgtttagggtttttttctattaagctttttgttggattgactgtataatttttttcttctagtattctttgaaaatttgaaaattgttatattttatgtctagtgttctttgaaaataattctttgaaaattatttttatgtcctaattttaccattaaaattatgaccacttg

SEQ ID NO: 327653 - DNA, 2184 bp, Artificial Sequence
  derived and/or modified sequence
atgcagcagaagaccaagctgttcctgcaggccctgaagtacagcatcccccacctgggcaagtgcatgcagaagcagcacctgaaccactacaacttcgccgaccactgctacaacagaatcaagctgaagaagtaccacctgaccaagtgcctgcagaacaagcccaagatcagcgagctggccagaaacatccccagcagaagcttcagctgcaaggacctgcagcccgtgaagcaggagaacgagaagcccctgcccgagaacatggacgccttcgagaaggtgagaaccaagctggagacccagccccaggaggagtacgagatcatcaacgtggaggtgaagcacggcggcttcgtgtactaccaggagggctgctgcctggtgagaagcaaggacgaggaggccgacaacgacaactacgaggtgctgttcaacctggaggagctgaagctggaccagcccttcatcgactgcatcagagtggcccccgacgagaagtacgtggccgccaagatcagaaccgaggacagcgaggccagcacctgcgtgatcatcaagctgagcgaccagcccgtgatggaggccagcttccccaacgtgagcagcttcgagtgggtgaaggacgaggaggacgaggacgtgctgttctacaccttccagagaaacctgagatgccacgacgtgtacagagccaccttcggcgacaacaagagaaacgagagattctacaccgagaaggaccccagctacttcgtgttcctgtacctgaccaaggacagcagattcctgaccatcaacatcatgaacaagaccaccagcgaggtgtggctgatcgacggcctgagcccctgggacccccccgtgctgatccagaagagaatccacggcgtgctgtactacgtggagcacagagacgacgagctgtacatcctgaccaacgtgggcgagcccaccgagttcaagctgatgagaaccgccgccgacacccccgccatcatgaactgggacctgttcttcaccatgaagagaaacaccaaggtgatcgacctggacatgttcaaggaccactgcgtgctgttcctgaagcacagcaacctgctgtacgtgaacgtgatcggcctggccgacgacagcgtgagaagcctgaagctgcccccctgggcctgcggcttcatcatggacaccaacagcgaccccaagaactgccccttccagctgtgcagccccatcagaccccccaagtactacacctacaagttcgccgagggcaagctgttcgaggagaccggccacgaggaccccatcaccaagaccagcagagtgctgagactggaggccaagagcaaggacggcaagctggtgcccatgaccgtgttccacaagaccgacagcgaggacctgcagaagaagcccctgctggtgcacgtgtacggcgcctacggcatggacctgaagatgaacttcagacccgagagaagagtgctggtggacgacggctggatcctggcctactgccacgtgagaggcggcggcgagctgggcctgcagtggcacgccgacggcagactgaccaagaagctgaacggcctggccgacctggaggcctgcatcaagaccctgcacggccagggcttcagccagcccagcctgaccaccctgaccgccttcagcgccggcggcgtgctggccggcgccctgtgcaacagcaaccccgagctggtgagagccgtgaccctggaggcccccttcctggacgtgctgaacaccatgatggacaccaccctgcccctgaccctggaggagctggaggagtggggcaaccccagcagcgacgagaagcacaagaactacatcaagagatactgcccctaccagaacatcaagccccagcactaccccagcatccacatcaccgcctacgagaacgacgagagagtgcccctgaagggcatcgtgagctacaccgagaagctgaaggaggccatcgccgagcacgccaaggacaccggcgagggctaccagacccccaacatcatcctggacatccagcccggcggcaaccacgtgatcgaggacagccacaagaagatcaccgcccagatcaagttcctgtacgaggagctgggcctggacagcaccagcgtgttcgaggacctgaagaagtacctgaagttctag

SEQ ID NO: 327654 - DNA, 5565 bp, Artificial Sequence
  derived and/or modified sequence
ctcctgcacggcgagtgctggagcacgacgtaccgctcgctcggtcagggcgccccctccgcccgcctcctgcttcctcctccgctgcctgccgccgccgcctccaccattgtataatgctcggggcgcgcaggcagagaacggcggagtcttagcttcagcctcgcctgctgcccgctccccggcgccaccctcgggcccctggagcggggcactccgcatggagcgggagtagctgaggagtgggcggaaacccctcctgatgcgttagttcccaggtggagctgcatgtgatatatgttgggtaaaggaggaaaacggaagtttgatgagcatgaagatgggctggaaggcaaaatcgtgtctccctgtgacggtccatccaaggtgtcttacaccttacagcgccagactatcttcaacatttcccttatgaaactctataaccacaggcccctgacagagcccagcttgcaaaagaccgttttaattaacaacatgttgaggcggatccaggaggaactcaaacaggaaggcagcctgaggcccatgttcaccccctcctcccagcccaccaccgagcccagcgacagctaccgagaggccccgccggccttcagccacctggcgtccccgtcctcccacccctgcgacctcggaagcactacgcccctggaggcctgcctcaccccggcctcactgctcgaggacgacgatgacacgttttgcacctcccaggccatgcagcccacggctcccaccaaactgtcacctccagccctcttgccagaaaaggacagtttctcctctgccttggacgagatcgaggagctctgtcccacatctacctccacagaggcggccacggctgcgactgacagtgtgaaagggacctccagcgaggctggcacccagaaactcgacggtcctcaagagagccgcgcagatgactcaaaactgatggactctctgcctgggaattttgaaataacgacgtccacgggtttcctgacagacttgaccctggatgacatcctgtttgctgacattgatacgtccatgtatgattttgacccctgcacttcctcatcagggacagcctcaaaaatggcccctgtgtctgccgacgacctcctcaaaactctggctccttacagcagtcagcctgtcaccccaagtcagcctttcaaaatggacctcacagagctggaccacatcatggaggtgcttgttgggtcctaagacccagggacccagcgactatgcccacccagaccccagagcgttcccataaccctgacagttctccacactgtgcatgcacccttgcttgcctttttcagagaaaaagaaaattttacaacaggatcacactagtttttgctttgagcagagttggagtgccttcatccaagtatgaccacttttaatacacttttttgagtggttcctcagagacctactaccctggtataggaaagaatccatttgaagacaatgttgcaatgttgaatgacaaaaataaacagttcaagtgaagcacaaggattaagttggaaaagctgtaaattgcatgtgcatatttgtctattttttctataagttttattgcaagaggtaaagaagaaaactatatatatatatcttatttagataatctcagtaccttttctggcatttttgccctgtataggttgacttggcaattcggcctttttagaggcattaactactcctcgtaagtgttgcatttacatggctgtttagaaaactgctgcccaaatttattttatatttttgtacagattctgcagtttatgatattgtttttctaaaaacaaatgctgtttatacatatgagatagctattttgataggatttgctcacatagttcctgcaaacttcagatgtacaagttgcacttgtacttttatagagttgtaatgttttatatgtgtatggtgcaagagaaaattggatcaaatcaatctgcagttgatgtccccaaatgcaaacacaggcacacacatgcacacacccataaacacacacacagtgctttaagaaagggccaggtgatatcacacccaaatttcacaagcactgaccccctggcaccaacacccgccagtactgtgacttccaaagccagagccacatgtgctcatcaaacttgcattaagcagttggcgggagatggctgtggagctgggggtttaagtgatggttctcttttgctccctcttttgagggtaaagctactgtctttcttaagagtgtatttatgccaagtttgcgcttttaattgtttttattttgttttttaatgaaaacccagatctttcctttttggcataatttttatgatgacctgaaattttacatccgaacaaaattttacatccgaaaagcaaccaacttcttcatggaactcagccctgttgcaatgcttagggcccttaaagaagaaaatctccccagaaggcatccatcatgttgcttaattgtcttctgcagcttcctttccctagagctttccctgtgttgctaagagctgaaaatggcatcttcgtgatcaccacagtgagcttggctcgcctcggccggcccgggatgcactcttacaacatgtgtgactcttgaacctggagttcatcacattacgtcacagcttcccatctggttgctttcctgagtcagctacttcacacttgtcaaggctgttttaccccaaaactcagacaggactttctatgcatgttttccctcctccccccaattcccccccccatcaccttatctcccaggacacacttgagaagtagctttttattcctagtggtgtacatttaattttaaaaaggttgcaatgtatcatgcttgttgccgaaactgtttatggccttcttgtttcagttttttcttttcttccaatggtactttagctgttgagtgcaggttacaacctatattgttatgcagatggcttctttaggaataacttttatatttatttaaaaatttttaaattatgggatgttttgttgttgttgttgtctttgttgttggtcatttgtcaatattcagtcaccaattctgctcacttcttgccatggataaaattgggtctttctggctaattaaaaaagacaactttataaaatggcactttaagcaagccatagttagttttatttttgtaatgcacatggcaaagcaaagacgtttgtgatgaaggaactgctcatctaagcaaaagatttgagtatgatatgataaaggctttctacattctaatttactttttccccccacttgaatgtgttttaaaggctaattatcagctcagtagagcagtgagaaactgatcaaattgcacttgttctcctacaagcaacctccacgcagacacctcgtactgctacaggtgtgtcatttcctttaataggaccagggaccatgtaactgaggtgagggttgtagtagatgcttccagtgtcagtatgcctgttaattttaagagcttccctttcttgcagagaacaagtctgcccagattccatgctttctataactggaggacctggcaaacctgccgcatgctgcacacatctacctacgtacacatatacaatagtattgatgattctgaacaataacagggtaaaacagttggtttgccattgttaaaaactgatttacagtaacttacaacaactgtacttttgttggattagcaaatcatgtgtttaaacaaatcccatatgttgggcaacagttcaaataagcacggagaagtgttgcccaaacttggttctctgactcttatgtatttgtaaggctgggcttcaaaatcaaaacaaaaaccccaaaaacagcaggcaaatgctttttaactctgacaccgttgccataaatccctgatactcaaagtctaacaagaaagacatggaaaattagcagcccattttcagaaagatcaaaatgatctagggttctaattgcttttgcatcctattcttacaaagtgatgtcccaacagggaacagtaggagctggagtgggatctccaagtcccagtttgagtgtgggatgtgcttccagcagtgccttccctttatgaaagacatcacatggcatccagggccaggcaggcagcttgaggtgcctttacgagaaaaccgagctggggctgggagaggacagttattgacactgatgtgcaatgaagtgacaagatgagagcagaatcgtaagagctttgaatttgaagtgagtttttttccccccataagttatttattccttttttctgtgtaaatatatttattttactgtggagcgctaacatctggatcgtaacatgtgcagaatgtatggtaggaatgtattctcttgtaggaatgtaaatctgtattaaaagggggtccaagccaggcccccaggtcttctcattgtatgcacagtccgcattcatttttactcttctctaatatgggtctatttgaaatatgcaaaaggtatgaggaatgttttaatacctccaaatttttaagaaaagcatcaaagggttgatattttttaaagtttttttagtagcactttctctggatgacagaaggagcaaccacatgggcacccttgttcataccaaagggtgagcagtggccagagcctcctctgcacctctcgagtgtctttaccaattgagctttttatcgccatagccccttggagtgccccagctgccctgaggtcaatcaaggaaaatttcttaatgaaataagctccaaagagccaaagtatcaacttacagatcgtttttaaagcttaaatttatgaaccacctttgtggtaaacaatgaattatgaataccgcagggcagccttcttaaatgacaaatgtaaaaaaaaaaaaaaaaaagactctacttcgtgcagcaattgctactctatacgaattgtcttaatttgaaaaccttgctgttacaaattggacctttatacattttctgaaaacaatgaaaagagtatatttaaccttttctggctgtaaatggttaccttcctgtaactgccccgcacctggaggcatggagttgtgtgcatcctgcttatgtacaattgttttcagtgtttctaagaatgagtctgaatggttcttgaaaattagccaggatcaaatgctattgcagacaaagccaataaaaagttggacttcttttggggataacaagttttggaagagaaatgcaggccatatgtgcgcatgaccgagattttgaaaaaagatgtacatagtgacatgtttggtgcatggtttttgaggagggcttttgtcaaaaaggaggtataacctttcccccacagacctgagagctgtgccttttctatgcaatattacagacgttacatcggaacccagatggctgtattcacatgtaggtttgggctgtaatctaaacaattggacagattaaatgtacatggaaatgagcagtcttacttttgtagttttatattatacaataaacagttaaaagatgaaaaaaaaaaaaaaaaaa

SEQ ID NO: 327655 - DNA, 5549 bp, Artificial Sequence
  derived and/or modified sequence
actcctgcacggcgagtgctggagcacgacgtaccgctcgctcggtcagggcgccccctccgcccgcctcctgcttcctcctccgctgcctgccgccgccgcctccaccattgtataatgctcggggcgcgcaggcagagaacggcggagtcttagcttcagcctcgcctgctgcccgctccccggcgccaccctcgggcccctggagcggggcactccgcatggagcgggagtagctgaggagtgggcggaaacccctcctgatgcgttagttcccaggtggagctgcatgtgatatatgttgggtaaaggaggaaaacggaagtttgatgagcatgaagatgggctggaaggcaaaatcgtgtctccctgtgacggtccatccaaggtgtcttacaccttacagcgccagactatcttcaacatttcccttatgaaactctataaccacaggcccctgacagagcccagcttgcaaaagaccgttttaattaacaacatgttgaggcggatccaggaggaactcaaacaggaaggcagcctgaggcccatgttcaccccctcctcccagcccaccaccgagcccagcgacagctaccgagaggccccgccggccttcagccacctggcgtccccgtcctcccacccctgcgacctcggaagcactacgcccctggaggcctgcctcaccccggcctcactgctcgaggacgacgatgacacgttttgcacctcccaggccatgcagcccacggctcccaccaaactgtcacctccagccctcttgccagaaaaggacagtttctcctctgccttggacgagatcgaggagctctgtcccacatctacctccacagaggcggccacggctgcgactgacagtgtgaaagggacctccagcgaggctggcacccagaaactcgacggtcctcaagagagccgcgcagatgactcaaaactgatggactctctgcctgggaattttgaaataacgacgtccacgggtttcctgacagacttgaccctggatgacatcctgtttgctgacattgatacgtccatgtatgattttgacccctgcacttcctcatcagggacagcctcaaaaatggcccctgtgtctgccgacgacctcctcaaaactctggctccttacagcagtcagcctgtcaccccaagtcagcctttcaaaatggacctcacagagctggaccacatcatggaggtgcttgttgggtcctaagacccagggacccagcgactatgcccacccagaccccagagcgttcccataaccctgacagttctccacactgtgcatgcacccttgcttgcctttttcagagaaaaagaaaattttacaacaggatcacactagtttttgctttgagcagagttggagtgccttcatccaagtatgaccacttttaatacacttttttgagtggttcctcagagacctactaccctggtataggaaagaatccatttgaagacaatgttgcaatgttgaatgacaaaaataaacagttcaagtgaagcacaaggattaagttggaaaagctgtaaattgcatgtgcatatttgtctattttttctataagttttattgcaagaggtaaagaagaaaactatatatatatatcttatttagataatctcagtaccttttctggcatttttgccctgtataggttgacttggcaattcggcctttttagaggcattaactactcctcgtaagtgttgcatttacatggctgtttagaaaactgctgcccaaatttattttatatttttgtacagattctgcagtttatgatattgtttttctaaaaacaaatgctgtttatacatatgagatagctattttgataggatttgctcacatagttcctgcaaacttcagatgtacaagttgcacttgtacttttatagagttgtaatgttttatatgtgtatggtgcaagagaaaattggatcaaatcaatctgcagttgatgtccccaaatgcaaacacaggcacacacatgcacacacccataaacacacacacagtgctttaagaaagggccaggtgatatcacacccaaatttcacaagcactgaccccctggcaccaacacccgccagtactgtgacttccaaagccagagccacatgtgctcatcaaacttgcattaagcagttggcgggagatggctgtggagctgggggtttaagtgatggttctcttttgctccctcttttgagggtaaagctactgtctttcttaagagtgtatttatgccaagtttgcgcttttaattgtttttattttgttttttaatgaaaacccagatctttcctttttggcataatttttatgatgacctgaaattttacatccgaacaaaattttacatccgaaaagcaaccaacttcttcatggaactcagccctgttgcaatgcttagggcccttaaagaagaaaatctccccagaaggcatccatcatgttgcttaattgtcttctgcagcttcctttccctagagctttccctgtgttgctaagagctgaaaatggcatcttcgtgatcaccacagtgagcttggctcgcctcggccggcccgggatgcactcttacaacatgtgtgactcttgaacctggagttcatcacattacgtcacagcttcccatctggttgctttcctgagtcagctacttcacacttgtcaaggctgttttaccccaaaactcagacaggactttctatgcatgttttccctcctccccccaattcccccccccatcaccttatctcccaggacacacttgagaagtagctttttattcctagtggtgtacatttaattttaaaaaggttgcaatgtatcatgcttgttgccgaaactgtttatggccttcttgtttcagttttttcttttcttccaatggtactttagctgttgagtgcaggttacaacctatattgttatgcagatggcttctttaggaataacttttatatttatttaaaaatttttaaattatgggatgttttgttgttgttgttgtctttgttgttggtcatttgtcaatattcagtcaccaattctgctcacttcttgccatggataaaattgggtctttctggctaattaaaaaagacaactttataaaatggcactttaagcaagccatagttagttttatttttgtaatgcacatggcaaagcaaagacgtttgtgatgaaggaactgctcatctaagcaaaagatttgagtatgatatgataaaggctttctacattctaatttactttttccccccacttgaatgtgttttaaaggctaattatcagctcagtagagcagtgagaaactgatcaaattgcacttgttctcctacaagcaacctccacgcagacacctcgtactgctacaggtgtgtcatttcctttaataggaccagggaccatgtaactgaggtgagggttgtagtagatgcttccagtgtcagtatgcctgttaattttaagagcttccctttcttgcagagaacaagtctgcccagattccatgctttctataactggaggacctggcaaacctgccgcatgctgcacacatctacctacgtacacatatacaatagtattgatgattctgaacaataacagggtaaaacagttggtttgccattgttaaaaactgatttacagtaacttacaacaactgtacttttgttggattagcaaatcatgtgtttaaacaaatcccatatgttgggcaacagttcaaataagcacggagaagtgttgcccaaacttggttctctgactcttatgtatttgtaaggctgggcttcaaaatcaaaacaaaaaccccaaaaacagcaggcaaatgctttttaactctgacaccgttgccataaatccctgatactcaaagtctaacaagaaagacatggaaaattagcagcccattttcagaaagatcaaaatgatctagggttctaattgcttttgcatcctattcttacaaagtgatgtcccaacagggaacagtaggagctggagtgggatctccaagtcccagtttgagtgtgggatgtgcttccagcagtgccttccctttatgaaagacatcacatggcatccagggccaggcaggcagcttgaggtgcctttacgagaaaaccgagctggggctgggagaggacagttattgacactgatgtgcaatgaagtgacaagatgagagcagaatcgtaagagctttgaatttgaagtgagtttttttccccccataagttatttattccttttttctgtgtaaatatatttattttactgtggagcgctaacatctggatcgtaacatgtgcagaatgtatggtaggaatgtattctcttgtaggaatgtaaatctgtattaaaagggggtccaagccaggcccccaggtcttctcattgtatgcacagtccgcattcatttttactcttctctaatatgggtctatttgaaatatgcaaaaggtatgaggaatgttttaatacctccaaatttttaagaaaagcatcaaagggttgatattttttaaagtttttttagtagcactttctctggatgacagaaggagcaaccacatgggcacccttgttcataccaaagggtgagcagtggccagagcctcctctgcacctctcgagtgtctttaccaattgagctttttatcgccatagccccttggagtgccccagctgccctgaggtcaatcaaggaaaatttcttaatgaaataagctccaaagagccaaagtatcaacttacagatcgtttttaaagcttaaatttatgaaccacctttgtggtaaacaatgaattatgaataccgcagggcagccttcttaaatgacaaatgtaaaaaaaaaaaaaaaaaagactctacttcgtgcagcaattgctactctatacgaattgtcttaatttgaaaaccttgctgttacaaattggacctttatacattttctgaaaacaatgaaaagagtatatttaaccttttctggctgtaaatggttaccttcctgtaactgccccgcacctggaggcatggagttgtgtgcatcctgcttatgtacaattgttttcagtgtttctaagaatgagtctgaatggttcttgaaaattagccaggatcaaatgctattgcagacaaagccaataaaaagttggacttcttttggggataacaagttttggaagagaaatgcaggccatatgtgcgcatgaccgagattttgaaaaaagatgtacatagtgacatgtttggtgcatggtttttgaggagggcttttgtcaaaaaggaggtataacctttcccccacagacctgagagctgtgccttttctatgcaatattacagacgttacatcggaacccagatggctgtattcacatgtaggtttgggctgtaatctaaacaattggacagattaaatgtacatggaaatgagcagtcttacttttgtagttttatattatacaataaacagttaaaagatga

SEQ ID NO: 327656 - protein, 314 aa, Artificial Sequence
  derived and/or modified sequence
MLGKGGKRKFDEHEDGLEGKIVSPCDGPSKVSYTLQRQTIFNISLMKLYNHRPLTEPSLQKTVLINNMLRRIQEELKQEGSLRPMFTPSSQPTTEPSDSYREAPPAFSHLASPSSHPCDLGSTTPLEACLTPASLLEDDDDTFCTSQAMQPTAPTKLSPPALLPEKDSFSSALDEIEELCPTSTSTEAATAATDSVKGTSSEAGTQKLDGPQESRADDSKLMDSLPGNFEITTSTGFLTDLTLDDILFADIDTSMYDFDPCTSSSGTASKMAPVSADDLLKTLAPYSSQPVTPSQPFKMDLTELDHIMEVLVGS

SEQ ID NO: 327657 - DNA, 945 bp, Artificial Sequence
  derived and/or modified sequence
atgctaggcaagggcggaaaacggaagttcgatgagcacgaggatggactggaaggcaagatcgtcagcccatgcgatggaccatccaaagtgtcttatacactacagcggcagacgatcttcaatatttctctcatgaagctgtataaccatcggcccctaaccgagccgtccctccagaagacagttttaattaataacatgttgcggagaatccaggaagaactgaaacaagaggggagcttgcgcccaatgttcactccttccagtcagccaaccactgagccaagtgactcgtacagagaagccccacctgccttttcccatctcgcttcaccctcttcacacccctgcgatctgggctcaactacaccactggaagcttgtcttacaccagcctccctccttgaagacgacgatgataccttctgtacgtcacaggcaatgcagcccacggctccaacgaagctgtctcctcccgccctgctgcccgaaaaggactctttttcgtccgctttggatgagattgaagagttgtgcccgacaagcacctctaccgaagccgctacggccgccacggacagcgttaaaggcacctcgagtgaagctggcacacaaaaattggacggccctcaggaaagccgagcggatgactcgaagctcatggactcactgcctggtaatttcgagatcactacttcgacaggctttctgacggatttaactctcgatgatatactgttcgccgatattgatacgagcatgtatgatttcgacccatgtacttccagctctgggacggcaagcaaaatggctcctgtctctgccgatgacctgctgaagacccttgccccatacagcagccagcccgtgaccccgagccagcctttcaagatggacctcacagaactcgatcacatcatggaggttctagtaggcagctag

SEQ ID NO: 327658 - DNA, 945 bp, Artificial Sequence
  derived and/or modified sequence
atgctgggcaagggcggcaagaggaagtttgatgaacatgaagatggcctggagggcaagatcgtgagcccctgtgatggccccagcaaggtgtcctacaccctgcagaggcagaccatcttcaacatcagcctgatgaagctgtacaaccaccggcccctgacagagcccagcctgcagaagacagtgctgatcaacaacatgctgcggcgcatccaggaggagctgaagcaggagggcagcctgcggcccatgttcacccccagcagccagcccaccacagagcccagcgacagctaccgggaggcccccccagccttcagccacctggccagccccagcagccacccctgtgacctgggcagcaccacccccctggaggcctgcctgaccccagccagcctgctggaggatgatgatgacaccttctgcaccagccaggccatgcagcccacagcccccaccaagctgagccccccagccctgctgcctgagaaggacagcttcagcagcgccctggatgaaattgaggagctgtgccccaccagcaccagcacagaggccgccacagctgccacagattctgtgaagggcaccagcagcgaggccggcacccagaagctggatggcccccaggagagcagagcagatgacagcaagctgatggacagcctgcccggcaactttgagatcaccaccagcacaggcttcctgacagacctgaccctggatgacatcctgtttgctgacatcgacacctccatgtatgactttgacccctgcaccagcagcagcggcacagccagcaagatggcccctgtgtctgcagatgacctgctgaagaccctggccccctacagcagccagcctgtgacccccagccagcccttcaagatggacctgacagagctggaccacatcatggaggtgctggtgggcagctag

SEQ ID NO: 327659 - DNA, 945 bp, Artificial Sequence
  derived and/or modified sequence
atgctgggcaagggcggcaagcggaagttcgacgagcacgaggacggcttggaaggcaagatagttagtccctgtgatgggccatctaaggtgagttatacactccaaaggcagacgatcttcaatatatccctgatgaagttatataatcatagacccctgaccgagccatctctccagaaaaccgtcctcatcaataatatgctgcgaagaatccaggaggaactgaaacaggaggggagcttgaggcctatgttcacaccaagctcacagccaactacagaacccagcgactcctatagggaggccccaccggctttcagtcatctggcgtcaccctctagccacccttgtgaccttggatccacaaccccgttggaggcgtgtctgaccccagcatctctgttagaagacgatgatgacactttctgtacttcgcaggccatgcagcctactgcccctactaagttgagtccccctgctctgttacctgaaaaggattctttttctagtgcactagatgagattgaagagctgtgtccaacaagcacatctaccgaggccgcaacagccgctacagactctgttaagggcacaagctccgaggcaggaacacagaagctcgatggcccacaggaaagccgggccgacgattctaagctcatggatagcctccccggcaactttgaaatcaccacgtcaactggattcttgaccgatctgacactggatgacatcctgttcgctgacatcgacacctcgatgtatgatttcgacccctgtacttcctcaagtggcactgcatcgaaaatggctccagtctcagctgatgatctattgaaaacactcgctccttatagcagccagccagtcacccctagtcaacctttcaagatggacctgaccgagctggatcacattatggaagtgttggtggggtcatag

SEQ ID NO: 327660 - DNA, 945 bp, Artificial Sequence
  derived and/or modified sequence
atgttgggtaaaggcggaaaacggaagtttgatgaacatgaagacggactcgaggggaagatcgtttctccttgcgacggcccttccaaagtctcttatacactgcagaggcagacaatcttcaatatctctctaatgaaactgtataatcataggcccctcaccgagccatctcttcaaaaaactgtgctgatcaacaatatgttgcggaggatccaggaggagctgaagcaggagggcagtctgcgacctatgttcacaccctcaagtcagcctaccaccgagcccagtgatagttatagggaggccccacccgctttctcgcatctggcctccccaagcagccatccttgtgacttgggatcaacaactccacttgaagcctgtttaactcctgcctccctgctcgaggacgatgacgacacgttctgtacaagtcaagcaatgcagccaaccgctcctacgaagctcagccctcctgctctgctccccgaaaaggactcatttagcagcgcgttggatgaaatcgaagagctttgtcccacgtctacatcaacggaggccgcaaccgcagcaacggactctgtgaagggaacgtcatctgaagccggtactcagaaacttgatggaccccaggagagccgcgctgacgattctaagctcatggacagtcttcccggaaattttgaaatcacaactagcactgggttcctgaccgatctgaccctggacgacatcttatttgcggacatcgacacgtccatgtatgatttcgacccatgtacttcgtctagcggcaccgcttccaagatggctcctgtcagcgcagatgacctgctgaagacactggccccttactcatcacagccagttacaccttcccagccgttcaagatggatttgacggagttagatcacataatggaggttctggtcgggtcatag

SEQ ID NO: 327661 - DNA, 945 bp, Artificial Sequence
  derived and/or modified sequence
atgctgggcaagggcggcaagagaaagttcgacgagcacgaggacggcctggagggcaagatcgtgagcccctgcgacggccccagcaaggtgagctacaccctgcagagacagaccatcttcaacatcagcctgatgaagctgtacaaccacagacccctgaccgagcccagcctgcagaagaccgtgctgatcaacaacatgctgagaagaatccaggaggagctgaagcaggagggcagcctgagacccatgttcacccccagcagccagcccaccaccgagcccagcgacagctacagagaggccccccccgccttcagccacctggccagccccagcagccacccctgcgacctgggcagcaccacccccctggaggcctgcctgacccccgccagcctgctggaggacgacgacgacaccttctgcaccagccaggccatgcagcccaccgcccccaccaagctgagcccccccgccctgctgcccgagaaggacagcttcagcagcgccctggacgagatcgaggagctgtgccccaccagcaccagcaccgaggccgccaccgccgccaccgacagcgtgaagggcaccagcagcgaggccggcacccagaagctggacggcccccaggagagcagagccgacgacagcaagctgatggacagcctgcccggcaacttcgagatcaccaccagcaccggcttcctgaccgacctgaccctggacgacatcctgttcgccgacatcgacaccagcatgtacgacttcgacccctgcaccagcagcagcggcaccgccagcaagatggcccccgtgagcgccgacgacctgctgaagaccctggccccctacagcagccagcccgtgacccccagccagcccttcaagatggacctgaccgagctggaccacatcatggaggtgctggtgggcagctag

SEQ ID NO: 327662 - protein, 283 aa, Artificial Sequence
  derived and/or modified sequence
MTGEQMAAFHPSSTPNPLERPIKMGWLKKQRSIVKNWQQRYFVLRAQQLYYYKDEEDTKPQGCMYLPGCTIKEIATNPEEAGKFVFEIIPASWDQNRMGQDSYVLMASSQAEMEEWVKFLRRVAGTPCGAVFGQRLDETVAYEQKFGPHLVPILVEKCAEFILEHGRNEEGIFRLPGQDNLVKQLRDAFDAGERPSFDRDTDVHTVASLLKLYLRDLPEPVVPWSQYEGFLLCGQLTNADEAKNYRNRNDCQSVVSAQIHQFCPRVSLLAHGQAHLLVNDLLV

SEQ ID NO: 327663 - DNA, 852 bp, Artificial Sequence
  derived and/or modified sequence
atgaccggggagcagatggcagcctttcacccttcatccaccccaaacccactggagaggccaatcaagatgggatggttgaaaaagcagcggtctatcgttaagaactggcagcagcgatacttcgttctaagagcccagcagctttactattacaaagatgaagaggacacgaagccccagggctgcatgtacctgccagggtgtactataaaggagatcgccaccaatccagaggaggcagggaaattcgtctttgagatcatcccagcgtcttgggaccagaatagaatggggcaggattcctatgtcctgatggcaagttcccaggccgagatggaggaatgggttaagtttctgcgacgcgtggctggaactccttgtggggcagtattcggccagcggctggatgaaacagtggcttacgagcagaaatttggtccacatctcgtgcccattcttgtggaaaagtgcgcggagttcatactggaacacggtagaaatgaggaggggatatttcgactgcccggacaagataatctagtgaagcagttgcgagacgcctttgacgccggggagcgccctagctttgatagggacaccgacgttcataccgtggcttccttgctgaaattatacctccgtgatctgcctgaaccggtcgttccatggagccagtacgagggattcttactgtgtggtcagcttacaaacgctgatgaggccaagaactatcgaaaccggaacgactgtcagtccgttgtttcagcacagatacaccagttttgcccacgggtgtcactgttagcgcatggccaggctcacctgctcgtgaacgacctactagtttag

SEQ ID NO: 327664 - DNA, 852 bp, Artificial Sequence
  derived and/or modified sequence
atgaccggagagcagatggccgcattccacccctcctcgacacctaatcccctagaaaggcctatcaagatgggctggcttaagaagcaacggtcaattgtgaagaactggcaacaacggtacttcgtcctgagagcgcagcaactgtactactataaagacgaagaagatacgaagccacaagggtgcatgtatctcccaggctgcaccattaaagaaatcgccacaaaccccgaggaagccggtaagtttgtgttcgagatcattcccgccagctgggatcagaaccgcatgggccaagactcgtatgtgctcatggcgtcaagccaggctgaaatggaggagtgggtcaagtttctcagacgcgttgccgggactccttgcggggctgtattcgggcagcgcctggatgaaaccgtcgcctacgaacaaaaatttggcccacaccttgtgcctatcctcgttgagaagtgcgccgaatttattctggaacacggccggaatgaggaaggcatcttccgtctccccggtcaggacaatctagtaaagcaattaagagacgcgtttgacgctggagagcgcccttcttttgatcgagacactgacgtccacaccgtggcatcactcctcaagctctacctacgagacctcccagagcccgtagtcccatggagccaatacgaggggttcctgttatgtggacagctcactaacgcggatgaggccaagaactaccggaacaggaacgattgtcaatccgtcgtcagtgcacagatccatcagttctgcccccgcgtatccctcctagcccatggccaagctcacctcctggtgaacgacttgttggtatag

SEQ ID NO: 327665 - DNA, 852 bp, Artificial Sequence
  derived and/or modified sequence
atgaccggggagcagatggccgccttccaccccagcagcacccccaaccccctggagcggcccatcaagatgggctggctgaagaagcagaggagcatcgtgaagaactggcagcagcgctactttgtgctgcgggcccagcagctgtactactacaaggatgaggaggacaccaagccccagggctgcatgtacctgcccggctgcaccatcaaggagatcgccaccaaccctgaggaggccggcaagtttgtgtttgagatcatcccagcctcctgggaccagaacaggatgggccaggacagctatgtgctgatggccagcagccaggccgagatggaggagtgggtgaagttcctgcggcgggtggccggcaccccctgtggggctgtgtttggccagaggctggatgaaacagtggcctatgagcagaagtttggcccccacctggtgcccatcctggtggagaagtgtgccgagttcatcctggagcacggcagaaatgaggagggcatcttccggctgcccggccaggacaacctggtgaagcagctgagagatgcctttgatgctggggagcggcccagctttgaccgggacacagatgtgcacacagtggccagcctgctgaagctgtacctgcgggacctgcctgagcctgtggtgccctggagccagtatgagggcttcctgctgtgtggccagctgaccaatgctgatgaggccaagaactacagaaacagaaatgactgccagagcgtggtgtctgcccagatccaccagttctgcccccgggtgtccctgctggcccacggccaggcccacctgctggtgaatgacctgctggtgtag

SEQ ID NO: 327666 - DNA, 852 bp, Artificial Sequence
  derived and/or modified sequence
atgaccggcgagcagatggccgccttccaccccagcagcacccccaacccattagagcggccgattaagatgggctggctgaagaagcaaaggagtatcgtgaaaaactggcaacagaggtacttcgttctgcgagcccagcagctctactattataaggatgaagaggatacaaagccacagggatgtatgtatctgccggggtgtaccatcaaggagatcgccaccaatcccgaggaggctgggaaattcgtcttcgaaatcattcccgccagttgggaccaaaataggatgggtcaggatagttatgtcctgatggcatcatctcaggccgaaatggaggagtgggtgaagttcctgcggagggtggctggcactccatgcggagcagttttcgggcaacggcttgatgaaaccgtagcctatgaacagaagttcggccctcacctggtgccaatcctggtcgagaagtgcgcagaattcatcttagagcatgggagaaacgaggagggaatatttagactgccaggccaggataatctggtgaagcagctgcgggacgcgtttgatgctggcgagcgcccatctttcgacagggatactgatgttcatactgtggccagtctcctcaagctatatttacgggacctgcccgaacccgtagtgccatggtctcaatacgaaggctttctgctctgtggacaactcactaacgcagatgaagcaaagaactaccgcaatcgaaacgactgtcagtcagtggtgtcggcccagattcaccagttctgcccgagggtgtccctgttagcacatggacaggcccatctgctcgtgaatgacttactggtgtag

SEQ ID NO: 327667 - DNA, 852 bp, Artificial Sequence
  derived and/or modified sequence
atgaccggcgagcagatggccgccttccaccccagcagcacccccaatcccctcgagcgcccgatcaagatgggatggttgaagaagcagcgttccatagtgaagaactggcagcagcggtactttgtgctgcgggcacagcagctatactactacaaagacgaggaagacaccaaaccacagggctgtatgtacctgccgggctgcacaatcaaagagattgcgacaaatccagaggaggcaggaaaatttgtgtttgaaattatccccgcatcatgggaccagaataggatgggccaggactcgtatgtacttatggcaagctcacaggcggagatggaggaatgggtaaaatttctcaggcgggtggccgggaccccctgtggggccgtgttcggtcagcgcttggatgagacagtagcatatgagcagaagttcggaccccacctggtgcccattctggtcgagaaatgcgccgagtttatcctcgaacacggacgtaacgaagagggcatattcaggctgcccggccaggataatttggtaaagcaactcagggacgccttcgacgcgggcgagaggccaagcttcgaccgtgacaccgacgtccatactgtggcaagcttgctgaaattgtatctcagggatctgccggagcctgtcgtaccctggtcccagtatgaggggtttcttctctgtggacagttgactaacgctgacgaggcgaagaattatcgcaacagaaacgattgtcagtccgtggtttcagctcagatccatcagttttgccctcgtgtcagccttttagctcacggacaggctcatttgctggtgaacgatctgctagtgtag

SEQ ID NO: 327668 - DNA, 852 bp, Artificial Sequence
  derived and/or modified sequence
atgacgggcgagcagatggccgcttttcatccaagcagcacacccaaccccctcgagagacccattaagatggggtggctaaaaaaacaacgctcaattgtaaaaaactggcagcaaagatatttcgtgctgagagcgcagcagctgtactactacaaagatgaggaggataccaaaccacagggctgtatgtacttaccgggatgcaccattaaggagatagctactaatcccgaagaagcagggaagtttgtgtttgaaatcatccccgcttcctgggatcagaatagaatggggcaagactcttatgtcctgatggctagcagccaagcagagatggaggagtgggtgaagtttcttagacgagtcgcgggtaccccctgtggggctgttttcggccagcgccttgacgagacagtagcctatgagcagaaatttggtcctcatcttgtgcccatcctggtggaaaaatgcgcagaatttatattggagcacggcagaaacgaggaaggaattttccgacttcccggtcaggataatctggtgaagcagctcagggatgcatttgacgccggagaacgaccatcattcgatagagacactgacgtccatactgtggcctcgcttctgaagctgtatttacgcgacctcccggaaccagtggtgccttggtcccagtatgaaggatttctcttgtgcggccagctcactaacgccgacgaggcgaaaaattatagaaataggaacgactgccagtctgtggtgtccgcacaaattcaccaattttgcccgagagtgagtctgctagctcacggtcaggctcaccttttggtgaatgatctgctggtgtag

SEQ ID NO: 327669 - DNA, 852 bp, Artificial Sequence
  derived and/or modified sequence
atgactggagagcaaatggccgcatttcaccctagcagtactcctaacccactcgaacgccctataaagatgggatggctgaagaaacagagatccatcgtgaaaaattggcaacagagatactttgtgctgcgtgcccaacagctgtattactataaggacgaagaggataccaaaccgcaaggatgcatgtatctgccaggctgcacaatcaaggagattgctactaaccccgaggaggccggtaaattcgtatttgaaatcattcccgcatcatgggatcagaatcggatgggccaagacagttacgtgttaatggcgagtagccaggcagaaatggaggagtgggtgaaattccttcgtcgagtagcgggaactccttgtggtgctgtctttggtcagcggttggacgagacagtggcttacgagcagaagttcggacctcatctagtcccaatactcgtcgaaaagtgcgcagagtttatcctggaacacggtaggaacgaagaaggcatctttaggctacccggtcaagacaatcttgttaagcagctccgtgatgcttttgacgctggggaacgcccatcctttgatcgagatacagatgtgcataccgtggccagcttgctgaaactgtatctgcgggatttgccggaaccagtcgtcccatggagccaatacgaaggcttcctgctttgcggtcagttgactaatgccgatgaggccaagaattaccggaaccggaacgattgccagagcgttgtgagcgcgcagatccaccagttttgccctcgtgtgtcactgttggctcacgggcaggcccacctgctcgtgaatgacctcttagtgtag

SEQ ID NO: 327670 - DNA, 852 bp, Artificial Sequence
  derived and/or modified sequence
atgaccggcgagcagatggccgccttccaccccagcagcacccccaaccccctggagagacccatcaagatgggctggctgaagaagcagagaagcatcgtgaagaactggcagcagagatacttcgtgctgagagcccagcagctgtactactacaaggacgaggaggacaccaagccccagggctgcatgtacctgcccggctgcaccatcaaggagatcgccaccaaccccgaggaggccggcaagttcgtgttcgagatcatccccgccagctgggaccagaacagaatgggccaggacagctacgtgctgatggccagcagccaggccgagatggaggagtgggtgaagttcctgagaagagtggccggcaccccctgcggcgccgtgttcggccagagactggacgagaccgtggcctacgagcagaagttcggcccccacctggtgcccatcctggtggagaagtgcgccgagttcatcctggagcacggcagaaacgaggagggcatcttcagactgcccggccaggacaacctggtgaagcagctgagagacgccttcgacgccggcgagagacccagcttcgacagagacaccgacgtgcacaccgtggccagcctgctgaagctgtacctgagagacctgcccgagcccgtggtgccctggagccagtacgagggcttcctgctgtgcggccagctgaccaacgccgacgaggccaagaactacagaaacagaaacgactgccagagcgtggtgagcgcccagatccaccagttctgccccagagtgagcctgctggcccacggccaggcccacctgctggtgaacgacctgctggtgtag

SEQ ID NO: 327671 - protein, 914 aa, Artificial Sequence
  derived and/or modified sequence
MFPVFSGCFQELQEKNKSLELVSFEEVAVHFTWEEWQDLDDAQRTLYRDVMLETYSSLVSLGHYITKPEMIFKLEQGAEPWIVEETPNLRLSAVQIIDDLIERSHESHDRFFWQIVITNSNTSTQERVELGKTFNLNSNHVLNLIINNGNSSGMKPGQFNDCQNMLFPIKPGETQSGEKPHVCDITRRSHRHHEHLTQHHKIQTLLQTFQCNEQGKTFNTEAMFFIHKRVHIVQTFGKYNEYEKACNNSAVIVQVITQVGQPTCCRKSDFTKHQQTHTGEKPYECVECEKPSISKSDLMLQCKMPTEEKPYACNWCEKLFSYKSSLIIHQRIHTGEKPYGCNECGKTFRRKSFLTLHERTHTGDKPYKCIECGKTFHCKSLLTLHHRTHSGEKPYQCSECGKTFSQKSYLTIHHRTHTGEKPYACDHCEEAFSHKSRLTVHQRTHTGEKPYECNECGKPFINKSNLRLHQRTHTGEKPYECNECGKTFHRKSFLTIHQWTHTGEKPYECNECGKTFRCKSFLTVHQRTHAGEKPYACNECGKTYSHKSYLTVHHRTHTGEKPYECNECGKSFHCKSFLTIHQRTHAGKKPYECNECEKTFINKLNLGIHKRTHTGERPYECNECGKTFRQKSNLSTHQGTHTGEKPYVCNECGKTFHRKSFLTIHQRTHTGKNRMDVMNVEKLFVRNHTLLYIRELTPGKSPMNVMNVENPFIRRQIFRSIKVFTRGRNPMNVANVEKPCQKSVLTVHHRTHTGEKPYECNECGKTFCHKSNLSTHQGTHSGEKPYECDECRKTFYDKTVLTIHQRTHTGEKPFECKECRKTFSQKSKLFVHHRTHTGEKPFRCNECRKTFSQKSGLSIHQRTHTGEKPYECKECGKTFCQKSHLSRHQQTHIGEKSDVAEAGYVFPQNHSFFP

SEQ ID NO: 327672 - DNA, 3068 bp, Artificial Sequence
  derived and/or modified sequence
gtttgtattagttgggtttcccggtgtctctttagcaagtgaagtttctggttccctccttcactgtgtgacctgcctagtcctcctgggttgcgtttacagaagtttatacgagacctagtttccagggaagaactcactgatgccgcgagggagatggggtactggatgatggtcttcagccttaagggtacttcagtcttaaccgtgtgttataaggtttgaaagggagggttccctatgaataagaagcgcacttgaaagaacagccctctggtctaacctcccactggtgcttcagaggaggataaaaggtcacagctatgtttccagtgttctctggctgtttccaagagctacaagaaaagaataaatctctggagttggtgtcctttgaggaggtagctgtgcacttcacctgggaggagtggcaggacctggatgatgctcagaggaccctgtacagggacgtgatgctggagacctacagcagcctggtatcattggggcattacattaccaaacctgagatgatcttcaagctagagcaaggagcagagccatggatagtagaagaaaccccaaacctgagactttcagctgtccagatcattgatgaccttattgaaaggagccatgaaagtcatgatagatttttctggcaaattgtaatcaccaacagcaacacatcaactcaggagagagttgaattaggaaaaacatttaatttgaactcaaaccatgttttaaatctgattataaataatggaaacagttcaggaatgaagcctgggcagtttaatgattgccagaacatgcttttccctattaagcctggggagacacagtctggagagaaacctcatgtctgtgatataaccaggagatcccacagacatcatgaacatcttactcagcatcacaagattcaaactctgctgcagacttttcaatgtaatgaacaagggaaaaccttcaacacggaggcaatgttctttatacataagagggttcatatagtacagacctttggtaaatataatgaatatgagaaagcctgtaataactcagctgttattgtccaagtgataactcaggtaggacagccaacttgctgtagaaagtctgacttcactaaacatcagcagacacacacaggagagaaaccctatgaatgtgttgaatgtgagaaaccctccattagcaaatcagaccttatgctacagtgcaagatgcctactgaggaaaaaccttatgcctgtaactggtgtgaaaaattgttcagctataagtccagcctcattatccatcagagaattcacacaggggaaaagccctatggatgcaatgaatgtggtaaaacctttcgccgtaagtcattcctcactttacatgagagaactcacacaggggataaaccctacaaatgtattgaatgtggaaaaacttttcactgtaagtcacttctcactttacatcacagaactcactcaggggaaaagccctatcagtgtagtgaatgtggaaaaacctttagccagaagtcatacctcacaatacatcatagaactcacacaggggaaaagccctatgcatgtgaccattgtgaagaagcatttagccataagtcaaggcttactgtccatcagagaacacacacaggggaaaaaccgtatgaatgtaatgagtgtggaaaaccctttatcaataagtcaaacctcaggttacatcagagaactcacacaggggaaaaaccctatgaatgcaatgaatgtgggaaaacgtttcaccgtaagtcattcctcactatccatcaatggactcacacaggggaaaaaccctacgaatgcaatgaatgtgggaaaacctttcgctgtaagtcattcctcactgtccatcagagaactcatgctggggaaaaaccatacgcatgtaacgaatgtggaaaaacatatagccacaagtcataccttacagtacatcacagaactcacacaggggaaaaaccctatgaatgtaatgaatgtggaaaatcctttcactgtaagtcattcctaactatacatcagagaactcatgctggcaaaaaaccctatgaatgtaatgaatgtgagaaaacctttatcaataagttaaaccttgggatacacaagagaactcacacaggggaaagaccctatgaatgtaatgaatgtggaaaaacctttcgtcagaagtcaaatctcagcacccatcagggaactcacacaggagagaaaccttacgtatgtaatgaatgtggaaaaacctttcatcgcaagtcattcctcaccatacaccagagaactcacacggggaaaaaccgtatggatgtaatgaatgtggaaaaactttttgtcagaaatcataccttattatacatcagagaactcacaccggggaaaagccctatgaatgtaatgaatgtggaaaatcctttcatcagaaggcaaatcttcagaagcatcaaggtattcacacgggggagaaaccctatgaatgtagcaaatgtggaaaaaccttgtcagaagtcagtcctcactgtacatcatagaacccataccggagaaaaaccttatgaatgtaatgagtgtgggaaaaccttttgtcacaagtcaaacctcagtacgcatcaggggactcactcaggagagaaaccctatgaatgtgatgaatgtaggaaaactttttacgataagacagttctcaccatacatcagagaactcacacaggtgagaagccatttgaatgtaaagaatgtaggaaaaccttctcccagaagtcaaaactctttgtacatcacagaactcacacaggggaaaaaccctttagatgtaatgaatgtaggaaaactttctcccagaagtcaggcctcagtatacatcagagaacacacacaggagaaaaaccttatgaatgtaaggaatgtgggaaaaccttttgccagaagtcacacctcagcaggcatcaacaaacccatataggagagaaatctgacgtagctgaggcaggctatgtgttccctcaaaatcactcttttttcccttga

SEQ ID NO: 327673 - DNA, 981 bp, Artificial Sequence
  derived and/or modified sequence
atgttctttatacataagaaggttcatataggacagacctttggtaaatataatgaatatgagaaagcctgtaataacttagctattattgtccaagggataactcaggtaagacagccaacttgctgtagaaagtctgacttcagtaaacatcagcaaacacacacaggagagaaaccccatgaatgtgttgaatgtgagaaaccctccattagcaaatcagacctcatgatacagcacaagatgcctactgaggaaaaaccttatgcctgtaactgctgtgaaaaattgttcagctataagtccagcctcactatccatcagagaattcacacaggggaaaagccctatggatgcaatgaatgtggaaaaaccgttcgctgtaagtcattcctcactttacatcagagaactcacactggggataagccctacaaatgtattgaatgtggaaaaaccttcactgtaaatcaacttctcactttacatcacagaactcactcaggggaaaagccctatcagtgtagtgaatgtggaaaaacctttagtcagaagtcatacctcacaatacatcatagaactcacacctggcaaaagccctatgcatgtgaccattgtgaaaaagcatttagccataagtcaaagcttactgtccatcagagaacacacacaggggaaaagccctatgaatataatgagtgtagaaaaccctttatcaataagtcaaacctcaggatacatcagagaactcacattagggaaaaaccctatgaatgcaatgaatgtgggaaaacgtttcaccaaaagtcgttcctcactgtccatcaaaggactcacaggcggaaaaaaccctacgaatgcaatgaactggggaaaacctttcactgtaagtcattcctcactgtccatcagaaaactcatactggggaaaaaccatatgcatgtaacaaatgtggaaaaacatatagccacaagtcataa

SEQ ID NO: 327674 - protein, 149 aa, Artificial Sequence
  derived and/or modified sequence
GTKCRVSRTERSGRYGSIIDRDDRDERESRSRRRDSDYKRSSDDRRGDRYDDYRDYDSPERERERRNSDRSEDGYHSDGDYGEHDYRHDISDERESKTIMLRGLPITITESDIREMMESFEGPQPADVRLMKRKTEKVGDSRKAHCNAL

SEQ ID NO: 327675 - DNA, 2716 bp, Artificial Sequence
  derived and/or modified sequence
actgtgggtaggagacggccgtcggcggaggcgccattttgtgtagccgccgaaccttgttggaggttctggggcgcagaaccgctactgctgcttcggtctctccttgggaaaaaataaaatttgaaccttttggagctgtgtgctaaatcttcagtgggacaatgggttcagacaaaagagtgagtagaacagagcgtagtggaagatacggttccatcatagacagggatgaccgtgatgagcgtgaatcccgaagcaggcggagggactcagattacaaaagatctagtgatgatcggaggggtgatagatatgatgactaccgagactatgacagtccagagagagagcgtgaaagaaggaacagtgaccgatccgaagatggctaccattcagatggtgactatggtgagcacgactataggcatgacatcagtgacgagagggagagcaagaccatcatgctgcgcggccttcccatcaccatcacagagagcgatattcgagaaatgatggagtccttcgaaggccctcagcctgcggatgtgaggctgatgaagaggaaaacaggtgagagcttgcttagttcctgatattattgttctcttccccattcccacctcagtccctaaagaacatcctgattcccccagtcttcaagcacatgaattcagaatgaaaggtttgccatggctaaggaatgtgactctttgaaaaccatgttagcatctgaggaacttttttaaactttgttttagggacttttttttccttaggtaagtaatgatttataaactcctttttttttttgactatagtcggttgcatggttactttaagcgtggaatcaaatggagtggcatttagttcaggcggcttgttccttgccatggcaaagtatcaagaagatccccaagtcaagtcacatttgtaaagctgcttcccaattggctttgtcacgcagtgttgaagcagtgggagagagattcacctgttataaaggaactgactaacacaagtatcccgtctatatctgaatgctgtctctaggtgtaagccgtggtttcgccttcgtggagttttatcacttgcaagatgctaccagctggatggaagccaatcaggttgcttcactcaccaagtctagatattcatgaaaatggaacaagtctgtacaattttaaaaaaaggttgaaggagtggtttgttccaaaggagtgacttttttttaaaaaaaaagctttgtatatattaaaattgatgttactagaataagtacagtaccaaggacttcattatagaatttgttctgcctttaaacatggctacctacctggcagggctttgttaactactgaatacctgtctggtaatcactaaaacatcttaatgtttcccttttttctagtttgttatattcctattatgtccattgagagtaagcttagtatatcaaactctccatttgacagtgaagagaacatagtgaaagtctgtggcggcatttttataagtaattccttatttctgcctgaagaccacaaagcctcctggaggcgtaactgctcagaccggtcttcagggaatatttaaggacttagtggaatttatgaacaataagtctgatgagattagcctgggagtggtgtcctgcagctgtctaatctagttagagtggcattaacattctaatctccttgagaatgccttttatagtctgttcaaagcaagtcattgatggttcttcgaggtagtgttaactgaagtgttcttcagtttgtcaagataatgttcagtgcttggcacttaaataacattttttgcaagaactccaaggcacattattgaatgcctttaaccaagtgcattctgggaagtttgcttgactcattatcttgcttttctgcagcattctgtgatttgagtcatccatgaatccatgaataaaagttacattctttgattggtaatattgccatttataacaagactcactaatgagggtatcactttgactgactgatttgttaaagtttttaagcctctcattttcctaacccagaaatcacagcctgattttattaaaagtagagcttcattcatttcataccatagataccatcctagtaaatccagaacatatacaaggttcatgtgagtctgctttcttgacatgatagcattgtttgatgcagtggatatgtcagaatgactaacctaggagtttaaaactcctaagaaactaaaacctgtaagacatttaaaagtctccacaattttaatgtatacaaagctatgttactgtgtaacacattacagttcaaattcactccagaaataaaaggccagtaggattagggactcactggtagtttggagtctcccagcacacatccctcctagtgggatgatctattcacatatctcccagcttttttatttttgcttctgtatatcacagtgagtggatggcccttcagctttttctctcctggccagacatgcagtcttgcctttagatatcgcagagacaaaattcacagcatgtcttaaatcttccaggatttgcaagaaccaaattgctcaacagtatgtatgtttagaggggttagactcctttttaaaatctggatatctaaccacctacttaaatctgtttgatagtgtcaaaccacccccacccttgatcctcccacccccaagaaaaagaaaa

SEQ ID NO: 327676 - DNA, 569 bp, Artificial Sequence
  derived and/or modified sequence
attttgtgtagccgccgaaccttgttggaggttctggggcgcagaaccgctactgctgcttcggtctctccttggggtaagtgcggcggctgtctgtaacgacgaaaaaataaaatttgaaccttttggagctgtgtgctaaatcttcagtgggacaatgggttcagacaaaagagtgagtagaacagagcgtagtggaagatacggttccatcatagacagggatgaccgtgatgagcgtgaatcccgaagcaggcggagggactcagattacaaaagatctagtgatgatcggaggggtgatagatatgatgactaccgagactatgacagtccagagagagagcgtgaaagaaggaacagtgaccgatccgaagatggctaccattcagatggtgactatggtgagcacgactataggcatgacatcagtgacgagagggagagcaagaccatcatgctgcgcggccttcccatcaccatcacagagagcgatattcgagaaatgatggagtccttcgaaggccctcagcctgcggatgtgaggctgatgaagaggaaaacaggtg

SEQ ID NO: 327677 - DNA, 427 bp, Artificial Sequence
  derived and/or modified sequence
cttgtctcctagaaaaaataaaatttgaaccttttggagctgtgtgctaaatcttcagtgggacaatgggttcagacaaaagagtgagtagaacagagcgtagtggaagatacggttccatcatagacagggatgaccgtgatgagcgtgaatcccgaagcaggcggagggactcagattacaaaagatctagtgatgatcggaggggtgatagatatgatgactaccgagactatgacagtccagagagagagcgtgaaagaaggaacagtgaccgatccgaagatggctaccattcagatggtgactatggtgagcacgactataggcatgacatcagtgacgagagggagagcaagaccatcatgctgcgcggccttcccatcaccatcacagagagcgatattcgagaaatgatggagtcctt

SEQ ID NO: 327678 - DNA, 582 bp, Artificial Sequence
  derived and/or modified sequence
acgttattaatgtagtagatttcagtcagctcagtatcccagcttctacgaggttttacatttttcatcagaagtgtttgaatttcatgttgctccttgtattaatgaagacacttggattaatgttttaacggtcaactatcccacggagttgctttgatacaaaaccaaggagctgattgtagctctgccctttttgctttgtaattctaagaaaaaataaaatttgaaccttttggagctgtgtgctaaatcttcagtgggacaatgggttcagacaaaagagtgagtagaacagagcgtagtggaagatacggttccatcatagacagggatgaccgtgatgagcgtgaatcccgaagcaggcggagggactcagattacaaaagatctagtgatgatcggaggggtgatagatatgatgactaccgagactatgacagtccagagagagagcgtgaaagaaggaacagtgaccgatccgaagatggctaccattcagatggtgactatggtgagcacgactataggcatgacatcagtgacgagagggagagcaagaccatcatgctgcgcggcctt

SEQ ID NO: 327679 - DNA, 363 bp, Artificial Sequence
  derived and/or modified sequence
atgggttccgacaagagagtttccagaaccgagaggtcgggccgctatggatctattatcgatcgcgatgatagagacgagagagaatcccgctcccgccggagagacagcgattacaagcgaagctccgatgatagacggggggaccgttacgacgactaccgggactacgacagcccggagagagagagggagcgacgaaactctgatcgttcagaggacggatatcactccgacggagactacggggaacacgattatcgccacgatattagtgacgagcgggaatctaagaccatcatgttgcgcggactgcctattacaatcaccgaatccgacatacgggagatgatggaatcctag

SEQ ID NO: 327680 - DNA, 318 bp, Artificial Sequence
  derived and/or modified sequence
atgggctctgacaaacgagtcagcaggactgaaagatctggccgctatgggtccatcatcgatcgggatgatagagacgaacgcgagtctagatcgcgacggcgggattcagactacaaaaggagctcggacgacagaagaggtgaccggtatgatgattaccgcgattacgactcccctgaaagggagcgagagcgcaggaattccgatcgctcagaggatgggtatcattctgacggcgactacggggagcatgattatcgccatgacattagcgatgaaagagagagtaagacaatcatgctccgggggctctag

SEQ ID NO: 327681 - DNA, 414 bp, Artificial Sequence
  derived and/or modified sequence
atgggctctgataagcgggtcagcagaactgaaagaagtggtcgctatggctccataattgacagggacgatcgggatgaaagagagagtagatctcgcagacgggattccgactataaacggtccagtgatgacaggcgtggagacaggtacgatgactatcgcgactatgattctccagaacgtgaacgggagcgccggaattcggacaggagtgaagacggataccatagcgacggcgattatggtgagcacgactatcggcacgacataagcgacgaaagagagtccaaaaccataatgctacggggattgcccattactatcacagaatccgacattcgagagatgatggaatccttcgagggccctcagcctgcagatgtgcgattgatgaaacggaaaactggctag

SEQ ID NO: 327682 - DNA, 432 bp, Artificial Sequence
  derived and/or modified sequence
atgggatcagataagagagtctcacgcaccgagcgatctgggcggtatggaagtatcatcgatcgagacgatagagatgagcgggagtccaggagcaggaggcgcgactctgactataaacgatcaagcgatgaccgacggggcgatcggtacgatgactaccgcgactatgacagtcccgagagagaacgcgagaggaggaacagtgataggtcagaagatggataccacagcgacggggactatggggaacatgattacaggcatgatatatctgacgagagagaatccaagacaataatgcttcggggtctgcctattacaattacagagagcgacattcgtgaaatgatggagtctttcgaaggaccgcaacccgctgacgtacgattaatgaaacggaaaactggggagagtcttctgtcctcctag

SEQ ID NO: 327683 - DNA, 381 bp, Artificial Sequence
  derived and/or modified sequence
atgggttccgacaagagagtgagtagaaccgagagatctgggcggtatgggtctattattgatcgggatgaccgggatgaaagagaaagtagatcccgtaggagggatagtgactacaagcggtcatctgacgaccgccgcggcgaccgctacgatgattatcgggactatgattctccagaaaacgacaaatatagcagaaatgatggtgtacttagaaggcccagcgcctgcggatgcgaggccgacgaggaggaaaaccgctgcaagccatggttcaggctacgtggtgttctgtcgcttgcgagatgctatcagctggacgggagccagagcgagaaggtgggagactcccggaaggcccactgtaatgcattgtag

SEQ ID NO: 327684 - DNA, 450 bp, Artificial Sequence
  derived and/or modified sequence
ggcacaaaatgcagagtctctcgtaccgagcggtctgggcgatatggctctatcatcgatagggacgatagggacgaacgagaaagtcgatcacggagaagagatagcgattacaaaagaagctctgacgaccggcggggggacaggtacgacgattacagagactatgactcccctgaacgggaacgcgagagacggaattctgaccgaagtgaggacggctaccactccgatggcgactacggagagcacgactacagacatgatatctccgacgaaagggagtctaagaccatcatgctgcgcgggctgcctattacaattacagaaagcgatatccgggaaatgatggaatccttcgaggggccacagcccgccgacgtgcggctcatgaaacgcaagacagagaaggtgggagatagccgaaaagcccactgtaacgcgctgtag

SEQ ID NO: 327685 - DNA, 363 bp, Artificial Sequence
  derived and/or modified sequence
atgggcagtgacaagagggtgtccaggacagagaggagcggccgctatggcagcatcatcgacagagatgacagagatgagcgggagagccgcagcagaagaagagacagcgactacaagaggagcagtgatgaccggcggggggacagatatgatgactacagagattatgacagccctgagcgggagcgggagaggaggaacagcgacagaagtgaagatggctaccacagtgatggagactatggagaacatgactacagacatgacatcagtgatgagcgggagagcaagaccatcatgctgcggggcctgcccatcaccatcacagaaagtgacatccgggagatgatggagagctag

SEQ ID NO: 327686 - DNA, 318 bp, Artificial Sequence
  derived and/or modified sequence
atgggcagtgacaagagggtgtccaggacagagaggagcggccgctatggcagcatcatcgacagagatgacagagatgagcgggagagccgcagcagaagaagagacagcgactacaagaggagcagtgatgaccggcggggggacagatatgatgactacagagattatgacagccctgagcgggagcgggagaggaggaacagcgacagaagtgaagatggctaccacagtgatggagactatggagaacatgactacagacatgacatcagtgatgagcgggagagcaagaccatcatgctgcggggcctgtag

SEQ ID NO: 327687 - DNA, 414 bp, Artificial Sequence
  derived and/or modified sequence
atgggcagtgacaagagggtgtccaggacagagaggagcggccgctatggcagcatcatcgacagagatgacagagatgagcgggagagccgcagcagaagaagagacagcgactacaagaggagcagtgatgaccggcggggggacagatatgatgactacagagattatgacagccctgagcgggagcgggagaggaggaacagcgacagaagtgaagatggctaccacagtgatggagactatggagaacatgactacagacatgacatcagtgatgagcgggagagcaagaccatcatgctgcggggcctgcccatcaccatcacagaaagtgacatccgggagatgatggagagctttgagggcccccagcctgcagatgtgcggctgatgaagaggaagacaggatag

SEQ ID NO: 327688 - DNA, 432 bp, Artificial Sequence
  derived and/or modified sequence
atgggcagtgacaagagggtgtccaggacagagaggagcggccgctatggcagcatcatcgacagagatgacagagatgagcgggagagccgcagcagaagaagagacagcgactacaagaggagcagtgatgaccggcggggggacagatatgatgactacagagattatgacagccctgagcgggagcgggagaggaggaacagcgacagaagtgaagatggctaccacagtgatggagactatggagaacatgactacagacatgacatcagtgatgagcgggagagcaagaccatcatgctgcggggcctgcccatcaccatcacagaaagtgacatccgggagatgatggagagctttgagggcccccagcctgcagatgtgcggctgatgaagaggaagacaggagagagcctgctgagcagctag

SEQ ID NO: 327689 - DNA, 381 bp, Artificial Sequence
  derived and/or modified sequence
atgggcagtgacaagagggtgtccaggacagagaggagcggccgctatggcagcatcatcgacagagatgacagagatgagcgggagagccgcagcagaagaagagacagcgactacaagaggagcagtgatgaccggcggggggacagatatgatgactacagagattatgacagcccagaaaatgacaagtacagcagaaatgatggagtgctgcggcggcccagcgcctgtggctgtgaggctgatgaggaggagaaccgctgcaagccctggttccggctgcggggcgtgctgagcctggcccgctgctaccagctggatggcagccagagcgagaaggtgggggacagcaggaaggcccactgcaatgccctgtag

SEQ ID NO: 327690 - DNA, 450 bp, Artificial Sequence
  derived and/or modified sequence
ggcaccaagtgccgggtgtccaggacagagaggagcggccgctatggcagcatcatcgacagagatgacagagatgagcgggagagccgcagcagaagaagagacagcgactacaagaggagcagtgatgacagaagaggagacagatatgatgactacagagattatgacagccctgagcgggagcgggagaggaggaacagcgacagaagtgaagatggctaccacagtgatggagactatggagaacatgactacagacatgacatcagtgatgagcgggagagcaagaccatcatgctgcggggcctgcccatcaccatcacagaaagtgacatccgggagatgatggagagctttgagggcccccagcctgcagatgtgcggctgatgaagaggaagacagagaaggtgggggacagcaggaaggcccactgcaatgccctgtag

SEQ ID NO: 327691 - DNA, 363 bp, Artificial Sequence
  derived and/or modified sequence
atgggcagcgacaagcgggtgagccggaccgagcggagcggccggtacggatctataatcgaccgagatgatcgagacgagcgagaatctcgctcacgacggcgagactccgattacaagaggtcctctgacgataggcggggagatcgatatgatgattatcgggattacgattctcctgagcgggaacgtgaacggaggaattccgatagatcagaagacgggtatcatagcgatggagactatggcgagcatgattacaggcacgatattagtgacgagagggagtctaagaccatcatgctgcgcgggctacccatcacaataacggaaagcgatattcgggagatgatggagtcatag

SEQ ID NO: 327692 - DNA, 318 bp, Artificial Sequence
  derived and/or modified sequence
atgggcagcgacaagcgggtgagccggaccgagcggagcggccggtatggtagcatcattgatcgcgacgatcgggatgagagggagtcacgttcccgaagaagggacagcgactataagcgatcctcagacgatcgaaggggcgacaggtatgacgactatagagattacgattcccctgaacgtgaaagagagcggaggaattctgatagatccgaggacgggtaccatagcgatggcgactatggagagcacgattacagacatgacattagcgacgaacgcgaatctaagaccatcatgctgcgtggtctgtag

SEQ ID NO: 327693 - DNA, 414 bp, Artificial Sequence
  derived and/or modified sequence
atgggcagcgacaagcgggtgagccggaccgagcggagcggccggtacggtagcataatcgacagggacgatcgcgacgagagggagtctcgatccagacgccgagattctgactataaaaggtcaagcgatgaccgccggggagacaggtacgatgattacagggactatgactcccctgaacgggagcgagagagacggaactccgaccgcagcgaggatggctaccactctgatggtgactatggggagcacgactacagacacgacatctccgatgaaagggagtctaaaaccattatgctgaggggtctccccattacgatcacagaatccgacattagggaaatgatggagtctttcgaggggcctcagccagccgacgtccgtctgatgaagagaaagacaggatag

SEQ ID NO: 327694 - DNA, 432 bp, Artificial Sequence
  derived and/or modified sequence
atgggcagcgacaagcgggtgagccggaccgagcggagcggccggtacggctcaatcatcgatcgagatgaccgagacgagagagagtccagatcgagacggcgagacagcgactataagaggtcaagtgatgatagacgaggggaccgctacgatgactatagagattacgacagcccagaacgggagagagaaaggcggaactccgatagaagtgaagacggctaccattctgacggcgactacggggaacatgattacaggcatgacatttctgatgagcgcgagtccaaaaccataatgctgagagggttgcccatcacaattaccgagtccgatattagagagatgatggaatctttcgagggaccacaacccgccgacgttagactcatgaaacgcaagacgggggagagcctgttaagctcctag

SEQ ID NO: 327695 - DNA, 381 bp, Artificial Sequence
  derived and/or modified sequence
atgggcagcgacaagcgggtgagccggaccgagcggagcggccggtatggttctataatcgatcgtgatgatagggatgaaagggaatcgcgctcccgcagacgcgattctgattataagagatctagcgacgacagaaggggcgaccgctacgatgattatcgggattatgatagtcctgaaaatgacaaatactcaaggaatgacggagttcttcgtagaccctccgcatgtggctgtgaagccgacgaggaagaaaatcgatgcaaaccctggtttcgccttcggggagtgctgtccctggcgagatgttaccaactggatggctcacagtccgagaaggtgggtgattcgcgtaaggctcactgtaacgctttatag

SEQ ID NO: 327696 - DNA, 450 bp, Artificial Sequence
  derived and/or modified sequence
ggcaccaagtgccgggtgagccggaccgagcggagcggccggtacgggtctattatcgaccgtgatgaccgcgatgaacgcgaatccaggtcccgtaggagggatagtgactacaagaggtcaagtgacgatagacgtggtgacagatacgatgattacagggactatgatagtccagagcgcgaacgcgaacgacgcaatagtgatcgcagtgaggacggttatcacagtgatggggactacggtgagcatgattataggcacgatatcagcgacgaaagagaatcgaaaactattatgcttaggggattgcctattacaataactgagtccgatattagggagatgatggagtcctttgagggcccacagcctgccgacgtcagactcatgaaaaggaagactgaaaaagtaggcgattccagaaaggctcattgtaatgctctgtag

SEQ ID NO: 327697 - DNA, 363 bp, Artificial Sequence
  derived and/or modified sequence
atgggaagcgataaacgagttagcagaacagagcgtagcggcaggtacggctccataattgacagagacgaccgtgatgaacgagaatctaggtcacggaggagggattctgactataagcggagctctgatgacaggaggggagataggtatgacgattaccgcgattatgacagccctgaacgtgaacgcgagcgcaggaacagcgatcgatccgaggacggctaccatagcgacggtgactacggagagcacgactacaggcacgacatctcggatgaaagggagagcaagacgattatgctgcgaggcttacctattacaataaccgagagtgatatccgtgagatgatggagagctag

SEQ ID NO: 327698 - DNA, 318 bp, Artificial Sequence
  derived and/or modified sequence
atgggctcagacaagagagtttccaggacagaaaggagtgggaggtacggctctatcatcgacagggacgacagagacgaaagggagagccgatcgcgcagacgggacagcgactacaaaagatctagtgacgacaggcgcggtgataggtatgacgattatagagattacgacagccccgagagggaaagggaaaggagaaactccgaccgaagtgaggacgggtaccactccgatggtgattatggtgaacatgattataggcacgatattagcgacgagcgcgagtcgaagaccattatgctccgcggtctgtag

SEQ ID NO: 327699 - DNA, 414 bp, Artificial Sequence
  derived and/or modified sequence
atggggtctgataagagagtgagccggaccgaacgcagtggacgatacgggtctatcattgatagggacgacagggatgagagagagagcagatctcgtagaagagactccgattataagcgttcctcggatgatcgcagaggagaccgctatgatgattatagggactatgacagccccgaacgagagagagagcgccgaaatagcgatcggtcagaggatggttaccacagtgacggtgattacggtgagcatgactaccggcacgatatttcagacgaaagggagtcaaaaactattatgctaagaggcctgcctatcacaattactgaaagcgacataagggaaatgatggaaagctttgagggaccccaacccgctgacgtccggcttatgaagcgcaagactggctag

SEQ ID NO: 327700 - DNA, 432 bp, Artificial Sequence
  derived and/or modified sequence
atgggctccgataaaagggtcagccgaacagagcgcagtggcagatacggctcaattatcgaccgcgatgaccgagacgaacgggagtcccgcagcaggaggcgggactccgactacaagaggtcgtccgacgatcgcagaggggatagatatgatgactatcgcgattacgattctcctgaaagagaaagagagcgcaggaattcagatagatccgaggatgggtatcatagcgatggggactacggcgagcacgactaccgccacgacatcagtgacgagcgcgaatctaaaacaataatgctcaggggtttgcctatcacaattactgaatcggatatacgagagatgatggaatcattcgaagggccacaacccgctgacgtgcgactcatgaagcgcaaaactggcgaaagtctgctatcgtcctag

SEQ ID NO: 327701 - DNA, 381 bp, Artificial Sequence
  derived and/or modified sequence
atgggatccgacaagagggtgtctcgcacagaaaggagtggacggtacggatcaatcatcgaccgggatgacagagacgaaagagaaagccgatccagaaggagggatagcgattataaacgcagctccgacgatcgtaggggagaccggtacgacgactacagggattatgactctccagagaacgacaagtacagccgaaacgacggggtgctgaggaggccaagcgcttgtgggtgcgaggcggacgaggaggaaaatcgctgcaagccgtggttcagactccgaggagttctttccttggcccgatgttaccagcttgacggctcacagagcgagaaagtgggcgactcccggaaagcccactgtaacgccctgtag

SEQ ID NO: 327702 - DNA, 450 bp, Artificial Sequence
  derived and/or modified sequence
gggacaaagtgcagagtgtctcgtactgagcgcagtggtaggtacggttctataattgatagagacgatagagatgaacgcgaatcacggagccgacgaagggactccgactataagaggtcctctgatgatcgtaggggtgacaggtacgacgactatcgtgactatgattcacccgagcgagaacgggagcgtcgcaatagtgatagaagtgaagacggatatcacagtgatggagactacggggaacatgactacaggcatgacatctccgatgagcgagagtccaagaccataatgttaaggggcctgccgataaccatcaccgaatctgatatccgagagatgatggaaagcttcgaaggaccacagccagccgatgtgcgactgatgaaaagaaagacggaaaaagtaggggactcgcgcaaggcccactgtaatgccctctag

SEQ ID NO: 327703 - DNA, 363 bp, Artificial Sequence
  derived and/or modified sequence
atgggcagcgacaagagagtgagcagaaccgagagaagcggcagatacggcagcatcatcgacagagacgacagagacgagagagagagcagaagcagaagaagagacagcgactacaagagaagcagcgacgacagaagaggcgacagatacgacgactacagagactacgacagccccgagagagagagagagagaagaaacagcgacagaagcgaggacggctaccacagcgacggcgactacggcgagcacgactacagacacgacatcagcgacgagagagagagcaagaccatcatgctgagaggcctgcccatcaccatcaccgagagcgacatcagagagatgatggagagctag

SEQ ID NO: 327704 - DNA, 318 bp, Artificial Sequence
  derived and/or modified sequence
atgggcagcgacaagagagtgagcagaaccgagagaagcggcagatacggcagcatcatcgacagagacgacagagacgagagagagagcagaagcagaagaagagacagcgactacaagagaagcagcgacgacagaagaggcgacagatacgacgactacagagactacgacagccccgagagagagagagagagaagaaacagcgacagaagcgaggacggctaccacagcgacggcgactacggcgagcacgactacagacacgacatcagcgacgagagagagagcaagaccatcatgctgagaggcctgtag

SEQ ID NO: 327705 - DNA, 414 bp, Artificial Sequence
  derived and/or modified sequence
atgggcagcgacaagagagtgagcagaaccgagagaagcggcagatacggcagcatcatcgacagagacgacagagacgagagagagagcagaagcagaagaagagacagcgactacaagagaagcagcgacgacagaagaggcgacagatacgacgactacagagactacgacagccccgagagagagagagagagaagaaacagcgacagaagcgaggacggctaccacagcgacggcgactacggcgagcacgactacagacacgacatcagcgacgagagagagagcaagaccatcatgctgagaggcctgcccatcaccatcaccgagagcgacatcagagagatgatggagagcttcgagggcccccagcccgccgacgtgagactgatgaagagaaagaccggctag

SEQ ID NO: 327706 - DNA, 432 bp, Artificial Sequence
  derived and/or modified sequence
atgggcagcgacaagagagtgagcagaaccgagagaagcggcagatacggcagcatcatcgacagagacgacagagacgagagagagagcagaagcagaagaagagacagcgactacaagagaagcagcgacgacagaagaggcgacagatacgacgactacagagactacgacagccccgagagagagagagagagaagaaacagcgacagaagcgaggacggctaccacagcgacggcgactacggcgagcacgactacagacacgacatcagcgacgagagagagagcaagaccatcatgctgagaggcctgcccatcaccatcaccgagagcgacatcagagagatgatggagagcttcgagggcccccagcccgccgacgtgagactgatgaagagaaagaccggcgagagcctgctgagcagctag

SEQ ID NO: 327707 - DNA, 381 bp, Artificial Sequence
  derived and/or modified sequence
atgggcagcgacaagagagtgagcagaaccgagagaagcggcagatacggcagcatcatcgacagagacgacagagacgagagagagagcagaagcagaagaagagacagcgactacaagagaagcagcgacgacagaagaggcgacagatacgacgactacagagactacgacagccccgagaacgacaagtacagcagaaacgacggcgtgctgagaagacccagcgcctgcggctgcgaggccgacgaggaggagaacagatgcaagccctggttcagactgagaggcgtgctgagcctggccagatgctaccagctggacggcagccagagcgagaaggtgggcgacagcagaaaggcccactgcaacgccctgtag

SEQ ID NO: 327708 - DNA, 450 bp, Artificial Sequence
  derived and/or modified sequence
ggcaccaagtgcagagtgagcagaaccgagagaagcggcagatacggcagcatcatcgacagagacgacagagacgagagagagagcagaagcagaagaagagacagcgactacaagagaagcagcgacgacagaagaggcgacagatacgacgactacagagactacgacagccccgagagagagagagagagaagaaacagcgacagaagcgaggacggctaccacagcgacggcgactacggcgagcacgactacagacacgacatcagcgacgagagagagagcaagaccatcatgctgagaggcctgcccatcaccatcaccgagagcgacatcagagagatgatggagagcttcgagggcccccagcccgccgacgtgagactgatgaagagaaagaccgagaaggtgggcgacagcagaaaggcccactgcaacgccctgtag

SEQ ID NO: 327709 - protein, 89 aa, Artificial Sequence
  derived and/or modified sequence
MAAATGDPGLSKLQFAPFSSALDVGFWHELTQKKLNEYRLDEAPKDIKGYYYNGDSAGLPARLTLEFSAFDMSAPTPARCCPAIGTLYN

SEQ ID NO: 327710 - protein, 126 aa, Artificial Sequence
  derived and/or modified sequence
MAAATGDPGLSKLQFAPFSSALDVGFWHELTQKKLNEYRLDEAPKDIKGYYYNGDSAGLPARLTLEFSAFDMSAPTPARCCPAIGTLYNTNTLESFKTADKKLLLEQAANEIWESIKSGTALENPV

SEQ ID NO: 327711 - protein, 66 aa, Artificial Sequence
  derived and/or modified sequence
MAAATGDPGLSKLQFAPFSSALDVGFWHELTQKKLNEYRLDEAPKDIKGYYYNGDSAGLPARLTLE

SEQ ID NO: 327712 - protein, 176 aa, Artificial Sequence
  derived and/or modified sequence
MAAATGDPGLSKLQFAPFSSALDVGFWHELTQKKLNEYRLDEAPKDIKGYYYNGDSAGLPARLTLEFSAFDMSAPTPARCCPAIGTLYNTNTLESFKTADKKLLLEQAANEIWESIKSGTALENPVLLNKFLLLTFADLKKYHFYYWFCYPALCLPESLPLIQGPVGLDQRFSLKQ

SEQ ID NO: 327713 - protein, 1208 aa, Artificial Sequence
  derived and/or modified sequence
MEPLLLGRGLIVYLMFLLLKFSKAIEIPSSVQQVPTIIKQSKVQVAFPFDEYFQIECEAKGNPEPTFSWTKDGNPFYFTDHRIIPSNNSGTFRIPNEGHISHFQGKYRCFASNKLGIAMSEEIEFIVPSVPKFPKEKIDPLEVEEGDPIVLPCNPPKGLPPLHIYWMNIELEHIEQDERVYMSQKGDLYFANVEEKDSRNDYCCFAAFPRLRTIVQKMPMKLTVNSSNSIKQRKPKLLLPPTESGSESSITILKGEILLLECFAEGLPTPQVDWNKIGGDLPKGRETKENYGKTLKIENVSYQDKGNYRCTASNFLGTATHDFHVIVEEPPRWTKKPQSAVYSTGSNGILLCEAEGEPQPTIKWRVNGSPVDNHPFAGDVVFPREISFTNLQPNHTAVYQCEASNVHGTILANANIDVVDVRPLIQTKDGENYATVVGYSAFLHCEFFASPEAVVSWQKVEEVKPLEGRRYHIYENGTLQINRTTEEDAGSYSCWVENAIGKTAVTANLDIRNATKLRVSPKNPRIPKLHMLELHCESKCDSHLKHSLKLSWSKDGEAFEINGTEDGRIIIDGANLTISNVTLEDQGIYCCSAHTALDSAADITQVTVLDVPDPPENLHLSERQNRSVRLTWEAGADHNSNISEYIVEFEGNKEEPGRWEELTRVQGKKTTVILPLAPFVRYQFRVIAVNEVGRSQPSQPSDHHETPPAAPDRNPQNIRVQASQPKEMIIKWEPLKSMEQNGPGLEYRVTWKPQGAPVEWEEETVTNHTLRVMTPAVYAPYDVKVQAINQLGSGPDPQSVTLYSGEDYPDTAPVIHGVDVINSTLVKVTWSTVPKDRVHGRLKGYQINWWKTKSLLDGRTHPKEVNILRFSGQRNSGMVPSLDAFSEFHLTVLAYNSKGAGPESEPYIFQTPEGVPEQPTFLKVIKVDKDTATLSWGLPKKLNGNLTGYLLQYQIINDTYEIGELNDINITTPSKPSWHLSNLNATTKYKFYLRACTSQGCGKPITEESSTLGEGSKGIGKISGVNLTQKTHPIEVFEPGAEHIVRLMTKNWGDNDSIFQDVIETRGREYAGLYDDISTQGWFIGLMCAIALLTLLLLTVCFVKRNRGGKYSVKEKEDLHPDPEIQSVKDETFGEYSDSDEKPLKGSLRSLNRDMQPTESADSLVEYGEGDHGLFSEDGSFIGAYAGSKEKGSVESNGSSTATFPLRA

SEQ ID NO: 327714 - DNA, 3627 bp, Artificial Sequence
  derived and/or modified sequence
atggaaccactgctgctcggccgaggcctgattgtgtacttaatgttcttgctgctgaagttctccaaggctattgagattccctccagcgtgcaacaggtaccaactatcattaaacaatcgaaagtgcaggtagcttttcccttcgacgaatattttcagatcgaatgtgaggctaaggggaacccagagcccaccttttcttggactaaggatggaaatccattctatttcactgatcacaggattatcccatccaataattcaggaacttttaggatacctaatgagggccacattagtcatttccagggaaagtacaggtgctttgcctctaataagctgggcatcgcaatgtccgaagagatcgagttcatcgtcccatccgtgccaaagttccccaaagagaaaatcgatccattggaagttgaagaaggggaccccatcgttcttccgtgtaaccccccaaagggcctgccacctctgcatatctactggatgaatattgaattggaacacattgagcaggacgagagagtttacatgtcccagaagggcgacttgtacttcgccaacgtggaggaaaaagactctcgaaacgattattgctgctttgcagcctttcctcgactcagaaccatcgtccagaaaatgccgatgaagctgacggtcaactcaagcaactctatcaaacagcgaaagcctaagcttttgctcccacctacagagagtgggagcgaaagttccataaccatcctcaagggcgagattctgctgctggagtgttttgctgaaggcttacctacaccccaagtggattggaataaaatcggcggagatctcccaaagggccgagaaaccaaagaaaattacgggaagacactgaaaattgaaaacgtgtcttaccaagacaaaggaaactaccggtgtaccgctagtaattttctaggaactgcaacccacgattttcatgtgatcgtcgaggagccccctagatggaccaagaaacctcagtctgctgtgtacagcactgggtctaacgggatcctgctgtgcgaagccgaaggcgagcctcagccaacgattaagtggagggttaatggcagccctgtggacaatcaccccttcgccggggatgtggtctttccacgggaaatctcatttaccaatctgcaaccaaaccacacggcagtgtaccagtgtgaagcttcaaatgtgcacggtaccatcctcgcgaatgcaaatatcgatgtcgtggatgtaaggccgcttattcagactaaagacggggagaattatgcaaccgtcgtcggctattccgcttttttgcactgcgaattttttgcttcgcctgaggctgttgttagttggcaaaaggtggaggaagtaaagcctttggaaggtagacgataccatatatacgaaaacggaaccctgcagattaaccggacaacagaagaagacgcaggctcttattcctgttgggtggagaacgccatcgggaaaacagctgtgactgcgaatctggatatccggaacgctaccaagctcagagtgtctcctaaaaaccctagaatccctaagcttcacatgcttgagctgcactgcgaatcgaaatgcgacagtcatctgaaacatagtctgaaactgagttggagtaaggacggggaggcgtttgagatcaacgggaccgaagatggccggataatcattgatggcgcaaatttgactataagtaacgtgacgctggaagatcaaggcatctactgctgctcggcgcatacagccctggattctgccgccgacattactcaggtaacagtgctcgacgtacctgatcccccagaaaatttacatctaagtgagcgccagaatagaagtgtcaggttgacttgggaagcgggagcggaccacaacagtaatataagcgagtatatagtcgagtttgagggtaataaagaagagcccgggcgctgggaggaactgacaagagtgcagggcaagaagacaactgttattttgcctctggcacccttcgtgcgctatcagttccgggttatagcagtgaatgaggtgggaaggtcccaacctagtcagccttcggatcaccacgagacccctcctgccgcccccgaccggaatccccagaacattcgggtgcaggctagtcagcccaaggagatgatcatcaaatgggagccccttaaatctatggagcagaatggccccgggctggaatatagagtgacttggaagccacagggggcaccagtcgagtgggaggaggaaactgtcacaaaccacacgctgcgtgttatgacaccagctgtgtacgccccatacgacgtgaaggtgcaggcaattaaccagctcggctccggtccagacccacagtccgtgacgctatacagcggggaagattatccagacacagcccccgtcatccatggcgttgatgtgataaacagcactttggtcaaggtcacctggtccaccgtcccaaaagaccgggttcatggacggttgaaggggtaccagatcaattggtggaaaaccaaatctctcttggacggacggacacacccgaaggaagtaaacatcctgagattcagtggacagcgtaactccgggatggttccctctctggacgcattttcagagttccacctgactgtgcttgcctacaattcaaaaggtgccgggccagagagcgaaccttacatcttccagacacctgagggagtgccggagcagccaacatttctgaaagttatcaaagtggataaggacacagctaccctgtcatggggattgcccaagaaactaaatggtaatctcactggatacctgctgcagtaccaaattatcaacgatacttacgagatcggggagctgaacgacatcaatattactaccccctccaagccaagttggcacctgagcaacctgaacgccaccaccaagtacaagttttatctgcgcgcttgcacttcacaaggctgtgggaagcctattactgaggagagttccacactcggggagggctccaagggcatcggaaagatatccggagtgaacctgacgcagaagacccacccgatcgaggtgtttgagcccggagccgagcacatcgtgcgtcttatgaccaagaactggggcgacaatgacagtatctttcaggatgttattgaaacacgcggcagagagtatgccggcctgtatgatgacatctcaactcagggatggttcattggactcatgtgtgcaattgccctgcttacgctgctgttgctgaccgtatgcttcgtgaaacgaaaccgtggaggcaaatacagcgtaaaagagaaagaggacctacatcccgatcctgagatccagagtgttaaggatgaaaccttcggagagtactctgattcagatgagaagccactgaagggaagtctgaggagtttgaatagagacatgcagcccacagagtccgctgattctttggtcgaatatggggagggcgatcatgggcttttcagcgaagacggctcttttattggagcttacgctggctctaaagagaaaggtagcgtcgaatccaatggtagcagtaccgcaacctttccactcagggcctag

SEQ ID NO: 327715 - DNA, 3627 bp, Artificial Sequence
  derived and/or modified sequence
atggagcccctgctgctgggccggggcctgattgtgtacctgatgttcctgctgctgaagttcagcaaggccatcgagatccccagctctgtgcagcaggtgcccaccatcatcaagcagagcaaggtgcaggtggccttcccctttgatgagtacttccagattgaatgtgaggccaagggcaaccctgagcccaccttctcctggaccaaggatggcaaccccttctacttcacagaccaccgcatcatccccagcaacaacagcggcaccttccgcatccccaatgaaggccacatcagccacttccagggcaagtaccgctgctttgccagcaacaagctgggcatcgccatgtctgaggagattgagttcatcgtgcccagcgtgcccaagttccccaaggagaagattgaccccctggaggtggaggagggggaccccatcgtgctgccctgcaacccccccaagggcctgccccccctgcacatctactggatgaacatcgagctggagcacatcgagcaggatgagcgggtgtacatgagccagaagggggacctgtactttgccaacgtggaggagaaggacagcagaaatgactactgctgctttgctgccttcccccggctgcggaccatcgtgcagaagatgcccatgaagctgactgtgaacagcagcaacagcatcaagcagaggaagcccaagctgctgctgcccccaacagagagcggcagcgagagcagcatcaccatcctgaagggggagatcctgctgctggagtgctttgctgagggcctgcccaccccccaggtggactggaacaagattggaggagacctgcccaagggccgggagaccaaggaaaattatggcaagaccctgaagattgaaaatgtgtcctaccaggacaagggcaactaccgctgcacagccagcaacttcctgggcacagccacccatgacttccacgtgattgtggaggagcccccacgctggaccaagaagccccagagcgctgtgtacagcacaggcagcaatggcatcctgctgtgtgaggccgagggggagccccagcccaccatcaagtggagggtgaatggcagccctgtggacaaccacccctttgctggagatgtggtgttcccccgggagatctccttcaccaacctgcagcccaaccacacagctgtgtaccagtgtgaggccagcaatgtgcacggcaccatcctggccaatgccaacattgatgtggtggatgtgcggcccctcatccagaccaaggatggagaaaattatgccaccgtggtgggctacagcgccttcctgcactgtgagttctttgccagccctgaggccgtggtgtcctggcagaaggtggaggaggtgaagcccctggagggccgccgctaccacatctatgaaaatggcaccctgcagatcaacagaaccacagaagaagatgctggcagctacagctgctgggtggagaatgccatcggcaagacagctgtgacagccaacctggacatcagaaatgccaccaagctgcgggtgagccccaagaacccccgcatccccaagctgcacatgctggagctgcactgtgagagcaaatgtgacagccacctgaagcacagcctgaagctgtcctggagcaaggatggagaggcctttgagatcaatggaacagaagatggccgcatcatcattgatggagccaacctgaccatcagcaatgtgaccctggaggaccagggcatctactgctgcagcgcccacacagccctggacagcgctgctgacatcacccaggtgacagtgctggatgtgcctgaccccccagagaacctgcacctgtctgagcggcagaacagatctgtgcggctgacctgggaggccggggctgaccacaacagcaacatcagcgagtacatcgtggagtttgagggcaacaaggaggagcccggccgctgggaggagctgaccagggtgcagggcaagaagaccaccgtcatcctgcccctggccccctttgtgcgctaccagttccgggtgattgctgtgaatgaggtgggccgcagccagcccagccagcccagcgaccaccacgagaccccacctgctgccccagacaggaacccccagaacatccgggtgcaggccagccagcccaaggagatgatcatcaagtgggagcccctgaagtccatggagcagaatggacctggcctggagtacagagtgacctggaagccccagggcgcccctgtggagtgggaggaggagaccgtgaccaaccacaccctgcgggtgatgaccccagctgtgtatgccccctatgatgtgaaggtgcaggccatcaaccagctgggcagcggccctgacccccagagcgtgaccctgtacagcggggaggactacccagacacagcccctgtgatccacggcgtggatgtgatcaacagcaccctggtgaaggtgacctggagcacagtgcccaaggacagagtgcacggccgcctgaagggctaccagatcaactggtggaagaccaagagcctgctggatggccgcacccaccccaaggaggtgaacatcctgcgcttcagcggccagaggaacagcggcatggtgcccagcctggatgccttcagcgagttccacctgactgtgctggcctacaacagcaagggggccggccctgagagcgagccctacatcttccagaccccagagggcgtgcctgagcagcccaccttcctgaaggtgatcaaggtggacaaggacacagccaccctgtcctggggcctgcccaagaagctgaatggaaacctgaccggctacctgctgcagtaccagatcatcaatgacacctatgagatcggggagctgaatgacatcaacatcaccacccccagcaagcccagctggcacctgagcaacctgaatgccaccaccaagtacaagttctacctgcgggcctgcaccagccagggctgcggcaagcccatcacagaggagagcagcaccctgggggagggcagcaaaggaattggcaagatctctggagtgaacctgacccagaagacccaccccatcgaggtgtttgagcctggagctgagcacatcgtgcggctgatgaccaagaactggggagacaatgacagcatcttccaggatgtgattgagacccggggccgggagtatgccggcctgtatgatgacatcagcacccagggctggttcatcggcctgatgtgtgccatcgccctgctgaccctgctgctgctgactgtgtgctttgtgaagaggaacagaggaggcaagtacagcgtgaaggagaaggaggacctgcacccagaccctgagatccagagcgtgaaggatgagacctttggagagtacagcgacagtgatgagaagcccctgaagggcagcctgcggagcctgaacagagacatgcagcccacagagagcgctgacagcctggtggagtatggagagggggaccacggcctcttctctgaagatggcagcttcatcggggcctatgccggcagcaaggagaagggctctgtggagagcaatggcagcagcacagccaccttccccctgcgggcctag

SEQ ID NO: 327716 - DNA, 3627 bp, Artificial Sequence
  derived and/or modified sequence
atggagcccctgctgctgggccggggcctgatcgtgtacctgatgtttttactgttaaagttctccaaagccattgagatccctagcagtgttcagcaagtcccgacaattattaaacagtccaaggtgcaagttgccttcccatttgacgaatactttcagattgaatgtgaggctaaaggtaatcccgaacccacattctcttggactaaggacggcaatcctttttactttacggatcacagaatcatcccctcaaataattctgggacattccgaatccctaatgagggacatatatcccactttcaaggtaaatatcgatgcttcgcttcgaacaagcttgggattgcgatgtccgaagagatagaatttatcgtgcccagcgtacccaagttccccaaagaaaaaatagatccgctggaagttgaagaaggcgatcctatagtcttaccttgtaacccacctaaggggctcccgcccctacacatttactggatgaatatcgagctcgagcacatcgaacaagatgagcgggtgtacatgagtcaaaaaggtgatttgtatttcgccaacgtggaagaaaaggattcacggaacgactactgttgtttcgccgcatttcctcgcctccgcaccattgtgcagaagatgcccatgaagctcacagtcaactcctctaacagcattaagcaacgtaagcctaaactactgctgcctcctactgaaagcggttcagagagcagcatcacaattctcaaaggtgagatcctgctgctggagtgctttgctgaagggctgccaacgccccaggtcgactggaacaaaatcggcggagatctacctaaaggccgcgagacaaaggaaaactatggcaagactcttaagatcgaaaatgtctcttaccaggataaagggaattatcgctgcacagccagcaacttcttaggaacggcaacgcacgatttccacgttatcgtggaggaacctccccggtggacaaagaagccccagtcagctgtatactcaactgggagcaatgggatcctcctgtgtgaggccgaaggcgaaccgcaacctacaattaagtggagggtgaacgggagtccagtggacaatcatcccttcgcaggtgacgtcgttttccctcgcgagatctcttttaccaaccttcaacccaatcacacagcagtctaccagtgcgaagcttctaacgtgcacgggacaattctggctaatgctaatatcgacgtggttgacgtacgtcctttaatccagacaaaagatggtgaaaactatgctaccgtggtgggttacagcgctttcctgcactgtgagtttttcgccagtcccgaggctgttgtgagttggcagaaagtggaagaggtcaaaccactagagggccgccgctaccatatctacgagaatggcactctccagatcaacaggacgacggaggaggacgccggttcctatagttgttgggtagaaaacgctataggcaagactgctgtgaccgctaacctggatattagaaatgccacaaagttaagagtttctccaaagaaccccaggattccaaaattacacatgctggaacttcactgcgaatccaaatgcgactctcatcttaagcactctctcaagttgtcatggagtaaggacggagaagcattcgaaatcaatggtaccgaggatggaagaatcataatcgatggggcaaatttgacaatcagcaacgtgaccttagaggaccagggaatctactgctgttctgcccacaccgcgcttgattccgccgccgacattacccaggtgaccgtgctcgatgtccccgacccacctgagaacctacacctttccgagcggcaaaacagatcagtgagattaacttgggaagctggagccgatcacaatagtaacattagcgaatacatcgtggagtttgagggcaataaagaagaaccagggagatgggaggaactgactcgcgtgcaaggaaagaaaactactgttattctccctctggcgccatttgttcgttatcagtttcgggtcattgccgttaacgaagtgggcagaagtcagccctctcagcccagcgaccatcacgagaccccgcctgctgcacccgatcgcaaccctcagaatatccgtgttcaggcctcccaacctaaagaaatgattattaagtgggagcccctgaaaagtatggagcagaatgggccaggtctggaatatcgtgtgacttggaagccacaaggcgctcccgtcgagtgggaggaagaaactgtgacgaatcacactctgagagtcatgacgcccgccgtttatgcaccttacgacgtgaaagtacaggccataaatcagctgggctcgggtcccgatccacaatccgtgactctgtatagcggagaggattacccagatactgcacccgtcattcatggagttgatgttatcaactctacattggtcaaggtcacgtggtctaccgttccaaaagacagagtccatggcaggctgaaaggataccaaatcaattggtggaagacaaagtcactgcttgatgggcgaacacatcctaaggaggtaaatatcttaagattctccggccagaggaattctgggatggtcccttcattggatgcattctccgaattccacctaactgtccttgcatataacagcaagggagccggtccggagtccgaaccttatatctttcagacccccgaaggggtccccgaacagcctactttcttgaaagttatcaaagtggacaaggacacagccaccctgagctggggtttgcccaaaaagctcaacgggaatctgactggctacctccttcaataccagattattaatgacacttatgagattggggagctgaatgacataaatatcaccacaccctcaaagccatcctggcatttaagcaacctgaatgcaacaaccaagtataagttctacttgcgtgcatgcacaagccagggctgtggaaagcccattaccgaggaatcttctacactcggcgagggaagtaagggaattggcaaaataagcggagtcaacctcacccaaaaaactcacccgattgaggtgtttgaaccaggggctgaacacattgtgcgtcttatgactaagaactggggcgataatgattctatctttcaggatgtgatcgaaacacgagggagagagtatgccgggctgtatgatgacatcagcacacaaggatggtttatcggcctgatgtgcgccattgccctgctcaccctcctgttgttaaccgtttgctttgtgaagaggaacagaggcggcaaatactcagtgaaggagaaggaagacctgcacccagatcccgagattcaaagcgtgaaggatgagacctttggcgaatacagcgactcggacgagaagccactgaaaggttcccttagaagtttgaatagggacatgcaacctactgagtccgctgattccctagtggagtacggcgagggcgatcacggtctgttcagcgaggacggcagtttcatcggtgcctacgcaggctccaaagaaaaggggtcagtcgaatctaacgggtcttcaacagcgacctttcctctgcgtgcctag

SEQ ID NO: 327717 - DNA, 3627 bp, Artificial Sequence
  derived and/or modified sequence
atggagccattactgttgggcagaggattaatagtgtatcttatgttcttactgcttaagtttagtaaagctatcgagatcccatcatccgtgcagcaggtgccgacaatcattaagcagtcaaaggtgcaggtggcctttccgtttgatgaatacttccaaatcgaatgcgaggcaaaggggaacccagagccaaccttcagctggactaaggatggaaatccattctacttcaccgaccaccggattatcccctccaataactccgggactttcagaatccctaacgagggccacatttcacattttcagggcaagtaccgctgctttgctagcaataagctgggcatcgcaatgagcgaagagattgagttcatcgtgccttcggttccaaagttcccgaaagaaaagatcgaccctctagaagtggaggagggagatccaattgttctcccctgtaacccacccaagggactcccaccattgcatatttattggatgaacattgaactggaacacattgaacaagatgagagagtatacatgtctcaaaaaggagacctatattttgctaacgtcgaagagaaggattcgcggaatgactactgttgctttgccgcattcccaaggctacgcactattgtgcaaaagatgcccatgaagctcacagtgaactcctccaattcaataaagcagcgcaagcccaaactcctccttccccctaccgagtcaggatcagagtccagtatcacaatcctcaagggagaaatcttactcctcgagtgttttgctgaagggcttcctacaccccaggttgactggaataagatagggggtgacctgccaaaaggccgtgaaacaaaagagaactacggaaaaacactcaagatcgagaacgtcagctaccaggataaaggaaactatagatgtactgcctctaattttttaggtaccgccactcatgactttcacgtgatcgtcgaagaaccaccacgctggaccaagaaaccacagagcgccgtgtattctactggatcgaatggaattctgctttgtgaggcagagggcgagccccaaccaactataaaatggagggttaacggctcacccgtcgataaccacccttttgccggtgacgtggtgttccccagagaaatctcctttactaatcttcaacccaatcatactgcggtttaccagtgtgaagccagcaacgtccacgggactattctggcaaatgctaatatcgacgtcgtcgatgtgcggcctctgattcagaccaaggacggagaaaactatgccacagtcgtaggatattctgcgttcctccactgtgagttttttgcaagcccagaagcagtcgtctcatggcagaaagtggaggaggtgaaacccctggagggccgtcgttatcatatttacgaaaatggcacattgcagattaatcgaactactgaggaggacgctgggtcatattcatgctgggttgaaaatgcgataggtaagactgctgtcacagcgaacctcgacatacgcaacgctaccaagcttcgggtctcgcctaagaatcctaggatccctaagctgcacatgctggaactgcactgtgaatcgaagtgtgattctcatttgaaacacagccttaaactctcatggtctaaggacggtgaagcatttgaaattaacggaaccgaagatggtaggatcattattgacggagcaaatctcaccatatctaacgttaccctcgaggatcagggtatatattgctgctcggctcacaccgctctcgacagcgcagccgacatcacacaggtcaccgtgctggacgtgccagatcctccagagaacctccacctgagcgagcggcagaacaggagtgtccggcttacttgggaggcaggcgctgatcataactccaatatttccgagtatattgttgaatttgaaggcaacaaggaggagcctggcagatgggaggagctcacacgagtgcagggaaagaagaccaccgtgattctgcccttggccccattcgtgcgatatcagtttcgagtcatcgccgtgaatgaggtggggcgatcccaacccagccagccttccgaccaccacgaaacaccaccggctgctcccgatcgtaatccacagaatatccgcgttcaggcatctcagcctaaagaaatgattattaagtgggagcctctgaagtctatggagcagaacggcccaggactggagtaccgagtcacctggaagcctcaaggagcacccgtcgaatgggaggaggaaacagtgacaaatcacacgctccgagtcatgacgccggcagtctatgccccttacgacgtcaaggtccaggccatcaatcagctggggagcggacccgacccccagtcagttaccctgtattccggagaagactaccctgacaccgcacccgtaatccacggggtggacgttataaattctactctggtgaaggtcacatggagtacagttcccaaagatagagtccacggcagactgaagggataccagatcaattggtggaagaccaagagcctgttagatgggagaacacatccaaaagaggtgaatattttgaggttctctggacagagaaattccggaatggttcccagcttggatgcctttagcgaatttcacttaacagtgctcgcgtacaattctaaaggcgcagggcctgagtcggagccatatatatttcaaaccccagaaggcgtgcccgagcaacccacgttcctgaaggtgatcaaggtagacaaagatacagccacactctcctggggcctgcccaagaaattgaacggcaatttaactgggtatctgctgcagtaccagattattaatgatacgtacgaaatcggggagcttaatgacattaacattactacaccttcaaagccttcttggcacctatcaaatctgaacgcgactacaaagtataagttctacctaagagcctgcacaagtcagggatgtggtaaacccattactgaggaaagcagcactctgggggagggcagcaagggtattggaaaaattagtggtgtaaacttaacgcagaagacgcacccaatcgaggtattcgaacctggcgcagagcatattgtccggttgatgacaaagaactggggagataacgattcaattttccaggacgtgatcgagacccggggacgagaatacgcaggactctacgacgatatcagtacccaggggtggtttattgggctcatgtgtgccattgccctccttactctgcttctcctcactgtgtgtttcgtcaagcgcaacagagggggtaagtattcagtaaaggagaaggaagatctacaccctgaccccgagattcagtccgtgaaggacgaaacctttggagaatactccgactcagatgagaagccattgaagggaagccttaggtccttgaatcgtgacatgcagcctacagaatcagccgattctctcgttgagtacggggagggggaccacgggctcttctctgaggatgggtcatttattggtgcctacgcagggagcaaagaaaagggatctgtggagtctaacggctcgtctactgcgacctttccactgcgtgcttag

SEQ ID NO: 327718 - DNA, 5235 bp, Artificial Sequence
  derived and/or modified sequence
caggaagggagcagaggcgagagccagcctccggcaggagggcgtagaccccggtgccagccagaacggctccagccttcccgcggccagagagccagcggcgggaggggacgggcgggacctccgcggacagccccgggtgcggaccagcgggcagcggccggcgagaccctccctggatccgcccagagcttaccggaccctgcgcgcccccgtcccggctcccggccggctcgggggagaaggcgcccgaggggaggcgccggacagatcgcgtttcggaggcggcgcaggtgctgtaaactgcaaaccataatcctgtcttaatactgcaaacaaatcatagtggaactaaggggaacttaatttactgtttccaggttaactaaggtctcagctgtaaaccaaaagtgagaggagacattaagattttcattcttaccgggttgtcttcttcctgaagagcaatggagccgcttttacttggaagaggactaatcgtatatctaatgttcctcctgttaaaattctcaaaagcaattgaaataccatcttcagttcaacaggttccaacaatcataaaacagtcaaaagtccaagttgcctttcccttcgatgagtattttcaaattgaatgtgaagctaaaggaaatccagaaccaacattttcgtggactaaggatggcaaccctttttatttcactgaccatcggataattccatcgaacaattcaggaacattcaggatcccaaacgaggggcacatatctcactttcaagggaaataccgctgctttgcttcaaataaactgggaatcgctatgtcagaagaaatagaatttatagttccaagtgttccaaaattcccaaaagaaaaaattgaccctcttgaagtggaggagggagatccaattgtcctcccatgcaatcctcccaaaggcctcccacctttacacatttattggatgaatattgaattagaacacatcgaacaagatgaaagagtatacatgagccaaaagggagatctatacttcgcaaacgtggaagaaaaggacagtcgcaatgactactgttgctttgctgcatttccaagattaaggactattgtacagaaaatgccaatgaaactaacagttaacagttcaaattccatcaagcaaagaaaacccaaactgctgttgcctcccactgagagtggcagtgagtcttcaattaccatcctcaaaggggaaatcttgctgcttgagtgttttgctgaaggcttgccaactccacaggttgattggaacaaaattggtggtgacttaccaaaggggagagaaacaaaagaaaattatggcaagactttgaagatagagaatgtctcctaccaggacaaaggaaattatcgctgcacagccagcaatttcttgggaacagccactcacgattttcacgttatagtagaagagcctcctcgctggacaaagaagcctcagagtgctgtgtatagcaccggaagcaatggcatcttgttatgtgaggctgaaggagaacctcaacccacaatcaagtggagagtcaatggctccccagttgacaatcatccatttgctggtgatgttgtcttccccagggaaatcagttttaccaaccttcaaccaaatcatactgctgtgtaccagtgtgaagcctcaaatgtccatggaactatccttgccaatgccaatattgatgttgtggatgtccgtccattgatacaaaccaaagatggagaaaattacgctacagtggttgggtacagtgctttcttacattgcgagttctttgcttcacctgaggcagtcgtgtcctggcagaaggtggaagaagtgaaacccctggagggcaggcggtatcatatctatgaaaatggcacattgcagatcaacagaaccaccgaagaagatgctgggtcttactcatgttgggtagaaaatgctataggaaaaactgcagtcacagccaatttggatattagaaatgctacaaaacttagagtttctcctaagaatcctcgtatccccaaattgcatatgcttgaattacattgtgaaagcaaatgtgactcacatttgaaacacagtttgaagttgtcctggagtaaagatggagaagcctttgaaattaatggcacagaagatggcaggataattattgatggagctaatttgaccatatctaatgtaactttagaggaccaaggtatttactgctgttcagctcatactgctctagacagtgctgccgatataactcaagtaactgttcttgatgttccggatccaccagaaaaccttcacttgtctgaaagacagaacaggagtgttcggctgacctgggaagctggagctgaccacaacagcaatattagcgagtatattgttgaatttgaaggaaacaaagaagagcctggaaggtgggaggaactgaccagagtccaaggaaagaaaaccacagttatcttacctttggctccatttgtgagataccagttcagggtcatagccgtgaacgaagtagggagaagtcagcctagccagccgtcagaccatcatgaaacaccaccagcagctccagataggaatccacaaaacataagggttcaagcctctcaacccaaggaaatgattataaagtgggagcctttgaaatccatggagcagaatggaccaggcctagagtacagagtgacctggaagccacagggagccccagtggagtgggaagaagaaacagtcacaaaccacacattgcgggtgatgacgcctgctgtctatgccccttatgatgtcaaggtccaggctatcaatcaactaggatctgggcctgaccctcagtcagtgactctctattctggagaagactatcctgatacagctccagtgatccatggggtggacgttataaacagtacattagttaaagttacctggtcaacagttccaaaggacagagtacatggacgtctgaaaggctatcagataaattggtggaaaacaaaaagtctgttggatggaagaacacatcccaaagaagtgaacattctaagattttcaggacaaagaaactctggaatggttccttccttagatgcctttagtgaatttcatttaacagtcttagcctataactctaaaggagctggtcctgaaagtgagccttatatatttcaaacaccagaaggagtacctgaacagccaacttttctaaaggtcatcaaagttgataaagacactgccactttatcttggggactacctaagaaattaaatggaaacttaactggctatcttttgcaatatcagataataaatgacacctacgagattggagaattaaatgatattaacattacaactccatcaaagcccagctggcacctctcaaacctgaatgcaactaccaagtacaaattctacttgagggcttgcacttcacagggctgtggaaaaccgatcacggaggaaagctccaccttaggagaagggagtaaaggtatcgggaagatatcaggagtaaatcttactcaaaagactcacccaatagaggtatttgagccgggagctgaacatatagttcgcctaatgactaagaattggggcgataatgatagcatttttcaagatgtaattgagacaagagggagagaatatgctggtttatatgatgacatctccactcaaggctggtttattggactgatgtgtgcgattgctcttctcacactactattattaactgtttgctttgtgaagaggaatagaggtggaaagtactcagttaaagaaaaggaagatttgcatccagacccagaaattcagtcagtaaaagatgaaacctttggtgaatacagtgacagtgatgaaaagcctctcaaaggaagccttcggtcccttaatagggatatgcagcctactgaaagtgctgacagcttagtcgaatacggagagggagaccatggtctcttcagtgaagatggatcatttattggtgcctacgctggatctaaggagaagggatctgttgaaagcaatggaagttctacagcaacttttccccttcgggcataaacacaacatatgtaagcaacgctactggttcaccccaaccttccatatttatctgttcaaaggagcaagaactttcatataggaatagaaacatgctggccgaagatttcatccagaagtcaacatcctgcaattatgttgaaaagagtagtactttcttcaaaatataaaatgccaagcacttcaggcctatgttttgcttatattgttttcaggtgctcaaaatgcaaaacacaaaacaaatcctgcatttagatacacctcaactaaatccaaagtccccattcagtatattccatatttgcctgattttactattcggtgtgtttgcatagatgttgctacttggtgggtttttctccgtatgcacattggtatacagtctctgagaactggcttggtgactttgcttcactacaggttaaaagaccataagcaaactggttatttaaaatgtaaaaaggaatatgaaagtcttattaaaacacttcattgaaaatatacagtctaaatttattatttaaattttactagcaaaagtcttaggtgaacaatcaactagtatttgttgagctcctatttgcccagagatggtcatatttaaacagaagtatacgtttttcagtttcaacatgaatttttttatttctgtcagttatgacatccacaagcatcactttttgtgtctgttttttttttttttcttggactaaattcaactgcatggaagcggtggtcagaaggttgttttatacgagaacaggcagaaagtgcccattgttcaggattctaatagctacatctacttaatatcttcatttctaaattgactgcttttacctttttctcatgtttatataatggtatgcttgcatatatttcatgaatacattgtacatattatgttaatatttacacaatttaaaatatagatgtgttttattttgaagtgagaaaatgaacattaacaggcatgtttgtacagctagaatatattagtaagatactgtttttcgtcattccagagctacaactaataacacgaggttccaaagctgaagactttgtataaagtatttgggttttgttcttgtattgctttctttcaacagtttcaaaataaaatatcatataaatattg

SEQ ID NO: 327719 - DNA, 3627 bp, Artificial Sequence
  derived and/or modified sequence
atggagcccctgctgctgggcagaggcctgatcgtgtacctgatgttcctgctgctgaagttcagcaaggccatcgagatccccagcagcgtgcagcaggtgcccaccatcatcaagcagagcaaggtgcaggtggccttccccttcgacgagtacttccagatcgagtgcgaggccaagggcaaccccgagcccaccttcagctggaccaaggacggcaaccccttctacttcaccgaccacagaatcatccccagcaacaacagcggcaccttcagaatccccaacgagggccacatcagccacttccagggcaagtacagatgcttcgccagcaacaagctgggcatcgccatgagcgaggagatcgagttcatcgtgcccagcgtgcccaagttccccaaggagaagatcgaccccctggaggtggaggagggcgaccccatcgtgctgccctgcaacccccccaagggcctgccccccctgcacatctactggatgaacatcgagctggagcacatcgagcaggacgagagagtgtacatgagccagaagggcgacctgtacttcgccaacgtggaggagaaggacagcagaaacgactactgctgcttcgccgccttccccagactgagaaccatcgtgcagaagatgcccatgaagctgaccgtgaacagcagcaacagcatcaagcagagaaagcccaagctgctgctgccccccaccgagagcggcagcgagagcagcatcaccatcctgaagggcgagatcctgctgctggagtgcttcgccgagggcctgcccaccccccaggtggactggaacaagatcggcggcgacctgcccaagggcagagagaccaaggagaactacggcaagaccctgaagatcgagaacgtgagctaccaggacaagggcaactacagatgcaccgccagcaacttcctgggcaccgccacccacgacttccacgtgatcgtggaggagccccccagatggaccaagaagccccagagcgccgtgtacagcaccggcagcaacggcatcctgctgtgcgaggccgagggcgagccccagcccaccatcaagtggagagtgaacggcagccccgtggacaaccaccccttcgccggcgacgtggtgttccccagagagatcagcttcaccaacctgcagcccaaccacaccgccgtgtaccagtgcgaggccagcaacgtgcacggcaccatcctggccaacgccaacatcgacgtggtggacgtgagacccctgatccagaccaaggacggcgagaactacgccaccgtggtgggctacagcgccttcctgcactgcgagttcttcgccagccccgaggccgtggtgagctggcagaaggtggaggaggtgaagcccctggagggcagaagataccacatctacgagaacggcaccctgcagatcaacagaaccaccgaggaggacgccggcagctacagctgctgggtggagaacgccatcggcaagaccgccgtgaccgccaacctggacatcagaaacgccaccaagctgagagtgagccccaagaaccccagaatccccaagctgcacatgctggagctgcactgcgagagcaagtgcgacagccacctgaagcacagcctgaagctgagctggagcaaggacggcgaggccttcgagatcaacggcaccgaggacggcagaatcatcatcgacggcgccaacctgaccatcagcaacgtgaccctggaggaccagggcatctactgctgcagcgcccacaccgccctggacagcgccgccgacatcacccaggtgaccgtgctggacgtgcccgacccccccgagaacctgcacctgagcgagagacagaacagaagcgtgagactgacctgggaggccggcgccgaccacaacagcaacatcagcgagtacatcgtggagttcgagggcaacaaggaggagcccggcagatgggaggagctgaccagagtgcagggcaagaagaccaccgtgatcctgcccctggcccccttcgtgagataccagttcagagtgatcgccgtgaacgaggtgggcagaagccagcccagccagcccagcgaccaccacgagaccccccccgccgcccccgacagaaacccccagaacatcagagtgcaggccagccagcccaaggagatgatcatcaagtgggagcccctgaagagcatggagcagaacggccccggcctggagtacagagtgacctggaagccccagggcgcccccgtggagtgggaggaggagaccgtgaccaaccacaccctgagagtgatgacccccgccgtgtacgccccctacgacgtgaaggtgcaggccatcaaccagctgggcagcggccccgacccccagagcgtgaccctgtacagcggcgaggactaccccgacaccgcccccgtgatccacggcgtggacgtgatcaacagcaccctggtgaaggtgacctggagcaccgtgcccaaggacagagtgcacggcagactgaagggctaccagatcaactggtggaagaccaagagcctgctggacggcagaacccaccccaaggaggtgaacatcctgagattcagcggccagagaaacagcggcatggtgcccagcctggacgccttcagcgagttccacctgaccgtgctggcctacaacagcaagggcgccggccccgagagcgagccctacatcttccagacccccgagggcgtgcccgagcagcccaccttcctgaaggtgatcaaggtggacaaggacaccgccaccctgagctggggcctgcccaagaagctgaacggcaacctgaccggctacctgctgcagtaccagatcatcaacgacacctacgagatcggcgagctgaacgacatcaacatcaccacccccagcaagcccagctggcacctgagcaacctgaacgccaccaccaagtacaagttctacctgagagcctgcaccagccagggctgcggcaagcccatcaccgaggagagcagcaccctgggcgagggcagcaagggcatcggcaagatcagcggcgtgaacctgacccagaagacccaccccatcgaggtgttcgagcccggcgccgagcacatcgtgagactgatgaccaagaactggggcgacaacgacagcatcttccaggacgtgatcgagaccagaggcagagagtacgccggcctgtacgacgacatcagcacccagggctggttcatcggcctgatgtgcgccatcgccctgctgaccctgctgctgctgaccgtgtgcttcgtgaagagaaacagaggcggcaagtacagcgtgaaggagaaggaggacctgcaccccgaccccgagatccagagcgtgaaggacgagaccttcggcgagtacagcgacagcgacgagaagcccctgaagggcagcctgagaagcctgaacagagacatgcagcccaccgagagcgccgacagcctggtggagtacggcgagggcgaccacggcctgttcagcgaggacggcagcttcatcggcgcctacgccggcagcaaggagaagggcagcgtggagagcaacggcagcagcaccgccaccttccccctgagagcctag

SEQ ID NO: 327720 - DNA, 291 bp, Artificial Sequence
  derived and/or modified sequence
atggagcctcttctactgggcaggggactgatcgtatatctcatgttcttgctgcttaagttttctaaggccattgaaatcccttctagtgtacaacaggtgccaaccattatcaagcagtccaaagtgcaagttgcgttcccattcgatgaatacttccagattgaatgtgaggcaaaaggaaatccagagcccactttctcttggactaaggacggcaatcccttttactttacggaccacaggatcatcccatctaataattccgggactttccgaatccccaattag

SEQ ID NO: 327721 - DNA, 201 bp, Artificial Sequence
  derived and/or modified sequence
atggagccactgctcctgggtcgagggctgatagtgtacttaatgttcttactactgaaattttctaaggccatagagattccaagctccgttcagcaagtccccactatcattaagcaaagtaaagtccaggtagctttcccctttgatgaatatttccagattgaatgtgaagccaagggaaatcctgaacctacctag

SEQ ID NO: 327722 - DNA, 546 bp, Artificial Sequence
  derived and/or modified sequence
atggaaccccttttgctgggaagggggctgatagtttacttaatgttcctactgcttaagtttagcaaagccattgagatacccagctctgttcaacaggtacctaccatcattaagcagagcaaggtgcaggttgcatttccttttgatgaatattttcagatagagtgcgaagccaagggcaaccccgagccaacattctcatggactaaggacggaaatccgttttatttcacagaccaccggataatcccttctaacaactctggcacatttagaattcccaacgaaggccacatttctcacttccagggtaagtaccgctgtttcgcttctaataagcttggtatagcgatgagcgaagaaatcgaattcatcgtgccatccgttcctaaattcccgaaggagaaaatcgaccctcttgaggtggaagagggagatcccatagtgctgccgtgtaatccgccgaaggggctcccaccactgcacatctactggatgaacattgaacttgaacacatcgagcaggacgagagggtctactag

SEQ ID NO: 327723 - DNA, 258 bp, Artificial Sequence
  derived and/or modified sequence
atggaacccctgctcttgggaaggggcctaattgtctacttaatgttccttctgcttaagtttagcaaggctatcgagattccctcaagtgtgcagcaggtcccaacaatcatcaagcagtctaaggtccaagtcgcgtttccattcgatgagtatttccaaatcgagtgcgaggcgaaagggaatccagagcctacctttagttggaccaaggatggtaacccattttacttcaccgatcataggattatcccttag

SEQ ID NO: 327724 - DNA, 291 bp, Artificial Sequence
  derived and/or modified sequence
atggagcccctgctgctgggccggggcctgattgtgtacctgatgttcctgctgctgaagttcagcaaggccatcgagatccccagctctgtgcagcaggtgcccaccatcatcaagcagagcaaggtgcaggtggccttcccctttgatgagtacttccagattgaatgtgaggccaagggcaaccctgagcccaccttctcctggaccaaggatggcaaccccttctacttcacagaccaccgcatcatccccagcaacaacagcggcaccttccgcatccccaactag

SEQ ID NO: 327725 - DNA, 201 bp, Artificial Sequence
  derived and/or modified sequence
atggagcccctgctgctgggccggggcctgattgtgtacctgatgttcctgctgctgaagttcagcaaggccatcgagatccccagctctgtgcagcaggtgcccaccatcatcaagcagagcaaggtgcaggtggccttcccctttgatgagtacttccagattgaatgtgaggccaagggcaaccctgagcccacctag

SEQ ID NO: 327726 - DNA, 546 bp, Artificial Sequence
  derived and/or modified sequence
atggagcccctgctgctgggccggggcctgattgtgtacctgatgttcctgctgctgaagttcagcaaggccatcgagatccccagctctgtgcagcaggtgcccaccatcatcaagcagagcaaggtgcaggtggccttcccctttgatgagtacttccagattgaatgtgaggccaagggcaaccctgagcccaccttctcctggaccaaggatggcaaccccttctacttcacagaccaccgcatcatccccagcaacaacagcggcaccttccgcatccccaatgaaggccacatcagccacttccagggcaagtaccgctgctttgccagcaacaagctgggcatcgccatgtctgaggagattgagttcatcgtgcccagcgtgcccaagttccccaaggagaagattgaccccctggaggtggaggagggggaccccatcgtgctgccctgcaacccccccaagggcctgccccccctgcacatctactggatgaacatcgagctggagcacatcgagcaggatgagcgggtgtactag

SEQ ID NO: 327727 - DNA, 258 bp, Artificial Sequence
  derived and/or modified sequence
atggagcccctgctgctgggccggggcctgattgtgtacctgatgttcctgctgctgaagttcagcaaggccatcgagatccccagctctgtgcagcaggtgcccaccatcatcaagcagagcaaggtgcaggtggccttcccctttgatgagtacttccagattgaatgtgaggccaagggcaaccctgagcccaccttctcctggaccaaggatggcaaccccttctacttcacagaccaccgcatcatcccctag

SEQ ID NO: 327728 - DNA, 291 bp, Artificial Sequence
  derived and/or modified sequence
atggagcccctgctgctgggccggggcctgatcgtgtacctgatgtttttgctgcttaagttttcgaaggctattgagattccaagtagcgtccagcaagtgccgacgatcattaagcagagcaaggtgcaggtggccttcccctttgatgaatatttccaaatcgagtgcgaagcaaagggaaacccggagcctaccttttcctggactaaagacgggaaccctttttattttactgaccaccgaataatcccctccaataactcaggtacattccgaatccctaattag

SEQ ID NO: 327729 - DNA, 201 bp, Artificial Sequence
  derived and/or modified sequence
atggagcccctgctgctgggccggggcctgatcgtgtacctgatgttcctactactgaaattctctaaggccatcgaaatcccctcatctgttcagcaagtacccacaatcatcaagcaatccaaggtgcaagtcgcatttcccttcgatgaatactttcagatcgagtgcgaagccaaggggaacccggaacccacttag

SEQ ID NO: 327730 - DNA, 546 bp, Artificial Sequence
  derived and/or modified sequence
atggagcccctgctgctgggccggggcctgatcgtgtacctgatgttcctcctgctgaagttctcgaaggccatcgagatcccatcaagcgtacagcaggtgcccaccattattaaacagtccaaagtccaggtagcattcccctttgatgagtatttccaaattgaatgcgaagccaagggcaacccagaacccaccttttcctggaccaaggatggcaatcccttttattttaccgatcaccgtattatcccgagcaacaattctgggacattccgaatcccaaatgagggtcacatatcccactttcagggcaagtacaggtgtttcgcctcaaacaaacttggaattgccatgtccgaagagatagagttcatcgtgccatcagtcccaaagttccctaaggaaaagatcgatcctttagaggtcgaggagggcgatcctatcgtgctgccttgtaatcctcccaaaggcctgccccccctgcacatatactggatgaacattgaacttgaacatatagagcaggacgagcgtgtctactag

SEQ ID NO: 327731 - DNA, 258 bp, Artificial Sequence
  derived and/or modified sequence
atggagcccctgctgctgggccggggcctgatcgtgtacctgatgtttcttctgcttaaatttagtaaggccatcgaaattccctccagcgttcagcaagtgcccactattattaaacagagcaaggtgcaggtcgcattccctttcgacgagtatttccagatcgaatgtgaggccaagggcaatcctgaaccaactttttcatggactaaggatgggaaccccttttacttcactgaccaccgcatcatcccctag

SEQ ID NO: 327732 - DNA, 291 bp, Artificial Sequence
  derived and/or modified sequence
atggagcccctcctgctgggtagagggcttattgtatatttgatgttcctgttgctgaagttttcgaaggccatcgagatccccagtagtgtgcagcaagtacccacgataattaaacaatctaaggtacaggttgcctttcctttcgacgagtatttccaaatagagtgcgaagccaagggaaatcctgaacctaccttctcgtggactaaagatggaaatcctttctactttaccgaccatagaattattccttctaataatagtggaacttttcggattcctaactag

SEQ ID NO: 327733 - DNA, 201 bp, Artificial Sequence
  derived and/or modified sequence
atggaaccgctcctcctgggacgaggtctgattgtgtatctgatgttcctgcttctaaaattcagcaaggcgattgagattccatcgtctgttcaacaagtgcctacgatcataaaacagtcaaaagtgcaggttgctttcccgttcgatgagtatttccagattgagtgcgaagcgaagggcaacccagaacctacttag

SEQ ID NO: 327734 - DNA, 546 bp, Artificial Sequence
  derived and/or modified sequence
atggaacccctgttgttgggtcgaggtctcattgtatatcttatgtttctgctgctgaaattctcaaaagctatagagatcccatccagcgtccaacaggtgcctaccattatcaaacagtcaaaagtccaagtggctttcccatttgacgagtacttccagattgagtgcgaggcaaaagggaacccagaaccaaccttttcctggaccaaagacggcaaccccttttatttcacagaccaccgcatcattccctccaacaacagcggaacttttcgcatcccaaacgagggtcatatttcgcatttccaaggcaagtaccgctgctttgcgagcaacaagctgggtattgccatgtccgaggaaattgagttcatcgtgccatcagtgcctaagtttcccaaagaaaagatcgacccactggaggtcgaagaaggcgatcctattgttctgccatgcaacccgcctaagggcttacctcctttgcatatatattggatgaacatcgaactagaacatatcgaacaggacgaacgagtgtactag

SEQ ID NO: 327735 - DNA, 258 bp, Artificial Sequence
  derived and/or modified sequence
atggaaccacttctgctcggacgtggactgatagtgtacctcatgtttcttctgctaaaattttcgaaggccatcgagatccccagctcagtgcagcaggttccgacaatcatcaaacagtcgaaagtccaggtggctttcccttttgatgaatactttcaaattgaatgcgaagccaaaggcaaccccgagccgacgtttagttggaccaaggatggcaacccgttctacttcaccgaccaccgtatcattccctag

SEQ ID NO: 327736 - DNA, 543 bp, Artificial Sequence
  derived and/or modified sequence
tcggacagctcggggtcagtcgacggagcacaccgggcgcccgaatccgccgggtcccactcacgcccgccggccgccggtgctgtaaactgcaaaccataatcctgtcttaatactgcaaacaaatcatagtggaactaaggggaacttaatttactgtttccaggttaactaaggtctcagctgtaaaccaaaagtgagaggagacattaagattttcattcttaccgggttgtcttcttcctgaagagcaatggagccgcttttacttggaagaggactaatcgtatatctaatgttcctcctgttaaaattctcaaaagcaattgaaataccatcttcagttcaacaggttccaacaatcataaaacagtcaaaagtccaagttgcctttcccttcgatgagtattttcaaattgaatgtgaagctaaaggaaatccagaaccaacattttcgtggactaaggatggcaaccctttttatttcactgaccatcggataattccatcgaacaattcaggaacattcaggatcccaaacga

SEQ ID NO: 327737 - DNA, 572 bp, Artificial Sequence
  derived and/or modified sequence
agaggcgagagccagcctccggcaggagggcgtagaccccggtgccagccagaacggctccagccttcccgcggccagagagccagcggcgggaggggacgggcgggacctccgcggacagccccgggtgcggaccagcgggcagcggccggcgagaccctccctggatccgcccagagcttaccggaccctgcgcgcccccgtcccggctcccggccggctcgggggagaaggcgcccgaggggaggcgccggacagatcgcgtttcggaggcggcgcagtttccaggttaactaaggtctcagctgtaaaccaaaagtgagaggagacattaagattttcattcttaccgggttgtcttcttcctgaagagcaatggagccgcttttacttggaagaggactaatcgtatatctaatgttcctcctgttaaaattctcaaaagcaattgaaataccatcttcagttcaacaggttccaacaatcataaaacagtcaaaagtccaagttgcctttcccttcgatgagtattttcaaattgaatgtgaagctaaaggaaatccagaaccaac

SEQ ID NO: 327738 - DNA, 723 bp, Artificial Sequence
  derived and/or modified sequence
gagccacagtgtctcagccaggggcagggccggggaactcctgcgaaaaaccacgggccggaggagcagcagccgcgcgggcccagtttccaggttaactaaggtctcagctgtaaaccaaaagtgagaggagacattaagattttcattcttaccgggttgtcttcttcctgaagagcaatggagccgcttttacttggaagaggactaatcgtatatctaatgttcctcctgttaaaattctcaaaagcaattgaaataccatcttcagttcaacaggttccaacaatcataaaacagtcaaaagtccaagttgcctttcccttcgatgagtattttcaaattgaatgtgaagctaaaggaaatccagaaccaacattttcgtggactaaggatggcaaccctttttatttcactgaccatcggataattccatcgaacaattcaggaacattcaggatcccaaacgaggggcacatatctcactttcaagggaaataccgctgctttgcttcaaataaactgggaatcgctatgtcagaagaaatagaatttatagttccaagtgttccaaaattcccaaaagaaaaaattgaccctcttgaagtggaggagggagatccaattgtcctcccatgcaatcctcccaaaggcctcccacctttacacatttattggatgaatattgaattagaacacatcgaacaagatgaaagagtatac

SEQ ID NO: 327739 - DNA, 594 bp, Artificial Sequence
  derived and/or modified sequence
agaaagggaagaaggcaaacaggaaaagagccagaagagcagagttcccagcagaggggaagcaagtggagaggcggtgtggaggaatcaatttggccccatctggaatggacagaaggctagaacctgcagtgcagtgagtgtgggagaaaccagctggcacaaggtgctgtaaactgcaaaccataatcctgtcttaatactgcaaacaaatcatagtggaactaaggggaacttaatttactgtttccaggttaactaaggtctcagctgtaaaccaaaagtgagaggagacattaagattttcattcttaccgggttgtcttcttcctgaagagcaatggagccgcttttacttggaagaggactaatcgtatatctaatgttcctcctgttaaaattctcaaaagcaattgaaataccatcttcagttcaacaggttccaacaatcataaaacagtcaaaagtccaagttgcctttcccttcgatgagtattttcaaattgaatgtgaagctaaaggaaatccagaaccaacattttcgtggactaaggatggcaaccctttttatttcactgaccatcggataattcc

SEQ ID NO: 327740 - DNA, 291 bp, Artificial Sequence
  derived and/or modified sequence
atggagcccctgctgctgggcagaggcctgatcgtgtacctgatgttcctgctgctgaagttcagcaaggccatcgagatccccagcagcgtgcagcaggtgcccaccatcatcaagcagagcaaggtgcaggtggccttccccttcgacgagtacttccagatcgagtgcgaggccaagggcaaccccgagcccaccttcagctggaccaaggacggcaaccccttctacttcaccgaccacagaatcatccccagcaacaacagcggcaccttcagaatccccaactag

SEQ ID NO: 327741 - DNA, 201 bp, Artificial Sequence
  derived and/or modified sequence
atggagcccctgctgctgggcagaggcctgatcgtgtacctgatgttcctgctgctgaagttcagcaaggccatcgagatccccagcagcgtgcagcaggtgcccaccatcatcaagcagagcaaggtgcaggtggccttccccttcgacgagtacttccagatcgagtgcgaggccaagggcaaccccgagcccacctag

SEQ ID NO: 327742 - DNA, 546 bp, Artificial Sequence
  derived and/or modified sequence
atggagcccctgctgctgggcagaggcctgatcgtgtacctgatgttcctgctgctgaagttcagcaaggccatcgagatccccagcagcgtgcagcaggtgcccaccatcatcaagcagagcaaggtgcaggtggccttccccttcgacgagtacttccagatcgagtgcgaggccaagggcaaccccgagcccaccttcagctggaccaaggacggcaaccccttctacttcaccgaccacagaatcatccccagcaacaacagcggcaccttcagaatccccaacgagggccacatcagccacttccagggcaagtacagatgcttcgccagcaacaagctgggcatcgccatgagcgaggagatcgagttcatcgtgcccagcgtgcccaagttccccaaggagaagatcgaccccctggaggtggaggagggcgaccccatcgtgctgccctgcaacccccccaagggcctgccccccctgcacatctactggatgaacatcgagctggagcacatcgagcaggacgagagagtgtactag

SEQ ID NO: 327743 - DNA, 258 bp, Artificial Sequence
  derived and/or modified sequence
atggagcccctgctgctgggcagaggcctgatcgtgtacctgatgttcctgctgctgaagttcagcaaggccatcgagatccccagcagcgtgcagcaggtgcccaccatcatcaagcagagcaaggtgcaggtggccttccccttcgacgagtacttccagatcgagtgcgaggccaagggcaaccccgagcccaccttcagctggaccaaggacggcaaccccttctacttcaccgaccacagaatcatcccctag

SEQ ID NO: 327744 - protein, 43 aa, Artificial Sequence
  derived and/or modified sequence
MSEQGDLNQAIAEEGGTEQETATPENGIVKSESLDEEEKLELQ

SEQ ID NO: 327745 - protein, 32 aa, Artificial Sequence
  derived and/or modified sequence
MSEQGDLNQAIAEEGGTEQETATPENGIVKSE

SEQ ID NO: 327746 - protein, 89 aa, Artificial Sequence
  derived and/or modified sequence
MSEQGDLNQAIAEEGGTEQETATPENGIVKSESLDEEEKLELQRRLEAQNQERRKSKSGAGKGKLTRSLAVCEESSARPGGESLQDQTL

SEQ ID NO: 327747 - protein, 98 aa, Artificial Sequence
  derived and/or modified sequence
MSEQGDLNQAIAEEGGTEQETATPENGIVKSESLDEEEKLELQRRLEAQNQERRKSKSGAGKGKLTRSLAVCEESSARPGGESLQDQESIHLQLSSFS

SEQ ID NO: 327748 - DNA, 285 bp, Artificial Sequence
  derived and/or modified sequence
atgaggaagctgcggctgcgggccagcaaccctggccccagcggggcccctggcacccggcagcacttcagcaccagccggggcggccaccactgtgcccggcgctggctgcggcgggtgagaagaagccgcagccagacccccagctaccagaacctggaccccaacccccccatcgtgcgcttccccctgcccctggagcgcatcagcgaggtgccccggcgggcctgcctgcacggcagagatgccagctctgtgtggcccccacctgagaggagtgactag

SEQ ID NO: 327749 - protein, 369 aa, Artificial Sequence
  derived and/or modified sequence
MTPTDFTSPIPNMADDYGSESTSSMEDYVNFNFTDFYCEKNNVRQFASHFLPPLYWLVFIVGALGNSLVILVYWYCTRVKTMTDMFLLNLAIADLLFLVTLPFWAIAAADQWKFQTFMCKVVNSMYKMNFYSCVLLIMCISVDRYIAIAQAMRAHTWREKRLLYSKMVCFTIWVLAAALCIPEILYSQIKEESGIAICTMVYPSDESTKLKSAVLTLKVILGFFLPFVVMACCYTIIIHTLIQAKKSSKHKALKVTITVLTVFVLSQFPYNCILLVQTIDAYAMFISNCAVSTNIDICFQVTQTIAFFHSCLNPVLYVFVGERFRRDLVKTLKNLGCISQAQWVSFTRREGSLKLSSMLLETTSGALSL

SEQ ID NO: 327750 - DNA, 1110 bp, Artificial Sequence
  derived and/or modified sequence
atgactccgaccgattttacaagtccaattcctaacatggccgacgattatggctccgaatcaaccagctctatggaggattacgtaaacttcaacttcaccgatttttactgtgagaaaaataatgtgagacagttcgctagccactttttaccaccattatattggttggtcttcatagtaggagcgctgggaaatagtcttgttattctcgtgtactggtactgcacaagggtgaagacaatgacagacatgtttctgttgaacctcgctatcgccgacttattattcttggtgaccctcccattctgggcgattgccgccgcagaccagtggaaattccaaacttttatgtgtaaagtcgtgaacagcatgtataagatgaacttttactcatgcgtgctgctgattatgtgcatttcagtggatcgatacattgccattgcacaggccatgagggcccacacctggcgcgagaagcggctgctgtacagtaaaatggtctgttttaccatttgggtactcgccgctgccttatgtatcccagagattctctattcccagattaaggaggagagtgggatcgcgatctgcacaatggtctatccgtcggatgagagcacaaaactaaagagcgctgtattgaccctgaaagtcattctgggctttttcttgccctttgtggtgatggcctgttgttacacgattataatccataccctgattcaggcgaagaaaagctccaaacacaaggccctgaaggtaacgatcaccgtgttaactgtttttgtcctcagtcagttcccttataactgcatcctcctggtgcagactattgacgcatacgccatgttcatttccaattgtgcagtctctaccaacatcgacatatgcttccaggtaacccaaacgatcgcattcttccactcttgcctcaacccagtgttatatgtgtttgtcggcgaacggttcagaagagatttggtgaaaaccctcaagaatctaggctgcatctcacaagcgcagtgggtgtcattcacccggcgagagggctctctgaaactttcaagtatgctccttgaaacgacatccggggctctctccctttag

SEQ ID NO: 327751 - DNA, 1110 bp, Artificial Sequence
  derived and/or modified sequence
atgacccccacagacttcaccagccccatccccaacatggctgatgattatggcagcgagagcaccagctccatggaggactatgtgaacttcaacttcacagacttctactgtgagaagaacaacgtgcggcagtttgccagccacttcctgccccccctgtactggctggtgttcatcgtgggcgccctgggcaacagcctggtgatcctggtgtactggtactgcaccagggtgaagaccatgacagacatgttcctgctgaacctggccatcgctgacctgctcttcctggtgaccctgcccttctgggccatcgctgctgctgaccagtggaagttccagaccttcatgtgcaaggtggtgaacagcatgtacaagatgaacttctacagctgtgtgctgctgatcatgtgcatctctgtggaccgctacatcgccatcgcccaggccatgagggcccacacctggagggagaagaggctgctgtacagcaagatggtgtgcttcaccatctgggtgctggccgccgccctgtgcatccctgagatcctgtacagccagatcaaggaggagagcggcatcgccatctgcaccatggtgtaccccagtgatgagagcaccaagctgaagtctgctgtgctgaccctgaaggtgatcctgggcttcttcctgccctttgtggtgatggcctgctgctacaccatcatcatccacaccctcatccaggccaagaagagcagcaagcacaaggccctgaaggtgaccatcaccgtgctgactgtgtttgtgctgagccagttcccctacaactgcatcctgctggtgcagaccattgatgcctatgccatgttcatcagcaactgtgctgtgtccaccaacatcgacatctgcttccaggtgacccagaccatcgccttcttccacagctgcctgaaccctgtgctgtatgtgtttgtgggggagcgcttcagaagagacctggtgaagaccctgaagaacctgggctgcatcagccaggcccagtgggtgtccttcacccggcgggagggcagcctgaagctgagctccatgctgctggagaccaccagcggggccctgagcctgtag

SEQ ID NO: 327752 - DNA, 1110 bp, Artificial Sequence
  derived and/or modified sequence
atgacccccaccgacttcaccagccccatccccaacatggccgacgactatggcagtgaatccaccagttctatggaggactacgtaaacttcaacttcactgatttctactgtgagaagaacaacgtgcggcagttcgcgtcacattttctgccaccactgtattggctcgtatttatcgtcggagccctggggaacagtctggtgatattagtgtattggtactgtactcgagtcaagacaatgaccgacatgttcctgctgaacctcgcaatagcagatctgctattcctggtaaccctacctttctgggccatcgctgctgccgaccaatggaagttccaaacctttatgtgcaaagtggttaactctatgtacaagatgaatttttacagttgcgtcttgctgattatgtgtattagcgttgacagatatatcgctatcgcgcaggctatgcgcgcgcacacttggagagagaagaggctcctttacagcaaaatggtttgctttaccatatgggttttggcagcagctttgtgtattccggaaatcctttactcacagattaaagaggaatccggtattgcaatatgcaccatggtctacccctctgatgaaagcacaaaactgaagtctgccgttctgactctgaaagtgattctcggatttttcttgcctttcgtcgtgatggcctgctgctatactatcattattcatacattgatacaggcaaagaagagctccaagcataaagcattgaaggtcactattactgtgttgaccgttttcgtgctgtcacagttcccctacaattgcattttgttagtccagacgatagacgcttatgccatgtttatctctaattgtgccgtctcaacaaatattgatatttgtttccaagtgacacaaactatcgcgtttttccactcctgcctaaatcccgtcttatacgtgtttgtgggagagagattccgtcgtgatctagttaaaaccctgaagaaccttggttgtatctcccaggcacagtgggtgagttttacacgtcgcgaggggagtctgaagctttcctctatgcttctcgagacaactagcggtgccctgagcctgtag

SEQ ID NO: 327753 - DNA, 1110 bp, Artificial Sequence
  derived and/or modified sequence
atgacccccactgattttacaagccccatcccaaacatggccgatgattatggctccgagtccaccagtagcatggaggactacgttaacttcaattttacagatttctattgtgagaagaataacgttagacagttcgccagccattttctgccccctctgtactggcttgtattcattgtaggcgctctgggtaactcattagtcatactggtgtactggtattgcacacgcgtcaaaaccatgactgatatgttcctgctaaatttagctatcgcagacctcctctttctcgtcacattgcctttctgggcaatcgccgctgccgaccagtggaaatttcagacttttatgtgcaaagttgtgaattcaatgtacaagatgaacttttactcctgcgtgttactaatcatgtgcatctccgtagatcggtacatagccattgcacaggccatgcgtgcacacacgtggcgagagaagaggttgctgtattcaaaaatggtttgttttaccatctgggttctggccgcagccctgtgcatccccgaaatcttatattcacaaattaaagaggagtcgggtatagcgatctgtaccatggtatacccaagcgacgaatcaaccaaactgaaatctgccgtgctgactctgaaggtcatcctaggcttcttcctgccattcgtcgtgatggcctgctgttatacgattatcatccacacactgatccaggctaagaaatccagtaaacacaaagccctgaaggtgaccatcacagttttgactgtgtttgttctgagtcagttcccatataactgcattttgctcgtgcagaccatcgacgcttatgccatgttcatatccaattgtgcagtctccaccaacattgatatatgctttcaagtcacccagactattgcattctttcattcttgcctaaacccggtcctgtacgttttcgttggagagagattcagaagagacctggtaaaaacgctcaaaaacctagggtgcatttcacaggcccaatgggtgtctttcactcggcgagaaggcagcctgaaactgtcttcaatgcttctggagaccactagtggggcactttcactgtag

SEQ ID NO: 327754 - DNA, 1331 bp, Artificial Sequence
  derived and/or modified sequence
cacaaagcctgcccctcatcccaggcagagagcaacccagctctttccccagacactgagagctggtggtgcctgctgtcccagggagagttgcatcgccctccacagagcaggcttgcatctgactgacccaccatgacacccacagacttcacatctcctccaggccccgctccagatcaccttccctcgctggcccaggaatccatctccttccaggaccttagcccaggactaacacaagccctattcctaacatggctgatgactatggctctgaatccacatcttccatggaagactacgttaacttcaacttcactgacttctactgtgagaaaaacaatgtcaggcagtttgcgagccatttcctcccacccttgtactggctcgtgttcatcgtgggtgccttgggcaacagtcttgttatccttgtctactggtactgcacaagagtgaagaccatgaccgacatgttccttttgaatttggcaattgctgacctcctctttcttgtcactcttcccttctgggccattgctgctgctgaccagtggaagttccagaccttcatgtgcaaggtggtcaacagcatgtacaagatgaacttctacagctgtgtgttgctgatcatgtgcatcagcgtggacaggtacattgccattgcccaggccatgagagcacatacttggagggagaaaaggcttttgtacagcaaaatggtttgctttaccatctgggtattggcagctgctctctgcatcccagaaatcttatacagccaaatcaaggaggaatccggcattgctatctgcaccatggtttaccctagcgatgagagcaccaaactgaagtcagctgtcttgaccctgaaggtcattctggggttcttccttcccttcgtggtcatggcttgctgctataccatcatcattcacaccctgatacaagccaagaagtcttccaagcacaaagccctaaaagtgaccatcactgtcctgaccgtctttgtcttgtctcagtttccctacaactgcattttgttggtgcagaccattgacgcctatgccatgttcatctccaactgtgccgtttccaccaacattgacatctgcttccaggtcacccagaccatcgccttcttccacagttgcctgaaccctgttctctatgtttttgtgggtgagagattccgccgggatctcgtgaaaaccctgaagaacttgggttgcatcagccaggcccagtgggtttcatttacaaggagagagggaagcttgaagctgtcgtctatgttgctggagacaacctcaggagcactctccctctga

SEQ ID NO: 327755 - DNA, 2567 bp, Artificial Sequence
  derived and/or modified sequence
gcttcctttctcgtgttgttatcgggtagctgcctgctcagaacccacaaagcctgcccctcatcccaggcagagagcaacccagctctttccccagacactgagagctggtggtgcctgctgtcccagggagagttgcatcgccctccacagagcaggcttgcatctgactgacccaccatgacacccacagacttcacaagccctattcctaacatggctgatgactatggctctgaatccacatcttccatggaagactacgttaacttcaacttcactgacttctactgtgagaaaaacaatgtcaggcagtttgcgagccatttcctcccacccttgtactggctcgtgttcatcgtgggtgccttgggcaacagtcttgttatccttgtctactggtactgcacaagagtgaagaccatgaccgacatgttccttttgaatttggcaattgctgacctcctctttcttgtcactcttcccttctgggccattgctgctgctgaccagtggaagttccagaccttcatgtgcaaggtggtcaacagcatgtacaagatgaacttctacagctgtgtgttgctgatcatgtgcatcagcgtggacaggtacattgccattgcccaggccatgagagcacatacttggagggagaaaaggcttttgtacagcaaaatggtttgctttaccatctgggtattggcagctgctctctgcatcccagaaatcttatacagccaaatcaaggaggaatccggcattgctatctgcaccatggtttaccctagcgatgagagcaccaaactgaagtcagctgtcttgaccctgaaggtcattctggggttcttccttcccttcgtggtcatggcttgctgctataccatcatcattcacaccctgatacaagccaagaagtcttccaagcacaaagccctaaaagtgaccatcactgtcctgaccgtctttgtcttgtctcagtttccctacaactgcattttgttggtgcagaccattgacgcctatgccatgttcatctccaactgtgccgtttccaccaacattgacatctgcttccaggtcacccagaccatcgccttcttccacagttgcctgaaccctgttctctatgtttttgtgggtgagagattccgccgggatctcgtgaaaaccctgaagaacttgggttgcatcagccaggcccagtgggtttcatttacaaggagagagggaagcttgaagctgtcgtctatgttgctggagacaacctcaggagcactctccctctgaggggtcttctctgaggtgcatggttcttttggaagaaatgagaaatacagaaacagtttccccactgatgggaccagagagagtgaaagagaaaagaaaactcagaaagggatgaatctgaactatatgattacttgtagtcagaatttgccaaagcaaatatttcaaaatcaactgactagtgcaggaggctgttgattggctcttgactgtgatgcccgcaattctcaaaggaggactaaggaccggcactgtggagcaccctggctttgccactcgccggagcatcaatgccgctgcctctggaggagcccttggattttctccatgcactgtgaacttctgtggcttcagttctcatgctgcctcttccaaaaggggacacagaagcactggctgctgctacagaccgcaaaagcagaaagtttcgtgaaaatgtccatctttgggaaattttctaccctgctcttgagcctgataacccatgccaggtcttatagattcctgatctagaacctttccaggcaatctcagacctaatttccttctgttctccttgttctgttctgggccagtgaaggtccttgttctgattttgaaacgatctgcaggtcttgccagtgaacccctggacaactgaccacacccacaaggcatccaaagtctgttggcttccaatccatttctgtgtcctgctggaggttttaacctagacaaggattccgcttattccttggtatggtgacagtgtctctccatggcctgagcagggagattataacagctgggttcgcaggagccagccttggccctgttgtaggcttgttctgttgagtggcacttgctttgggtccaccgtctgtctgctccctagaaaatgggctggttcttttggccctcttctttctgaggcccactttattctgaggaatacagtgagcagatatgggcagcagccaggtagggcaaaggggtgaagcgcaggccttgctggaaggctatttacttccatgcttctccttttcttactctatagtggcaacattttaaaagcttttaacttagagattaggctgaaaaaaataagtaatggaattcacctttgcatcttttgtgtctttcttatcatgatttggcaaaatgcatcacctttgaaaatatttcacatattggaaaagtgctttttaatgtgtatatgaagcattaattacttgtcactttctttaccctgtctcaatattttaagtgtgtgcaattaaagatcaaatagatacatt

SEQ ID NO: 327756 - DNA, 2512 bp, Artificial Sequence
  derived and/or modified sequence
ctttctcgtgttgttatcgggtagctgcctgctcagaacccacaaagcctgcccctcatcccaggcagagagcaacccagctctttccccagacactgagagctggtggtgcctgctgtcccagggagagttgcatcgccctccacaagccctattcctaacatggctgatgactatggctctgaatccacatcttccatggaagactacgttaacttcaacttcactgacttctactgtgagaaaaacaatgtcaggcagtttgcgagccatttcctcccacccttgtactggctcgtgttcatcgtgggtgccttgggcaacagtcttgttatccttgtctactggtactgcacaagagtgaagaccatgaccgacatgttccttttgaatttggcaattgctgacctcctctttcttgtcactcttcccttctgggccattgctgctgctgaccagtggaagttccagaccttcatgtgcaaggtggtcaacagcatgtacaagatgaacttctacagctgtgtgttgctgatcatgtgcatcagcgtggacaggtacattgccattgcccaggccatgagagcacatacttggagggagaaaaggcttttgtacagcaaaatggtttgctttaccatctgggtattggcagctgctctctgcatcccagaaatcttatacagccaaatcaaggaggaatccggcattgctatctgcaccatggtttaccctagcgatgagagcaccaaactgaagtcagctgtcttgaccctgaaggtcattctggggttcttccttcccttcgtggtcatggcttgctgctataccatcatcattcacaccctgatacaagccaagaagtcttccaagcacaaagccctaaaagtgaccatcactgtcctgaccgtctttgtcttgtctcagtttccctacaactgcattttgttggtgcagaccattgacgcctatgccatgttcatctccaactgtgccgtttccaccaacattgacatctgcttccaggtcacccagaccatcgccttcttccacagttgcctgaaccctgttctctatgtttttgtgggtgagagattccgccgggatctcgtgaaaaccctgaagaacttgggttgcatcagccaggcccagtgggtttcatttacaaggagagagggaagcttgaagctgtcgtctatgttgctggagacaacctcaggagcactctccctctgaggggtcttctctgaggtgcatggttcttttggaagaaatgagaaatacagaaacagtttccccactgatgggaccagagagagtgaaagagaaaagaaaactcagaaagggatgaatctgaactatatgattacttgtagtcagaatttgccaaagcaaatatttcaaaatcaactgactagtgcaggaggctgttgattggctcttgactgtgatgcccgcaattctcaaaggaggactaaggaccggcactgtggagcaccctggctttgccactcgccggagcatcaatgccgctgcctctggaggagcccttggattttctccatgcactgtgaacttctgtggcttcagttctcatgctgcctcttccaaaaggggacacagaagcactggctgctgctacagaccgcaaaagcagaaagtttcgtgaaaatgtccatctttgggaaattttctaccctgctcttgagcctgataacccatgccaggtcttatagattcctgatctagaacctttccaggcaatctcagacctaatttccttctgttctccttgttctgttctgggccagtgaaggtccttgttctgattttgaaacgatctgcaggtcttgccagtgaacccctggacaactgaccacacccacaaggcatccaaagtctgttggcttccaatccatttctgtgtcctgctggaggttttaacctagacaaggattccgcttattccttggtatggtgacagtgtctctccatggcctgagcagggagattataacagctgggttcgcaggagccagccttggccctgttgtaggcttgttctgttgagtggcacttgctttgggtccaccgtctgtctgctccctagaaaatgggctggttcttttggccctcttctttctgaggcccactttattctgaggaatacagtgagcagatatgggcagcagccaggtagggcaaaggggtgaagcgcaggccttgctggaaggctatttacttccatgcttctccttttcttactctatagtggcaacattttaaaagcttttaacttagagattaggctgaaaaaaataagtaatggaattcacctttgcatcttttgtgtctttcttatcatgatttggcaaaatgcatcacctttgaaaatatttcacatattggaaaagtgctttttaatgtgtatatgaagcattaattacttgtcactttctttaccctgtctcaatattttaagtgtgtgcaattaaagatcaaatagatacat

SEQ ID NO: 327757 - DNA, 1110 bp, Artificial Sequence
  derived and/or modified sequence
atgacccccaccgacttcaccagccccatccccaacatggccgacgactacggcagcgagagcaccagcagcatggaggactacgtgaacttcaacttcaccgacttctactgcgagaagaacaacgtgagacagttcgccagccacttcctgccccccctgtactggctggtgttcatcgtgggcgccctgggcaacagcctggtgatcctggtgtactggtactgcaccagagtgaagaccatgaccgacatgttcctgctgaacctggccatcgccgacctgctgttcctggtgaccctgcccttctgggccatcgccgccgccgaccagtggaagttccagaccttcatgtgcaaggtggtgaacagcatgtacaagatgaacttctacagctgcgtgctgctgatcatgtgcatcagcgtggacagatacatcgccatcgcccaggccatgagagcccacacctggagagagaagagactgctgtacagcaagatggtgtgcttcaccatctgggtgctggccgccgccctgtgcatccccgagatcctgtacagccagatcaaggaggagagcggcatcgccatctgcaccatggtgtaccccagcgacgagagcaccaagctgaagagcgccgtgctgaccctgaaggtgatcctgggcttcttcctgcccttcgtggtgatggcctgctgctacaccatcatcatccacaccctgatccaggccaagaagagcagcaagcacaaggccctgaaggtgaccatcaccgtgctgaccgtgttcgtgctgagccagttcccctacaactgcatcctgctggtgcagaccatcgacgcctacgccatgttcatcagcaactgcgccgtgagcaccaacatcgacatctgcttccaggtgacccagaccatcgccttcttccacagctgcctgaaccccgtgctgtacgtgttcgtgggcgagagattcagaagagacctggtgaagaccctgaagaacctgggctgcatcagccaggcccagtgggtgagcttcaccagaagagagggcagcctgaagctgagcagcatgctgctggagaccaccagcggcgccctgagcctgtag

SEQ ID NO: 327758 - protein, 270 aa, Artificial Sequence
  derived and/or modified sequence
MGEAEAPSFEMTWSSTTSSGYCSQEDSDSELEQYFTARTSLARRPRRDQDEPVEWETPDLSQAEIEQKIKEYNAQINSNLFMSLNKDGSYTGFIKVQLKLVRPVSVPSSKKPPSLQDARRGPGRGTSVRRRTSFYLPKDAVKHLHVLSRTRAREVIEALLRKFLVVDDPRKFALFERAERHGQVYLRKLLDDEQPLRLRLLAGPSDKALSFVLKENDSGEVNWDAFSMPELHNFLRILQREEEEHLRQILQKYSYCRQKIQEALHACPLG

SEQ ID NO: 327759 - protein, 189 aa, Artificial Sequence
  derived and/or modified sequence
MSLNKDGSYTGFIKVQLKLVRPVSVPSSKKPPSLQDARRGPGRGTSVRRRTSFYLPKDAVKHLHVLSRTRAREVIEALLRKFLVVDDPRKFALFERAERHGQVYLRKLLDDEQPLRLRLLAGPSDKALSFVLKENDSGEVNWDAFSMPELHNFLRILQREEEEHLRQILQKYSYCRQKIQEALHACPLG

SEQ ID NO: 327760 - DNA, 813 bp, Artificial Sequence
  derived and/or modified sequence
atgggcgaggccgaggcccccagcttcgagatgacctggagcagcaccaccagcagcggctactgcagccaggaggacagcgacagcgagctggagcagtacttcaccgccagaaccagcctggccagaagacccagaagagaccaggacgagcccgtggagtgggagacccccgacctgagccaggccgagatcgagcagaagatcaaggagtacaacgcccagatcaacagcaacctgttcatgagcctgaacaaggacggcagctacaccggcttcatcaaggtgcagctgaagctggtgagacccgtgagcgtgcccagcagcaagaagccccccagcctgcaggacgccagaagaggccccggcagaggcaccagcgtgagaagaagaaccagcttctacctgcccaaggacgccgtgaagcacctgcacgtgctgagcagaaccagagccagagaggtgatcgaggccctgctgagaaagttcctggtggtggacgaccccagaaagttcgccctgttcgagagagccgagagacacggccaggtgtacctgagaaagctgctggacgacgagcagcccctgagactgagactgctggccggccccagcgacaaggccctgagcttcgtgctgaaggagaacgacagcggcgaggtgaactgggacgccttcagcatgcccgagctgcacaacttcctgagaatcctgcagagagaggaggaggagcacctgagacagatcctgcagaagtacagctactgcagacagaagatccaggaggccctgcacgcctgccccctgggctag

SEQ ID NO: 327761 - DNA, 813 bp, Artificial Sequence
  derived and/or modified sequence
atgggggaggccgaggccccatcctttgagatgacatggagtagcacaacgagttccggatattgcagccaggaggactcagattctgagctcgaacagtatttcactgctaggactagtctggcccggcgtcccaggcgtgatcaggatgagcccgtggaatgggagacccctgatctttcccaggcggagatcgaacagaaaatcaaagaatacaatgcccagatcaactcgaatctctttatgtctctgaacaaagacggctcatacaccggtttcatcaaagtgcaactgaagctggtgcgccccgtgtctgtgcccagctccaagaaaccaccctctttgcaggacgctcgtagggggccaggtcggggaacatccgtcaggcgccgtaccagtttctatctgcctaaagacgctgtcaaacacctgcacgttttaagccggacaagagcccgtgaggtgattgaagctctcctgcgtaagttcctcgtcgtggacgatcctcgcaagttcgccctctttgagagggcagagcgtcacggccaagtgtacctgcgaaaacttctggatgacgagcagcctcttaggctgcgtctcctggctggaccgtcggacaaagcactgagctttgtgctcaaagaaaatgactccggcgaggtgaattgggatgctttttctatgcccgagctgcataacttcttgagaattttacaaagagaggaggaagagcacctacgccagatattacagaaatactcgtattgtcggcaaaagattcaagaagcccttcatgcctgcccactgggatag

SEQ ID NO: 327762 - DNA, 813 bp, Artificial Sequence
  derived and/or modified sequence
atgggagaggccgaggcccccagctttgagatgacctggagcagcaccaccagcagcggctactgcagccaggaggacagcgacagcgagctggagcagtacttcaccgcccggaccagcctggcccggcggccccggcgggaccaggatgagcctgtggagtgggagaccccagacctgagccaggccgagattgagcagaagatcaaggagtacaatgcccagatcaacagcaacctcttcatgagcctgaacaaggatggcagctacacaggcttcatcaaggtgcagctgaagctggtgcggcctgtgtctgtgcccagcagcaagaagccacccagcctgcaggatgcccggcggggccctggccggggcacctctgtgagaagaaggaccagcttctacctgcccaaggatgctgtgaagcacctgcacgtgctgagcaggacccgggcccgggaggtgattgaggccctgctgaggaagttcctggtggtggatgaccccaggaagtttgccctgtttgagcgggcagagagacatggccaggtgtacctgaggaagctgctggatgatgagcagcccctgcggctgcggctgctggccggccccagcgacaaggccctgagctttgtgctgaaggaaaatgacagcggggaggtgaactgggatgccttctccatgcctgagctgcacaacttcctgcgcatcctgcagcgggaggaggaggagcacctgcggcagatcctgcagaagtacagctactgccggcagaagatccaggaggccctgcacgcctgccccctgggctag

SEQ ID NO: 327763 - DNA, 813 bp, Artificial Sequence
  derived and/or modified sequence
atgggcgaggccgaggcccccagcttcgagatgacctggagcagcaccacctctagtggatactgcagtcaggaggatagtgattcagagctggagcagtattttactgcccggacatcactcgccaggaggccaaggcgcgaccaggatgaacccgtggaatgggagacccccgacctctctcaagctgaaatcgaacaaaaaatcaaagagtataacgctcagattaattctaatctgttcatgagcttgaacaaggacggcagctacaccggatttataaaggtgcaactcaaattggtgcgccctgtgagcgtaccgtctagcaagaaacctccgtcacttcaggacgctaggagagggcccggtagagggacaagtgtacggaggcgaacctcgttttatttgcccaaagacgccgtcaagcacctccacgtgctgtcccggacgagggctcgagaggtgattgaagctcttctgcggaaatttctggtggttgacgatccgcggaaatttgctctgtttgagcgagcggagcggcacggacaggtttatcttcggaagttgttagacgacgagcaaccgctgagactgcggctgctcgcaggacctagcgacaaggcactgagtttcgtcctgaaggaaaacgattcaggtgaagtgaattgggatgctttttcgatgcctgagttgcacaactttctgaggatcctgcaacgcgaggaagaagagcatctgcgccagatacttcagaaatattcatattgcagacagaagattcaagaagctctgcatgcgtgtcccctgggatag

SEQ ID NO: 327764 - DNA, 813 bp, Artificial Sequence
  derived and/or modified sequence
atgggggaggctgaggctccgagctttgagatgacttggtcttcaaccacttcctccggctactgttctcaggaagattctgacagcgaactggaacaatatttcactgcacgcacatcactcgctcgaaggccacggcgtgaccaggatgaacctgtggagtgggagactccagacctgtctcaggccgagatcgaacagaaaatcaaggaatataacgcacagattaacagtaacctgttcatgtcattgaacaaagatggttcatatacggggtttatcaaagtgcaacttaaactggtgcggccagtgtcagtgccctcttccaagaaaccgcctagcctgcaggacgctcggcgtggcccagggcgtggtacttctgttcgaaggcggaccagcttttacctgccaaaagatgcggtgaagcacttgcatgttctctccagaactagggctagagaagttatagaagcactactgcgtaaatttctggtcgtggatgatccacgtaaattcgctctgtttgagcgggctgagaggcacggccaggtttatcttagaaagctgttggatgacgaacagcctctgaggctgcggctgttggccggaccttccgacaaagccctcagcttcgtactgaaggagaacgactccggggaggtaaattgggacgccttctctatgccagagctccacaactttctgaggattctgcagcgtgaggaggaagaacacttaagacagatcctgcagaagtattcctactgcaggcagaagatccaggaagcgttgcacgcttgtcctctaggctag

SEQ ID NO: 327765 - DNA, 1751 bp, Artificial Sequence
  derived and/or modified sequence
gcgatctacgtttcagtcttaacggttgcggcgcggctctggcccgggcgcacgcgcacactgacacgcgtacacgcacgcacgcgaccggggcggtggttggcggctacggacgcgcaggactgggggacgggcgggtacggctatgggcgaggcggaggcgccttctttcgaaatgacctggagcagcacgacgagcagtggctactgcagccaagaggactcggactcggagctcgagcagtacttcaccgcgcgaacctcgctagctcgcaggccgcgccgggaccaggacgagcctgtggagtgggagacacctgacctttctcaagctgagattgagcagaagatcaaggagtacaatgcccagatcaacagcaacctcttcatgagcttgaacaaggacggttcttacacaggcttcatcaaggttcagctgaagctggtgcgccctgtctctgtgccctccagcaagaagccaccctccttgcaggatgcccggcggggcccaggacggggcacaagtgtcaggcgccgcacttccttttacctgcccaaggatgctgtcaagcacctgcatgtgctgtcacgcacaagggcacgtgaagtcattgaggccctgctgcgaaagttcttggtggtggatgacccccgcaagtttgcactctttgagcgcgctgagcgtcacggccaagtgtacttgcggaagctgttggatgatgagcagcccctgcggctgcggctcctggcagggcccagtgacaaggccctgagctttgtcctgaaggaaaatgactctggggaggtgaactgggacgccttcagcatgcctgaactacataacttcctacgtatcctgcagcgggaggaggaggagcacctccgccagatcctgcagaagtactcctattgccgccagaagatccaagaggccctgcacgcctgcccccttgggtgacctcttgtacccccaggtggaaggcagacagcaggcagcgccaagtgcgtgccgtgtgagtgtgacagggccagtggggcctgtggaatgagtgtgcatggaggccctcctgtgctgggggaatgagcccagagaacagcgaagtagcttgctccctgtgtccacctgtgggtgtagccaggtatggctctgcacccctctgccctcattactgggccttagtgggccagggctgccctgagaagctgctccaggcctgcagcaggagtggtgcagacagaagtctcctcaatttttgtctcagaagtgaaaatcttggagaccctgcaaacagaacagggtcatgtttgcaggggtgacggccctcatctatgaggaaaggttttggatcttgaatgtggtctcaggatatccttatcagagctaagggtgggtgctcagaataaggcaggcattgaggaagagtcttggtttctctctacagtgccaactcctcacacaccctgaggtcagggagtgctggctcacagtacagcatgtgccttaatgcttcatatgaggaggatgtccctgggccagggtctgtgtgaatgtgggcactggcccaggttcataccttatttgctaatcaaagccagggtctctccctcaggtgttttttatgaagtgcgtgaatgtatgtaatgtgtggtggcctcagctgaatgcctcctgtggggaaaggggttggggtgacagtcatcatcagggcctggggcctgagagaattggctcaataaagatttcaagatcc

SEQ ID NO: 327766 - protein, 428 aa, Artificial Sequence
  derived and/or modified sequence
MATARTFGPEREAEPAKEARVVGSELVDTYTVYIIQVTDGSHEWTVKHRYSDFHDLHEKLVAERKIDKNLLPPKKIIGKNSRSLVEKREKDLEVYLQKLLTACVLLSTKAVYFVLHDGLRRYFSEPLQDFWHQKNTDYNNSPFHISQCFVLKLSDLQSVNVGLFDQHFRLTGSTPMQVVTCLTRDSYLTHCFLQHLMVVLSSLERTPSPEPVDKDFYSEFGNKTTGKMENYELIHSSRVKFTYPSEEEIGDLTFTVAQKMAEPEKAPALSILLYVQAFQVGMPPPGCCRGPLRPKTLLLTSSEIFLLDEDCVHYPLPEFAKEPPQRDRYRLDDGRRVRDLDRVLMGYQTYPQALTLVFDDVQGHDLMGSVTLDHFGEVPGGPARASQGREVQWQVFVPSAESREKLISLLARQWEALCGRELPVELTG

SEQ ID NO: 327767 - protein, 1791 aa, Artificial Sequence
  derived and/or modified sequence
MDDRCYPVIFPDERNFRPFTSDSLAAIEKRIAIQKEKKKSKDQTGEVPQPRPQLDLKASRKLPKLYGDIPRELIGKPLEDLDPFYRNHKTFMVLNRKRTIYRFSAKHALFIFGPFNSIRSLAIRVSVHSLFSMFIIGTVIINCVFMATGPAKNSNSNNTDIAECVFTGIYIFEALIKILARGFILDEFSFLRDPWNWLDSIVIGIAIVSYIPGITIKLLPLRTFRVFRALKAISVVSRLKVIVGALLRSVKKLVNVIILTFFCLSIFALVGQQLFMGSLNLKCISRDCKNISNPEAYDHCFEKKENSPEFKMCGIWMGNSACSIQYECKHTKINPDYNYTNFDNFGWSFLAMFRLMTQDSWEKLYQQTLRTTGLYSVFFFIVVIFLGSFYLINLTLAVVTMAYEEQNKNVAAEIEAKEKMFQEAQQLLKEEKEALVAMGIDRSSLTSLETSYFTPKKRKLFGNKKRKSFFLRESGKDQPPGSDSDEDCQKKPQLLEQTKRLSQNLSLDHFDEHGDPLQRQRALSAVSILTITMKEQEKSQEPCLPCGENLASKYLVWNCCPQWLCVKKVLRTVMTDPFTELAITICIIINTVFLAMEHHKMEASFEKMLNIGNLVFTSIFIAEMCLKIIALDPYHYFRRGWNIFDSIVALLSFADVMNCVLQKRSWPFLRSFRVLRVFKLAKSWPTLNTLIKIIGNSVGALGSLTVVLVIVIFIFSVVGMQLFGRSFNSQKSPKLCNPTGPTVSCLRHWHMGDFWHSFLVVFRILCGEWIENMWECMQEANASSSLCVIVFILITVIGKLVVLNLFIALLLNSFSNEERNGNLEGEARKTKVQLALDRFRRAFCFVRHTLEHFCHKWCRKQNLPQQKEVAGGCAAQSKDIIPLVMEMKRGSETQEELGILTSVPKTLGVRHDWTWLAPLAEEEDDVEFSGEDNAQRITQPEPEQQAYELHQENKKPTSQRVQSVEIDMFSEDEPHLTIQDPRKKSDVTSILSECSTIDLQDGFGWLPEMVPKKQPERCLPKGFGCCFPCCSVDKRKPPWVIWWNLRKTCYQIVKHSWFESFIIFVILLSSGALIFEDVHLENQPKIQELLNCTDIIFTHIFILEMVLKWVAFGFGKYFTSAWCCLDFIIVIVSVTTLINLMELKSFRTLRALRPLRALSQFEGMKVVVNALIGAIPAILNVLLVCLIFWLVFCILGVYFFSGKFGKCINGTDSVINYTIITNKSQCESGNFSWINQKVNFDNVGNAYLALLQVATFKGWMDIIYAAVDSTEKEQQPEFESNSLGYIYFVVFIIFGSFFTLNLFIGVIIDNFNQQQKKLGGQDIFMTEEQKKYYNAMKKLGSKKPQKPIPRPLNKCQGLVFDIVTSQIFDIIIISLIILNMISMMAESYNQPKAMKSILDHLNWVFVVIFTLECLIKIFALRQYYFTNGWNLFDCVVVLLSIVSTMISTLENQEHIPFPPTLFRIVRLARIGRILRLVRAARGIRTLLFALMMSLPSLFNIGLLLFLIMFIYAILGMNWFSKVNPESGIDDIFNFKTFASSMLCLFQISTSAGWDSLLSPMLRSKESCNSSSENCHLPGIATSYFVSYIIISFLIVVNMYIAVILENFNTATEESEDPLGEDDFDIFYEVWEKFDPEATQFIKYSALSDFADALPEPLRVAKPNKYQFLVMDLPMVSEDRLHCMDILFAFTARVLGGSDGLDSMKAMMEEKFMEANPLKKLYEPIVTTTKRKEEERGAAIIQKAFRKYMMKVTKGDQGDQNDLENGPHSPLQTLCNGDLSSFGVAKGKVHCD

SEQ ID NO: 327768 - protein, 1444 aa, Artificial Sequence
  derived and/or modified sequence
MDDRCYPVIFPDERNFRPFTSDSLAAIEKRIAIQKEKKKSKDQTGEVPQPRPQLDLKASRKLPKLYGDIPRELIGKPLEDLDPFYRNHKTFMVLNRKRTIYRFSAKHALFIFGPFNSIRSLAIRVSVHSLFSMFIIGTVIINCVFMATGPAKNSNSNNTDIAECVFTGIYIFEALIKILARGFILDEFSFLRDPWNWLDSIVIGIAIVSYIPGITIKLLPLRTFRVFRALKAISVVSRLKVIVGALLRSVKKLVNVIILTFFCLSIFALVGQQLFMGSLNLKCISRDCKNISNPEAYDHCFEKKENSPEFKMCGIWMGNSACSIQYECKHTKINPDYNYTNFDNFGWSFLAMFRLMTQDSWEKLYQQTLRTTGLYSVFFFIVVIFLGSFYLINLTLAVVTMAYEEQNKNVAAEIEAKEKMFQEAQQLLKEEKEALVAMGIDRSSLTSLETSYFTPKKRKLFGNKKRKSFFLRESGKDQPPGSDSDEDCQKKPQLLEQTKRLSQNLSLDHFDEHGDPLQRQRALSAVSILTITMKEQEKSQEPCLPCGENLASKYLVWNCCPQWLCVKKVLRTVMTDPFTELAITICIIINTVFLAMEHHKMEASFEKMLNIGNLVFTSIFIAEMCLKIIALDPYHYFRRGWNIFDSIVALLSFADVMNCVLQKRSWPFLRSFRVLRVFKLAKSWPTLNTLIKIIGNSVGALGSLTVVLVIVIFIFSVVGMQLFGRSFNSQKSPKLCNPTGPTVSCLRHWHMGDFWHSFLVVFRILCGEWIENMWECMQEANASSSLCVIVFILITVIGKLVVLNLFIALLLNSFSNEERNGNLEGEARKTKVQLALDRFRRAFCFVRHTLEHFCHKWCRKQNLPQQKEVAGGCAAQSKDIIPLVMEMKRGSETQEELGILTSVPKTLGVRHDWTWLAPLAEEEDDVEFSGEDNAQRITQPEPEQQAYELHQENKKPTSQRVQSVEIDMFSEDEPHLTIQDPRKKSDVTSILSECSTIDLQDGFGWLPEMVPKKQPERCLPKGFGCCFPCCSVDKRKPPWVIWWNLRKTCYQIVKHSWFESFIIFVILLSSGALIFEDVHLENQPKIQELLNCTDIIFTHIFILEMVLKWVAFGFGKYFTSAWCCLDFIIVIVSVTTLINLMELKSFRTLRALRPLRALSQFEGMKVVVNALIGAIPAILNVLLVCLIFWLVFCILGVYFFSGKFGKCINGTDSVINYTIITNKSQCESGNFSWINQKVNFDNVGNAYLALLQVATFKGWMDIIYAAVDSTEKEQQPEFESNSLGYIYFVVFIIFGSFFTLNLFIGVIIDNFNQQQKKLGGQDIFMTEEQKKYYNAMKKLGSKKPQKPIPRPLNKCQGLVFDIVTSQIFDIIIISLIILNMISMMAESYNQPKAMKSILDHLNWVFVVIFTLECLIKIFALRQYYFTNGWNLFDCVVVLLSIVSK

SEQ ID NO: 327769 - DNA, 5376 bp, Artificial Sequence
  derived and/or modified sequence
atggacgatcggtgttatcctgtgatattccctgatgaaaggaattttcgaccattcacgtccgactcactggcagctatcgagaagcgtatcgctatccagaaggagaaaaagaagagcaaggatcagacaggtgaagttccgcagccacgtccccagcttgatctaaaggccagccgaaaattgcccaagctttacggggatatcccgagagaactcattgggaaaccactggaggatctcgatcccttctacaggaaccataagaccttcatggtcctcaaccggaagagaacaatctatcgcttcagcgccaaacatgctctgtttatctttggaccctttaacagtatccgaagtttggccatacgggtgtctgtgcactcgctattctctatgttcataatcggcacagtgatcattaattgtgtcttcatggctacagggcctgccaaaaattcaaactcgaataatactgacattgcagagtgtgtttttaccggcatctacatttttgaagctctgatcaagatcctggcgcgtggttttatacttgacgagttttcctttcttcgtgatccgtggaattggctggatagcatcgtgattggcatcgcaatcgtgtcctacattccaggaatcacaatcaaactactgcccctaagaactttccgcgtattccgtgcccttaaggccatctctgttgttagccgcctaaaagtgattgtgggagccctgctgcggagcgttaagaaattagtgaacgtgatcatacttaccttcttttgtctgagcatcttcgccctggtaggccagcagctcttcatggggtctctgaatctgaaatgtatcagtcgtgactgtaaaaacatttcaaacccggaggcatatgatcactgtttcgaaaagaaagagaacagcccagagtttaagatgtgcggtatatggatgggcaacagcgcttgctccattcaatatgagtgcaagcacacaaaaatcaacccggattacaactatacaaatttcgacaattttgggtggtcctttttggctatgttccgactcatgacccaagatagttgggaaaaactgtaccagcaaacactgagaactacaggtctgtattccgtattctttttcatagtagtcattttcctcggcagtttttacctgataaatctcactctcgccgtggtgaccatggcttatgaagaacagaataagaacgtcgcagccgagattgaagccaaagagaagatgttccaggaggcccagcaacttctaaaagaggagaaggaagcgctagtggcaatggggatagatcggagctctctcacttctttagaaactagttacttcactccaaaaaaacggaagttgtttggcaacaagaagcgaaagtcgttcttcttgcgggagtcagggaaggatcagcctccagggtccgacagtgacgaggactgtcagaagaagcctcaactcctggaacagaccaagcgcttatctcagaatctcagccttgatcatttcgacgaacatggcgatcccctgcaacgacagcgggccctgagtgcggtttccatactgacaataacaatgaaggagcaggaaaagtcgcaggagccatgtctgccttgtggagaaaacctcgcctccaaatacttagtctggaactgttgcccccagtggctgtgtgttaagaaggtcctgcggactgtgatgaccgatccattcacggagctggccatcacaatctgcattatcatcaacacagtcttcctcgcaatggagcaccataagatggaagcctcattcgagaagatgttgaatatcggcaatttggtgttcacctcaatcttcatagctgaaatgtgtctgaaaatcattgctctcgacccttaccactattttcgccgggggtggaatatctttgatagtatagtagccctgttgtcctttgctgacgtaatgaactgcgttctgcagaagagaagctggccttttttgagaagtttcagagtattacgagtattcaagctggccaaatcctggcctacacttaacaccctaattaagatcatcggaaacagtgtgggggccttgggatctttgacagtcgtcttagtgatcgttattttcatattctccgttgtaggaatgcaactcttcgggagatcatttaattcacagaagtcccctaagctgtgcaacccaacagggccgacggtttcatgccttaggcactggcacatgggggacttttggcacagttttcttgtggtcttccgaattctgtgcggggaatggatcgagaatatgtgggagtgcatgcaggaggccaacgcttcctcctcactatgcgtgatcgtgttcatcctcatcacagtgattggcaaactggtggtgcttaatctgttcatcgctctactgctcaactcgttttccaacgaggagaggaacggaaatcttgaaggagaagctcgcaaaacaaaggtgcagttagccctggatagattccgcagagccttctgttttgtcaggcacacactggagcatttttgccataagtggtgtagaaaacagaatctgccccaacagaaagaagtggcaggcggatgcgccgcacagtccaaggacatcatccctctggttatggaaatgaaacgaggcagtgagacgcaggaggagcttggcatactgacctcagtgccaaaaacattaggagtgaggcacgactggacgtggcttgcccctctagcagaagaggaggacgatgtcgaattttccggcgaagacaacgctcaacgtatcacccagcccgagccggaacagcaggcctatgagctgcaccaggaaaacaagaaacccaccagtcagagagtccagtctgtggagatcgatatgttctctgaggatgaacctcacctcacgattcaagatcctaggaaaaagtcagacgttacctcgattctttccgagtgcagtactatcgacctgcaggatggtttcggctggctgccagaaatggttcccaaaaaacagcctgagcgctgcttgcccaaaggatttgggtgctgcttcccgtgctgctccgtggataaacgtaaacccccatgggtcatttggtggaatctgcgtaaaacttgctatcaaatagtgaaacactcctggtttgagagttttattatcttcgtgatcttgctatcttctggtgcgctcatttttgaagatgtacacctggagaaccagcctaaaatccaggaactcctgaactgtaccgatattatattcacgcatatatttatcctcgagatggtcctcaagtgggtggccttcggttttgggaaatatttcacatctgcatggtgttgtttagacttcatcatcgtaatcgtctctgttacgacacttattaacctgatggaactcaaaagcttccggaccctgcgggccttgcggcctcttagagccctgagccaattcgaaggaatgaaagttgtggttaacgctctcatcggggcaattcctgccatactgaacgtgctgctcgtctgtctgatattttggttggtattctgcattcttggtgtctacttcttctcaggtaaatttgggaagtgtataaacggcacagattcagtaattaattacaccattattactaacaaaagtcagtgcgaatcaggaaacttttcgtggattaaccagaaagtgaatttcgataatgtgggaaacgcatacctggcacttctgcaggtcgcaacattcaagggttggatggacatcatctatgctgccgtcgactctaccgagaaagagcaacaacccgagtttgagtctaattctctgggttatatttactttgtggtgttcatcattttcggttcttttttcactctcaatctgttcattggggtgattatcgataacttcaaccagcagcagaagaagctgggggggcaagacattttcatgaccgaggagcagaaaaaatactataatgccatgaagaagctgggaagtaaaaaaccacagaaacctattcctcgacccttaaacaagtgccaaggtctggtcttcgacatcgtgacttctcagatatttgacatcataatcatatccctgattatactcaacatgattagcatgatggcagaaagttacaaccagcctaaggcgatgaaaagcatcctcgaccatctcaattgggttttcgtagtgattttcactctcgaatgtctcattaagatctttgcccttaggcaatactactttaccaacggctggaatctgtttgattgtgtcgttgtcctgcttagtatcgtcagcaccatgatatcgaccttggaaaaccaagagcacatcccctttccaccaaccttgtttcgtatagtgcgccttgcgaggatcggtagaatactgcgcctggtgcgagctgctagaggcatccggactctgctattcgccctgatgatgagcttgccttccttgtttaacatcgggctgctgcttttccttattatgttcatttacgcgattttgggcatgaattggttctccaaagtcaacccagagtctggtattgatgacatcttcaatttcaagacattcgcctcaagcatgctgtgcctgttccaaatttcgacttccgccggctgggacagtctcctgagccctatgttgcgctcaaaggaatcatgtaacagctcttctgaaaattgtcatttgcccgggatagcgacaagctacttcgtctcctatattattatctcctttttgatcgtagtgaacatgtacatcgctgtgatcctcgagaacttcaatactgccaccgaagagtcggaggacccccttggggaggacgacttcgacattttctacgaagtctgggaaaagttcgatcctgaagctacacaattcatcaaatacagtgcgctctcggatttcgccgacgctcttcctgagcccctaagagtggccaaacccaacaaataccagttcctcgtgatggaccttcctatggtctctgaagacaggttacattgtatggatatcctcttcgcctttactgccagggtcctcggcggaagcgacggcctagatagcatgaaggcaatgatggaggaaaagtttatggaggccaatccgctgaaaaaactgtacgagcctattgtgacgaccactaagagaaaagaagaggaacggggagccgccattatccagaaggccttccgcaagtacatgatgaaggttacaaaaggtgatcaaggcgaccagaatgatcttgaaaatgggccacactcgccgttgcagacgctatgcaacggagatctgtctagttttggagtggcgaaagggaaggttcattgcgactag

SEQ ID NO: 327770 - DNA, 4335 bp, Artificial Sequence
  derived and/or modified sequence
atggacgatagatgctacccagtgatatttcctgacgagcgcaactttcggcccttcacgtccgattccctggcggctatcgaaaagcgcatcgctatccaaaaggagaaaaagaagtctaaggatcagacaggggaagtcccccaacctcgtcctcaacttgacttgaaagcaagccggaagctgcctaagctgtacggggacatacctcgtgagctgattggcaagcctctcgaggacttggatcctttctaccgtaaccacaagacctttatggtgctcaacaggaaaaggaccatttatcgcttcagtgctaagcacgcattattcatatttggacccttcaattcgatacgctcgcttgctatccgggtttcagttcactccctatttagtatgttcatcatagggacggttatcataaattgcgtgtttatggccactggacctgcaaagaatagtaattccaacaatacagatatcgccgaatgcgtgtttaccgggatctatatttttgaggcacttatcaagatcttagcgagggggtttatattggacgaatttagcttcctacgggacccctggaattggttagattctatagtgataggaattgcaattgtgtcctacatccctggtattaccataaagcttctgcctttgagaactttccgcgtgtttagagccctgaaagccatatcagtggtgagtaggctgaaagttatagtcggagccctgcttcgtagcgtcaaaaagctcgtcaatgtgattatcctcacctttttttgcctgtctatatttgccctggtaggtcagcagctgtttatgggtagcttgaatctgaaatgcatctccagggactgtaaaaacattagcaacccagaagcatacgaccattgcttcgagaagaaggagaattccccagagtttaaaatgtgtggcatctggatgggaaactccgcctgtagcattcagtatgaatgtaaacatacgaagattaatcccgactacaactataccaatttcgacaatttcgggtggtcctttttggctatgtttcggctgatgacccaagattcatgggagaagttataccaacagaccttgaggactacggggctgtacagtgtgttttttttcatagttgttatctttctgggatcattttatctcatcaatcttaccctggcggttgtgactatggcttatgaggagcagaataagaacgtggccgccgaaattgaggccaaagagaagatgttccaggaagcccagcagttgctgaaggaagaaaaggaagcccttgtggctatggggatcgacaggtcttcactgacctcactggagacttcgtatttcacacctaaaaagagaaaactgtttggaaataagaagaggaagtcatttttcctgcgcgagtccggtaaagatcagccaccaggatccgacagcgatgaggactgtcagaaaaagccccaactgctcgaacagactaaaagactgtcccaaaatttgtcactggatcattttgacgaacacggtgaccccctgcagaggcagagagctctcagtgctgtgtcaatcctgaccatcacaatgaaagaacaagaaaagagtcaggagccctgcctcccctgtggtgaaaacctggctagcaaatatttagtgtggaactgctgtccacaatggctgtgcgtaaagaaggtcttgcgcaccgtaatgacagaccctttcactgagctggccatcactatctgcatcattataaatacagtgttcctggccatggaacatcataaaatggaggcgagtttcgagaagatgctgaacatagggaatttagtgtttacctctatttttattgcagaaatgtgcctcaagatcatcgctctggatccataccactatttcagacgtgggtggaacattttcgactctatcgtagcactgctgtcctttgccgatgtaatgaactgcgttttgcagaagaggtcctggccctttctcagatccttcagggtactgcgggtattcaagctggcgaagagctggcccacccttaacactctcatcaaaatcatcggaaatagtgttggcgctctgggctcccttacggtggtacttgttatcgtgatttttatattcagtgtggtcggaatgcaattgttcgggagaagcttcaatagtcaaaagtccccaaagctatgtaatcccaccggtccaacagtatcctgtcttcggcactggcatatgggagatttctggcacagcttcctggtggtctttcgcatactgtgtggtgagtggattgagaatatgtgggaatgcatgcaggaggctaatgcatcgtcgagcctatgcgtgattgtgttcattttgatcacggttatcggcaagcttgtggtgctgaacctgtttattgcattattgctgaacagtttttctaacgaagaaaggaatggcaacctcgagggcgaagccaggaaaaccaaggtgcagctggcactcgacagattcagaagagccttctgctttgtcaggcataccctcgagcatttctgtcataagtggtgtaggaaacagaacctgcctcagcagaaagaagttgctggggggtgcgccgcccaaagcaaggatattatcccactggtgatggagatgaagcgaggttcagagacccaagaggaactgggcattctcactagtgtacctaagacattgggggtgagacatgattggacttggctggcgccactcgctgaagaagaggatgacgtcgagtttagcggcgaagataacgcccaacgtattactcagcctgaaccggaacagcaggcctacgaactgcatcaggagaacaaaaagccaactagccagagagtgcagtccgtggagatcgatatgttctcagaggacgaaccccacctgaccattcaagacccaaggaaaaaatcagacgtgacttcaattttgtctgagtgcagtactatagaccttcaggacgggtttggctggctgcctgagatggtccccaagaagcagcccgaacgttgcttgccaaagggcttcgggtgctgctttccttgctgcagcgttgataaacgcaagcccccatgggttatttggtggaacctcagaaagacctgctatcagattgtgaagcactcatggtttgaatctttcattatttttgtgattctgctatcctccggagctctgattttcgaggatgtgcacctggagaatcaacccaagatccaggagctcctgaactgtacagacattatctttacacacatctttattctcgagatggttcttaaatgggtggcttttggctttggaaagtacttcacatccgcctggtgctgcctggacttcattatcgtcattgtgagcgtgacaaccctgataaatctgatggagctgaagtctttcagaactcttcgtgccctgagaccccttcgtgcactctcccagttcgaaggcatgaaagtggtggttaatgccctgataggagcaatcccagccatactgaacgtgctgttagtgtgtctcatattctggttggtgttttgcatcctgggcgtgtattttttttccggcaaattcggcaaatgtattaacggaacagattcagttattaactacaccattattacgaacaagagtcagtgcgagagtggcaactttagctggatcaatcaaaaagttaactttgacaatgttgggaacgcgtatctggcactgttgcaggtagcgaccttcaaaggatggatggacataatttacgcagcggtcgacagcaccgagaaagagcaacagccagagttcgaatccaatagcctcggctatatctattttgtggtgtttattatcttcggctctttcttcaccttaaatctgtttattggtgtgatcattgataactttaatcagcagcagaaaaaattgggtggccaggatattttcatgacagaggaacagaaaaaatactataatgccatgaagaagctgggctcaaaaaagccgcagaagccgatccctagaccacttaacaaatgccaaggtctggtcttcgatattgtaacttctcaaatattcgacattatcatcattagcctgataatcttgaacatgatctctatgatggccgagtcttacaaccaaccaaaagctatgaagagcatcttggaccatctgaattgggtgttcgtggttatcttcaccttggagtgccttataaaaatcttcgccctcagacaatattactttacgaatgggtggaatttatttgactgtgtggtggtgttgttgtcaattgtcagcaagtag

SEQ ID NO: 327771 - DNA, 5376 bp, Artificial Sequence
  derived and/or modified sequence
atggatgatcgctgctacccagtgatcttccctgacgagaggaattttcgacctttcacaagcgactcccttgccgcgatcgagaaacgcatcgccattcagaaggagaaaaagaagtcaaaagatcaaacgggcgaggtgccacagccccgcccccagctggatctcaaagcatcacgaaaacttcccaaactgtacggagacatacctcgcgagctgattggaaaacctttagaggacctggacccattttatagaaaccacaaaacctttatggttctaaacaggaaaagaaccatttatagattttcagccaagcacgctctttttatctttggacccttcaacagcattcggagcttggccatcagggtcagcgtgcacagtcttttctccatgtttattattgggactgtcataatcaactgtgtgtttatggccaccggcccggccaaaaatagcaatagcaacaataccgatatagctgagtgtgttttcaccggcatctacatttttgaagccctgatcaaaatcttggcccgggggtttattctggacgaattttcattcctgcgagacccttggaattggctggactctatcgtgatcggcatcgctatcgtgagctatattcctggaatcactatcaaactgctgcccttaaggacctttcgtgtgttcagggcgctgaaggcgatctccgttgtctcacgcctgaaagtgatagttggtgctctgctcagatctgttaagaaactggtcaacgtgatcattcttacctttttctgtttatccatattcgcgttggttgggcaacagcttttcatgggatctctgaacctgaaatgcatcagtcgggattgcaaaaatattagcaacccggaagcctacgatcattgctttgagaaaaaagaaaatagccctgagtttaaaatgtgcggaatttggatgggaaactcggcctgctctatccagtacgagtgcaagcatactaaaattaacccggactataactacaccaattttgacaattttggttggagtttcctggctatgtttcgactcatgactcaggactcttgggaaaagctgtatcagcagacactgagaaccacggggctgtacagcgtctttttcttcatcgtggtgatattcctgggcagtttctacctcattaacctgactcttgccgtggtgaccatggcgtacgaagagcagaataagaatgtcgccgctgaaatcgaggcaaaagaaaaaatgttccaggaggcccaacagctgttgaaagaggaaaaagaggccctcgtggctatgggaatcgatagaagctccctaacgtccctggagacctcttactttactcccaagaagaggaagctttttgggaacaaaaagcgaaaaagtttcttcttgcgtgaatcagggaaggaccagccaccgggatccgactctgatgaggactgtcagaagaagccacagctgttggagcagaccaaacgactaagtcagaacttgagcttagaccactttgatgagcatggtgatcctttacagcgccagcgggctctaagtgctgtgtcaattcttacaattactatgaaagaacaggagaagagccaagaaccctgcctcccatgcggagaaaacctcgcttctaaatatctggtctggaactgctgcccacagtggctctgtgttaagaaggttctgaggactgttatgacagacccctttaccgaacttgccatcacaatctgtatcatcatcaatacagtctttctggccatggaacatcataaaatggaagcttccttcgaaaaaatgctcaatatcggcaatttggtgttcacctccatttttatcgccgagatgtgtctgaaaatcatcgctctggatccctatcactattttaggcgcggttggaatatcttcgatagcattgtggctctgttatccttcgccgatgtcatgaattgtgtgctgcaaaagcgctcatggccctttttacgatcttttagagttctaagagtgttcaaactggcgaaaagctggcccacactgaacaccctgataaagattattggaaattctgtgggtgccctcggctctctaacggtggttcttgttatcgtgatttttattttttcagtcgtcggcatgcagctgttcggccgaagtttcaatagtcagaagagccccaaactctgtaacccaactggacctactgtgagctgtctgcgccactggcatatgggcgacttttggcactcatttttagtagtgttcaggattctgtgcggggagtggatcgagaatatgtgggagtgcatgcaggaagctaatgcttcaagtagcttgtgtgtgatagtgttcatccttattaccgtgatcggcaaacttgtagtcctgaacctgttcatcgctctgctgttgaatagctttagcaacgaggagaggaacgggaatctggagggcgaggcccggaagacaaaggtgcagctcgcgctcgaccgcttccgccgggctttctgctttgttcgacataccctggaacacttttgccacaagtggtgcagaaaacagaacctcccacagcaaaaagaggttgcaggtgggtgtgccgcccaaagtaaggacattattccactcgtaatggagatgaaacggggaagcgagacccaggaggagctgggaattctaacttccgtgcccaagaccctaggtgtgaggcatgattggacgtggctggcccctctggcggaagaagaagacgatgtcgagttttccggagaggacaacgctcagcgcataactcaaccggagcctgagcagcaggcctacgagctgcaccaggagaataagaagccaacctcacagagagtccaaagcgtggagattgatatgttctccgaagacgaaccccatctaacaatccaggatcccagaaagaaatccgacgtgaccagcatactgtcagagtgcagcaccatcgacttgcaggacgggtttggttggcttcccgaaatggttcctaaaaagcaacctgagcggtgtctgcctaaaggctttggctgttgctttccgtgctgcagcgtggacaagagaaagcccccctgggttatatggtggaaccttcgcaaaacatgttatcagatcgtcaagcactcatggttcgagtcttttattatattcgttatactgctgagcagtggagctctaatatttgaggacgttcacttagaaaaccagcccaagattcaagaattgctgaattgcaccgatataatctttacacatattttcattcttgagatggtgctgaaatgggttgcttttggtttcggtaagtattttacctctgcctggtgttgtctggattttattattgtcatcgtgtccgtaactacactgattaacttgatggaattgaaatcttttcgcactctgcgggcactccgccctcttcgcgctttatcccagttcgaaggaatgaaagttgtggtaaatgctctgatcggtgcaatccccgctattctcaatgttctgctggtctgtctgatattttggttagtcttctgtatcctcggcgtgtactttttctccgggaaatttggaaaatgcataaacggcacagactcagtgattaactacaccatcattactaacaaaagtcagtgtgaatcaggtaatttctcctggatcaaccaaaaggtgaatttcgacaatgtgggcaatgcctacttagctctgcttcaagtggcaacctttaaaggatggatggacatcatctatgctgcggtggattcgaccgagaaagagcagcagcctgagttcgaatctaactccctgggctacatctatttcgtggtatttatcatcttcgggagctttttcactttgaatctgtttataggcgtcattatcgacaattttaaccagcaacagaaaaagcttggggggcaagacatattcatgacagaggagcaaaagaaatattataacgctatgaagaagttaggatcaaagaagccccagaagccgatcccgcgcccccttaacaagtgtcagggtctagtgtttgacatcgtgacttctcagatattcgatatcatcattatttctctgataattctaaacatgatatccatgatggccgaaagctacaaccagcctaaagccatgaaatcaatcttagaccacctgaattgggtttttgtcgtaatattcactctcgagtgtctcatcaaaattttcgccctccgccagtactatttcacgaacggatggaatctgttcgactgcgtcgtggtgttactcagcatcgtcagcaccatgatctctaccctggagaaccaggagcatattccattcccgcccacactgttcagaatcgtccgactggccaggataggccgaatactgagactcgtgagggccgcgagaggcatcaggacgctgctcttcgcgctcatgatgagcttacccagcttgttcaacatcgggctccttctattccttatcatgtttatttacgcaatattagggatgaattggttctccaaggtgaaccctgagtcaggaattgacgacatatttaacttcaagacgttcgcctcgagcatgctgtgcctgttccagatttctacatccgctggctgggattccctcttgagccctatgctcagaagtaaggagtcatgcaattcatcgtccgaaaactgtcatctcccaggtatcgctacgagttacttcgtgtcatatataatcatttccttcctgatcgtggtcaacatgtatatcgcagtgattctcgaaaactttaataccgccaccgaagaaagcgaagacccattgggcgaggatgactttgacattttttatgaagtttgggaaaaattcgatccagaggcaacccaattcatcaagtacagtgccctctccgacttcgccgacgccctgcctgaaccactccgagtggctaaacctaacaaataccagttcctcgtgatggacctgccgatggtgagcgaggatcgacttcactgtatggacatcctattcgccttcacagcccgcgtgttgggaggttccgatggcctcgatagcatgaaagccatgatggaagagaagttcatggaggccaaccctctgaagaagctgtatgaaccaatcgtgaccaccaccaaacgtaaagaagaggagcggggggcagccattatccagaaggctttccgaaagtatatgatgaaagtgaccaagggcgaccagggcgatcaaaacgacctggagaacggtccccactcacctctccagaccctctgtaatggcgacctcagctcctttggagtggcaaagggcaaggttcattgcgactag

SEQ ID NO: 327772 - DNA, 5376 bp, Artificial Sequence
  derived and/or modified sequence
atggatgaccgctgctaccctgtgatcttcccagatgagaggaacttccggcccttcaccagtgacagcctggccgccatcgagaagagaattgccatccagaaggagaagaagaagagcaaggaccagacaggagaggtgccccagccccggccccagctggacctgaaggccagcaggaagctgcccaagctgtatggagacatcccccgggagctgattggcaagcccctggaggacctggaccccttctacagaaaccacaagaccttcatggtgctgaacaggaagaggaccatctaccgcttcagcgccaagcacgccctcttcatcttcggccccttcaacagcatccgcagcctggccatccgggtgtctgtgcacagcctcttctccatgttcatcatcggcaccgtcatcatcaactgtgtgttcatggccaccggccctgccaagaacagcaacagcaacaacacagacattgctgaatgtgtgttcaccggcatctacatctttgaggccctgatcaagatcctggcccggggcttcatcctggatgagttctccttcctgcgggacccctggaactggctggacagcatcgtgattggaattgccatcgtgtcctacatccctggcatcaccatcaagctgctgcccctgcggaccttccgggtcttccgggccctgaaggccatctctgtggtgtcccggctgaaggtgattgtgggcgccctgctgcggtctgtgaagaagctggtgaatgtcatcatcctgaccttcttctgcctgagcatctttgccctggtgggccagcagctgttcatgggcagcctgaacctgaagtgcatcagccgggactgcaagaacatcagcaaccctgaggcctatgaccactgctttgagaagaaggagaacagccctgagttcaagatgtgtggcatctggatgggcaacagcgcctgcagcatccagtatgagtgcaagcacaccaagatcaacccagactacaactacaccaactttgacaactttggctggagcttcctggccatgttccggctgatgacccaggacagctgggagaagctgtaccagcagaccctgcggaccaccggcctgtacagcgtcttcttcttcatcgtggtgatcttcctgggcagcttctacctgatcaacctgaccctggccgtggtgaccatggcctatgaggagcagaacaagaatgtggccgctgagattgaggccaaggagaagatgttccaggaggcccagcagctgctgaaggaggagaaggaggccctggtggccatgggcatcgacaggagcagcctgaccagcctggagaccagctacttcacccccaagaagaggaagctgtttggaaacaagaagaggaagagcttcttcctgcgggagagcggcaaggaccagcccccaggcagtgacagtgatgaggactgccagaagaagccccagctgctggagcagaccaagaggctgagccagaacctgagcctggaccactttgatgaacatggagaccccctgcagaggcagagggccctgtctgctgtgtccatcctgaccatcaccatgaaggagcaggagaagagccaggagccctgcctgccctgtggggagaacctggccagcaagtacctggtgtggaactgctgcccccagtggctgtgtgtgaagaaggtgctgaggacagtgatgacagaccccttcacagagctggccatcaccatctgcatcatcatcaacacagtgttcctggccatggagcaccacaagatggaggccagctttgagaagatgctgaacatcggcaacctggtgttcaccagcatcttcatcgccgagatgtgcctgaagatcatcgccctggacccctaccactacttccggcggggctggaacatctttgacagcatcgtggccctgctgagctttgctgatgtgatgaactgtgtgctgcagaagaggtcctggcccttcctgcgctccttccgggtgctgcgggtcttcaagctggccaagtcctggcccaccctgaacaccctcatcaagatcatcggcaacagcgtgggcgccctgggcagcctgactgtggtgctggtgattgtcatcttcatcttctctgtggtgggcatgcagctgtttggccgctccttcaacagccagaagagccccaagctgtgcaaccccaccggccccaccgtgtcctgcctgcggcactggcacatgggagacttctggcacagcttcctggtggtgttccgcatcctgtgtggggagtggattgagaacatgtgggagtgcatgcaggaggccaatgccagcagcagcctgtgtgtgattgtgttcatcctgatcaccgtgattggcaagctggtggtgctgaacctcttcatcgccctgctgctgaacagcttcagcaatgaggagagaaatggaaacctggagggggaggccaggaagaccaaggtgcagctggccctggaccgcttccggcgggccttctgctttgtgcgccacaccctggagcacttctgccacaagtggtgcaggaagcagaacctgccccagcagaaggaggtggccggcggctgtgccgcccagagcaaggacatcatccccctggtgatggagatgaagaggggcagcgagacccaggaggagctgggcatcctgacctctgtgcccaagaccctgggcgtgagacatgactggacctggctggcccccctggccgaggaggaggatgatgtggagttctctggagaagataatgcccagaggatcacccagcctgagcctgagcagcaggcctatgagctgcaccaggagaacaagaagcccaccagccagagggtgcagagcgtggagattgacatgttttctgaagatgagccccacctgaccatccaggaccccaggaagaagagtgatgtgaccagcatcctgtctgaatgttccaccatcgacctgcaggacggcttcggctggctgcctgagatggtgcccaagaagcagcctgagcgctgcctgcccaagggcttcggctgctgcttcccctgctgcagcgtggacaagaggaagccaccctgggtgatctggtggaacctgaggaagacctgctaccagatcgtgaagcacagctggtttgagagcttcatcatcttcgtcatcctgctgagcagcggggccctgatctttgaagatgtgcacctggagaaccagcccaagatccaggagctgctgaactgcacagacatcatcttcacccacatcttcatcctggagatggtgctgaagtgggtggccttcggctttgggaagtacttcaccagcgcctggtgctgcctggacttcatcatcgtgattgtgtctgtgaccaccctcatcaacctgatggagctgaagagcttccgcaccctgcgggccctgcggcccctgcgggccctgagccagtttgagggcatgaaggtggtggtgaatgccctgattggagccatcccagccatcctgaatgtgctgctggtgtgcctgatcttctggctggtgttctgcatcctgggcgtgtacttcttcagcggcaagtttgggaagtgcatcaatggaacagattctgtcatcaactacaccatcatcaccaacaagagccagtgtgagagcggcaacttctcctggatcaaccagaaggtgaactttgacaacgtgggcaatgcctacctggccctgctgcaggtggccaccttcaagggctggatggacatcatctatgctgctgtggacagcacagagaaggagcagcagcctgagtttgagagcaacagcctgggctacatctactttgtggtgttcatcatcttcggcagcttcttcaccctgaacctcttcatcggggtcatcatcgacaacttcaaccagcagcagaagaagctgggcggccaggacatcttcatgacagaggagcagaagaagtactacaatgccatgaagaagctgggcagcaagaagccccagaagcccatcccccggcccctgaacaagtgccagggcctggtgtttgacatcgtgaccagccagatctttgacatcatcatcatcagcctcatcatcctgaacatgatctccatgatggccgagagctacaaccagcccaaggccatgaagagcatcctggaccacctgaactgggtgtttgtggtgatcttcaccctggagtgcctgatcaagatctttgccctgcggcagtactacttcaccaacggctggaacctgtttgactgtgtggtggtgctgctgagcatcgtgtccaccatgatcagcaccctggagaaccaggagcacatccccttcccccccaccctcttccgcatcgtgcggctggcccgcatcggccgcatcctgcggctggtgcgggccgcccggggcatccgcaccctgctgtttgccctgatgatgagcctgcccagcctcttcaacatcggcctgctgctcttcctgatcatgttcatctatgccatcctgggcatgaactggttcagcaaggtgaaccctgagagcggcattgatgacatcttcaacttcaagacctttgccagctccatgctgtgcctcttccagatcagcaccagcgctggctgggacagcctgctgagccccatgctgcggagcaaggagagctgcaacagcagcagcgagaactgccacctgcccggcatcgccaccagctactttgtgtcctacatcatcatctccttcctgattgtggtgaacatgtacatcgctgtgatcctggagaacttcaacacagccacagaggagagcgaggaccccctgggggaggatgactttgacatcttctatgaggtgtgggagaagtttgatcctgaggccacccagttcatcaagtacagcgccctgagtgactttgctgatgccctgcctgagcccctgcgggtggccaagcccaacaagtaccagttcctggtgatggacctgcccatggtgtctgaagatcggctgcactgcatggacatcctgtttgccttcaccgcccgggtgctgggcggcagtgatggcctggacagcatgaaggccatgatggaggagaagttcatggaggccaaccccctgaagaagctgtatgagcccatcgtgaccaccaccaagaggaaggaggaggagagaggagctgccatcatccagaaggccttcaggaagtacatgatgaaggtgaccaagggggaccagggcgaccagaatgacctggagaatggcccccacagccccctgcagaccctgtgcaatggagacctgagcagctttggagtggccaagggcaaggtgcactgtgactag

SEQ ID NO: 327773 - DNA, 4335 bp, Artificial Sequence
  derived and/or modified sequence
atggatgaccgctgctaccctgtgatcttcccagatgagaggaacttccggcccttcaccagtgacagcctggccgccatcgagaagagaattgccatccagaaggagaagaagaagagcaaggaccagacaggagaggtgccccagccccggccccagctggacctgaaggccagcaggaagctgcccaagctgtatggagacatcccccgggagctgattggcaagcccctggaggacctggaccccttctacagaaaccacaagaccttcatggtgctgaacaggaagaggaccatctaccgcttcagcgccaagcacgccctcttcatcttcggccccttcaacagcatccgcagcctggccatccgggtgtctgtgcacagcctcttctccatgttcatcatcggcaccgtcatcatcaactgtgtgttcatggccaccggccctgccaagaacagcaacagcaacaacacagacattgctgaatgtgtgttcaccggcatctacatctttgaggccctgatcaagatcctggcccggggcttcatcctggatgagttctccttcctgcgggacccctggaactggctggacagcatcgtgattggaattgccatcgtgtcctacatccctggcatcaccatcaagctgctgcccctgcggaccttccgggtcttccgggccctgaaggccatctctgtggtgtcccggctgaaggtgattgtgggcgccctgctgcggtctgtgaagaagctggtgaatgtcatcatcctgaccttcttctgcctgagcatctttgccctggtgggccagcagctgttcatgggcagcctgaacctgaagtgcatcagccgggactgcaagaacatcagcaaccctgaggcctatgaccactgctttgagaagaaggagaacagccctgagttcaagatgtgtggcatctggatgggcaacagcgcctgcagcatccagtatgagtgcaagcacaccaagatcaacccagactacaactacaccaactttgacaactttggctggagcttcctggccatgttccggctgatgacccaggacagctgggagaagctgtaccagcagaccctgcggaccaccggcctgtacagcgtcttcttcttcatcgtggtgatcttcctgggcagcttctacctgatcaacctgaccctggccgtggtgaccatggcctatgaggagcagaacaagaatgtggccgctgagattgaggccaaggagaagatgttccaggaggcccagcagctgctgaaggaggagaaggaggccctggtggccatgggcatcgacaggagcagcctgaccagcctggagaccagctacttcacccccaagaagaggaagctgtttggaaacaagaagaggaagagcttcttcctgcgggagagcggcaaggaccagcccccaggcagtgacagtgatgaggactgccagaagaagccccagctgctggagcagaccaagaggctgagccagaacctgagcctggaccactttgatgaacatggagaccccctgcagaggcagagggccctgtctgctgtgtccatcctgaccatcaccatgaaggagcaggagaagagccaggagccctgcctgccctgtggggagaacctggccagcaagtacctggtgtggaactgctgcccccagtggctgtgtgtgaagaaggtgctgaggacagtgatgacagaccccttcacagagctggccatcaccatctgcatcatcatcaacacagtgttcctggccatggagcaccacaagatggaggccagctttgagaagatgctgaacatcggcaacctggtgttcaccagcatcttcatcgccgagatgtgcctgaagatcatcgccctggacccctaccactacttccggcggggctggaacatctttgacagcatcgtggccctgctgagctttgctgatgtgatgaactgtgtgctgcagaagaggtcctggcccttcctgcgctccttccgggtgctgcgggtcttcaagctggccaagtcctggcccaccctgaacaccctcatcaagatcatcggcaacagcgtgggcgccctgggcagcctgactgtggtgctggtgattgtcatcttcatcttctctgtggtgggcatgcagctgtttggccgctccttcaacagccagaagagccccaagctgtgcaaccccaccggccccaccgtgtcctgcctgcggcactggcacatgggagacttctggcacagcttcctggtggtgttccgcatcctgtgtggggagtggattgagaacatgtgggagtgcatgcaggaggccaatgccagcagcagcctgtgtgtgattgtgttcatcctgatcaccgtgattggcaagctggtggtgctgaacctcttcatcgccctgctgctgaacagcttcagcaatgaggagagaaatggaaacctggagggggaggccaggaagaccaaggtgcagctggccctggaccgcttccggcgggccttctgctttgtgcgccacaccctggagcacttctgccacaagtggtgcaggaagcagaacctgccccagcagaaggaggtggccggcggctgtgccgcccagagcaaggacatcatccccctggtgatggagatgaagaggggcagcgagacccaggaggagctgggcatcctgacctctgtgcccaagaccctgggcgtgagacatgactggacctggctggcccccctggccgaggaggaggatgatgtggagttctctggagaagataatgcccagaggatcacccagcctgagcctgagcagcaggcctatgagctgcaccaggagaacaagaagcccaccagccagagggtgcagagcgtggagattgacatgttttctgaagatgagccccacctgaccatccaggaccccaggaagaagagtgatgtgaccagcatcctgtctgaatgttccaccatcgacctgcaggacggcttcggctggctgcctgagatggtgcccaagaagcagcctgagcgctgcctgcccaagggcttcggctgctgcttcccctgctgcagcgtggacaagaggaagccaccctgggtgatctggtggaacctgaggaagacctgctaccagatcgtgaagcacagctggtttgagagcttcatcatcttcgtcatcctgctgagcagcggggccctgatctttgaagatgtgcacctggagaaccagcccaagatccaggagctgctgaactgcacagacatcatcttcacccacatcttcatcctggagatggtgctgaagtgggtggccttcggctttgggaagtacttcaccagcgcctggtgctgcctggacttcatcatcgtgattgtgtctgtgaccaccctcatcaacctgatggagctgaagagcttccgcaccctgcgggccctgcggcccctgcgggccctgagccagtttgagggcatgaaggtggtggtgaatgccctgattggagccatcccagccatcctgaatgtgctgctggtgtgcctgatcttctggctggtgttctgcatcctgggcgtgtacttcttcagcggcaagtttgggaagtgcatcaatggaacagattctgtcatcaactacaccatcatcaccaacaagagccagtgtgagagcggcaacttctcctggatcaaccagaaggtgaactttgacaacgtgggcaatgcctacctggccctgctgcaggtggccaccttcaagggctggatggacatcatctatgctgctgtggacagcacagagaaggagcagcagcctgagtttgagagcaacagcctgggctacatctactttgtggtgttcatcatcttcggcagcttcttcaccctgaacctcttcatcggggtcatcatcgacaacttcaaccagcagcagaagaagctgggcggccaggacatcttcatgacagaggagcagaagaagtactacaatgccatgaagaagctgggcagcaagaagccccagaagcccatcccccggcccctgaacaagtgccagggcctggtgtttgacatcgtgaccagccagatctttgacatcatcatcatcagcctcatcatcctgaacatgatctccatgatggccgagagctacaaccagcccaaggccatgaagagcatcctggaccacctgaactgggtgtttgtggtgatcttcaccctggagtgcctgatcaagatctttgccctgcggcagtactacttcaccaacggctggaacctgtttgactgtgtggtggtgctgctgagcatcgtgtccaagtag

SEQ ID NO: 327774 - DNA, 5376 bp, Artificial Sequence
  derived and/or modified sequence
atggacgaccggtgctaccccgtgatcttccccgacgagcggaacttcagacccttcaccagtgacagcctggccgctatcgaaaaacgaatcgccatccaaaaggaaaagaagaaatctaaagaccagactggggaggtgcctcagccccgcccccagctggacctaaaagcgagccggaagctgcccaagttgtacggtgatatcccacgggaacttatcggcaagcccttagaagacttggaccccttctataggaaccacaagacattcatggtcttgaacaggaagcgcaccatctacagattctcggccaagcatgcgctgttcattttcggaccattcaatagcattcgctccctcgcaatccgcgtgtccgtgcactcactgttttctatgttcataatcgggaccgtgatcattaattgtgtgttcatggccactggccctgccaagaattccaatagtaacaacacggacattgcagagtgtgtctttaccggcatctatatttttgaagcccttataaaaatcctggccagaggcttcatactcgacgagtttagctttctcagagacccatggaattggctggattccatcgtaatcgggatagctattgtgtcttatatcccgggaattaccatcaagctgctgccactccgcacatttagggtattcagagcccttaaagctatctctgtggtgagccgtctgaaagtaatagtgggcgcccttctgcggtccgttaaaaaactcgtaaacgtgatcatactgacgtttttttgtctgagcatattcgcgttggtgggccagcagctctttatgggttccttgaacctcaagtgtatttcgcgggactgtaagaatatctccaaccccgaggcttatgatcactgtttcgagaagaaggaaaacagtcccgagtttaagatgtgcggaatatggatgggcaactccgcctgctcaattcagtatgagtgcaagcacacaaaaatcaaccctgattataattacaccaacttcgataatttcgggtggtcttttctcgcaatgttccgcctcatgacacaagacagctgggagaagctctatcaacaaaccctgcggactacaggattatattctgtgttctttttcattgtagtcatatttctgggttctttctacctgatcaatcttaccctcgccgtggtgacaatggcttacgaggagcagaacaaaaacgtggcagccgagatagaggcaaaagaaaaaatgttccaggaggcacagcagctcctgaaggaagaaaaagaagcgttggtggcaatgggtatagatagaagctctcttacatccctggagacgagctactttactccgaagaaacgaaagcttttcggaaataaaaaaagaaaatccttttttctcagggagtcgggcaaagaccaacccccgggatccgatagtgacgaagactgccagaaaaaaccccagctcttggagcaaacaaaaagactgtcccagaacctcagcctggaccactttgacgagcatggggatcctttgcaacggcaaagggccttatccgctgtctccatactgaccatcaccatgaaggagcaggagaaaagccaggagccatgcctcccctgcggcgagaatctggccagcaagtacctggtctggaactgttgccctcaatggctgtgcgtgaaaaaggtgttgagaacagtgatgactgatcccttcaccgaacttgccatcacaatctgcatcatcataaacaccgtgtttctggcgatggagcaccataagatggaagcatcattcgaaaagatgctgaatatcgggaaccttgttttcacctcaatctttatcgcagaaatgtgtctgaaaattatagcgttggacccttatcactactttcggaggggatggaatatattcgattctattgtcgccctactcagctttgcggacgtaatgaactgtgtgctgcaaaagaggagctggccatttctgcgaagcttcagagtcttgcgagttttcaaactagccaaaagctggcctaccctgaatacactcataaaaatcatcggcaactcagtgggggccctgggatcactcacagtagtgctggtaattgtaatctttatttttagcgtggtcggcatgcagttgttcggccgttcatttaacagccaaaaaagccccaaactctgcaatcccaccggacccactgtgtcctgtctgagacactggcacatgggagacttttggcattcgttcctggtggtgttccggatcctgtgtggggagtggatagagaacatgtgggagtgcatgcaggaagcaaacgccagtagttccttatgcgttatcgtctttatcctgatcacagtgatagggaaactggtcgtccttaatctcttcattgcattgcttctaaatagctttagcaatgaggagaggaacgggaatttggagggcgaggcccgcaaaaccaaagtgcagctggccctcgacaggttcaggagggcattttgcttcgttcgacatactttagagcacttttgccacaaatggtgcaggaaacagaaccttcctcagcagaaggaagttgcaggggggtgcgctgcgcagagcaaagacatcatacctcttgtgatggagatgaaaaggggaagcgagactcaggaagaacttggcattctcacatccgtgccaaagacgttaggcgtacgtcacgattggacctggctggctcctctcgctgaagaggaagatgatgtcgaattctccggcgaagataacgcccagcgaatcacccagcccgagcccgagcagcaagcctatgagctccatcaggagaataagaagcccactagccagcgcgtccagtctgtggagatagatatgtttagcgaggacgagccacatctgacaatccaggatccccgcaagaagtctgacgttaccagtattctcagcgaatgctccacaatcgatctgcaggatggatttggatggctgcctgaaatggtgcctaagaaacagcccgaacggtgcttgccaaaggggtttggctgttgttttccatgttgtagtgtggataagcggaaacccccctgggtaatctggtggaatttgcggaagacctgttaccagatagtcaagcactcttggttcgagtctttcattatttttgtgattttgctctccagcggggccctcatttttgaagacgtccacctggagaaccaacccaagatccaggaacttctgaactgcacagacattattttcacccacatctttatccttgagatggtgcttaagtgggttgcattcggcttcggtaagtacttcacaagtgcatggtgctgtctggattttatcatagtcatcgtgagtgtcactaccctgattaaccttatggagctgaagagtttccggactctgagagccctgcgcccacttcgggctcttagccaatttgagggtatgaaggtggtggtgaacgctttgatcggcgctattcctgccatcttaaatgtgctgctcgtctgtctgattttttggctcgttttttgtattttgggggtttatttcttcagcgggaagttcggcaagtgtattaatggcactgatagcgtgattaattatactatcatcacaaacaaaagtcagtgtgagagcgggaatttctcctggataaaccaaaaagtcaacttcgacaatgtggggaatgcatatctcgcccttcttcaggtggcgacttttaaagggtggatggacataatctacgccgccgtagattctacagagaaagaacagcaacctgagttcgagagcaatagcctgggctacatctattttgtggtgtttatcatttttggatctttctttacattgaatctgttcataggggtgattatagataactttaaccagcagcagaagaagctaggaggccaagatattttcatgacggaagagcagaagaagtactacaatgccatgaagaaactcggatctaaaaaaccccagaaacctattcccagacctttaaataagtgccagggcctggtttttgatatcgtgacctctcagattttcgatatcatcataattagtctgattatactgaacatgatttctatgatggccgaaagctacaatcaaccgaaagcgatgaagtcaattctcgatcacctgaattgggtgttcgttgtgattttcaccctggagtgtcttatcaaaatttttgccctgagacagtattacttcacaaatggctggaacctctttgattgcgttgtcgtccttttatctattgtgtccacaatgatttcaactctggagaatcaggagcacatccccttccctccgaccttgttcaggatcgtgagactggcaaggatcggccgcatactgcggctcgttagggcagcccgaggcattcggaccctgttgtttgcgctcatgatgagtctgccttcattgtttaatattggcctgctgctgtttctgatcatgtttatatatgcaattctaggtatgaattggttcagcaaagtcaaccctgagtctggcatcgatgatatcttcaatttcaagacattcgcttccagcatgctttgtctgttccaaatctccacatctgctggatgggactctctcttgtcaccgatgctcagaagtaaggagtcctgtaactcatcctctgagaactgtcacctgcctggaatcgccacgtcttacttcgtctcctacatcatcatcagctttttaatcgttgtgaacatgtatatcgccgtcatactggagaacttcaacaccgctacagaggagtcagaggacccactgggcgaagacgactttgacattttttatgaggtctgggagaaattcgaccccgaagccacccagtttataaagtattccgctttgtctgactttgccgacgctttaccggagccgctgagagtggcgaaacccaacaaataccagttcctcgttatggacctgcccatggtgagtgaagaccggcttcattgcatggacatcttgtttgcattcaccgctagagtccttgggggatctgacggactcgattctatgaaagctatgatggaggagaagttcatggaagcgaacccattgaagaaactttacgaacccattgtcactaccacaaaacgcaaagaggaggagaggggggcagccatcattcaaaaagctttccgcaagtatatgatgaaggtcactaagggggaccagggagatcagaatgatctcgaaaatggacctcacagcccgctgcagactctgtgcaatggcgacctgtcttctttcggtgtagctaagggtaaggttcactgcgactag

SEQ ID NO: 327775 - DNA, 4335 bp, Artificial Sequence
  derived and/or modified sequence
atggacgaccggtgctaccccgtgatcttccccgacgagcggaacttcaggccctttacgtcagactctctcgctgcaatcgaaaaacggattgcaatccagaaggaaaaaaagaagtccaaggaccaaaccggcgaagtgccccagccacgccctcaactcgacctgaaggcaagtaggaagctgccaaagctgtacggagacattccacgcgagctaattggtaagcccctggaagacctcgatcccttctataggaaccataaaacttttatggttctgaatagaaagcgtacaatttataggttctccgctaaacacgctctgttcatatttggcccgttcaacagcattaggtctttggcgattagggtgtccgtccactctctgttcagtatgttcatcatagggaccgtcatcattaactgtgtctttatggccacaggcccggctaaaaatagtaattcaaataataccgacattgcagagtgtgtcttcaccggtatctacattttcgaggccctcatcaagatcttagctcgtggcttcatcctcgatgagtttagcttcctgagggatccttggaattggctggactccatcgtcattggaattgctatcgtttcttatatccccgggattacaatcaaattactgccacttagaacttttcgcgtattccgggccttaaaggcaattagcgtggtctccaggcttaaggtgattgtgggtgcgttgctgcgatctgtcaaaaaattagtgaacgtgattatcttgacatttttttgcctttcaattttcgctctggttggacagcaacttttcatgggctccttgaacttaaaatgtatatctcgcgactgtaaaaatatatccaatcctgaggcttacgatcactgtttcgagaagaaagaaaattcacctgaattcaaaatgtgcggaatttggatgggtaatagcgcatgcagtatccagtatgagtgcaaacataccaaaattaaccccgactacaactacaccaatttcgacaacttcggctggtcttttctcgcaatgttccgcctgatgacccaagatagctgggaaaagttgtaccagcagaccctccggaccacaggcctgtactccgtgttcttttttatcgtggtaatcttcttgggcagcttttacctgattaatctgactcttgctgtggtcacaatggcatacgaagagcagaataaaaatgtcgccgccgagatcgaggctaaggaaaagatgtttcaggaggcccagcagctgctgaaagaggagaaagaggccctcgtcgccatgggcatcgatcgctcctctctaacaagcctggagacatcatattttacgcctaagaagagaaaattatttggaaacaaaaagagaaagtctttttttctacgcgagtccggcaaggaccagcctcctggcagtgatagcgatgaagattgtcagaaaaagccccagcttttggaacagaccaagcgattgtcacaaaacctgtccttggaccacttcgatgaacatggggatccattgcagagacagagggccctgagtgcagtttctatcctcacgattaccatgaaggagcaggaaaagtcgcaggagccttgtctgccatgcggagagaatctagcttcaaagtatctggtatggaactgctgcccgcagtggttatgtgtcaagaaggtgcttcgcaccgtgatgacagaccctttcaccgagttggctattacaatctgtatcattataaatactgtgtttctggccatggaacaccataagatggaggcctcatttgagaaaatgcttaacatcgggaatctcgtgttcacaagtatctttatagccgagatgtgcctgaagattatcgctctggacccttatcattacttcaggcgcggctggaatattttcgacagtattgtggccctgctttcgtttgcggacgtgatgaactgtgtactgcagaagagaagttggccctttctgagatcttttcgtgtactgcgtgtctttaagttggctaagagttggccgacactcaacacacttatcaaaatcatcgggaacagcgtaggggcattgggtagcctgactgtggttcttgtgatcgtgatatttatcttttctgttgtaggaatgcagctgttcggcaggtccttcaactctcagaaaagccccaaattatgtaaccctacaggacccactgttagctgcctgcggcactggcacatgggggacttctggcacagtttccttgtggtttttcgtattctctgcggcgagtggatcgaaaacatgtgggagtgcatgcaggaggcgaatgctagcagcagcctgtgcgtcatagtgtttatcctgatcactgtgattgggaaattggttgtcctcaacttgtttatagcacttctgttgaactctttctcgaacgaagagcgaaatggcaacctagagggtgaagcaagaaaaacgaaagtgcagcttgcgctggatcgcttcagacgcgcgttctgcttcgtgagacacaccttagagcatttctgccataagtggtgtcgaaagcagaatctgccacagcagaaagaggtggcaggaggatgtgccgcacagagtaaggatattatcccactggttatggagatgaaacgaggatccgagacccaggaagaacttggaatactgacctctgtcccaaagacactcggcgtgaggcacgattggacgtggctagcccccctggctgaagaggaggatgatgttgaatttagtggtgaggataacgcacagaggatcacacagcccgaaccagaacagcaggcctatgaactgcatcaggagaacaagaagcctacatcccagagggttcagtccgtggaaattgacatgtttagtgaagatgagccacatttgaccattcaggacccaagaaaaaaatcggatgtgacctccattctgagtgagtgctcgacaattgacttgcaggatggcttcgggtggctgcctgaaatggtgcctaagaagcagcctgaacgttgccttcctaaaggattcggatgttgctttccttgctgcagtgtggacaagagaaaacctccttgggtgatttggtggaacctacggaagacgtgttatcagatcgtgaagcattcttggtttgaatctttcattatcttcgtgatccttctgtctagtggtgccttaatttttgaggatgtgcacctggaaaaccaaccgaaaatccaggagctcctgaattgcactgatattatctttactcatatttttatcttggaaatggtattaaagtgggtagcttttgggttcggcaaatacttcacctcagcctggtgctgtctggactttattatagtgattgtgagcgtgaccaccttgattaacctgatggagctgaagtctttccgtactctacgcgccttgcggcccctgagggccttatcccagtttgagggtatgaaggttgtggtgaatgccctaattggggcaattcctgctatactaaacgttcttcttgtctgcctgattttttggttggtgttctgcatcctgggtgtgtactttttttctggcaagtttggtaaatgtataaatggaactgacagcgtgatcaactacaccatcattacgaacaaaagccaatgtgagagcggaaattttagttggatcaaccagaaggtgaatttcgacaatgtaggcaatgcctacctggccctgttgcaagtcgcaaccttcaaagggtggatggatattatctacgcagccgtggatagcacagagaaggagcaacagccagagttcgagtcaaattccctcggctatatctattttgtggtttttattatatttgggtcattttttacgcttaacctgtttatcggggtgattattgataattttaatcaacagcagaagaaactgggggggcaagacatctttatgacagaagagcagaaaaagtactacaacgccatgaaaaagttaggctccaagaaacctcagaaacccatccctaggccactgaataagtgtcaggggctggtcttcgacattgttacctcgcagatcttcgacattataatcatctctttaataatcctcaacatgattagtatgatggccgagtcctacaaccagccaaaggccatgaagagcatcctggaccatctaaattgggtgtttgtagtcatattcacgctcgaatgccttatcaaaatcttcgccctgcgacagtattacttcaccaatggctggaatcttttcgattgcgtggtggtgctgctgtccattgtctcaaagtag

SEQ ID NO: 327776 - DNA, 5376 bp, Artificial Sequence
  derived and/or modified sequence
atggacgaccggtgctaccccgtgatcttccccgacgagcggaactttaggccgtttacttcggacagtcttgctgctattgagaaacgcatcgcaatacaaaaagagaagaagaaaagcaaggaccaaaccggcgaggtccctcagcctcggcctcagctggaccttaaggccagcagaaaactgcccaagctctatggtgatatcccacgcgaactgattggcaaaccgttggaggacctggaccccttctatcgcaatcataagacgtttatggtcctgaatcgaaagcgtaccatctacagattctcagccaagcatgctctgtttatctttggaccctttaattcaatacggagtcttgctatccgcgtgtccgtgcactcccttttcagcatgttcataataggcactgtcatcatcaactgtgtgttcatggccactggtcccgctaaaaattcaaattccaacaataccgacatagcagagtgtgtgttcactgggatatatattttcgaagcactgataaaaatcctagcgagggggtttatcttggacgaatttagcttcctccgagacccatggaactggctggattccatcgtcatcggtattgctatcgtgtcctatatcccaggcataaccattaaactcctccccttgcggactttcagagtcttccgggccttgaaggcaatatccgtggtttcccgcctcaaagtaatagtcggcgcactgttaaggagtgtcaaaaagcttgtaaatgtcataatcttaacctttttctgcctaagcatctttgcgttggtggggcagcagctgtttatgggatcacttaatttaaaatgtataagccgggactgcaagaatatctctaacccagaggcctacgaccactgctttgagaagaaggagaacagtcccgagtttaaaatgtgtggaatctggatgggcaattccgcctgcagtatccagtacgagtgtaaacacacaaagattaatcccgattataattataccaattttgataatttcggctggtccttcctggccatgtttcgactcatgacccaggatagttgggagaagctgtatcagcagaccctgcggaccactgggctgtattctgtatttttctttatcgtggttatattcctgggcagcttttatctcatcaacttgactcttgctgtcgtaacaatggcgtatgaggaacagaataagaatgtggccgcggagatcgaggccaaggagaagatgtttcaggaggcccagcaactcctcaaggaagagaaagaggctcttgttgccatgggcatagacaggtcatctctgacttccttggagacaagctacttcacgcccaagaagagaaagctgttcggaaacaagaagcgtaaatcctttttcctgcgggaaagcggcaaggatcagcccccagggtctgatagtgacgaggactgtcaaaagaagcctcaactactcgagcaaacgaaaagactgtcacagaacctttccctcgatcacttcgacgaacacggggatcctctgcagaggcaacgggcgctgtccgcagtgagcattctgaccattactatgaaagaacaggagaagagccaggaaccttgcttgccgtgtggggagaacctggcatcaaagtacctcgtctggaattgttgtccccaatggctgtgcgtcaaaaaggtgctgcggacggtcatgacagatccttttacggagctcgcaattacaatctgtattattatcaacaccgtcttcttggctatggagcaccacaaaatggaagcctctttcgaaaagatgctgaatattggtaatctagtgttcaccagtattttcattgctgaaatgtgcttgaaaataatcgcactcgatccctaccattattttagacgtggctggaatatattcgactcaatcgttgcgctgttgagtttcgccgacgtgatgaactgtgtcctgcagaagcggtcttggccattcttgagaagcttccgagtccttcgagtttttaagttagccaaatcatggcctactcttaataccctgatcaaaatcatcggtaacagtgttggcgctctaggttcattgacagtcgtcctggttatcgtgatctttatctttagtgtggtgggcatgcagctatttggacggtcgttcaattctcaaaagtccccgaaactctgcaacccaactggccctaccgtcagttgtcttcggcactggcacatgggagatttctggcatagcttcttggtggtgttccgcattctgtgtggagagtggatcgagaacatgtgggagtgtatgcaggaggccaacgctagctcctctttgtgcgttattgtctttatcctgatcactgttatcggaaagctggtggtgctgaatctgttcatcgctctcctcttgaacagtttctctaacgaagaacggaacggtaacttggagggtgaggctcgaaagaccaaagtccagttagctctagaccggtttcggcgcgctttttgttttgtgaggcataccctggaacatttttgccacaagtggtgtcgaaagcagaacctgcctcagcagaaagaggtggcagggggatgcgccgcccagagtaaggatatcatcccccttgtgatggaaatgaaacggggcagtgagacccaggaggagttagggatcttgacctccgtgccgaagactctgggcgtgcggcacgactggacatggcttgccccacttgccgaggaagaagatgatgtcgagttttctggggaggataatgcccagaggatcacgcaaccagagcctgaacagcaagcctacgagctgcatcaggagaataaaaaacctaccagtcagagggtccaaagcgttgagattgatatgttcagtgaagatgagcctcatttgaccatccaagatcctaggaagaagtccgacgtaacatccatactgagcgaatgctccaccattgacctgcaagacggcttcggctggctgcccgagatggtgccaaaaaaacagcccgagcgctgccttcctaagggattcggctgttgtttcccatgttgctcggtcgataaacgcaaacctccgtgggtgatttggtggaacttacgtaagacatgttatcagatcgttaagcacagttggttcgaatccttcattattttcgtcatcctgctgtcgtctggcgcgcttatattcgaggacgttcatctggaaaatcagccgaaaattcaggaactcctcaactgcacagacataattttcactcatatattcatcctggagatggtgctaaagtgggttgcatttggtttcggtaagtatttcacctccgcgtggtgttgtctcgacttcatcatagtgattgtgtccgtgaccacccttatcaatctgatggaactgaagtccttccgaacccttcgcgccttacgtccgcttagagcgctgtctcagtttgaagggatgaaagtcgtggtaaacgcgctgatcggggctattccagccatcttgaatgtgctgctggtttgtctaatcttttggctggtcttctgtattcttggcgtgtacttcttctctggtaaattcggcaaatgtataaatggaaccgacagcgtgatcaattacacaatcatcactaacaagagccagtgcgagtccggcaatttctcttggattaatcagaaggtgaatttcgataatgtcggaaacgcatatctggctctcctgcaagtggccacgttcaaggggtggatggatataatttatgctgccgttgactctacagagaaggaacaacagccagaattcgagagcaattccctaggctatatttactttgtggtcttcatcatcttcgggtcattcttcaccctgaacttgtttattggcgtcatcatagacaacttcaatcagcagcagaagaaactcggcggtcaagacatatttatgaccgaagaacagaaaaagtactacaacgccatgaaaaaactcggctccaaaaagccacaaaaacccattcctcgccccctaaacaaatgtcaggggctcgtgttcgatattgtaacctcacagatattcgatattattatcatctctctgattatattgaatatgatttctatgatggccgagagttacaaccaacccaaggcaatgaaaagcattctggaccacctgaactgggtgtttgtggtgatttttacattggagtgccttattaagatcttcgcccttcggcagtattatttcacgaacggttggaatttgttcgattgtgtggtggtcctgctgtctatagtgtcaaccatgatcagtaccctggaaaaccaagagcacattccatttccccccactttgttccgcatcgttagactggctcggatcgggaggattctgagactggtccgagccgcacggggcatccgtacactcttgtttgcccttatgatgagcctgcctagcctctttaacatcggactgttgctctttctgattatgttcatttacgccattcttggcatgaactggttctcaaaagtcaaccccgaatccggaattgatgacattttcaactttaagacattcgcctctagcatgttgtgtttattccaaatctcaactagtgcaggctgggatagcctcctctcaccaatgctgcggtcaaaggagagctgcaactctagttctgagaattgccacttgcctggcattgccaccagctattttgtgtcctacatcattataagcttccttatcgtggtgaatatgtacattgctgtgatcctggagaacttcaacacggcaaccgaggagagtgaagaccccctaggggaagacgattttgacattttctatgaggtctgggaaaagttcgacccagaagcaactcaattcataaaatactcagccttgagcgattttgctgatgcgcttcccgagcccctgcgcgtggctaaaccgaataagtatcagttcctggtcatggatctgcctatggtcagcgaagaccgcctgcactgtatggacattctgtttgcatttaccgctcgagtgctcggaggaagcgacgggctggacagcatgaaggctatgatggaagagaagttcatggaggccaatcctctgaaaaaactctacgagcccattgttacgaccactaagaggaaagaagaggagagaggcgctgcaatcatacagaaagcctttagaaagtatatgatgaaggtgacaaaaggagaccagggcgaccagaacgatttggaaaacggccctcattccccccttcaaaccttgtgcaatggcgacttatcatcatttggagtagctaaaggtaaagtgcactgcgactag

SEQ ID NO: 327777 - DNA, 5375 bp, Artificial Sequence
  derived and/or modified sequence
atggatgacagatgttaccccgtgatcttccctgacgagcgaaacttcaggcccttcacttctgactctctggcagcgatcgaaaaacgcatcgctatccagaaggaaaagaagaaatccaaggatcagacgggcgaagtcccacagccacgccctcagctggatttaaaggcgtctaggaaactgcccaagctttacggtgacattcctcgggagctgattggcaaaccacttgaagacctcgatcctttttacaggaatcataagaccttcatggtcttgaaccggaaaagaactatctatagattttcagcaaaacatgctctctttattttcggacctttcaactcgatccgaagcctggcgattcgagtgtctgtgcactcactgttcagtatgtttataataggaacggtcatcataaattgtgtcttcatggcgacagggccagctaagaactcaaatagcaacaacaccgacattgctgagtgtgtgttcaccggcatttacatctttgaggctcttatcaaaatcctggcgcgaggattcattcttgatgaattcagttttctgcgtgacccatggaactggctcgacagcatcgtgattgggatagcaatcgtttcctatattcccggaatcactatcaagctattacctttgcgcaccttcagagttttcagagcactgaaagcgatcagcgttgtgtcccgcttgaaggtgatcgtcggcgctctgttgagatcggtgaagaaattagtgaatgtaatcattcttacatttttttgcctgagtatttttgccctggtaggccaacaattgtttatggggagtctgaacctaaagtgcatctcaagagactgcaagaatatatccaacccggaggcttacgatcactgcttcgaaaagaaagagaactctcctgaatttaagatgtgtggaatctggatgggtaattcagcctgcagtatacaatacgagtgcaaacatacgaagattaatcctgattataactacaccaactttgacaacttcgggtggtccttcctggcaatgtttagactgatgactcaggacagctgggagaagttgtaccagcaaaccctgcgcaccactgggctctacagtgtgttcttttttatcgtcgtgatattcctaggcagcttctacttgatcaacctcacgttggccgttgtgacgatggcgtacgaagaacagaataagaatgtggccgctgaaattgaggctaaggaaaagatgtttcaggaggcccaacagctgctgaaggaagagaaagaggcgcttgtcgcgatgggaattgacagaagcagcctgacttccctggagacctcatacttcactcctaaaaagcgtaagctctttggaaataaaaagcgtaagagttttttcttgagggagagtggaaaagaccagcctcccggttccgacagcgatgaggattgccagaagaagccccagctgctcgagcaaaccaaacgtctctcacagaacctctcacttgaccattttgatgagcatggggaccccctacaacgacagcgggctctaagtgccgtatcaatcttgacaatcaccatgaaggagcaagagaaatcccaggaaccttgcctgccctgtggcgagaacctagcctctaaatacctggtctggaattgctgtccacagtggctgtgtgttaaaaaggtgcttagaacagtaatgaccgaccctttcactgaactggcaatcacgatctgtattataattaataccgtgtttcttgcgatggagcatcataagatggaggcctcgttcgagaagatgctgaacatcggcaacttggtctttacatctatctttattgccgagatgtgccttaagatcatcgcactagacccataccactacttccgaaggggatggaacatcttcgactcaattgttgcgctgctatccttcgcagacgtgatgaattgtgttcttcagaaacgctcctggccattccttcgctctttccgagtcctgagagtttttaagctggcaaaaagctggccaaccctgaacacgctgatcaaaatcatcggaaactctgtcggggcactgggcagcttgacagtcgtgctagtgatcgtcatttttatctttagcgtggtgggtatgcagctattcggccgttcatttaacagccagaaatctccgaagctctgcaatcctaccggcccaactgtgagctgcctcaggcactggcacatgggcgatttctggcattcattcctagtcgtttttaggattctgtgcggcgagtggatcgaaaatatgtgggaatgcatgcaggaagcaaatgcctcctcatccttgtgcgtcatcgtctttatcctcattacagtgatcggcaagcttgtggtcctgaacctgtttatagccctcctgctgaatagcttcagcaacgaggagaggaacggaaatttagagggtgaggcaagaaaaacgaaagtccaactcgcactggatcggtttaggagagctttctgttttgtacggcatacactggagcacttctgccataagtggtgcaggaagcagaatctcccacagcaaaaggaggtcgcagggggttgcgccgctcaaagcaaggacatcattccactcgtgatggagatgaaacgaggctcagaaactcaggaggagctcggtatattaacctctgtacccaaaacactcggagtaagacacgactggacatggctggcacccctagcggaggaggaagatgatgtggagttcagtggcgaagataacgcacagaggattacacaacccgagcccgaacagcaggcttatgagctccaccaggagaataaaaagccgacttctcagcgtgtgcagtccgtcgaaattgacatgttctcagaagacgagcctcacctgaccatccaggaccctcggaagaagtccgacgtcacctcaattctctccgagtgctctactatcgatttgcaggatggctttggctggctgcccgagatggtgccgaaaaaacagccagaacgctgtctccctaaaggatttggatgctgttttccgtgctgtagtgtggataaaagaaaacctccttgggtcatttggtggaacctgcgtaagacatgttaccaaattgttaagcactcttggtttgagtcattcatcatctttgtcatcttgctttcatctggggctctcatttttgaggatgtgcacctggagaaccagccaaaaattcaggagctactgaattgcaccgatatcattttcacacacatattcatcctggaaatggttctcaaatgggtggcttttggctttggcaagtacttcacatctgcatggtgttgcttggacttcatcatagtaattgtctcagtgaccacgctgattaatttgatggagctaaaatcattccggaccctgcgtgcactgagaccactccgagccttgagtcagtttgaaggcatgaaagtcgtcgtaaatgctctcataggggcaattccagcaatccttaatgtcttactggtttgcctgattttttggttagtattttgcatcttaggggtctacttttttagtggcaaatttggcaaatgcattaatgggacagattccgtgatcaactacaccattattactaataagtcacaatgcgagtcagggaatttctcttggattaatcagaaagtgaatttcgataacgtcggcaacgcctacctggcccttctgcaggtggccacgtttaaaggctggatggacattatatatgcagccgtggacagcactgaaaaggaacaacagcctgaattcgagagtaatagccttggctacatttattttgtggtattcataatctttggctctttttttaccctgaatctgttcataggtgttatcattgacaacttcaatcagcagcagaaaaagctggggggtcaggacatcttcatgacggaggagcagaaaaagtattataatgcgatgaaaaagttgggttccaaaaagcctcagaagcccatacctaggccgctgaacaagtgtcagggcctggtcttcgacatcgtcacatcccaaatctttgatatcattatcatatcattgatcatccttaatatgatctccatgatggccgagagttacaaccagccgaaggccatgaagtccatactggaccacctgaattgggtgttcgtggtcatttttacccttgagtgcctaattaaaatcttcgcgctgaggcagtattattttacgaacgggtggaatctgttcgactgtgtcgtggtgctactgtccatcgtctcaactatgataagcaccttggagaatcaggaacacattcccttccctccaactctcttccgaattgtgcggctcgctcgcattggtagaatactgcgtttggttagagccgctagaggaattaggactctgctgtttgcactgatgatgtccttgccctctctgttcaacatcggcctactgttatttctgatcatgtttatatacgcaatcttgggaatgaactggttttctaaggtaaaccccgagtccggaattgatgacatctttaactttaagacgtttgcctcttcgatgctgtgcctctttcaaatttcaacctctgctggctgggactctctcctgtcgccaatgctgcggagtaaggagtcctgtaattcctcttctgaaaactgtcatctccccggtattgccacgagctactttgtaagttatatcattatctcattcttgattgtggtgaacatgtatattgctgtgattctggagaattttaataccgcaacggaagagtccgaggaccccctcggcgaggatgacttcgacatcttctatgaagtttgggagaagtttgacccagaggcaacacaatttattaaatacagcgccctaagcgactttgccgatgccctcccagaacccctgcgagtagccaaaccgaataagtatcagttcttggttatggatctgccaatggtgtccgaggaccgactgcactgcatggatatcttgtttgcattcaccgccagggtccttgggggatccgatggcctcgattccatgaaagcaatgatggaagagaaatttatggaggcaaacccgctgaagaaactgtacgagcccattgtcacgacgaccaaacggaaggaagaggagaggggcgcagccatcattcaaaaggcttttcgaaagtatatgatgaaagtgactaagggggaccaaggcgaccagaatgacttggagaacgggcctcactctcctctgcagacgctctgtaatggtgatctgagttcttttggcgttgcaaagggaaaagttcattgcgatta

SEQ ID NO: 327778 - DNA, 4335 bp, Artificial Sequence
  derived and/or modified sequence
atggacgatagatgctatcctgtcattttcccagatgagcgaaattttcgaccttttacaagtgacagcttggcagccatcgagaagcggatcgctatacaaaaggagaaaaaaaaaagcaaggaccagactggtgaagttccccaaccacgcccacagctggacttgaaagcaagtcggaagctgccgaagctttatggagatataccgagagagctaataggcaaacctttagaggatttggatcctttctaccgtaatcataagacattcatggtgctgaacaggaaacgtacgatttaccgcttctctgcgaagcatgcgctattcatctttggacccttcaacagtattcgatcattggctattagagttagtgtccattccctattctctatgtttataatcggcaccgtgataatcaactgcgtatttatggcgaccggccctgctaaaaatagcaactcaaataacactgatatcgcagaatgtgtatttacggggatttatatcttcgaggccctaatcaagattctggccaggggctttatccttgacgagttcagctttctcagggacccctggaactggttagacagcattgtcattggtattgcgatcgtgtcttatattcccggtatcacgattaaactcttacctttgcgcacttttagggttttcagagccctgaaggccatatcagtcgtttctcggttgaaagtcatcgttggcgctcttcttcgtagcgtcaagaaactagtgaacgtcataatcctgacttttttctgcctttctatcttcgctctggtcgggcagcagctgtttatggggtctttgaacctgaagtgtatcagcagagactgcaaaaatatctctaatccggaagcttatgaccactgtttcgagaagaaggaaaactctccagaattcaagatgtgtgggatttggatgggcaatagtgcctgctccatccagtatgaatgcaaacacaccaagataaacccagactacaattataccaactttgacaattttggctggtccttcttagccatgtttcggttaatgactcaagatagttgggaaaaactttatcagcagactctgagaaccacaggcctttattccgtgtttttctttatagtcgtcatcttcttgggctctttctatctgattaacctgacgctagcagtggttaccatggcctacgaagaacaaaataagaatgtagctgccgagatcgaggctaaggagaagatgtttcaagaggcgcaacagctgttgaaggaagaaaaagaggccttagtcgccatgggcattgacagaagctcgctgactagcctggagacgtcctactttacacccaagaagcgcaagctttttggcaataagaagcgtaaatccttctttctaagggagtctgggaaagatcagccaccgggaagcgactctgacgaggattgccagaagaagccccagctgctggagcaaacaaagcggctctctcagaacctcagcctggatcacttcgatgagcatggcgacccattgcagcgacagcgagccctctcggccgtctccatattgaccatcactatgaaagagcaggaaaagtcacaggaaccgtgtttgccttgcggcgagaacctggccagtaaatatctcgtgtggaattgctgcccacaatggttatgcgttaagaaggtcctcagaacggtgatgacagaccctttcactgaacttgcaattaccatttgcataattattaacaccgtgttcttagccatggagcatcacaagatggaagcctcctttgagaaaatgctgaacatcggaaacctcgtgtttacgagtatctttattgccgagatgtgcttgaagattatcgctctggacccctatcattatttcagacgaggctggaacatttttgactccatcgtggcccttctgtctttcgccgacgtcatgaattgtgtccttcaaaaacgctcatggccatttctaagaagctttagggtgctgagagtgtttaagctcgcaaaaagctggcctaccctcaacacattaatcaagataattggcaacagtgtcggggctcttgggagcctaacagtcgtcctcgtaatcgtcatcttcattttctccgtggtgggcatgcaactgtttgggaggagcttcaacagccagaaaagcccaaaactgtgcaacccaaccggacctaccgtcagctgcctcagacactggcacatgggcgacttctggcactcattcttggtggtgttccgcattctctgcggtgagtggatcgaaaatatgtgggaatgtatgcaggaggctaacgccagcagctccctttgcgtaattgtttttatcctaatcaccgtcattggcaagctggtcgtgctgaatctgttcatcgccctgctcctcaattccttctctaatgaagagaggaacggtaatctcgaaggcgaggcgcgaaaaactaaagtgcagctcgctttagaccgtttccgacgggcattttgctttgtccgccacactttagagcacttctgccataaatggtgccgaaaacagaatctgccacagcagaaggaagtagccggaggttgcgcagctcaatccaaagacataattcctttggtgatggagatgaagcgaggctcagaaacccaggaagagttgggcatcctaacaagtgtgccgaagacactaggagtccgccacgactggacgtggctggcgccactggccgaagaagaagatgacgttgagtttagtggagaagataacgcacaaaggataacacagcccgagcccgagcagcaggcctatgagttacatcaggagaataaaaagccaacctctcagagagttcagtccgtcgagatcgacatgttctccgaagacgaaccacacctgactatccaagatcctagaaagaagtcggatgtgacctctatcctgtccgagtgctcaactatcgacttgcaggatgggtttggttggctaccagagatggtcccgaaaaaacagcctgaacgatgccttccaaagggctttggctgctgcttcccttgttgctccgtcgacaaacgcaaacccccttgggtcatttggtggaacctccgcaagacctgctaccagatcgtgaagcatagctggtttgagtcttttatcattttcgtcatcctcctcagtagtggagcccttatatttgaagacgttcacctggagaatcagcctaagattcaagagctactcaactgcactgacattatatttacacacatttttattctggaaatggtgctgaagtgggtggcttttggctttggaaaatactttaccagtgcctggtgctgtctcgactttattattgtgatagtgagcgtgacaaccctcatcaacctaatggagctgaaaagcttcaggaccctgagggccctccgtcccctgcgagccttaagccagtttgagggcatgaaagtcgtggtgaacgcactgattggtgccattccggctatcctgaatgtgctcttggtgtgcttgatcttctggctggtgttctgtattttaggggtctactttttcagtggaaagttcggaaagtgcatcaatggaaccgacagtgtgatcaactacacaattatcaccaataagagccagtgtgaatcaggaaacttcagttggatcaaccagaaggtcaactttgacaacgtgggaaacgcgtacctcgccttactgcaggtggccacctttaaaggctggatggatatcatctacgccgctgtagacagcacagagaaggaacagcagccagagtttgagtcaaattccctgggatacatttactttgtggtcttcataattttcgggagcttcttcacccttaatctcttcattggggtaatcatcgacaattttaaccaacagcagaagaaactcgggggacaggacatctttatgactgaagagcagaagaaatactataacgcgatgaaaaaattgggaagcaagaaacctcagaaaccaataccacggcctctgaataaatgtcagggccttgtctttgacattgtgaccagtcagatcttcgatatcattataatctccttgatcattctgaacatgattagtatgatggcagagagctacaatcagcctaaggcaatgaaatctatcctggatcacctgaattgggtatttgtggttattttcacgctagagtgtttaattaaaattttcgcactaaggcagtattacttcaccaatggttggaacttgtttgactgcgtcgttgtcctgcttagcattgtaagcaaatag

SEQ ID NO: 327779 - DNA, 5375 bp, Artificial Sequence
  derived and/or modified sequence
atggatgaccggtgctacccagtgatcttccccgacgagcggaactttcggccttttactagcgacagcttggccgctatcgagaagaggatagccattcagaaagaaaaaaaaaagagtaaggaccagactggagaggtccctcagcccaggccacagctcgacttgaaagcgtcccgcaaactacctaaactttacggcgacatcccccgagaactgataggtaaacccttggaggatctggatccattctacaggaatcacaaaacattcatggtactgaatcgcaaacggacgatctatcggttctcagccaagcatgcgttgtttatttttggaccctttaactccattcgctctcttgcaatacgagtgtctgtgcacagccttttttctatgtttatcataggaaccgtaatcatcaactgcgtcttcatggctaccggcccagctaagaacagcaactccaacaatacagatattgcagagtgcgtctttactggtatttacatattcgaggccctcatcaagatccttgctaggggctttatcctcgatgaattctctttcctgagagacccgtggaactggctcgactccattgtcatcggtatcgctatagtcagctacatccctggcattaccatcaaactcttacccttgcgaacgttccgtgtgttcagagctttgaaggctatctcagtggtgtcccgactgaaagttattgtgggggctctcctcaggtctgtgaagaagttggttaacgttatcatcctcacgttcttctgcttgtccatatttgcactcgtgggtcagcagctattcatgggctctctgaacctgaagtgcatttctcgggattgtaagaatatctctaacccggaggcttatgatcactgcttcgaaaagaaagaaaacagccccgaatttaagatgtgtgggatctggatggggaatagcgcatgctccatccagtatgaatgtaagcatacaaaaataaacccagattacaactatacaaattttgacaatttcggatggagctttctggccatgttccggctgatgacgcaagattcttgggagaaactctaccaacagactcttcgcacaacgggactatatagtgtcttttttttcattgtggtgatctttctgggcagtttctacctcatcaatctaacactggccgtcgtgacaatggcctacgaggaacagaataaaaatgtggcagccgaaatcgaggcaaaggaaaaaatgtttcaggaggcgcagcagctgttgaaagaagagaaagaagccctggtcgccatgggaattgacagatcttcgctgacctcgttagagacctcctatttcaccccgaagaagcgcaaattgttcggcaataaaaagcggaagagcttttttttgagggagtctggcaaggatcagccccctggaagcgactccgatgaggactgtcagaaaaagcctcagctgctggaacagacgaaacgattgagccagaatctgtctctagaccactttgatgagcatggagaccccctgcaacggcagcgcgcacttagcgctgtcagcatcctcacaattaccatgaaggagcaggagaaatcacaggaaccttgtctgccatgcggagagaatctcgcttctaagtatctagtgtggaattgttgtcctcagtggttatgtgtgaagaaagttctgcgcacagtgatgaccgacccttttacggagctcgccataacaatttgtatcatcatcaataccgtgttcctggccatggagcatcataagatggaagcctcattcgaaaagatgctaaacattggcaacctggtcttcacctcaatctttatagctgagatgtgcctgaagatcatcgccctcgacccataccactacttccgaagagggtggaacatatttgattctattgttgctcttttgtcctttgcagacgtgatgaattgtgtgctccaaaaacgatcctggcccttccttagatcattccgtgtcctgcgggtgtttaaactggccaaatcttggccaacgctgaacaccctgatcaagatcatcggaaattcagttggagccctggggagcctgactgtagttctagttatagtaatcttcatattttcagtggttggcatgcagctgtttggtcggtcctttaacagccaaaagtctcctaagctctgcaatccgacgggacccaccgtttcttgtctgcgccattggcatatgggggatttttggcattcttttctggtcgtttttcgaatcctgtgtggagagtggatcgagaacatgtgggagtgtatgcaggaggccaatgcctcctcttctctgtgcgtcatagtgttcatcctgattactgtcatcggcaagctcgtggtgctgaatctctttatagcactactgttgaattcttttagtaacgaagaacggaacggaaacctggaaggcgaggccagaaagactaaagtgcaattagcactggaccggttccgtcgtgccttttgttttgtgagacacaccctggaacacttctgtcataagtggtgtagaaagcagaatcttccacaacagaaagaggtggcgggaggatgcgcggctcagtctaaggatatcattccactggttatggaaatgaaaaggggcagcgagacgcaagaggaactggggatattaacttcagtgcccaagactcttggcgtacgccacgactggacatggctcgcacctctggctgaagaggaggacgatgtcgaattctcaggagaggataatgcccaacgcatcacacagccagagcctgaacagcaggcatatgagctgcaccaggaaaataagaagccaacctcgcagcgcgtccagagcgtggagatcgacatgtttagtgaggacgagccccaccttacgattcaagacccaaggaaaaagtctgacgtgaccagcatcttgtcagagtgcagtaccatcgacctgcaggatggctttgggtggctgccggaaatggtccccaagaagcagccagagcggtgcttgccgaaaggctttggctgttgtttcccatgttgtagcgtcgataaacggaagcccccttgggtgatctggtggaacttaaggaaaacatgctatcagatcgttaaacattcttggtttgaatccttcatcatctttgtgattctgctcagtagcggagccctgatcttcgaagacgtccatttggaaaaccagcctaagatccaagaactccttaactgcactgatatcatctttacgcatattttcattctggaaatggttctgaagtgggttgccttcgggtttgggaagtactttacctcagcctggtgttgtctcgattttattatcgtaatcgtttcagtgactacactgatcaacctaatggagctgaagtcattcagaaccctgcgggctctccggcctttgcgcgctttgtctcagttcgaggggatgaaagtcgtggtgaatgccttgatcggagccatccccgctatactgaacgtgctgctggtctgtttgatattttggctggttttctgcatcctcggtgtgtattttttctctggtaaatttggcaagtgcatcaacggcacggacagcgtgatcaactacacaatcatcacaaacaaaagtcaatgcgagagtgggaacttctcctggatcaaccaaaaagtaaattttgacaacgtcggtaacgcctatctggcactgttacaggttgctacctttaaggggtggatggacataatctacgctgctgtcgacagcactgaaaaagagcagcagccagagtttgaatccaactctctcgggtacatttattttgtggtgtttattatctttggaagctttttcactctcaatttatttattggagtcattattgacaacttcaatcagcagcagaagaagctgggtggacaggacatctttatgacggaagagcagaagaagtactacaacgcgatgaagaagctcggatctaagaagccccagaagcccatccctagacccctcaacaagtgccaagggctagtgtttgatattgtaacatcccagatctttgatattatcatcatttccctgatcattctcaacatgatttccatgatggccgagtcctacaaccaacctaaagcaatgaaaagtattctggatcacctgaactgggttttcgtggtgattttcactcttgagtgcttgatcaaaattttcgccctccggcaatactactttaccaacggctggaatttgtttgattgcgttgttgttctgttaagcatcgtgagtactatgatatcgactttagaaaatcaggagcatatccctttcccccctacactgtttcggatcgtacggctggcacgcattggcaggatcctgcgtctcgtgcgagctgctaggggcatccgaacgcttttattcgccttaatgatgagtctcccttcactgttcaacatcggtctgctcctttttctaataatgtttatttacgctattctcggcatgaactggttttccaaagtgaaccccgagagtggcatagatgacatcttcaattttaagactttcgcaagctcaatgttgtgcttatttcagatcagcacttctgccggatgggatagcttactgagcccaatgctccgtagcaaagagtcttgcaattcaagctctgaaaactgtcacctccccggtattgccacctcctatttcgtatcgtacattatcatttcctttctgatcgtcgtgaatatgtacattgccgttatcctggagaactttaacactgctactgaggagagcgaggacccactgggggaagacgatttcgacatattttatgaggtctgggaaaagtttgatcctgaggctacacagtttattaaatacagtgcgctgagcgactttgccgacgccctccctgagccactccgagttgccaagccaaataagtaccaattcttagtgatggatctgcccatggtctcagaagatcgcctgcactgcatggatattctcttcgcctttactgcccgtgttctgggcggtagcgatgggttggatagtatgaaagccatgatggaagaaaaatttatggaggccaaccccttgaaaaaactctatgagccgatcgtgacaaccacaaagagaaaggaagaggagaggggggcagctataatccagaaagcttttagaaagtatatgatgaaagtgaccaagggcgatcagggagatcagaacgatttggagaacggaccacactcacctttgcagacactgtgcaatggggacctgtcatcttttggagtggcaaagggcaaagttcactgcgacta

SEQ ID NO: 327780 - DNA, 6500 bp, Artificial Sequence
  derived and/or modified sequence
tcctgctatacccacagtggtggtcatctcttctgatcttcacagccaatcagctcccaaggcccctgacctcagctcagcttttgtagatccttatgacaccatcctttaagactggaatcctagggcaggctgttttattcccgcctcctgaggcctttctgaggatctgtggcttgtctctgtcctgagggtgaagatggatgacagatgctacccagtaatctttccagatgagcggaatttccgccccttcacttccgactctctggctgcaattgagaagcggattgccatccaaaaggagaaaaagaagtctaaagaccagacaggagaagtaccccagcctcggcctcagcttgacctaaaggcctccaggaagttgcccaagctctatggcgacattcctcgtgagctcataggaaagcctctggaagacttggacccattctaccgaaatcataagacatttatggtgttaaacagaaagaggacaatctaccgcttcagtgccaagcatgccttgttcatttttgggcctttcaattcaatcagaagtttagccattagagtctcagtccattcattgttcagcatgttcattatcggcaccgttatcatcaactgcgtgttcatggctacagggcctgctaaaaacagcaacagtaacaatactgacattgcagagtgtgtcttcactgggatttatatttttgaagctttgattaaaatattggcaagaggtttcattctggatgagttttctttccttcgagatccatggaactggctggactccattgtcattggaatagcgattgtgtcatatattccaggaatcaccatcaaactattgcccctgcgtaccttccgtgtgttcagagctttgaaagcaatttcagtagtttcacgtctgaaggtcatcgtgggggccttgctacgctctgtgaagaagctggtcaacgtgattatcctcaccttcttttgcctcagcatctttgccctggtaggtcagcagctcttcatgggaagtctgaacctgaaatgcatctcgagggactgtaaaaatatcagtaacccggaagcttatgaccattgctttgaaaagaaagaaaattcacctgaattcaaaatgtgtggcatctggatgggtaacagtgcctgttccatacaatatgaatgtaagcacaccaaaattaatcctgactataattatacgaattttgacaactttggctggtcttttcttgccatgttccggctgatgacccaagattcctgggagaagctttatcaacagaccctgcgtactactgggctctactcagtcttcttcttcattgtggtcattttcctgggctccttctacctgattaacttaaccctggctgttgttaccatggcatatgaggagcagaacaagaatgtagctgcagagatagaggccaaggaaaagatgtttcaggaagcccagcagctgttaaaggaggaaaaggaggctctggttgccatgggaattgacagaagttcacttacttcccttgaaacatcatattttaccccaaaaaagagaaagctctttggtaataagaaaaggaagtccttctttttgagagagtctgggaaagaccagcctcctgggtcagattctgatgaagattgccaaaaaaagccacagctcctagagcaaaccaaacgactgtcccagaatctatcactggaccactttgatgagcatggagatcctctccaaaggcagagagcactgagtgctgtcagcatcctcaccatcaccatgaaggaacaagaaaaatcacaagagccttgtctcccttgtggagaaaacctggcatccaagtacctcgtgtggaactgttgcccccagtggctgtgcgttaagaaggtcctgagaactgtgatgactgacccgtttactgagctggccatcaccatctgcatcatcatcaacactgtcttcttggccatggagcatcacaagatggaggccagttttgagaagatgttgaatatagggaatttggttttcactagcatttttatagcagaaatgtgcctaaaaatcattgcgctcgatccctaccactactttcgccgaggctggaacatttttgacagcattgttgctcttctgagttttgcagatgtaatgaactgtgtacttcaaaagagaagctggccattcttgcgttccttcagagtgctcagggtcttcaagttagccaaatcctggccaactttgaacacactaattaagataatcggcaactctgtcggagcccttggaagcctgactgtggtcctggtcattgtgatctttattttctcagtagttggcatgcagctttttggccgtagcttcaattcccaaaagagtccaaaactctgtaacccgacaggcccgacagtctcatgtttacggcactggcacatgggggatttctggcactccttcctagtggtattccgcatcctctgcggggaatggatcgaaaatatgtgggaatgtatgcaagaagcgaatgcatcatcatcattgtgtgttattgtcttcatattgatcacggtgataggaaaacttgtggtgctcaacctcttcattgccttactgctcaattcctttagcaatgaggaaagaaatggaaacttagaaggagaggccaggaaaactaaagtccagttagcactggatcgattccgccgggctttttgttttgtgagacacactcttgagcatttctgtcacaagtggtgcaggaagcaaaacttaccacagcaaaaagaggtggcaggaggctgtgctgcacaaagcaaagacatcattcccctggtcatggagatgaaaaggggctcagagacccaggaggagcttggtatactaacctctgtaccaaagaccctgggcgtcaggcatgattggacttggttggcaccacttgcggaggaggaagatgacgttgaattttctggtgaagataatgcacagcgcatcacacaacctgagcctgaacaacaggcctatgagctccatcaggagaacaagaagcccacgagccagagagttcaaagtgtggaaattgacatgttctctgaagatgagcctcatctgaccatacaggatccccgaaagaagtctgatgttaccagtatactatcagaatgtagcaccattgatcttcaggatggctttggatggttacctgagatggttcccaaaaagcaaccagagagatgtttgcccaaaggctttggttgctgctttccatgctgtagcgtggacaagagaaagcctccctgggtcatttggtggaacctgcggaaaacctgctaccaaatagtgaaacacagctggtttgagagctttattatctttgtgattctgctgagcagtggggcactgatatttgaagatgttcaccttgagaaccaacccaaaatccaagaattactaaattgtactgacattatttttacacatatttttatcctggagatggtactaaaatgggtagccttcggatttggaaagtatttcaccagtgcctggtgctgccttgatttcatcattgtgattgtctctgtgaccaccctcattaacttaatggaattgaagtccttccggactctacgagcactgaggcctcttcgtgcgctgtcccagtttgaaggaatgaaggtggtggtcaatgctctcataggtgccatacctgccattctgaatgttttgcttgtctgcctcattttctggctcgtattttgtattctgggagtatacttcttttctggaaaatttgggaaatgcattaatggaacagactcagttataaattataccatcattacaaataaaagtcaatgtgaaagtggcaatttctcttggatcaaccagaaagtcaactttgacaatgtgggaaatgcttacctcgctctgctgcaagtggcaacatttaagggctggatggatattatatatgcagctgttgattccacagagaaagaacaacagccagagtttgagagcaattcactcggttacatttacttcgtagtctttatcatctttggctcattcttcactctgaatctcttcattggcgttatcattgacaacttcaaccaacagcagaaaaagttaggtggccaagacatttttatgacagaagaacagaagaaatactataatgcaatgaaaaaattaggatccaaaaaacctcaaaaacccattccacggcctctgaacaaatgtcaaggtctcgtgttcgacatagtcacaagccagatctttgacatcatcatcataagtctcattatcctaaacatgattagcatgatggctgaatcatacaaccaacccaaagccatgaaatccatccttgaccatctcaactgggtctttgtggtcatctttacgttagaatgtctcatcaaaatctttgctttgaggcaatactacttcaccaatggctggaatttatttgactgtgtggtcgtgcttctttccattgttagtacaatgatttctaccttggaaaatcaggagcacattcctttccctccgacgctcttcagaattgtccgcttggctcggattggccgaatcctgaggcttgtccgggctgcacgaggaatcaggactctcctctttgctctgatgatgtcgcttccttctctgttcaacattggtcttctactctttctgattatgtttatctatgccattctgggtatgaactggttttccaaagtgaatccagagtctggaatcgatgacatattcaacttcaagacttttgccagcagcatgctctgtctcttccagataagcacatcagcaggttgggattccctgctcagccccatgctgcgatcaaaagaatcatgtaactcttcctcagaaaactgccacctccctggcatagccacatcctactttgtcagttacattatcatctcctttctcattgttgtcaacatgtacattgctgtgattttagagaacttcaatacagccactgaagaaagtgaggaccctttgggtgaagatgactttgacatattttatgaagtgtgggaaaagtttgacccagaagcaacacaatttatcaaatattctgccctttctgactttgctgatgccttgcctgagcctttgcgtgtcgcaaagccaaataaatatcaatttctagtaatggacttgcccatggtgagtgaagatcgcctccactgcatggatattcttttcgccttcaccgctagggtactcggtggctctgatggcctagatagtatgaaagcaatgatggaagagaagttcatggaagccaatcctctcaagaagttgtatgaacccatagtcaccaccaccaagagaaaggaagaggaaagaggtgctgctattattcaaaaggcctttcgaaagtacatgatgaaggtgaccaagggtgaccaaggtgaccaaaatgacttggaaaacgggcctcattcaccactccagactctttgcaatggagacttgtctagctttggggtggccaagggcaaggtccactgtgactgagccctcacctccacgcctacctcatagcttcacagccttgccttcagcctctgagctccaggggtcagcagcttagtgtatcaacagggagtggattcaccaaattagccattccattttcttttctggctaaaataaatgatatttcaatttcattttaaataatacttacagagatataagataaggctacttgacaaccagtggtactattataataaggaagaagacaccaggaaggactgtaaaaggacataccaattttaggattgaaatagttcaggccgggcgcagtggctcatgcctgtaatcccagcactttgagaggccaaggcaggtggatcacgaggtcaagagatcgagaccatcctggccaacatgatgaaactccgtctctactaaaaatacaaaaattagctgggcatggtggcgtgcgcctgtagtcccagctacttgggaggctgaggcaggagaatcgcttaaacctgggagacggaggttgcagtgagccaagatcgtgccactgcactccagcctggtgacagagtgagactctgtttcaaaaaagaaaagaaaagaaacatggttcaaattatatctaaacaaaaaagaataagaaacaaaaaacacattaaaattttaagttgtattttctatgtttctagatacatcatttttgtttgatattttcctgatgcaagtatgtggtttatcacatgtagctcttttgcatgctaaatgaaaattcaaaacttgccaataaatgaatagcttattgcagacattttttaccaacattaattattttgggtttgtttaaaacctagaggcacaatcttgacttgtcaattactaccctttcacaagctaccatctcagatatatatatatatataaattcaataaagctttctgtttgtgttcc

SEQ ID NO: 327781 - DNA, 5729 bp, Artificial Sequence
  derived and/or modified sequence
tcctgctatacccacagtggtggtcatctcttctgatcttcacagccaatcagctcccaaggcccctgacctcagctcagcttttgtagatccttatgacaccatcctttaagactggaatcctagggcaggctgttttattcccgcctcctgaggcctttctgaggatctgtggcttgtctctgtcctgagggtgaagatggatgacagatgctacccagtaatctttccagatgagcggaatttccgccccttcacttccgactctctggctgcaattgagaagcggattgccatccaaaaggagaaaaagaagtctaaagaccagacaggagaagtaccccagcctcggcctcagcttgacctaaaggcctccaggaagttgcccaagctctatggcgacattcctcgtgagctcataggaaagcctctggaagacttggacccattctaccgaaatcataagacatttatggtgttaaacagaaagaggacaatctaccgcttcagtgccaagcatgccttgttcatttttgggcctttcaattcaatcagaagtttagccattagagtctcagtccattcattgttcagcatgttcattatcggcaccgttatcatcaactgcgtgttcatggctacagggcctgctaaaaacagcaacagtaacaatactgacattgcagagtgtgtcttcactgggatttatatttttgaagctttgattaaaatattggcaagaggtttcattctggatgagttttctttccttcgagatccatggaactggctggactccattgtcattggaatagcgattgtgtcatatattccaggaatcaccatcaaactattgcccctgcgtaccttccgtgtgttcagagctttgaaagcaatttcagtagtttcacgtctgaaggtcatcgtgggggccttgctacgctctgtgaagaagctggtcaacgtgattatcctcaccttcttttgcctcagcatctttgccctggtaggtcagcagctcttcatgggaagtctgaacctgaaatgcatctcgagggactgtaaaaatatcagtaacccggaagcttatgaccattgctttgaaaagaaagaaaattcacctgaattcaaaatgtgtggcatctggatgggtaacagtgcctgttccatacaatatgaatgtaagcacaccaaaattaatcctgactataattatacgaattttgacaactttggctggtcttttcttgccatgttccggctgatgacccaagattcctgggagaagctttatcaacagaccctgcgtactactgggctctactcagtcttcttcttcattgtggtcattttcctgggctccttctacctgattaacttaaccctggctgttgttaccatggcatatgaggagcagaacaagaatgtagctgcagagatagaggccaaggaaaagatgtttcaggaagcccagcagctgttaaaggaggaaaaggaggctctggttgccatgggaattgacagaagttcacttacttcccttgaaacatcatattttaccccaaaaaagagaaagctctttggtaataagaaaaggaagtccttctttttgagagagtctgggaaagaccagcctcctgggtcagattctgatgaagattgccaaaaaaagccacagctcctagagcaaaccaaacgactgtcccagaatctatcactggaccactttgatgagcatggagatcctctccaaaggcagagagcactgagtgctgtcagcatcctcaccatcaccatgaaggaacaagaaaaatcacaagagccttgtctcccttgtggagaaaacctggcatccaagtacctcgtgtggaactgttgcccccagtggctgtgcgttaagaaggtcctgagaactgtgatgactgacccgtttactgagctggccatcaccatctgcatcatcatcaacactgtcttcttggccatggagcatcacaagatggaggccagttttgagaagatgttgaatatagggaatttggttttcactagcatttttatagcagaaatgtgcctaaaaatcattgcgctcgatccctaccactactttcgccgaggctggaacatttttgacagcattgttgctcttctgagttttgcagatgtaatgaactgtgtacttcaaaagagaagctggccattcttgcgttccttcagagtgctcagggtcttcaagttagccaaatcctggccaactttgaacacactaattaagataatcggcaactctgtcggagcccttggaagcctgactgtggtcctggtcattgtgatctttattttctcagtagttggcatgcagctttttggccgtagcttcaattcccaaaagagtccaaaactctgtaacccgacaggcccgacagtctcatgtttacggcactggcacatgggggatttctggcactccttcctagtggtattccgcatcctctgcggggaatggatcgaaaatatgtgggaatgtatgcaagaagcgaatgcatcatcatcattgtgtgttattgtcttcatattgatcacggtgataggaaaacttgtggtgctcaacctcttcattgccttactgctcaattcctttagcaatgaggaaagaaatggaaacttagaaggagaggccaggaaaactaaagtccagttagcactggatcgattccgccgggctttttgttttgtgagacacactcttgagcatttctgtcacaagtggtgcaggaagcaaaacttaccacagcaaaaagaggtggcaggaggctgtgctgcacaaagcaaagacatcattcccctggtcatggagatgaaaaggggctcagagacccaggaggagcttggtatactaacctctgtaccaaagaccctgggcgtcaggcatgattggacttggttggcaccacttgcggaggaggaagatgacgttgaattttctggtgaagataatgcacagcgcatcacacaacctgagcctgaacaacaggcctatgagctccatcaggagaacaagaagcccacgagccagagagttcaaagtgtggaaattgacatgttctctgaagatgagcctcatctgaccatacaggatccccgaaagaagtctgatgttaccagtatactatcagaatgtagcaccattgatcttcaggatggctttggatggttacctgagatggttcccaaaaagcaaccagagagatgtttgcccaaaggctttggttgctgctttccatgctgtagcgtggacaagagaaagcctccctgggtcatttggtggaacctgcggaaaacctgctaccaaatagtgaaacacagctggtttgagagctttattatctttgtgattctgctgagcagtggggcactgatatttgaagatgttcaccttgagaaccaacccaaaatccaagaattactaaattgtactgacattatttttacacatatttttatcctggagatggtactaaaatgggtagccttcggatttggaaagtatttcaccagtgcctggtgctgccttgatttcatcattgtgattgtctctgtgaccaccctcattaacttaatggaattgaagtccttccggactctacgagcactgaggcctcttcgtgcgctgtcccagtttgaaggaatgaaggtggtggtcaatgctctcataggtgccatacctgccattctgaatgttttgcttgtctgcctcattttctggctcgtattttgtattctgggagtatacttcttttctggaaaatttgggaaatgcattaatggaacagactcagttataaattataccatcattacaaataaaagtcaatgtgaaagtggcaatttctcttggatcaaccagaaagtcaactttgacaatgtgggaaatgcttacctcgctctgctgcaagtggcaacatttaagggctggatggatattatatatgcagctgttgattccacagagaaagaacaacagccagagtttgagagcaattcactcggttacatttacttcgtagtctttatcatctttggctcattcttcactctgaatctcttcattggcgttatcattgacaacttcaaccaacagcagaaaaagttaggtggccaagacatttttatgacagaagaacagaagaaatactataatgcaatgaaaaaattaggatccaaaaaacctcaaaaacccattccacggcctctgaacaaatgtcaaggtctcgtgttcgacatagtcacaagccagatctttgacatcatcatcataagtctcattatcctaaacatgattagcatgatggctgaatcatacaaccaacccaaagccatgaaatccatccttgaccatctcaactgggtctttgtggtcatctttacgttagaatgtctcatcaaaatctttgctttgaggcaatactacttcaccaatggctggaatttatttgactgtgtggtcgtgcttctttccattgttagtaagtaaaatcagcagtcagagggactttaagaaccagaagtaagtttgtaaatcttatcattttttgaagtttgttcaaactatccacaaagcagaaaactgggccaagtgtactttctgaaagaatagacaggggtactaatgccattctctactgggaagttgctaggagatagagagtaatttctgttcccttaactcactacacaactgaaatagagttcaataatcatgcagctaatgtattcaatggaaatagacaaaattaaaatgactcagaagtttttgtggtggtaacctgatttattcagataattgagtcaaagttctacctttcctgtgcaactataagccctatgagcattttttagttttaaggatttactgcccatgttttttcctttgttcaaaatccacatgggtgccagatcacaattattgtgcccctgtggcactgctgtgccccctttcaacccctatacaaggccccatggcccactctagattgggctttcaagagtatatcattcagacaatcaaagctttttttctattctatatcccatgttaacttaaaccacagtgtgaactgtgcttgtctcagattctttgaccccgcttaccaaccagcctcattctctaatcagtatatttttcctaatcacacgcagggttaactaaaaggcttataaaagaatacaaaagaaagaaggttattaccatactccttcttataaaacacacacatacacacatcaactttaaaattaaattcttcatggctaaaccataagtgcttactctgggtttttgaagtctggttttaattaaactgttaacttgacattttataattatgtaaaactgtccaggagcccttctcatagttcaaaacacaatgaagacaaagaaaactgattttccaaatggaagcttttttgcgatctcagaaagaatgcatcaaacagatatattggatcaagatattttggttcctaatgctactgcagcattgcagatgtttcagagaacaacaacaaatatgctacagttcatagtgtgttctggtttctaagccatgatgttaatgtagataaagcttatcaatagattcttccatgagtttacagttaagtagacctttaatttttattagtcaattccaatcacaagtcttggtgaaattgacagcagcaaaaaa

SEQ ID NO: 327782 - DNA, 5376 bp, Artificial Sequence
  derived and/or modified sequence
atggacgacagatgctaccccgtgatcttccccgacgagagaaacttcagacccttcaccagcgacagcctggccgccatcgagaagagaatcgccatccagaaggagaagaagaagagcaaggaccagaccggcgaggtgccccagcccagaccccagctggacctgaaggccagcagaaagctgcccaagctgtacggcgacatccccagagagctgatcggcaagcccctggaggacctggaccccttctacagaaaccacaagaccttcatggtgctgaacagaaagagaaccatctacagattcagcgccaagcacgccctgttcatcttcggccccttcaacagcatcagaagcctggccatcagagtgagcgtgcacagcctgttcagcatgttcatcatcggcaccgtgatcatcaactgcgtgttcatggccaccggccccgccaagaacagcaacagcaacaacaccgacatcgccgagtgcgtgttcaccggcatctacatcttcgaggccctgatcaagatcctggccagaggcttcatcctggacgagttcagcttcctgagagacccctggaactggctggacagcatcgtgatcggcatcgccatcgtgagctacatccccggcatcaccatcaagctgctgcccctgagaaccttcagagtgttcagagccctgaaggccatcagcgtggtgagcagactgaaggtgatcgtgggcgccctgctgagaagcgtgaagaagctggtgaacgtgatcatcctgaccttcttctgcctgagcatcttcgccctggtgggccagcagctgttcatgggcagcctgaacctgaagtgcatcagcagagactgcaagaacatcagcaaccccgaggcctacgaccactgcttcgagaagaaggagaacagccccgagttcaagatgtgcggcatctggatgggcaacagcgcctgcagcatccagtacgagtgcaagcacaccaagatcaaccccgactacaactacaccaacttcgacaacttcggctggagcttcctggccatgttcagactgatgacccaggacagctgggagaagctgtaccagcagaccctgagaaccaccggcctgtacagcgtgttcttcttcatcgtggtgatcttcctgggcagcttctacctgatcaacctgaccctggccgtggtgaccatggcctacgaggagcagaacaagaacgtggccgccgagatcgaggccaaggagaagatgttccaggaggcccagcagctgctgaaggaggagaaggaggccctggtggccatgggcatcgacagaagcagcctgaccagcctggagaccagctacttcacccccaagaagagaaagctgttcggcaacaagaagagaaagagcttcttcctgagagagagcggcaaggaccagccccccggcagcgacagcgacgaggactgccagaagaagccccagctgctggagcagaccaagagactgagccagaacctgagcctggaccacttcgacgagcacggcgaccccctgcagagacagagagccctgagcgccgtgagcatcctgaccatcaccatgaaggagcaggagaagagccaggagccctgcctgccctgcggcgagaacctggccagcaagtacctggtgtggaactgctgcccccagtggctgtgcgtgaagaaggtgctgagaaccgtgatgaccgaccccttcaccgagctggccatcaccatctgcatcatcatcaacaccgtgttcctggccatggagcaccacaagatggaggccagcttcgagaagatgctgaacatcggcaacctggtgttcaccagcatcttcatcgccgagatgtgcctgaagatcatcgccctggacccctaccactacttcagaagaggctggaacatcttcgacagcatcgtggccctgctgagcttcgccgacgtgatgaactgcgtgctgcagaagagaagctggcccttcctgagaagcttcagagtgctgagagtgttcaagctggccaagagctggcccaccctgaacaccctgatcaagatcatcggcaacagcgtgggcgccctgggcagcctgaccgtggtgctggtgatcgtgatcttcatcttcagcgtggtgggcatgcagctgttcggcagaagcttcaacagccagaagagccccaagctgtgcaaccccaccggccccaccgtgagctgcctgagacactggcacatgggcgacttctggcacagcttcctggtggtgttcagaatcctgtgcggcgagtggatcgagaacatgtgggagtgcatgcaggaggccaacgccagcagcagcctgtgcgtgatcgtgttcatcctgatcaccgtgatcggcaagctggtggtgctgaacctgttcatcgccctgctgctgaacagcttcagcaacgaggagagaaacggcaacctggagggcgaggccagaaagaccaaggtgcagctggccctggacagattcagaagagccttctgcttcgtgagacacaccctggagcacttctgccacaagtggtgcagaaagcagaacctgccccagcagaaggaggtggccggcggctgcgccgcccagagcaaggacatcatccccctggtgatggagatgaagagaggcagcgagacccaggaggagctgggcatcctgaccagcgtgcccaagaccctgggcgtgagacacgactggacctggctggcccccctggccgaggaggaggacgacgtggagttcagcggcgaggacaacgcccagagaatcacccagcccgagcccgagcagcaggcctacgagctgcaccaggagaacaagaagcccaccagccagagagtgcagagcgtggagatcgacatgttcagcgaggacgagccccacctgaccatccaggaccccagaaagaagagcgacgtgaccagcatcctgagcgagtgcagcaccatcgacctgcaggacggcttcggctggctgcccgagatggtgcccaagaagcagcccgagagatgcctgcccaagggcttcggctgctgcttcccctgctgcagcgtggacaagagaaagcccccctgggtgatctggtggaacctgagaaagacctgctaccagatcgtgaagcacagctggttcgagagcttcatcatcttcgtgatcctgctgagcagcggcgccctgatcttcgaggacgtgcacctggagaaccagcccaagatccaggagctgctgaactgcaccgacatcatcttcacccacatcttcatcctggagatggtgctgaagtgggtggccttcggcttcggcaagtacttcaccagcgcctggtgctgcctggacttcatcatcgtgatcgtgagcgtgaccaccctgatcaacctgatggagctgaagagcttcagaaccctgagagccctgagacccctgagagccctgagccagttcgagggcatgaaggtggtggtgaacgccctgatcggcgccatccccgccatcctgaacgtgctgctggtgtgcctgatcttctggctggtgttctgcatcctgggcgtgtacttcttcagcggcaagttcggcaagtgcatcaacggcaccgacagcgtgatcaactacaccatcatcaccaacaagagccagtgcgagagcggcaacttcagctggatcaaccagaaggtgaacttcgacaacgtgggcaacgcctacctggccctgctgcaggtggccaccttcaagggctggatggacatcatctacgccgccgtggacagcaccgagaaggagcagcagcccgagttcgagagcaacagcctgggctacatctacttcgtggtgttcatcatcttcggcagcttcttcaccctgaacctgttcatcggcgtgatcatcgacaacttcaaccagcagcagaagaagctgggcggccaggacatcttcatgaccgaggagcagaagaagtactacaacgccatgaagaagctgggcagcaagaagccccagaagcccatccccagacccctgaacaagtgccagggcctggtgttcgacatcgtgaccagccagatcttcgacatcatcatcatcagcctgatcatcctgaacatgatcagcatgatggccgagagctacaaccagcccaaggccatgaagagcatcctggaccacctgaactgggtgttcgtggtgatcttcaccctggagtgcctgatcaagatcttcgccctgagacagtactacttcaccaacggctggaacctgttcgactgcgtggtggtgctgctgagcatcgtgagcaccatgatcagcaccctggagaaccaggagcacatccccttcccccccaccctgttcagaatcgtgagactggccagaatcggcagaatcctgagactggtgagagccgccagaggcatcagaaccctgctgttcgccctgatgatgagcctgcccagcctgttcaacatcggcctgctgctgttcctgatcatgttcatctacgccatcctgggcatgaactggttcagcaaggtgaaccccgagagcggcatcgacgacatcttcaacttcaagaccttcgccagcagcatgctgtgcctgttccagatcagcaccagcgccggctgggacagcctgctgagccccatgctgagaagcaaggagagctgcaacagcagcagcgagaactgccacctgcccggcatcgccaccagctacttcgtgagctacatcatcatcagcttcctgatcgtggtgaacatgtacatcgccgtgatcctggagaacttcaacaccgccaccgaggagagcgaggaccccctgggcgaggacgacttcgacatcttctacgaggtgtgggagaagttcgaccccgaggccacccagttcatcaagtacagcgccctgagcgacttcgccgacgccctgcccgagcccctgagagtggccaagcccaacaagtaccagttcctggtgatggacctgcccatggtgagcgaggacagactgcactgcatggacatcctgttcgccttcaccgccagagtgctgggcggcagcgacggcctggacagcatgaaggccatgatggaggagaagttcatggaggccaaccccctgaagaagctgtacgagcccatcgtgaccaccaccaagagaaaggaggaggagagaggcgccgccatcatccagaaggccttcagaaagtacatgatgaaggtgaccaagggcgaccagggcgaccagaacgacctggagaacggcccccacagccccctgcagaccctgtgcaacggcgacctgagcagcttcggcgtggccaagggcaaggtgcactgcgactag

SEQ ID NO: 327783 - DNA, 4335 bp, Artificial Sequence
  derived and/or modified sequence
atggacgacagatgctaccccgtgatcttccccgacgagagaaacttcagacccttcaccagcgacagcctggccgccatcgagaagagaatcgccatccagaaggagaagaagaagagcaaggaccagaccggcgaggtgccccagcccagaccccagctggacctgaaggccagcagaaagctgcccaagctgtacggcgacatccccagagagctgatcggcaagcccctggaggacctggaccccttctacagaaaccacaagaccttcatggtgctgaacagaaagagaaccatctacagattcagcgccaagcacgccctgttcatcttcggccccttcaacagcatcagaagcctggccatcagagtgagcgtgcacagcctgttcagcatgttcatcatcggcaccgtgatcatcaactgcgtgttcatggccaccggccccgccaagaacagcaacagcaacaacaccgacatcgccgagtgcgtgttcaccggcatctacatcttcgaggccctgatcaagatcctggccagaggcttcatcctggacgagttcagcttcctgagagacccctggaactggctggacagcatcgtgatcggcatcgccatcgtgagctacatccccggcatcaccatcaagctgctgcccctgagaaccttcagagtgttcagagccctgaaggccatcagcgtggtgagcagactgaaggtgatcgtgggcgccctgctgagaagcgtgaagaagctggtgaacgtgatcatcctgaccttcttctgcctgagcatcttcgccctggtgggccagcagctgttcatgggcagcctgaacctgaagtgcatcagcagagactgcaagaacatcagcaaccccgaggcctacgaccactgcttcgagaagaaggagaacagccccgagttcaagatgtgcggcatctggatgggcaacagcgcctgcagcatccagtacgagtgcaagcacaccaagatcaaccccgactacaactacaccaacttcgacaacttcggctggagcttcctggccatgttcagactgatgacccaggacagctgggagaagctgtaccagcagaccctgagaaccaccggcctgtacagcgtgttcttcttcatcgtggtgatcttcctgggcagcttctacctgatcaacctgaccctggccgtggtgaccatggcctacgaggagcagaacaagaacgtggccgccgagatcgaggccaaggagaagatgttccaggaggcccagcagctgctgaaggaggagaaggaggccctggtggccatgggcatcgacagaagcagcctgaccagcctggagaccagctacttcacccccaagaagagaaagctgttcggcaacaagaagagaaagagcttcttcctgagagagagcggcaaggaccagccccccggcagcgacagcgacgaggactgccagaagaagccccagctgctggagcagaccaagagactgagccagaacctgagcctggaccacttcgacgagcacggcgaccccctgcagagacagagagccctgagcgccgtgagcatcctgaccatcaccatgaaggagcaggagaagagccaggagccctgcctgccctgcggcgagaacctggccagcaagtacctggtgtggaactgctgcccccagtggctgtgcgtgaagaaggtgctgagaaccgtgatgaccgaccccttcaccgagctggccatcaccatctgcatcatcatcaacaccgtgttcctggccatggagcaccacaagatggaggccagcttcgagaagatgctgaacatcggcaacctggtgttcaccagcatcttcatcgccgagatgtgcctgaagatcatcgccctggacccctaccactacttcagaagaggctggaacatcttcgacagcatcgtggccctgctgagcttcgccgacgtgatgaactgcgtgctgcagaagagaagctggcccttcctgagaagcttcagagtgctgagagtgttcaagctggccaagagctggcccaccctgaacaccctgatcaagatcatcggcaacagcgtgggcgccctgggcagcctgaccgtggtgctggtgatcgtgatcttcatcttcagcgtggtgggcatgcagctgttcggcagaagcttcaacagccagaagagccccaagctgtgcaaccccaccggccccaccgtgagctgcctgagacactggcacatgggcgacttctggcacagcttcctggtggtgttcagaatcctgtgcggcgagtggatcgagaacatgtgggagtgcatgcaggaggccaacgccagcagcagcctgtgcgtgatcgtgttcatcctgatcaccgtgatcggcaagctggtggtgctgaacctgttcatcgccctgctgctgaacagcttcagcaacgaggagagaaacggcaacctggagggcgaggccagaaagaccaaggtgcagctggccctggacagattcagaagagccttctgcttcgtgagacacaccctggagcacttctgccacaagtggtgcagaaagcagaacctgccccagcagaaggaggtggccggcggctgcgccgcccagagcaaggacatcatccccctggtgatggagatgaagagaggcagcgagacccaggaggagctgggcatcctgaccagcgtgcccaagaccctgggcgtgagacacgactggacctggctggcccccctggccgaggaggaggacgacgtggagttcagcggcgaggacaacgcccagagaatcacccagcccgagcccgagcagcaggcctacgagctgcaccaggagaacaagaagcccaccagccagagagtgcagagcgtggagatcgacatgttcagcgaggacgagccccacctgaccatccaggaccccagaaagaagagcgacgtgaccagcatcctgagcgagtgcagcaccatcgacctgcaggacggcttcggctggctgcccgagatggtgcccaagaagcagcccgagagatgcctgcccaagggcttcggctgctgcttcccctgctgcagcgtggacaagagaaagcccccctgggtgatctggtggaacctgagaaagacctgctaccagatcgtgaagcacagctggttcgagagcttcatcatcttcgtgatcctgctgagcagcggcgccctgatcttcgaggacgtgcacctggagaaccagcccaagatccaggagctgctgaactgcaccgacatcatcttcacccacatcttcatcctggagatggtgctgaagtgggtggccttcggcttcggcaagtacttcaccagcgcctggtgctgcctggacttcatcatcgtgatcgtgagcgtgaccaccctgatcaacctgatggagctgaagagcttcagaaccctgagagccctgagacccctgagagccctgagccagttcgagggcatgaaggtggtggtgaacgccctgatcggcgccatccccgccatcctgaacgtgctgctggtgtgcctgatcttctggctggtgttctgcatcctgggcgtgtacttcttcagcggcaagttcggcaagtgcatcaacggcaccgacagcgtgatcaactacaccatcatcaccaacaagagccagtgcgagagcggcaacttcagctggatcaaccagaaggtgaacttcgacaacgtgggcaacgcctacctggccctgctgcaggtggccaccttcaagggctggatggacatcatctacgccgccgtggacagcaccgagaaggagcagcagcccgagttcgagagcaacagcctgggctacatctacttcgtggtgttcatcatcttcggcagcttcttcaccctgaacctgttcatcggcgtgatcatcgacaacttcaaccagcagcagaagaagctgggcggccaggacatcttcatgaccgaggagcagaagaagtactacaacgccatgaagaagctgggcagcaagaagccccagaagcccatccccagacccctgaacaagtgccagggcctggtgttcgacatcgtgaccagccagatcttcgacatcatcatcatcagcctgatcatcctgaacatgatcagcatgatggccgagagctacaaccagcccaaggccatgaagagcatcctggaccacctgaactgggtgttcgtggtgatcttcaccctggagtgcctgatcaagatcttcgccctgagacagtactacttcaccaacggctggaacctgttcgactgcgtggtggtgctgctgagcatcgtgagcaagtag

SEQ ID NO: 327784 - DNA, 4461 bp, Artificial Sequence
  derived and/or modified sequence
gcaagaccaggactcgggctggaggggcgctgggctcggacctgccaaggccacgggggagcaagggacagaggcgggggtcctagctgacggcttttactgcctaggatgacgctgcggcttctggtggccgcgctctgcgccgggatcctggcagaggcgccccgagtgcgagcccagcacagggagagaggtctgcatcctgatcacagacgggaagtcccaggacctggtggacacagctgcccaaaggctgaaggggcagggggtcaagctatttgctgtggggatcaagaatgctgaccctgaggagctgaagcgagttgcctcacagcccaccagtgacttcttcttcttcgtcaatgacttcagcatcttgaggacactactgcccctcgtttcccggagagtgtgcacgactgctggtggcgtgcctgtgacccgacctcctgccctagaagggccggaactgaccatccagaataccacagcccacagcctcctggtggcctggcggagtgtgccaggtgccactggctaccgtgtgacatggcgggtcctcagtggtgggcccacacagcagcaggagctgggccctgggcagggttcagtgttgctgcgtgacttggagcctggcacggactatgaggtgaccgtgagcaccctatttggccgcagtgtggggcccgccacttccctgatggctcgcactggaccagagctgcctgtgagccctgtaacagacctgcaagccaccgagctgcccgggcagcgggtgcgagtgtcctggagcccagtccctggtgccacccagtaccgcatcattgtgcgcagcacccagggggttgagcggaccctggtgcttcctgggagtcagacagcattcgacttggatgacgttcaggctgggcttagctacactgtgcgggtgtctgctcgagtgggtccccgtgagggcagtgccagtgtcctcactgtccgccgggacccactgggcccagtgaggacggtccatgtgactcaggccagcagctcatctgtcaccattacctggaccagggttcctggcgccacaggatacagggtttcctggcactcagcccacggcccagagaaatcccagttggtttctggggaggccacggtggctgagctggatggactggagccagatactgagtatacggtgcatgtgagggcccatgtggctggcgtggatgggccccctgcctctgtggttgtgaggactgcgcctgaggctccgccagccctggggacgcttcacgtggtgcagcgcggggagcactcgctgaggctgcgctgggagccggtgcccagagcgcagggcttccttctgcactggcaacctgagggtggccaggaacagtcccgggtcctggggcccgagctcagcagctatcacctggacgggctggagccagcgacacagtaccgcgtgaggctgagtgtcctagggccagctggagaagggccctctgcagaggtgactgcgcgcactgtgtgcccccgtggcctggcggatgtggtgttcctaccacatgccactcaagacaatgctcaccgtgcggaggctacgaggagggtcctggagcgtctggtgttggcacttgggcctcttgggccacaggcagttcaggttggcctgctgtcttacagtcatcggccctccccactgttcccactgaatggctcccatgaccttggcattatcttgcaaaggatccgtgacatgccctacatggacccaagtgggaacaacctggccccggccagagccctgcccagtgtattgtccaaagggccagaagggggaacctggagagatgggcttccctggagcagatgggcgtccaggcagccctggccgcgccgggaatcctgggacccctggagcccctggcctaaagggctctccagggttgcctggccctcgtggggacccgggcccccctggacctcgtggaccactgggggacccaggaccccgtggccccccagggcttcctggaacagccatgaagggtgacaaaggcgatcgtggggagcggggtgactctgaggatggagctccaggcctcccaggacaacctgggtctccgggtgagcagggcccacggggacctcctggagctattggccccaaagggctgccaggggttgctggacgtcctggagccaagggtcctgaagggccaccaggacccactggccgccaaggagagaagggagatgtggggcccgctgggcccagaggagctaccggagtccaaggggaacggggcccacccggcttggttcttcctggagaccctggccccaagggagaccctggagaccggggtgaagttggagagaaaggtgacgagggtcctccgggtgacccgggtttgcctggaaaagcaggcgagcgtggccttcggggtcccccaggacccccgggacggctggtagacacaggacctggagccagagagaagggggacccaggtgtccgaggcccagcaggagaaaagggtgaccggggtccccctgggctggatggccggagcggactggatgggaaaccaggagccgctgggccctctgggccgaatggaaagccaggcgaggatggcaaacctggcctgaatggaaaaaacggagaacctggggaccctggagaagacgggaggaagggttttcctggtgtcccaggaggcacgggccccaagggtgaccgtggggagactggatccaaaggggagcagggcctccctggagagcgtggcctgcgaggagagcctggaagtgtgccggcatctgccctgcgggagatcgtggagacctgggatgagagctctggtagcttcctgcctgtgcccgaacggcgtcgaggccccaagggggactcaggcgaacagggccccccaggcaaggagggccccatcggctttcctggagaacgcgggctgaagggcgaccgtggagaccctggccctcaggggccacctggtctggcccttggggagaggggcccccccgggccttccggccttgccggggagcctggaaagcctggtattcccgggctcccaggcagggctgggggtgtgggagaggcaggaaggccaggagagaggggagaacggggagagaaaggagaacgtggagaacaggtgtctgtggatgagccaggtcctggactctctggagaacagggaccccctggactcaagggtgctaagggggagccgggcagcaatggtgaccaaggtcccaaaggagacaggggtctgcagggtccaagaggcccccctggcccagtgggtggtcatggagaccctggaccacctggtgccccgggcctgactggacctactggagctgtgggacttcctggaccccccggcccttcaggccttgtgggtccacaggggtctccaggtttgcctggacaagtggctgtggtcgggctccctggagcaaagggagagaagggagcccctggaggccttgctggagacctggtgggtgagccgggtcagaaaggggctccaggacccaaaggtttcaagggtgacccaggagtcggggtcccgggctcccctgggcctcctggccctccaggtgtgaagggaccacctggggcctctggactcaaaggagacaagggagaccctggagtagggctgcctgggccccgaggcgagcgtggggagccaggcatccggggtgatgttgggagtgcaggactaaagggtgacaagggagactcagctgtgatcctggggcctccaggcccacggggtgccaagggggacatgggtcaacctggtgcagcagggatccctggtgacccgggatccccaggaaaggatggagtgcctggtatccgaggagaaaaaggagatgttggcttcatgggtccccggggcctcaagggggagcctggtgtgccgggccagtcgggggcccctggcaaggagggcctgatcggtcccaagggtgaccgaggctttgacgggcagccaggccccaagggtgaccagggcgagaaaggggagcgggggcggccagggcctgccggtcctcgaggcgagaagggagaagctgcactgacggaggatgacatccggggctttgtgcgccaagagatgagtcagcactgtgagcgggtaccccctgaggatgatgagtactctgaatactccgagtattctgtggaggagtaccaggaccctgaagctccttgggatagtgatgacccctgttccctgccactggatgagggctcctgcactgcctacaccctgcgctggtaccatcgggctgtgacaggcagcacagaggcctgtcacccttttgtctatggtggctgtggagggaatgccaaccgttttgggacccgtgaggcctgcgagcgccgctgcccaccccgggtggtccagagccaggggacag

SEQ ID NO: 327785 - DNA, 438 bp, Artificial Sequence
  derived and/or modified sequence
atgggcccctggcccagagactggctgggcaagggctggagactgggcagctgcgaggccagagccggcgccaaggaggtgagcgtgatcagacacggcgcccccaaccccgcccagagccacctgcacgtgcaggccagagcccaggtgcacagcgaggacggccacagcctgccccccgtggtggacggcgaggacgaggtgctgagcctgctggtgttcgtgcaggacagccaggagtgctgcagacaggccgtgcagggcagacagggcagaggcgtgacctggggcctgggcctgcccagctaccacctgagaaccctgctgagccccgtgtgcgtgcccgccagagaccagagagcccccagaaagtgctgcgaggccgtgctggcctgccccctggtggagaccctggtgaccaccctgctgaccagatag

SEQ ID NO: 327786 - protein, 185 aa, Artificial Sequence
  derived and/or modified sequence
MSMFALLAHWMACIWYVIGKMEREDNSLLKWEVGWLHELGKRLESPYYGNNTLGGPSIRSAYIAALYFTLSSLTSVGFGNVSANTDAEKIFSICTMLIGVSQFQVCPRPSWIICWFRNHFGFILLMTTLMHALVFGNVTAIIQRMYSRWSLYHTRTKDLKDFIRVHHLPQQLKQRMLEYFQTTCF

SEQ ID NO: 327787 - DNA, 558 bp, Artificial Sequence
  derived and/or modified sequence
atgagcatgttcgccctgctggcccactggatggcctgcatctggtacgtgatcggcaagatggagagagaggacaacagcctgctgaagtgggaggtgggctggctgcacgagctgggcaagagactggagagcccctactacggcaacaacaccctgggcggccccagcatcagaagcgcctacatcgccgccctgtacttcaccctgagcagcctgaccagcgtgggcttcggcaacgtgagcgccaacaccgacgccgagaagatcttcagcatctgcaccatgctgatcggcgtgagccagttccaggtgtgccccagacccagctggatcatctgctggttcagaaaccacttcggcttcatcctgctgatgaccaccctgatgcacgccctggtgttcggcaacgtgaccgccatcatccagagaatgtacagcagatggagcctgtaccacaccagaaccaaggacctgaaggacttcatcagagtgcaccacctgccccagcagctgaagcagagaatgctggagtacttccagaccacctgcttctag

SEQ ID NO: 327788 - DNA, 558 bp, Artificial Sequence
  derived and/or modified sequence
atgtcaatgttcgcgctgcttgcacactggatggcatgtatctggtacgtgattggcaaaatggagagagaggacaatagtctactgaagtgggaggtgggatggttacatgagcttggtaagcgattagaaagcccctattacggtaacaacacactaggaggaccctcgatcaggagtgcttatatcgcagctctctattttaccctcagcagcctgacaagcgtgggatttggcaacgtctcagcaaatactgacgccgagaagatcttttctatttgtaccatgcttattggggtctcccagtttcaggtgtgccccaggccttcttggattatatgttggttccggaaccattttggctttattctgctgatgaccacactgatgcacgcactggttttcggcaacgttaccgccattattcagcggatgtacagccgttggtccctgtaccatactcggaccaaagatctcaaggatttcatacgagtgcaccatcttccacagcagctgaaacaaagaatgctcgaatatttccaaacgacatgcttctag

SEQ ID NO: 327789 - DNA, 558 bp, Artificial Sequence
  derived and/or modified sequence
atgtccatgtttgccctgctggcccactggatggcctgcatctggtacgtgattggcaagatggagcgggaggacaacagcctgctgaagtgggaggtgggctggctgcacgagctgggcaagaggctggagagcccctactacggcaacaacaccctgggcggccccagcatccgcagcgcctacatcgccgccctgtacttcaccctgagcagcctgacctctgtgggctttggaaatgtgtctgccaacacagatgctgagaagatcttcagcatctgcaccatgctgattggagtgtcccagttccaggtgtgcccccggcccagctggatcatctgctggttcaggaaccacttcggcttcatcctgctgatgaccaccctgatgcacgccctggtgtttggaaatgtgacagccatcatccagaggatgtacagccgctggagcctgtaccacaccaggaccaaggacctgaaggacttcatccgggtgcaccacctgccccagcagctgaagcagaggatgctggagtacttccagaccacctgcttctag

SEQ ID NO: 327790 - DNA, 558 bp, Artificial Sequence
  derived and/or modified sequence
atgagcatgttcgccctgctggcccactggatggcctgcatctggtacgtcatagggaagatggagagggaagacaactccctgctgaaatgggaagtcggctggctccacgagctggggaaacggctagaatcaccctactatggtaataataccctcggtggcccatcaattcggagcgcctacattgccgccctgtatttcaccctcagctcgctgacatcagtggggttcggaaacgtgtctgctaacacggacgctgaaaaaatattctcaatttgtactatgctcattggagtttcccagttccaggtctgtcctagacccagttggataatatgttggttcagaaatcacttcggtttcatcttgctgatgaccacactgatgcatgcattggtgtttgggaatgttacagccatcatccaacggatgtacagtagatggagcctgtaccatactcgaactaaagatctcaaggattttataagggttcaccacctgccacagcagttgaaacagcgcatgctggagtacttccagaccacctgcttctag

SEQ ID NO: 327791 - DNA, 558 bp, Artificial Sequence
  derived and/or modified sequence
atgagcatgttcgccttgctcgcacattggatggcttgtatttggtatgtaataggcaagatggaaagggaagataattccttactgaagtgggaagtggggtggttacacgaattgggaaaacggctggagtcgccctactacggcaacaacacacttggtggccctagcataaggtcagcgtatatcgcagctctgtattttaccctatctagcctgacgtctgtgggcttcggtaacgtctccgcaaatacagacgccgaaaaaattttctctatctgtactatgctgataggagtgtctcaattccaggtgtgcccgagaccctcatggataatctgttggtttcgaaaccatttcgggttcatactgctcatgacaaccttgatgcacgccttggtttttggcaatgttacggccattatccagagaatgtactctagatggtccctgtatcacacacgcacaaaggatttaaaggattttatccgggtccaccatttgccccaacagctgaaacagcgtatgttggagtacttccagactacttgcttctag

SEQ ID NO: 327792 - protein, 77 aa, Artificial Sequence
  derived and/or modified sequence
MRSPRMRVCAKSVLLSHWLFLAYVLMVCCKLMSASSQHLRGHAGHHQIKQGTCEVVAVHRCCNKNRIEERSQTVKCS

SEQ ID NO: 327793 - DNA, 753 bp, Artificial Sequence
  derived and/or modified sequence
agtcggaactccagcgccggcggcggcggcggcggcggaggaggagaaaggaaagaggaagggggagcggcgagaggcggagacggagcccgacaggggcggcaccacggcacgagccccgcacagtccagtgtgaggggagcggcgctaagagcaggcgacgccgccgccgccaccaccaccgccatagatacactctcatcctacgggccacgcctgggccttgctgccaggaagcttcggccccgcagctcggcttgctgcggtctcaggtaaccgaaccgcccctcctcctgcgcagcgggggcctggaccccaggttatccgcggtccccagcctgtccgcggccctgccggtactgagaccccccaccccttctccctcacgcgcagcagtgccctggaccagagaactatcgaacccggcgtcttgttctgccagccctggtgactcatcctccaggggctctggagaccgggatttggggactgactgagggagcgacgggtgtcaccctttcccttctcaagatggcgccgtggaaagtgtactggaggccgcggttccgcctggtctccgtcctggcagtcctgggggtctcggtcaaagcaaggtttctttacctccagaaagaagaatattggccccttgaattctggaagttcattgaagagtctgaaattagggacttatttcaaatttggacatggctagtcgaggcgcaacaagacccaacgggccaaatacgggaa

SEQ ID NO: 327794 - protein, 404 aa, Artificial Sequence
  derived and/or modified sequence
MELIEGAPLGEHFSSLKEKHHHFTEERLWKIFIQLCLALRYLHKEKRIVHRDLTPNNIMLGDKDKVTVTDFGLAKQKQENSKLTSVVGTILYSCPEVLKSEPYGEKADVWAVGCILYQMATLSPPFYSTNMLSLATKIVEAVYEPVPEGIYSEKVTDTISRCLTPDAEARPDIVEVSSMISDVMMKYLDNLSTSQLSLEKKLERERRRTQRYFMEANRNTVTCHHELAVLSHETFEKASLSSSSSGAASLKSELSESADLPPEGFQASYGKDEDRACDEILSDDNFNLENAEKDTYSEVDDELDISDNSSSSSSSPLKESTFNILKRSFSASGGERQSQTRDFTGGTGSRPRPALLPLDLLLKVPPHMLRAHIKEIEAELVTGWQSHSLPAVILRNLKDHGSTY

SEQ ID NO: 327795 - DNA, 1215 bp, Artificial Sequence
  derived and/or modified sequence
atggagctgatcgagggcgcccccctgggcgagcacttcagcagcctgaaggagaagcaccaccacttcaccgaggagagactgtggaagatcttcatccagctgtgcctggccctgagatacctgcacaaggagaagagaatcgtgcacagagacctgacccccaacaacatcatgctgggcgacaaggacaaggtgaccgtgaccgacttcggcctggccaagcagaagcaggagaacagcaagctgaccagcgtggtgggcaccatcctgtacagctgccccgaggtgctgaagagcgagccctacggcgagaaggccgacgtgtgggccgtgggctgcatcctgtaccagatggccaccctgagcccccccttctacagcaccaacatgctgagcctggccaccaagatcgtggaggccgtgtacgagcccgtgcccgagggcatctacagcgagaaggtgaccgacaccatcagcagatgcctgacccccgacgccgaggccagacccgacatcgtggaggtgagcagcatgatcagcgacgtgatgatgaagtacctggacaacctgagcaccagccagctgagcctggagaagaagctggagagagagagaagaagaacccagagatacttcatggaggccaacagaaacaccgtgacctgccaccacgagctggccgtgctgagccacgagaccttcgagaaggccagcctgagcagcagcagcagcggcgccgccagcctgaagagcgagctgagcgagagcgccgacctgccccccgagggcttccaggccagctacggcaaggacgaggacagagcctgcgacgagatcctgagcgacgacaacttcaacctggagaacgccgagaaggacacctacagcgaggtggacgacgagctggacatcagcgacaacagcagcagcagcagcagcagccccctgaaggagagcaccttcaacatcctgaagagaagcttcagcgccagcggcggcgagagacagagccagaccagagacttcaccggcggcaccggcagcagacccagacccgccctgctgcccctggacctgctgctgaaggtgcccccccacatgctgagagcccacatcaaggagatcgaggccgagctggtgaccggctggcagagccacagcctgcccgccgtgatcctgagaaacctgaaggaccacggcagcacctactag

SEQ ID NO: 327796 - DNA, 1215 bp, Artificial Sequence
  derived and/or modified sequence
atggagctgattgagggcgcacccctcggcgaacatttttcaagtcttaaggagaagcaccatcacttcactgaggagagactgtggaagatcttcatccaactgtgcctcgccctgcgttatttgcacaaggagaaacgtattgtccaccgggatctaactcccaacaacattatgctgggcgacaaagataaggtcaccgtgacagacttcggcttggccaaacagaagcaggagaacagcaaactgacaagcgtggtgggcacaatcctatacagctgccccgaggttctgaagtccgagccttatggagaaaaggccgacgtgtgggctgtaggctgcattctctaccagatggctacattgtccccgcctttctacagcacgaatatgctttccctggccaccaaaatcgtggaggctgtgtacgaacccgtgccagagggcatatactctgaaaaggtgaccgacacaattagcaggtgtttgacccccgacgctgaagctagaccagatattgttgaagtgtcgagcatgatcagtgacgtgatgatgaagtaccttgacaacctgtctacttctcagctttctctggagaagaagctggaacgtgagagaagaagaactcaaaggtacttcatggaggcgaacaggaacacagtcacgtgtcaccacgaactggctgtcctgtcccatgaaacatttgaaaaagccagcctgtcaagctcgtccagcggggccgcaagtcttaagtctgagctttcagaatcagcggacctaccgccagagggttttcaagcctcatacggcaaggacgaggatcgagcctgcgatgaaattttgtcagatgataactttaatctggaaaatgccgagaaggacacatattccgaggttgatgacgagttggatatctctgataattcgagctcttcgtcctcatctcctttgaaggaatccacattcaatatcttgaagaggtccttttccgcatcaggaggggaacggcagtcccagactcgagactttacgggcggaactgggtcccgccctcgccctgctcttctgcctttggacttactacttaaggttccccctcatatgctgcgagcacacatcaaagaaatcgaagcagagctggtgaccggctggcagtcccacagtctgcccgccgtgatactgcgcaacctgaaagatcatggctccacctactag

SEQ ID NO: 327797 - DNA, 1215 bp, Artificial Sequence
  derived and/or modified sequence
atggagctgattgagggcgcccccctgggggagcacttcagcagcctgaaggagaagcaccaccacttcacagaggagcggctgtggaagatcttcatccagctgtgcctggccctgcgctacctgcacaaggagaagagaattgtgcaccgggacctgacccccaacaacatcatgctgggggacaaggacaaggtgacagtgacagactttggcctggccaagcagaagcaggagaacagcaagctgacctctgtggtgggcaccatcctgtacagctgcccagaggtgctgaagtctgagccctatggagagaaggcagatgtgtgggccgtgggctgcatcctgtaccagatggccaccctgagcccccccttctacagcaccaacatgctgagcctggccaccaagatcgtggaggccgtgtatgagcctgtgcctgagggcatctacagcgagaaggtgacagacaccatcagccgctgcctgaccccagatgctgaggcccggccagacatcgtggaggtgtcctccatgatcagtgatgtgatgatgaagtacctggacaacctgagcaccagccagctgagcctggagaagaagctggagcgggagaggaggaggacccagcgctacttcatggaggccaacagaaacacagtgacctgccaccacgagctggccgtgctgagccatgagacctttgagaaggccagcctgagcagcagcagcagtggagctgccagcctgaagtctgagctgtctgagagcgctgacctgcccccagagggcttccaggccagctatggcaaggatgaagatcgggcctgtgatgagatcctgagtgatgacaacttcaacctggagaatgctgagaaggacacctacagcgaggtggatgatgagctggacatcagtgacaacagcagcagcagcagcagcagccccctgaaggagagcaccttcaacatcctgaagaggagcttcagcgccagcggcggggagcggcagagccagacccgggacttcaccggcggcaccggcagccggcccaggcctgccctgctgcccctggacctgctgctgaaggtgcccccccacatgctgcgggcccacatcaaggagattgaggccgagctggtgacaggctggcagagccacagcctgcctgctgtgatcctgaggaacctgaaggaccacggcagcacctactag

SEQ ID NO: 327798 - DNA, 1215 bp, Artificial Sequence
  derived and/or modified sequence
atggagctgatcgagggcgcccccctgggcgagcacttcagcagcctcaaggagaagcatcaccacttcaccgaagagcgtctgtggaagatttttatacaactgtgcttggcactgcggtatctgcataaggaaaagcgaattgttcacagggatctcactcccaataacatcatgctaggtgataaggacaaggtgacagtaaccgattttggcctggcaaaacagaagcaagagaattctaagctcacctccgtggtcggcaccatattgtactcgtgcccagaagttctgaaatcagaaccctatggagagaaagcagacgtgtgggcagttggctgcatcctttaccagatggcaaccctctccccacctttctactccaccaatatgctcagcttggctaccaaaattgtggaagctgtgtatgaaccagttccagagggaatatactccgaaaaggtgacggacactatcagccgctgcctgaccccagatgccgaggcccggccagatatagtcgaggtgtccagtatgattagcgacgtcatgatgaaatacctagacaacctgtctacttctcaactgtcactggagaagaagctggaaagagagagacggaggacacaacggtacttcatggaggccaatcgtaatacagttacgtgccatcatgaactagccgtgctgtctcatgagaccttcgaaaaggcttccttgtcatccagttcctctggtgcggcgtctttgaaaagtgagctgagtgagtccgcagacctgccacctgaagggtttcaggcctcttatgggaaggatgaggaccgggcttgcgatgaaattctctccgatgacaactttaatctggagaatgctgagaaagacacttatagcgaagttgatgacgaactggatatctctgataactcatccagctcgtcttcttcccctttgaaagaaagtactttcaatatactgaagagatccttttcggccagtggaggggaacgacagtcgcagacccgagacttcactggaggtaccggcagcaggccacgacccgctttgctgccactagatttgctgttgaaagtgcccccacacatgctcagagcccacattaaagaaattgaggcggaactggtcaccggttggcagtctcactccctacccgcagtgattctccggaacctgaaggaccacggctctacctattag

SEQ ID NO: 327799 - DNA, 1599 bp, Artificial Sequence
  derived and/or modified sequence
ttgattaggaggatgaactgaagcaaattgctgaaaatattgaaagcattaatcagaacaaagctcctttgaaatatataggcaactatgcaattttggatcatcttggaagtggagcttttggctgtgtttacaagctttatcatcccaacattgtacgttattacaaaacatttctggaaaatgataggttgtacatagttatggagctgatagaaggagccccgcttggagagcatttcagttctttgaaggaaaaacatcaccattttactgaagaaagactatggaaaatatttatacagctgtgcttagctcttcgatacttacacaaggagaagaggattgtccatagagatctgacaccaaacaacattatgttgggggataaggacaaagtaaccgttactgactttggcctggcaaagcaaaaacaagaaaacagtaaactcacctctgtggttggaacaatcctgtattcttgccccgaggtactgaagagtgagccgtatggggagaaggctgatgtctgggcagtaggctgcatcctttatcagatggcgactttgagtccccccttctacagcactaacatgctgtccttggctacaaaaatagtggaggcggtatatgaaccagtcccagaaggtatctactctgaaaaagtaacagacaccatcagcaggtgcctcactcctgatgcggaagctcgtccagatattgtagaagtcagttcgatgatatcagatgtcatgatgaaatatttagacaacttatctacatcccagttgtccttggaaaagaagctagaacgggaacgaagacgcacacaaaggtattttatggaagccaaccggaacaccgtcacatgtcaccatgagctggctgttctatctcacgagacctttgagaaggcaagtttgagtagcagcagcagtggagcagccagcctgaaaagtgaactttcagaaagcgcagacctgccccctgaaggcttccaggcctcctatggtaaagacgaagacagggcctgtgacgaaatcctgtcagatgataacttcaacctggaaaatgctgagaaagatacatattcagaggtagatgatgaattggacatttcggataactccagcagctccagttcaagccctctgaaagaatctacattcaacattttaaagagaagttttagtgcttcaggaggagaaagacaatcccaaacaagggacttcactggaggaacaggatcaagaccaagaccagctttgctgcctcttgacctgcttctgaaagtgccaccccacatgctcagggcccacattaaggaaatagaggctgagttagtgacagggtggcagtcccatagccttcctgctgtgattcttcgaaatctcaaagatcatggtagtacttactagatcacattgatgttaagcacacaatgggcaaatgcagaattatagttgggcctgagatgtctgaacgatgcttgggtggtaattttaatacaaagagcggagaattctgccttgtttgttcaccattattagtttggcgatttgatggtaacaaaatgccttctgtgttcactgttggttg

SEQ ID NO: 327800 - DNA, 1215 bp, Artificial Sequence
  derived and/or modified sequence
atggaactcattgagggggcacccctgggtgaacatttctcatccctgaaagagaagcaccaccattttaccgaagagcgtttgtggaaaattttcattcagctctgcctggctctgcggtatttgcacaaagaaaagcggatcgtgcaccgcgatctgacacccaataacatcatgttgggcgataaggacaaggttacagttactgatttcggtcttgctaagcaaaaacaggagaattccaaattaacaagcgttgttgggacaatactgtatagttgcccagaagtattgaagagcgagccgtatggcgagaaagctgatgtatgggctgttggttgcattctataccagatggccaccctgtctccaccgttttactcaacaaacatgctgagcctcgctacaaaaatagtggaagcagtgtacgagccggttcctgagggcatatactccgaaaaggtgactgacactattagtcgttgcctcacccctgatgccgaggccaggcctgacatagtcgaagtgagttccatgatctcagatgtcatgatgaagtatctggacaacctctcgaccagtcagctcagcctagaaaagaagttggagcgggaacgacgaagaactcagcgctatttcatggaggcaaaccggaacacggtcacatgtcaccacgagctggcagtcctcagtcacgagacttttgagaaagcctccctgagttccagctcctctggcgctgccagcctgaaaagcgagctatccgagtccgccgacctgccccctgagggcttccaagcaagctatggcaaagatgaagatagggcttgcgacgaaatcctaagcgatgacaacttcaatctggagaatgctgaaaaagacacatactccgaggtggatgatgagctggacatttctgacaactcttccagctcatcctcaagtcccctgaaagagtccaccttcaacatcctgaagagatcattctcggcttctggcggtgaacgccagtcccagacccgggattttactggcggtaccgggtcgcgccctagaccggcacttctgcccttagatctgctcctgaaagtgccacctcacatgctgagggcccatatcaaagagatagaggctgaactcgtgacagggtggcagagccactctttgccagccgtaatcctgaggaacctcaaagaccatggttcaacatactag

SEQ ID NO: 327801 - protein, 725 aa, Artificial Sequence [sequence omitted]

SEQ ID NO: 327802 - protein, 133 aa, Artificial Sequence
  derived and/or modified sequence
MPDQDKKVKTTEKSTDKQQEITIRDYSDLKRLRCLLNVQSSKQQLPAINFDSAQNSMTKSEPAIRAGGHRARGQWHESTEAVELENFSINYKNERNFSKHPQRKLFQEIFTALVKNRLISREWVNRAPSIHFL

SEQ ID NO: 327803 - DNA, 291 bp, Artificial Sequence
  derived and/or modified sequence
atgcccgaccaggacaagaaggtgaagaccaccgagaagagcaccgacaagcagcaggagatcaccatcagagactacagcgacctgaagagactgagatgcctgctgaacgtgcagagcagcaagcagcagctgcccgccatcaacttcgacagcgcccagaacagcatgaccaagagcgagcccgccatcagagccggcggccacagagccagaggccagtggcacgagagcaccgaggccgtggagctggagaacttcagcatcaactacaagaacgagagaaactag

SEQ ID NO: 327804 - DNA, 402 bp, Artificial Sequence
  derived and/or modified sequence
atgcccgaccaggacaagaaggtgaagaccaccgagaagagcaccgacaagcagcaggagatcaccatcagagactacagcgacctgaagagactgagatgcctgctgaacgtgcagagcagcaagcagcagctgcccgccatcaacttcgacagcgcccagaacagcatgaccaagagcgagcccgccatcagagccggcggccacagagccagaggccagtggcacgagagcaccgaggccgtggagctggagaacttcagcatcaactacaagaacgagagaaacttcagcaagcacccccagagaaagctgttccaggagatcttcaccgccctggtgaagaacagactgatcagcagagagtgggtgaacagagcccccagcatccacttcctgtag

SEQ ID NO: 327805 - DNA, 291 bp, Artificial Sequence
  derived and/or modified sequence
atgcccgaccaggacaagaaagtgaaaacgaccgaaaagtcaacagataagcagcaggaaatcactatacgcgattactcagacctcaaacggctccggtgtctgctgaatgtgcaaagctccaagcaacaactccctgctatcaatttcgattccgctcagaattctatgacgaagagtgagcccgcaatcagggctggcgggcatagagccagaggccagtggcatgagtccaccgaagcggtcgagctcgaaaacttttccataaattataaaaacgaaaggaattag

SEQ ID NO: 327806 - DNA, 402 bp, Artificial Sequence
  derived and/or modified sequence
atgccagaccaggacaagaaggtaaaaacaaccgaaaaatcaacagacaagcaacaggaaatcacaatacgggattatagcgacctgaaacgtctacggtgtctgctgaacgtgcagtcctcaaagcagcaattgcccgccatcaactttgacagcgctcagaattctatgacaaagtcagaacccgcgatacgcgcaggaggccatcgcgctcgaggacagtggcatgagtctaccgaagcggtcgagctcgagaacttttctattaactataaaaacgagcgcaatttttctaagcacccgcaacggaagctttttcaggaaatcttcaccgctcttgtgaagaacaggctgatttcgagagaatgggtcaaccgagcgcccagtattcatttcctgtag

SEQ ID NO: 327807 - DNA, 291 bp, Artificial Sequence
  derived and/or modified sequence
atgccagaccaggacaagaaggtgaagaccacagagaagagcacagacaagcagcaggagatcaccatccgggactacagcgacctgaagaggctgcgctgcctgctgaatgtgcagagcagcaagcagcagctgcctgccatcaactttgacagcgcccagaacagcatgaccaagtctgagcccgccatccgggccggcggccaccgggcccggggccagtggcatgagagcacagaagctgtggagctggagaacttcagcatcaactacaagaatgaaagaaattag

SEQ ID NO: 327808 - DNA, 402 bp, Artificial Sequence
  derived and/or modified sequence
atgccagaccaggacaagaaggtgaagaccacagagaagagcacagacaagcagcaggagatcaccatccgggactacagcgacctgaagaggctgcgctgcctgctgaatgtgcagagcagcaagcagcagctgcctgccatcaactttgacagcgcccagaacagcatgaccaagtctgagcccgccatccgggccggcggccaccgggcccggggccagtggcatgagagcacagaagctgtggagctggagaacttcagcatcaactacaagaatgaaagaaacttcagcaagcacccccagaggaagctgttccaggagatcttcaccgccctggtgaagaacagactcatcagccgggagtgggtgaacagagcccccagcatccacttcctgtag

SEQ ID NO: 327809 - DNA, 291 bp, Artificial Sequence
  derived and/or modified sequence
atgcccgaccaggacaagaaggtgaagaccaccgagaagagcaccgacaagcagcaggaaattactattagagattattccgacctgaagcgtcttcggtgcctcctcaatgtgcagagcagtaaacagcaacttcctgcgatcaactttgactctgcccaaaactctatgacaaagagtgagcccgccattagggcagggggccacagggcccgcggccagtggcacgagagcactgaggcagttgaattggagaactttagtattaactacaagaacgaacggaactag

SEQ ID NO: 327810 - DNA, 402 bp, Artificial Sequence
  derived and/or modified sequence
atgcccgaccaggacaagaaggtgaagaccaccgagaagagcaccgacaagcagcaggagataactatccgcgattatagcgatttaaaacgcctgagatgcttgctgaatgtgcagtcttctaagcaacagctccccgcaataaacttcgacagcgcgcaaaactccatgacaaaatccgaaccagccataagagcaggaggacatagagcacgtggtcagtggcacgagtcaactgaggccgtagaactcgaaaatttttctataaactataagaatgagcgcaactttagcaagcacccacagagaaaactcttccaggagatctttacagcgctagttaagaaccgcttgataagccgagagtgggtcaatcgggctcctagtattcactttctctag

SEQ ID NO: 327811 - DNA, 653 bp, Artificial Sequence
  derived and/or modified sequence
ggtgcagctggccgcggtgtccctgaggttgaggggaccgggaataggctggggggaggacgggacgggctgagactggacgggacccccggtctgcagcagcaggtgacagcagcagggacaatgataaggagattggcctgaaggagggaccgtccctcccgcgcgtggtataaccagaagaattcacattcccagacttgtcaacttgcatcagtggagacagtggcattcatataatacacatgtgtatgctacacttgacacaatgtgaatactcatctttcctttaggaaaccttattgtcctgttcatgtatacttgaggaatgcgatgttaattctggggcattgatgttttacaatgcctgatcaagataaaaaggtgaagaccacagaaaaatcaactgataaacagcaagaaatcaccatcagggactattcagatcttaaaagacttcggtgccttttgaacgtccaatcaagcaaacaacagcttccagccattaacttcgatagtgcccaaaatagcatgacgaagtctgagcccgccatcagggcgggtggacacagagctcggggtcagtggcatgaatccacagaagctgttgaacttgaaaattttagtataaactacaagaatgagagaaattt

SEQ ID NO: 327812 - DNA, 671 bp, Artificial Sequence
  derived and/or modified sequence
gaattgtcggcattggcctggccagcgctggttggtggcctggaggaggatttgattggaaaaccaacggtgcagctggccgcggtgtccctgaggttgaggggaccgggaataggctggggggaggacgggacgggctgagactggacgggacccccggtctgcagcagcaggtgacagcagcagggacaatgataaggagattggcctgaaggagggaccgtccctcccgcgcggaatgcgatgttaattctggggcattgatgttttacaatgcctgatcaagataaaaaggtgaagaccacagaaaaatcaactgataaacagcaagaaatcaccatcagggactattcagatcttaaaagacttcggtgccttttgaacgtccaatcaagcaaacaacagcttccagccattaacttcgatagtgcccaaaatagcatgacgaagtctgagcccgccatcagggcgggtggacacagagctcggggtcagtggcatgaatccacagaagctgttgaacttgaaaattttagtataaactacaagaatgagagaaatttcagcaaacatcctcagcgtaaactatttcaggagatctttaccgccttggtgaaaaatagactcataagcagagagtgggttaatcgagccccatctattcattttct

SEQ ID NO: 327813 - DNA, 291 bp, Artificial Sequence
  derived and/or modified sequence
atgccagatcaagacaagaaagtcaagaccaccgagaaaagcacagacaaacaacaggagataaccatccgagactactctgatttgaaacggctgaggtgtcttttaaacgtgcagtctagcaaacagcaattacccgctatcaacttcgattcggctcagaactcaatgacaaaatcagaacctgcgattagggcaggtggccatcgcgcacgcggacagtggcatgaatctacggaggccgtggagcttgaaaatttctctatcaattacaagaacgaaagaaactag

SEQ ID NO: 327814 - DNA, 402 bp, Artificial Sequence
  derived and/or modified sequence
atgcctgaccaggacaaaaaggtgaagaccacagaaaagtcgacggataagcagcaagagattacaatacgcgattactccgacctcaagcgactaaggtgcttacttaacgtgcagagcagtaaacagcagctgccagcaatcaatttcgactctgcacaaaactcgatgacaaagtccgaacctgccatacgagccggtggccaccgggcaagaggacagtggcatgaatccactgaagcagtggaacttgaaaacttcagtataaactacaaaaacgaaagaaatttttccaagcacccccagcgtaaattgtttcaggagatctttactgccctcgtgaaaaaccgccttatctcaagagaatgggtgaatagagcaccttccatccactttttgtag

SEQ ID NO: 327815 - DNA, 771 bp, Artificial Sequence
  derived and/or modified sequence
cagcgctgaccattcagactatgagaacattccaaccatgaactcagactatgagaatatccagattctgccctggaggcctgcagggctggtgtgttcaggaagctgtttgaagatcagagcagagccctgtccacagcaaactaaaatgatggctatgtggacatgagcagcttcaacacctttaagaacaatcagcagagcacagaccaggacgcagaaaggagtggacaacacctggccccagctgagtgcctcctagcactgaggaaagcagaaccaagctttgcaacaatgaactctccttgctggaagagaccgcccacctctaacagaattttgtagctggaggaaacttcagacacaagtcctgttacagaagaggaaactggcacagagaggaaatggtgcttgcataaggtctctggacagagtcttgccctgttgcccaggctggagtatagtagtgcagtggtgtgatcatagctcactgtaacttcgaccacctgggctcaaacaatccttcttcctctgcctcccaagtagctgggactacagagcaggacccaggatgcaagaccctaggcatccccaaggccttccactgtccccaggccttccaaagagacagcggcaggaccgcacaatctacaactggaaacagcaggaagtgctagaaaatcactttaaggaggaacagtacccagactatgacacacgacaagagctggcggagatgctcaatctcagggagtaccaagtgcaggtgtg

SEQ ID NO: 327816 - protein, 1178 aa, Artificial Sequence
  derived and/or modified sequence
MGQDAEDTSEEPPEKEELAGVQEAETATDCPEVLEEGCEEATGVTGGEQVDLSEPPDHEKKTNQEVAAATLEDHAQDESAEESCQIVPFENDCMEDFVTSLTGSPYEFFPTESTSFCSESCSPLSESAKGLESEQAPKLGLRAEENPMVGALCGQCGSLQGGAAEGPAAPDVVVVLEEEALDDALANPYVMGVGLPGQAAPGEGGQAASDALGGYGSKEELNCEAEGGLVPADRKNTSTRVRPHSGKVAGYVPETVPEETGPEAGSSAPGIGGAAEEVGKTLLSLEGKPLEASRALPAKPRAFTLYPRSFSVEGREIPVSVYQEPEGSGLDDHRIKRKEDNLSLSCVIGSSGSFSQRNHLPSSGTSTPSSMVDIPPPFDLACITKKPITKSSPSLLIESDSPDKYKKKKSSFKRFLALTFKKKTENKLHVDVNVSSSRSSSESSYHGPSRILEVDRRSLSNSPQLKSRTGKLRASESPSSLIFYRDGKRKGVPFSRTVSRVESFEDRSRPPFLPLPLTKPRSISFPSADTSDYENIPAMNSDYENIQIPPRRPARAGAFTKLFEDQSRALSTANENDGYVDMSSFNAFESKQQSADQDAESAYTEPYKVCPISSAAPKEDLTSDEEQRSSEEEDSASRDPSVTHKVEGQSRALVIAQELLSSEKAYVEMLQHLNLDFHGAVMRALDDMDHEGRDTLAREELRQGLSELPAIHDLHQGILEELEERLSNWESQQKVADVFLAREQGFDHHATHILQFDRYLGLLSENCLHSPRLAAAVREFEQSVQGGSQTAKHRLLRVVQRLFQYQVLLTDYLNNLCPDSAEYDNTQGALSLISKVTDRANDSMEQGENLQKLVHIEHSVRGQGDLLQPGREFLKEGTLMKVTGKNRRPRHLFLMNDVLLYTYPQKDGKYRLKNTLAVANMKVSRPVMEKVPYALKIETSESCLMLSASSCAERDEWYGCLSRALPEDYKAQALAAFHHSVEIRERLGVSLGERPPTLVPVTHVMMCMNCGCDFSLTLRRHHCHACGKIVCRNCSRNKYPLKYLKDRMAKVCDGCFGELKKRGRAVPGLMRERPVSMSFPLSSPRFSGSAFSSVFQSINPSTFKKQKKVPSALTEDKVALESMPLLGFTIAPEKEEGSSEVGPIFHLYHKKTLFYSFKAEDTNSAQRWIEAMEDASVL

SEQ ID NO: 327817 - DNA, 3537 bp, Artificial Sequence
  derived and/or modified sequence
atgggccaggacgccgaggacaccagcgaggagccccccgagaaggaggagctggccggcgtgcaggaggccgagaccgccaccgactgccccgaggtgctggaggagggctgcgaggaggccaccggcgtgaccggcggcgagcaggtggacctgagcgagccccccgaccacgagaagaagaccaaccaggaggtggccgccgccaccctggaggaccacgcccaggacgagagcgccgaggagagctgccagatcgtgcccttcgagaacgactgcatggaggacttcgtgaccagcctgaccggcagcccctacgagttcttccccaccgagagcaccagcttctgcagcgagagctgcagccccctgagcgagagcgccaagggcctggagagcgagcaggcccccaagctgggcctgagagccgaggagaaccccatggtgggcgccctgtgcggccagtgcggcagcctgcagggcggcgccgccgagggccccgccgcccccgacgtggtggtggtgctggaggaggaggccctggacgacgccctggccaacccctacgtgatgggcgtgggcctgcccggccaggccgcccccggcgagggcggccaggccgccagcgacgccctgggcggctacggcagcaaggaggagctgaactgcgaggccgagggcggcctggtgcccgccgacagaaagaacaccagcaccagagtgagaccccacagcggcaaggtggccggctacgtgcccgagaccgtgcccgaggagaccggccccgaggccggcagcagcgcccccggcatcggcggcgccgccgaggaggtgggcaagaccctgctgagcctggagggcaagcccctggaggccagcagagccctgcccgccaagcccagagccttcaccctgtaccccagaagcttcagcgtggagggcagagagatccccgtgagcgtgtaccaggagcccgagggcagcggcctggacgaccacagaatcaagagaaaggaggacaacctgagcctgagctgcgtgatcggcagcagcggcagcttcagccagagaaaccacctgcccagcagcggcaccagcacccccagcagcatggtggacatccccccccccttcgacctggcctgcatcaccaagaagcccatcaccaagagcagccccagcctgctgatcgagagcgacagccccgacaagtacaagaagaagaagagcagcttcaagagattcctggccctgaccttcaagaagaagaccgagaacaagctgcacgtggacgtgaacgtgagcagcagcagaagcagcagcgagagcagctaccacggccccagcagaatcctggaggtggacagaagaagcctgagcaacagcccccagctgaagagcagaaccggcaagctgagagccagcgagagccccagcagcctgatcttctacagagacggcaagagaaagggcgtgcccttcagcagaaccgtgagcagagtggagagcttcgaggacagaagcagaccccccttcctgcccctgcccctgaccaagcccagaagcatcagcttccccagcgccgacaccagcgactacgagaacatccccgccatgaacagcgactacgagaacatccagatcccccccagaagacccgccagagccggcgccttcaccaagctgttcgaggaccagagcagagccctgagcaccgccaacgagaacgacggctacgtggacatgagcagcttcaacgccttcgagagcaagcagcagagcgccgaccaggacgccgagagcgcctacaccgagccctacaaggtgtgccccatcagcagcgccgcccccaaggaggacctgaccagcgacgaggagcagagaagcagcgaggaggaggacagcgccagcagagaccccagcgtgacccacaaggtggagggccagagcagagccctggtgatcgcccaggagctgctgagcagcgagaaggcctacgtggagatgctgcagcacctgaacctggacttccacggcgccgtgatgagagccctggacgacatggaccacgagggcagagacaccctggccagagaggagctgagacagggcctgagcgagctgcccgccatccacgacctgcaccagggcatcctggaggagctggaggagagactgagcaactgggagagccagcagaaggtggccgacgtgttcctggccagagagcagggcttcgaccaccacgccacccacatcctgcagttcgacagatacctgggcctgctgagcgagaactgcctgcacagccccagactggccgccgccgtgagagagttcgagcagagcgtgcagggcggcagccagaccgccaagcacagactgctgagagtggtgcagagactgttccagtaccaggtgctgctgaccgactacctgaacaacctgtgccccgacagcgccgagtacgacaacacccagggcgccctgagcctgatcagcaaggtgaccgacagagccaacgacagcatggagcagggcgagaacctgcagaagctggtgcacatcgagcacagcgtgagaggccagggcgacctgctgcagcccggcagagagttcctgaaggagggcaccctgatgaaggtgaccggcaagaacagaagacccagacacctgttcctgatgaacgacgtgctgctgtacacctacccccagaaggacggcaagtacagactgaagaacaccctggccgtggccaacatgaaggtgagcagacccgtgatggagaaggtgccctacgccctgaagatcgagaccagcgagagctgcctgatgctgagcgccagcagctgcgccgagagagacgagtggtacggctgcctgagcagagccctgcccgaggactacaaggcccaggccctggccgccttccaccacagcgtggagatcagagagagactgggcgtgagcctgggcgagagaccccccaccctggtgcccgtgacccacgtgatgatgtgcatgaactgcggctgcgacttcagcctgaccctgagaagacaccactgccacgcctgcggcaagatcgtgtgcagaaactgcagcagaaacaagtaccccctgaagtacctgaaggacagaatggccaaggtgtgcgacggctgcttcggcgagctgaagaagagaggcagagccgtgcccggcctgatgagagagagacccgtgagcatgagcttccccctgagcagccccagattcagcggcagcgccttcagcagcgtgttccagagcatcaaccccagcaccttcaagaagcagaagaaggtgcccagcgccctgaccgaggacaaggtggccctggagagcatgcccctgctgggcttcaccatcgcccccgagaaggaggagggcagcagcgaggtgggccccatcttccacctgtaccacaagaagaccctgttctacagcttcaaggccgaggacaccaacagcgcccagagatggatcgaggccatggaggacgccagcgtgctgtag

SEQ ID NO: 327818 - DNA, 3537 bp, Artificial Sequence
  derived and/or modified sequence
atgggccaagatgcggaagacacttcagaggaacctccagaaaaggaggagctcgcgggcgtgcaggaagccgagaccgcaacagattgcccagaggtgcttgaggagggttgcgaggaagctaccggagtcacaggcggggagcaggttgatctcagcgaaccccccgaccatgagaaaaaaactaaccaagaggtagcagctgccaccctggaggaccatgctcaagatgaatcagccgaagaatcctgtcagatcgtgcccttcgaaaatgactgtatggaggactttgtcacttctctaaccgggtcaccatacgagttttttcccactgagtccacaagtttttgctctgagtcgtgcagccccttgtcagaatctgccaaggggttagagagcgaacaggccccaaaactcggcctgagggctgaagagaatccgatggtgggcgctttatgcggccagtgcggctcactgcagggaggtgccgcagaaggaccagccgcacccgatgtggtggtggtgctggaggaggaagctttggacgatgcgttggcaaatccatacgttatgggcgtcggcttacctgggcaggcagcacccggagagggtggccaagctgcctctgacgccttgggagggtacggcagcaaagaagaactcaattgtgaggcagagggcggcctagtgcccgctgatagaaagaacacctcgacacgcgttcgtccacattctggaaaggtggccgggtacgttccagagacggtccccgaagagactggacccgaagcggggagttcagcacctggtatcggaggagctgcagaggaggtggggaaaacattgttgagcctcgagggaaaaccactggaggcgagtcgagccctgcctgctaaaccacgcgcgttcaccctttaccccaggagcttctcagtggagggccgggaaatacctgtcagcgtgtatcaggagcctgaggggagcggcctggatgatcaccgcattaagcggaaggaggacaacctctcactgtcttgtgtcattggatctagcggctccttttcgcaacgaaatcatctccctagtagtggtactagcacgccatcctctatggtggatattccacctccgtttgatctggcctgcatcacgaaaaaacctatcactaaatcatccccatctcttctcatcgagtctgattcgccggataaatacaaaaaaaagaaaagttcatttaagaggtttttagcactgacattcaagaaaaagactgaaaacaaactacacgtagacgttaatgtgagctcatctcgaagttcttcagaatctagttaccacggcccgtcacgaatcctggaagttgaccgcagatctttgtccaatagtcctcaacttaagagccgcacaggcaaattaagagcctcagaatcccctagctcactgatcttctatcgagatggcaagaggaaaggagtcccttttagccggaccgtctccagagtggaaagcttcgaggatcggtcccgacccccatttctgccattacccctcaccaagccccgaagcatctctttcccaagcgctgataccagcgactatgaaaacatcccggccatgaatagtgattacgagaacatccagatacctcccaggcgccccgcccgcgcaggagcttttaccaagctgttcgaagaccaaagccgcgcgctgtcaaccgccaatgagaacgacgggtacgtggacatgtcatccttcaacgctttcgaaagtaaacagcaatccgccgaccaagatgccgagtccgcctacacagagccctacaaagtgtgcccaataagttcagcagcccccaaggaagacctcaccagtgatgaagagcagcgatccagcgaggaggaggattctgcatctcgcgacccatcagttacccacaaagtggagggccaatcccgcgccctcgtcatcgcccaagagcttttgtccagtgaaaaagcatatgtggaaatgctgcagcacctgaacctggacttccatggcgcggtcatgagggcactagacgatatggatcacgagggtagagacacattggcccgggaggagttacgtcagggcctttcggagttacctgcaatacacgatctgcatcagggcatcctcgaagagctggaagagcgcctcagcaactgggagtctcagcagaaagttgctgatgtctttctggcacgcgagcagggattcgaccatcatgctactcacatcctgcagttcgatcggtacctgggcttgctgtccgagaattgcctgcactccccgagactcgccgcagccgtgagggagtttgagcagagtgtgcagggtggctcccagacggcgaaacatcgcttattacgggttgttcagaggctcttccagtatcaagtcctgttgacagattacctcaataacctctgccctgatagcgcagaatatgataacacccagggcgcactgtccctcatcagcaaagtgaccgatcgggccaacgacagtatggagcaaggagagaatctgcagaagttggttcacatcgagcacagcgtccggggtcagggagacctgttgcagccaggccgggaatttctcaaggaaggtactctgatgaaggtgacaggtaaaaacagacggccgcgtcacctttttttgatgaacgacgtgctgctgtacacgtacccgcagaaggacggcaagtatagactaaaaaataccctggcagttgcgaacatgaaggtgtcgagacccgtaatggaaaaggtgccgtatgcactcaaaatcgagacatccgaatcttgtctgatgctgtctgcatcttcctgcgctgaacgcgatgagtggtacggatgtctcagcagagcgcttccagaagattacaaagctcaggccttggcagccttccaccactccgtcgagatccgcgaacgactgggagtgtctttaggagagagacctccaacactggtcccagtcacccatgtgatgatgtgcatgaactgcggttgcgatttttctctgactctgaggcgtcaccactgccacgcatgtgggaaaatcgtatgtaggaactgttcccggaataaatatccacttaagtacctgaaggaccggatggcgaaagtttgcgacgggtgcttcggcgagctcaaaaagcgcgggagggcagtgcctggactaatgagagagagacctgtctccatgagcttcccgcttagctccccccgtttttcaggcagtgctttcagtagtgtgtttcagtcaattaacccatccacctttaagaagcagaaaaaggtccccagcgcccttacagaggataaagtagccctagaaagtatgccccttctcgggttcacgattgcacccgagaaagaggagggttccagcgaagtgggcccaatctttcacctctaccataaaaagactctgttctatagcttcaaggccgaagacactaattccgcccagagatggattgaggcaatggaggacgcaagcgttctgtag

SEQ ID NO: 327819 - DNA, 3537 bp, Artificial Sequence
  derived and/or modified sequence
atgggccaggatgctgaggacaccagcgaggagcccccagagaaggaggagctggccggcgtgcaggaggccgagacagccacagactgcccagaggtgctggaggagggctgtgaggaggccaccggggtgactggaggagagcaggtggacctgtctgagcccccagaccacgagaagaagaccaaccaggaggtggccgccgccaccctggaggaccacgcccaggatgaatctgctgaggagagctgccagatcgtgccctttgaaaatgactgcatggaggactttgtgaccagcctgaccggcagcccctatgagttcttccccacagagagcaccagcttctgcagcgagagctgcagccccctgtctgagagcgccaagggcctggagagcgagcaggcccccaagctgggcctgcgggcagaggagaaccccatggtgggcgccctgtgtggccagtgtggcagcctgcagggcggcgctgctgagggccctgctgccccagatgtggtggtggtgctggaggaggaggccctggatgatgccctggccaacccctacgtgatgggcgtgggcctgcccggccaggccgcccctggagagggcggccaggccgccagtgatgccctgggcggctacggcagcaaggaggagctgaactgtgaggccgagggcggcctggtgcctgctgacaggaagaacaccagcaccagggtgcggccccacagcggcaaggtggccggctacgtgcctgagaccgtgcctgaggagaccggccctgaggccggcagcagcgcccctggcattggaggagctgctgaggaggtgggcaagaccctgctgagcctggagggcaagcccctggaggccagccgggccctgcctgccaagccccgggccttcaccctgtaccccaggagcttctctgtggagggccgggagatccctgtgtctgtgtaccaggagcctgagggcagcggcctggatgaccaccgcatcaagaggaaagaagacaacctgagcctgagctgtgtgattggcagcagcggcagcttcagccagaggaaccacctgcccagcagcggcaccagcacccccagctccatggtggacatccccccaccatttgacctggcctgcatcaccaagaagcccatcaccaagagcagccccagcctgctgattgaaagtgacagcccagacaagtacaagaagaagaagagcagcttcaagcgcttcctggccctgaccttcaagaagaagacagagaacaagctgcacgtggatgtgaatgtgagcagcagccgcagcagcagcgagagcagctaccacggccccagccgcatcctggaggtggaccggcgcagcctgagcaacagcccccagctgaagagcaggacaggcaagctgcgggccagcgagagccccagcagcctcatcttctacagagatggcaagaggaagggcgtgcccttcagcaggacagtgtcccgggtggagagctttgaagatagaagccggccccccttcctgcccctgcccctgaccaagcccaggagcatctccttccccagcgctgacaccagtgactatgagaacatcccagccatgaacagcgactatgagaacatccagatccccccaagaagacctgcccgggccggggccttcaccaagctgtttgaggaccagagccgggccctgagcacagccaatgaaaatgatggctacgtggacatgagcagcttcaatgcctttgagagcaagcagcagagcgctgaccaggatgctgagagcgcctacacagagccctacaaggtgtgccccatcagcagcgctgcccccaaggaggacctgaccagtgatgaggagcagaggagcagcgaggaggaggacagcgccagccgggaccccagcgtgacccacaaggtggagggccagagccgggccctggtgattgcccaggagctgctgagcagcgagaaggcctacgtggagatgctgcagcacctgaacctggacttccacggggctgtgatgagggccctggatgacatggaccacgagggccgggacaccctggcccgggaggagctgcggcagggcctgtctgagctgcctgccatccatgacctgcaccagggcatcctggaggagctggaggagcggctgagcaactgggagagccagcagaaggtggctgatgtgttcctggcccgggagcagggctttgaccaccacgccacccacatcctgcagtttgaccgctacctgggcctgctgtctgagaactgcctgcacagcccccggctggccgctgctgtgcgggagtttgagcagagcgtgcagggcggcagccagacagccaagcaccggctgctgcgggtggtgcagaggctcttccagtaccaggtgctgctgacagactacctgaacaacctgtgcccagacagcgcagaatatgacaacacccagggcgccctgagcctcatcagcaaggtgacagaccgggccaatgacagcatggagcagggcgagaacctgcagaagctggtgcacatcgagcacagcgtgcggggccagggcgacctgctgcagcccggccgggagttcctgaaggagggcaccctgatgaaggtgacaggcaagaacagaagacccaggcacctgttcctgatgaatgatgtgctgctgtacacctacccccagaaggatggcaagtaccgcctgaagaacaccctggccgtggccaacatgaaggtgtccaggcctgtgatggagaaggtgccctatgccctgaagattgagaccagcgagagctgcctgatgctgagcgccagcagctgtgccgagagagatgagtggtacggctgcctgagccgggccctgcctgaggactacaaggcccaggccctggccgccttccaccacagcgtggagatccgggagcggctgggcgtgtccctgggggagaggcctcccaccctggtgcctgtgacccacgtgatgatgtgcatgaactgtggctgtgacttcagcctgaccctgcggcggcaccactgccacgcctgtgggaagatcgtgtgcaggaactgcagcaggaacaagtaccccctgaagtacctgaaggacaggatggccaaggtgtgtgatggctgcttcggggagctgaagaagaggggccgggctgtgcccggcctgatgagggagaggcctgtgtccatgtccttccccctgagcagcccccgcttcagcggcagcgccttcagctctgtgttccagagcatcaaccccagcaccttcaagaagcagaagaaggtgcccagcgccctgacagaggacaaggtggccctggagagcatgcccctgctgggcttcaccatcgcccctgagaaggaggagggcagcagcgaggtgggccccatcttccacctgtaccacaagaagaccctcttctacagcttcaaggccgaggacaccaacagcgcccagcgctggattgaggccatggaggatgcctctgtgctgtag

SEQ ID NO: 327820 - DNA, 5108 bp, Artificial Sequence
  derived and/or modified sequence
gggaacaaagccctggtgtctcccgagtcctctgcggaagaggaagaggagcgtgaagagggaggcgaggcatgtggcctggagggtacaggagctggtgaggattcagtggcccctgctgctccgggtgcaggagcgctgagcagggagggtgaggaaggcacagaccttgctcttgaggatgaaggggagggctgcgctgatgagccagggacactggagcaggtgtccagaagtgaggaggaagagaagctagtgcagccacacagggagtgcagcctggaggacagtgggccttgggctggagagggggtcttccagagcgacctcctcctgcctcacatccatggagaggaccaggagccccccgacacccccggggaggcagaggaggatgatgaggaaggctgtgccagcacagacccagcaggggcagatgagggttcgggtcctgacaggcccacggaggacatgggacaggatgctgaggacaccagtgaggagccccctgagaaggaggagctggccggggtccaggaggcagagacagccacagactgccctgaagttcttgaggagggatgtgaagaggccacgggtgtcacaggtggggaacaggttgacctcagtgaaccacctgaccacgagaagaaaaccaaccaagaagtggcagccgccaccctggaggaccatgcacaggatgagtccgccgaggagagctgccagattgtcccttttgagaatgactgcatggaggacttcgtgacttccctcacaggaagcccctatgagttcttcccaactgagagcacctctttttgcagcgagagctgttctcctctttctgaatcagcgaaaggtttagaatcagagcaggcaccaaagctggggctgcgtgcggaggagaaccccatggtgggggctttgtgtggccagtgtggctccctacagggtggagcggccgagggtcccgcagcccctgatgtggtggtcgtgctggaggaggaggccttggatgatgcactggccaacccctatgtgatgggagtgggcctgcccggtcaggcggcccctggagaaggagggcaggctgcatcggacgccctgggtggttatggctcgaaagaagaattgaactgtgaggcagagggtggcctggttcccgcggacaggaagaacaccagcacgagggtccggccccactctgggaaggtggccggctatgtcccagaaaccgtccctgaagaaaccggacctgaggcgggctcgtcagcccctggcattggaggtgccgcagaggaggtgggaaagacgcttttgtcattggaggggaagcccttggaagccagcagggccttgccagcaaagcccagggcctttactttataccctcggtcgttctccgtggaaggccgagagattccagtgtccgtgtaccaggagcctgaggggtcagggttggatgaccacaggataaagaggaaagaggacaatctctctctgtcgtgtgtaattggctcctctgggagtttctcccagagaaaccaccttccgtccagcggcacctccacgccttcttccatggtcgacatcccacctcctttcgacctggcctgcatcaccaagaagcccatcacaaagagctctccctcactcctgatcgagagcgactccccggacaagtacaagaagaagaagtcatcctttaagcgcttcctggcactgacgtttaagaagaagacggagaacaaattgcatgtggatgtgaacgtgtcttcctctaggtcctcttcagagtccagctaccacgggccttccaggattctggaagttgaccggagaagcctcagcaactcccctcagcttaagtctcggactgggaagctccgggcttctgaatccccctcctccctcatcttttatagagatggcaagaggaaaggtgtccccttcagcaggacggtgtccagagtggagtcctttgaagaccgctcccggccgcccttcctgcccttgccactgaccaagccacggtccatctccttccccagcgctgacacttcagactatgagaacattccagccatgaactcggactatgagaatatccagattccaccccggagacctgccagggctggcgcgttcacgaagctgtttgaagatcagagcagagccctgtccacagcaaacgaaaatgatggctacgtggacatgagcagcttcaacgcctttgagagcaaacagcagagtgcagaccaggacgcagaaagcgcctacacagagccctacaaagtctgtcccatctcgtcggcagcccccaaagaggaccttacgtcggatgaagagcagagaagctcggaggaggaggacagtgcttcaagagaccccagtgtcacccacaaggtggaaggacagtccagagcccttgtcatcgcacaggaactgctatcttcagagaaagcatacgtggagatgctccagcacttaaatctggatttccatggagctgtcatgagggccttggatgacatggaccatgaaggcagagacacattggcccgggaggagctgaggcagggcctgagtgaactcccagccatccacgaccttcatcaaggcatcctggaggagctggaggaaaggctgtcaaattgggagagccagcagaaggtagctgacgtcttcctggcccgggagcaggggtttgatcaccacgccactcacatcctgcagttcgacaggtacctaggtctgctcagtgagaattgcctccactctccccggctggcagctgctgtccgtgaatttgagcagagtgtacaaggaggcagccagactgcgaagcatcggctgctgcgggtggttcaacgcctcttccagtaccaagtgctcctcacagactatttaaacaacctttgtccggactccgccgagtacgacaacacacagggtgcactgagcctcatctccaaagtcacagaccgtgccaacgacagcatggagcaaggggaaaacctgcagaagctggtccacattgagcacagcgtccggggccaaggggatctcctccagccaggaagggagtttctgaaggaagggacgctgatgaaagtaacagggaaaaacagacggccccggcacctatttctgatgaacgatgtgctcctgtacacctatccccagaaggatgggaagtaccggctgaagaacacattggctgtggccaacatgaaggtcagccgccctgtgatggagaaagtgccctacgctctaaagattgagacttccgagtcctgcctgatgctgtctgcgagctcctgtgcagagagggacgagtggtatggctgtctgagcagagccctccctgaggactacaaggcccaggcgctggctgcattccaccatagcgtggagatacgagagaggctgggggttagccttggggagaggccccccaccctggtgcctgtcacacacgtcatgatgtgcatgaactgcggctgcgacttctccctcaccctgcggcgtcatcactgtcacgcctgtggcaagatcgtgtgccggaactgttcgcggaacaagtacccgctgaagtacctgaaggacaggatggccaaggtctgcgacggctgcttcggggagctgaagaagcggggcagggctgtcccgggcctgatgagagagcggcctgtgagcatgagcttcccgctgtcttcaccccgcttctcgggcagtgccttttcatccgtcttccagagcattaacccctcgaccttcaagaagcagaagaaagtcccttcagccctgacagaggacaaagtggccttggagagtatgcctctgctaggcttcaccattgctccagaaaaggaagagggcagcagtgaagtaggacctatttttcacctttaccacaagaaaaccctattttatagcttcaaagcagaagataccaattcagctcagaggtggatcgaggccatggaagatgcgagtgtgttatagcagttatcaagcatgtggacttgtaacaaattcttaggtcaatatgtgaatgcttttagaagctaagctgtggctcaactcatccggacacacacctggattcagcaatgaggcctgaccttttttgctataaccgccccaccactcccctgcccttgccaacatcttcatgaatggaatccttaagggatatttatggacctctccttttctgtgttttccacccctacccccacccgccacccagtaataaactatttccttaccccgcagtgagttaaaatttagtaagatgaagatgtggaaaccaatgaaaagtacatttagaaatgcaggctttttagtagaaagaagctcttacagtttttactcatgataaatcttatcacctttcaaaaattgattgtggtgcctcaggtgaaatgagaagctatcagtaacagctactctcatcgaaagcactttattattttacggagctgcaacctccaattttgtgttttctaagtgatttacttaagtcaataacagatggaatcctgtggactaatgtgccaccagttttctaacaagggtgtacataaaatggatttgtgcagacctggctgtggcttgctggtgtgcaagcacacatcactttagaggggctgcgccccaccagataggaaggggaggattttctcctccagtcgaccttgtgacctgtatactaacataacttattaaaggaggggtccctcctcccccagagcagtcctcaacactatgtcagtgctggaaatgcagccactggcagatctggccccccagacgtcaccgcagggcctctgaagagtcaaggtctgctttaatttattgtgtgcctttctgtgtttacctcactcaagctgacaacattgtttatgggaatctatccttcttttagacacacggtaatccttgggctgtattactgaaggctttttattttttgagaggtgaaaaaaagagaaaacaagttagactccaaaggtgaattcctggtcttggcagatggctctgggaacagcgagggagcacagaagtcgtggcctgaggctgttctatgggcacttggggct

SEQ ID NO: 327821 - DNA, 3537 bp, Artificial Sequence
  derived and/or modified sequence
atgggccaggacgccgaggacaccagcgaggagccccccgagaaggaggagctcgccggcgtacaggaagcagaaaccgccacagactgccccgaagtcttggaggaagggtgcgaggaggctacaggggtgacaggaggcgagcaggtagacctctccgaaccccccgaccacgagaaaaaaactaatcaggaggtggcggctgccaccctggaggaccacgcccaagatgagtcggctgaggagtcttgccagatcgtccctttcgagaacgattgtatggaggactttgtgactagcctcaccggaagtccctacgagttcttcccaacagagtctacttctttctgctctgaaagctgctcgcctctctccgaatccgccaagggcctggagtccgagcaggctccaaagctagggctgagagctgaagagaacccaatggtgggggctttgtgtggccagtgtggttctttgcagggaggggcggcggagggccccgctgcccctgacgtcgtggttgtccttgaagaagaggctctggatgacgccctcgctaatccctacgtgatgggggttggattacctgggcaagcagcgcctggtgagggtggccaggccgcgtctgatgcactcggcggttacggaagcaaagaggaactcaactgtgaagcagagggcggactggtccccgccgaccggaaaaatacatccacccgtgtgcgtccccactcaggcaaggtggccggctatgtccccgagaccgtgcctgaagagacaggccccgaggcgggatcaagtgcgccggggatcggaggtgcagcagaagaagtcggcaagaccctcttgagtctggagggcaaacctctggaggcttccagagctctgccagccaaaccacgggcatttactttgtaccctcgttctttttcagttgagggacgggagattcccgtgagcgtctaccaggagccggaggggagcggactggacgatcacagaatcaaaaggaaagaggacaatctatcactaagctgcgtaatcggctcatcggggtctttcagccagcggaaccatcttcctagctcggggacctcaactccgtcctcaatggtggacatcccccctcccttcgacttagcttgtattacaaagaaacctattaccaagagttctccttcactactgattgagtcagactcaccagacaagtacaagaaaaagaagtcctcctttaagaggttcctcgcactaacttttaaaaagaaaaccgaaaataaattacacgtcgacgttaacgtctcttcctctaggtcctcttctgagagctcttaccacgggccctcgcggattttggaggtggatcggcgctccttgagcaatagtccacagctgaagtcccgcacggggaaactcagagcaagcgagtccccctcttcgctgatattttacagggacggcaagaggaagggagttccattctctaggacggtatcgcgcgtcgagtcctttgaagaccgctcacgcccacccttcctgccgctccccctgaccaagccaagatctatctccttcccatcagccgacacttcagattatgaaaatatccctgcaatgaacagtgattatgagaatatacagatccctccgagacgtccagcacgggccggggcctttaccaagttgttcgaggatcagagcagggccctgtcaaccgctaatgagaatgacggctacgtcgacatgtcttcttttaacgcatttgaaagcaagcagcagtctgcagatcaggacgcagagtcagcctacacggaaccctacaaggtctgcccaatcagctccgctgctcctaaagaagaccttacaagcgacgaggagcaacgctcttccgaagaagaggactcagctagccgcgatccctctgtaacacacaaggtggaaggtcagtctcgggccttagttatcgcccaggagctgctgtcctctgagaaggcttacgttgaaatgctccagcatttaaacctcgactttcatggagccgtgatgcgcgcgctggacgatatggatcacgaaggcagggacacactggccagagaagaactgcggcagggtctcagtgagctaccggcaattcacgatttacaccagggaatacttgaggagctggaggagcgactgtcaaactgggagagtcagcaaaaagtggcggacgtctttctcgccagagaacagggcttcgatcaccatgcgacgcacattctgcagtttgacagatatttaggcctcttatccgaaaactgcttgcactcaccacggctcgcggccgctgtcagggaattcgagcaatctgtccagggcggcagccaaaccgccaaacatcgtctattgcgggtggttcaacggctgtttcagtaccaggtgttgctgactgactacctgaataatctgtgccctgattccgccgaatatgataatacccagggcgctctgtccctgatttcaaaagtgacggatcgggccaatgattctatggagcaaggcgagaaccttcagaagttagtacatatagaacattcagtccgcggccagggagatctgcttcaaccaggacgtgaattcctcaaagaaggtactttaatgaaagtgactggcaaaaaccgtcgtccaaggcacctcttcctgatgaatgacgtgctcctctatacctatccccaaaaggatgggaagtatcgtctgaaaaacactttggcagtcgccaacatgaaagtatctcgccctgtgatggagaaggttccctatgccttgaagattgagactagcgaaagctgtttgatgctgagtgcctcttcctgtgctgagagagatgaatggtacggctgcctgagtcgagcactgcctgaagactacaaagcgcaggccctagcagccttccatcactctgtggaaatccgggagcggcttggcgtatctctgggcgagcgccctcccactcttgtgccagttacccacgtcatgatgtgtatgaactgcgggtgtgactttagtctcaccctgagaagacaccactgtcatgcctgcgggaaaatcgtttgccgcaattgtagtaggaacaagtatcccctgaaatacctaaaggacagaatggctaaggtgtgtgacgggtgcttcggtgagttgaaaaaaagaggtcgcgcagtccccggtctcatgcgcgaaaggcccgtgagcatgtcattcccgctgtcatctcccaggttctccggcagcgcttttagttctgtgtttcagtcaatcaatccttcaacatttaagaagcagaaaaaagtgccaagtgctctcacggaagataaagtggccctcgagagcatgcctttacttggcttcaccatcgccccagagaaggaggagggaagtagtgaggtgggaccgatattccatctataccacaagaagacactgttttattcctttaaggctgaagatactaatagtgcccagaggtggatcgaggctatggaggatgcctctgtgctgtag

SEQ ID NO: 327822 - DNA, 3537 bp, Artificial Sequence
  derived and/or modified sequence
atggggcaggatgctgaagacacatccgaagagcccccagagaaagaggaacttgctggagtgcaggaagcagaaactgcaactgactgccctgaggttctcgaggaaggctgcgaggaagctactggcgtgaccggcggtgagcaagtggatttgagcgaacctccagaccacgagaaaaagactaaccaggaagtcgctgccgcaactctcgaggaccacgcccaggatgagtcggcagaggaatcatgtcaaattgtgcctttcgaaaacgattgcatggaagactttgtcacctctttaactggttctccatatgagtttttccccaccgagagcacctctttttgctcagagtcatgcagtccactcagcgagtcagctaaagggctggagtctgaacaggccccaaagctggggttgcgtgccgaggaaaaccccatggtgggcgcactgtgcggccagtgtggcagccttcagggcggagccgcagaaggccctgccgcacccgatgtggtcgtggtgctcgaagaggaagcgctcgatgatgccctggccaacccttacgtcatgggcgtggggcttccgggacaggctgcccctggggagggcggacaagctgcatctgacgctttgggcggatacggaagcaaagaggagctgaattgcgaagccgagggaggcctggtgcccgctgaccgaaagaacacttctacccgggtaaggccccacagtgggaaggtcgcaggctatgtgccagagacagtgccagaggaaacaggaccagaagccggtagtagcgctccaggcatcggaggcgctgctgaagaagtggggaaaactctgttgtccttagaaggtaaacccctggaagcaagtcgagcactccctgctaagcccagggcctttaccctgtatccaaggagcttctccgtggaagggcgtgagataccagtgtctgtttaccaggaacctgaaggcagcggccttgacgaccatagaatcaaacgaaaggaggataacctgtcactgtcatgtgttatagggagcagtggcagttttagtcagcgcaaccatctcccatcctctggcacatccaccccatcatccatggtggatatccccccaccattcgatcttgcatgcattaccaagaagccgatcacaaagtccagccctagcttattaatcgaatctgacagcccagacaaatataagaagaagaagagctccttcaagagattcttggcattgactttcaaaaaaaagacagagaacaagcttcacgttgacgttaacgtgagctcatcacggtccagctccgaatcatcttaccatggaccatcacgaattctcgaagtggaccggaggagtctcagcaattcgccgcaactgaagtcccgcaccggaaagttgagggcttcagagtccccaagcagtctgattttctaccgcgacggaaaacgcaaaggtgttccattttcaagaacagtcagcagagttgagagttttgaggacaggagtaggccacctttcctgccattaccgctgactaaaccaagatccatttccttcccgtccgccgacacctcggactacgagaacatccccgctatgaactccgactacgaaaatatacagattccaccgcgtagacccgctagagcgggtgcctttaccaagctctttgaagaccaaagtcgcgctctcagcactgccaacgaaaacgacgggtatgtcgatatgtcatccttcaatgcatttgaatccaagcagcagtctgcagatcaggatgccgaaagtgcatatacggagccatacaaggtctgtccaatctcctcagctgccccaaaagaagacttaacctcagatgaggagcagcgctcgagcgaggaggaggacagcgcttctcgggacccttctgtgacccacaaggtggagggccagtcacgcgcattagtcattgcgcaggaactcctgtcttctgagaaagcctacgtagagatgttgcagcatctgaatctcgacttccatggtgcagtgatgcgggcactggacgatatggatcacgaaggtcgggacacattggccagggaagagctccgccaaggcctgtctgagcttccggcaatacatgacttgcatcaaggcatcctggaggaactggaggagagactcagcaactgggaaagccagcagaaagttgccgacgtttttctggccagggaacaggggtttgaccaccacgccacacacattttgcagtttgatagatatcttggtctgctttctgaaaactgcttgcatagccccagactagccgcagcagtgcgggaattcgagcagagcgtgcaagggggatcacagactgcaaagcaccggttgttaagggtagtccagcgcttatttcaataccaggtactgctgactgattatctcaacaacctgtgcccagactccgctgagtacgataacactcagggcgctctgagtcttatctctaaggtcaccgaccgggctaacgattccatggagcagggagagaacctgcaaaagctggtgcatatcgagcacagcgtccgcggtcagggggacctcttacagcctggccgagagttcctgaaggaaggaaccctaatgaaggtgacggggaagaaccgtcggccacggcatctctttctgatgaacgacgtgctcctgtacacataccctcaaaaggatggcaaatatcggcttaagaacacccttgcagtcgctaatatgaaggtgtcacggcctgtgatggagaaggtgccatacgcactgaagatagaaacctccgaatcctgcttaatgcttagcgcgagcagctgtgcggagagagatgaatggtatgggtgtctgagccgagctctgccagaagattacaaagcacaggccctggcagcttttcaccatagtgtggagatacgggagcgattaggcgtgagtcttggagagaggccaccaacgctcgtacctgttacacacgtcatgatgtgcatgaactgtggctgcgacttttccttgacactgaggcggcatcattgtcacgcctgtggcaagattgtgtgtagaaactgcagtcgcaacaagtatccccttaaatacttgaaggatcggatggcaaaggtgtgtgacggctgctttggagagcttaagaagaggggacgggcagtccccggtctgatgcgcgaaagacctgtctctatgtctttcccactttcgtccccgagatttagcgggtctgccttttcttcagtgttccagtccattaatccaagcacattcaagaaacagaagaaagtgcctagcgcactgaccgaagataaagtggccctggaatcaatgccgctgctcggctttaccattgcccctgagaaagaagaaggctctagcgaggttggaccaatctttcatctttaccacaaaaagactctcttctattcattcaaagcggaggacactaattccgcgcaacggtggattgaggcaatggaagatgctagcgtcctatag

SEQ ID NO: 327823 - DNA, 533 bp, Artificial Sequence
  derived and/or modified sequence
agagccctgtccacagcaaactaaaatgatggctatgtggacatgagcagcttcaacacctttaagaacaatcagcagagcacagaccaggacgcagaaagattatttatgaaaactgcaatagtcatcatttaaagttatggaactgtgtccggaattggtgggttcttggtctcactgacttcaagaatgaagccgcggacccttgcgacagagtcttgccctgttgcccaggctggagtatagtagtgcagtggtgtgatcatagctcactgtaacttcgaccacctgggctcaaacaatccttcttcctctgcctcccaagtagctgggactacagaacagagcaggacccaggatgcaagaccctaggcatccccaaggccttccactgtccccaggccttccaaagagacagcggcaggaccgcacaatctacaactggaaacagcaggaagtgctagaaaatcactttaaggaggaacagtacccagactatgacacacgacaagagctggcggagatgctcaatc

SEQ ID NO: 327824 - protein, 807 aa, Artificial Sequence
  derived and/or modified sequence
MGEYEPKIEVQFPETVPTAKGATVKLECFALGNPVPTIIWRRADGKPIARKARRHKSNGILEIPNFQQEDAGLYECVAENSRGKNVARGQLTFYAQPNWIQKINDIHVAMEENVFWECKANGRPKPTYKWLKNGEPLLTRDRIQIEQGTLNITIVNLSDAGMYQCLAENKHGVIFSNAELSVIAVGPDFSRTLLKRVTLVKVGGEVVIECKPKASPKPVYTWKKGRDILKENERITISEDGNLRIINVTKSDAGSYTCIATNHFGTASSTGNLVVKDPTRVMVPPSSMDVTVGESIVLPCQVTHDHSLDIVFTWSFNGHLIDFDRDGDHFERVGGQDSAGDLMIRNIQLKHAGKYVCMVQTSVDRLSAAADLIVRGPPGPPEAVTIDEITDTTAQLSWRPGPDNHSPITMYVIQARTPFSVGWQAVSTVPELIDGKTFTATVVGLNPWVEYEFRTVAANVIGIGEPSRPSEKRRTEEALPEVTPANVSGGGGSKSELVITWETVPEELQNGRGFGYVVAFRPYGKMIWMLTVLASADASRYVFRNESVHPFSPFEVKVGVFNNKGEGPFSPTTVVYSAEEEPTKPPASIFARSLSATDIEVFWASPLEKNRGRIQGYEVKYWRHEDKEENARKIRTVGNQTSTKITNLKGSVLYHLAVKAYNSAGTGPSSATVNVTTRKPPPSQPPGNIIWNSSDSKIILNWDQVKALDNESEVKGYKVLYRWNRQSSTSVIETNKTSVELSLPFDEDYIIEIKPFSDGGDGSSSEQIRIPKISNAYARGSGASTSNACTLSAISTIMISLTARSSL

SEQ ID NO: 327825 - DNA, 8305 bp, Artificial Sequence
  derived and/or modified sequence
gacttctcaggcaccaccagcagcgccaccgagagttattattattttttgaccaagcagcacatttcctggttcagtggcttgagctctgtgagcagctgactagtcaccccgggtctggctcaggatcagctggtgacgctgggctggagtctatgacttcttccttcagattgtcatgaagaaggggagttaagaggaaactgggggtcctccggaaggcgatctgagcactcaggctgatctagaggaagagtagaagtcatactttttttctcttgcttggtgaattccccagcagagtctggatccagcagtgctgttttccctgagggaatgtggagcagctcggcttgagtctgttgccagcttcaggaagggttcagactgaaaagggggtttgaggagaagatgctttggctgcctgaggtcctgcttgcgttcttagaagtcagatccagggagaaagtgaactgggacaattgacaagctccaagggtctggcagaagcttcctccgagactgggcatttcatcctccctggaggaagatctgcctgcactgcaagtgtccccaggaggagcacatggtgacagtgatgccgctggagatggagaagaccatcagcaaactcatgtttgactttcagaggaactcgacctcagatgatgactcaggctgtgctttggaagagtatgcctgggtcccgccgggtctgaagcctgaacaggtacaccagtactatagctgtctcccagaagagaaagtcccttatgtcaacagtcctggagagaaactgcgaatcaagcagctactacaccagctgccgccacatgacaatgaggttcgatattgcaactccctggatgaggaagagaagagggagctgaagcttttcagcagccagaggaaacgcgaaaacttgggccgcgggaatgtcaggcctttcccagtcaccatgacaggagctatttgtgaacagtgcggaggccagatcaatggtggagacatcgctgtgtttgcgtcacgcgctggccacggcgtttgctggcacccgccgtgcttcgtatgcactgtctgcaatgagctcctggtggatctgatctacttttaccaagatgggaagatatactgtggcaggcaccatgctgagtgcctgaagccgcgctgtgctgcctgcgatgagatcatctttgcagatgaatgcacagaagctgaggggcgacactggcacatgaaacacttttgctgcttcgagtgtgagacagtgctgggcggccagcgctacatcatgaaggagggaagaccctactgttgccactgcttcgagtccttgtatgcagaatattgtgacacctgtgcccaacatataggtatcgaccaaggtcaaatgacctatgatggccaacactggcatgccactgagacctgtttctgctgtgctcactgcaagaaatccctcctggggcggccattcctcccgaagcagggccagatattctgctcacgggcctgcagtgctggggaagaccccaatggttctgactcctctgattccgccttccagaacgccagggccaaggagtcccggcgcagtgccaaaattggcaagaacaagggcaagacggaggagcccatgctgaaccagcacagccagctgcaagtgagttctaaccggctgtcagccgacgtagaccccctgtcactgcagatggacatgctcagcctgtccagccagacacccagcctcaaccgggaccccatctggaggagccgggaagagccctaccattatgggaacaagatggagcagaaccagacccagagccctctgcagctcctcagccagtgcaacatcagaacttcctacagtccaggagggcaaggggctggggcccagcccgaaatgtggggcaagcacttcagcaaccccaaaaggagctcgtcactggccatgacaggacatgctggcagcttcatcaaggaatgccgagaagactattacccggggaggctgagatctcaggagagctacagtgatatgtctagtcagagtttcagtgagacccgaggcagcatccaagtccccaaatatgaggaggaagaggaagaggaagggggcttgtccactcagcagtgtcggacccgtcatcccatcagttccctgaaatacacagaggacatgacgcccacagagcagacccctcggggctccatggaatccctggccctgtctaatgcaacaggcctctctgctgatggtggtgccaagcgccaggagcacctatcccgattttccatgcctgacctcagcaaagactctggaatgaatgtgtctgagaagctgagcaacatgggcactcttaactcgtccatgcagttccggagcgcagagtcagttcgcagcctgctctctgcccagcagtaccaggagatggagggaaacctccaccagctcagcaaccccattggctacagagacctgcagtcccacggaaggatgcatcagagctttgattttgatggagggatggcgggcagcaagctgccagggcaggagggcgtgaggatccagcccatgagtgaacgcacccggagaagagctacttcacgcgacgacaaccgccgtttccgacctcacaggtccaggcgttcccgacgctctcgctccgacaacgccctccacctggccagcgaacgcgaggccatctcccggttaaaagataggccccctctgagagccagggaggactatgaccaatttatgcgccagcggagcttccaggagagcatggggcatgggtcccggagggacctgtacggccagtgccctaggactgtgtcggacctggctttgcagaatgcctttggggaccgctggggaccctacttcgccgagtatgattggtgttccacctgctcctcctcttcagagtctgacaacgagggctatttcctaggagaacccatcccccagccagcgcgcctgcgatacgtcacaagcgatgagctgctgcacaaatacagctcctacggcctccccaaatcttccacattaggtggcagaggacagttgcacagcaggaaaagacagaagagcaaaaactgtatcatttcttaatatgattgggatcagggaatgggagaagatgggagctaagaatgtaaagtcagaaacttgcactgttttaaatgttaaagcgcttttgggggtggcttatgggggagaaaagggaaaatgctgtcagtagatggaggcaaggttacaggttgactcaataggtagtcacagttcttggcatgttgaatattatttgcacatttcactttggaaacacagtagactctatcgaggccaggcttggtcacttccttcccatcagttctgtgttgagttgccatctctcaagatggtaaattgtttcctgctcgcttttatcctctctggttctcttacttttaggacccttttttcagtaagtaatttgtttattagccaggacccaagactaagttatttacatgtccattgtaaatgcaatgtaaatgagagttctgataaaatatttttgtattttgtaatatcaaaggaatttctatatcgtaggactcagtggggacttgcatgcacatccaccattgtctctgagtagtattgaaatgtggcccggtaccaccttttttttttttttttttttttctatacaaatttgttacatgtcagtgagacctttttcaaaggaacatattcaatttggctttttgtggctgaaaaaacataactgttagacccaaagcattttatgctccgttccatcttaaggagccatccttaagtctgctcccaccctcagtagaatttattttctacaaagtggtagtaatttttttttaaattgcaaatgtaatttttgccaattagagaaaccaaccggtgtcagtaaaattctgtgagaaatgccatccctgctgggaatgttgaagttacttaatgttgatctatcccttggggaaagtaaaagtgactgtgagtggtgccattgtgtgatgtcagcatgacgttgttttgaatgtggcattatgttctggtgctcatgtttcctggattgtattatctgctttcctttaccaaggcagacagaactgctgccttagcctgacaaccggttgtcctcaaagcaaatgaacttaagcatttgggattgagggacagaaggattctgagggggctctgcgagggacggtgtgtgacatgtcatgcctggagaaggaacaaggctatttgaaaacagaaggcaggtcaagggtagaagttaaaggagaatctgaaggcaggtcagggaaaagaagaactggaaatgaaacagaggacaggtgacaaccacctcgaagagctcccagagattgtagaaagagtccagtgtaaccagcttagtaaccagagtatctggattacccaggaaggttgagctgctgagatttcagtggtgcaatgtctttaaaaaaacaggctttgttgggagggtatttccattttgaactttgaggactgttggtcagaaaatgggctcaaaagtgagtttgcttaatgaagacatttaacggttgtgctgtttatagtaaaataaaactccctaccttgcttcagttaaaaatgaagcacttggtttcttccatcctcctcctccccttaatggattgtggcagttgaaataatccatcggatgacccacctgtagtgagatgtactgtcgatgtagtgcccggtgtatctcagtggccatctgccatggtgaggtgagcgtgatctcttttcagtatagtagttaacattttctagtattttttatggagagaatgtcaaaagtggcatttcagaccccgtcccagatgggtctgaggaaaggaaggctgtaaaggacatggtaatggcactccattcgggatgtattaaaataatttgcttttcaggtattaatatgacatttgtcattgtcactgatttttttaaaaaagcaatgcacatgttggttgtggctgttttccgcatgctatcttcatatctaaatgcttcattaattatccgagcctccggagaattaactctattacgtttgtatagtaagtttgtaaactgcttggcaaactgattaagaaataatttgcaataccgtgctactaaagtggcaggtttctggtagaaattgtgcgagtccaatttggagttttaagttccttgattgatgaaactaaaaaggcaattttggaaaaagagagggggaaaagtagatcacttatcttagcaaacggttgaaaatatgtctgtcctctgtggccccaaatccagtgaaagaaattctcccagtaaaagttgcttcctaactctgtttttctcagaatacctcttacctttctcaaagaaagcttcaaccaccatcatcagaaagaaggtggcctaaaaactgacacatggccagtgcccggaggggtctggaggcataagtctagatgcccagagagcatccaggcactgaactgctcagagcttgagatgaaatgacatacaagcttcagggtaaaactgtctactagcaagattacctccctcaattctaccattgcagatttcttctgaccccaaatgcaaccttacagagaatgctgaatgaggaaggccaattccttacaatgatggcagaacccccaagcgaatgccctattgaggagaaggacatcactgtatttggaattctgcctgctagtgatagctcacacatcacatcccagaatcccactcccaatgcattatttcctgaggcaagaacttaaggtcctcacctaattcctccatcacaaccattaactcttattggacaagctcctcctgtgagtagggcctgtactcacttcctcttagatcataattccatcttcaagagactgatttccagaatagtaatctttttccagcgttctctcttctccaatgccctggttgttatttttcccacctctcctaatattgatcttcttgtcttttggttagaactgcaacttcggagttgagttcatttcctattgctgctcaattcagtagcaacatagctggcttgttcccagacccaggaagtataagtcattgacagtttcctgagtggctctgccaatccataccacccttggtactgtgaaaaggcttcttggcagccaggtggcattgaggatggtattcagggcgctttccttctgtcatatagttgtgggatctctaccaagtgtgaaggtgaatgaggtaagggagatcagaaccatgcttcctggtttttcatacatccaaggaagaagtcctggtgtgggttgtttgacaccttctttccactttcaccttttattttttattccttcctttctacccccaaccagtcgagcaaatgagcaattttgtgtttctaatacaggatctggaagtagtgctttctaatcctcatttcctgtaggatgttcctgcactataacaagattatgttttcttccttctgcagcagctttctgcttcttgggtactactagctattgttcaattcaggtgaggcctgtgatgacatatatgtagcatgtgctctgcgctccctgcaagctgagcagatacaaccaatgcatcactgtatactcttgctgagaatgtggatgcagcctcacagatctttgcaacactccaaccagccaggaccagttgatcagaactgatcttattggtctgataaccaatcttatttgtgaactgattcatatctgtctttccactcttggttctcttgccgtagaacaaaaacagtttaggaagcataattacgaacatttaggaaccaatatgtataagtaattcggagactccaattcacctgcccctcccccatcccaggttgtggaggctcgaggaagctgacttcttaggctaaaggacaaaaaaatctctttacctccttggccattttcatgttctctgccaattactataggcagtcttcattttgcagaggtgaggtaagacttcatcttattcttcatgtaatcccaccttctaacaaaaaataaataaatatttaaattccaaggagaagtgttctttgtgtatttctagcagaaaacagatgcttaagcctaagaaggaagatccgtccatgacaaaggaaagtggaaaactgaaccagttatctgaatacttcatgccaggacagttgctattagcaactgttttgcaccttcagggctttaaaatgggctctgcagacagcatttgcatatgcaagactcagtagccaagcctccactgccaattgttgaaggcagtttcagatcgccaccttttgaggtacatttctttaagcacaagagaagtagaaatggcctttgccttgtctccagtggtttgtccctctggtgcctcagcagataccagagcttattcttatgaccatttggaagtagtcctcaaagtaaagatcaagaaaaaattggattctttttccattttctcataatagtagcctagtcaacacaagactcccataaaatatgactcactattgggagccatactattttataagcttacttcctgctgacaaaactagctttcctcaaggaaatataaaggaggggaaagtcacatagtgttaggaaaacattcctgtgttttgaatacgatgaatccataggatagagaaaaatctgcttgttctattctgagagttctctgagatatcccttcactctgcttggcatttggccattgatattcaacaggtcactgaccaagcttttctaaatttttcagagagagttacttaccagtaaggtctgttcttaaacctacctagttgattttcatatctttccataaagtgtcatgattctgtcatagaccctgacttaacattgtaaggactatgagtcctccattttttaattaatttttttttagcaaattaggacttcggcaggttttcctctcctaaactcattctttcctccacaggattgctttgtccatctcctgctttcatttcaagtgcataaacaaaacctcaaagggcctgggaaggtgaggcaggccagagtctgtgttctgtgttgagtgtcaagctatttgttaagaaggtctgcaacaggcctttggtgtgggctctgccagagactgttctgaacactttgcttgagatccgtgccctgtaaaatggatatgatgttttactgatgtctgtaatacatttgtaaacttccaataaaatttgaataaaagaaa

SEQ ID NO: 327826 - protein, 150 aa, Artificial Sequence
  derived and/or modified sequence
MVTVMPLEMEKTISKLMFDFQRNSTSDDDSGCALEEYAWVPPGLKPEQVHQYYSCLPEEKVPYVNSPGEKLRIKQLLHQLPPHDNEVRYCNSLDEEEKRELKLFSSQRKRENLGRGNVRPFPVTMTGAICEQCGGQINGGDIAVFASRAG

SEQ ID NO: 327827 - DNA, 453 bp, Artificial Sequence
  derived and/or modified sequence
atggtaaccgtaatgccgctcgagatggagaagactattagcaagctgatgttcgattttcagaggaatagcacttcagacgatgattctgggtgtgcgttggaggagtacgcttgggtcccacccgggctgaaaccagaacaggtgcatcaatattacagctgtctgcccgaggagaaggtgccgtatgttaattccccaggagaaaagctgcggatcaagcagttgctgcatcagctcccgccccatgataacgaagtccgttactgcaacagcttagacgaggaagagaaacgggaactgaagcttttttcgtctcagagaaaacgcgaaaacctcggaagagggaacgtgaggccattcccggtgaccatgactggcgccatctgcgaacagtgtggtggccagatcaacggcggggacatcgccgtttttgcgagcagggccgggtag

SEQ ID NO: 327828 - DNA, 453 bp, Artificial Sequence
  derived and/or modified sequence
atggtgacagtgatgcccctggagatggagaagaccatcagcaagctgatgtttgacttccagaggaacagcaccagtgatgatgacagcggctgtgccctggaggagtatgcctgggtgcccccaggcctgaagccagagcaggtgcaccagtactacagctgcctgcctgaggagaaggtgccctacgtgaacagccctggagagaagctgcgcatcaagcagctgctgcaccagctgccccctcatgacaatgaggtgcgctactgcaacagcctggatgaggaggagaagcgggagctgaagctgttcagcagccagaggaagcgggagaacctgggcagaggaaatgtgcggcccttccctgtgaccatgaccggggccatctgtgagcagtgtggcggccagatcaatggaggagacattgctgtgtttgccagcagagctggatag

SEQ ID NO: 327829 - DNA, 453 bp, Artificial Sequence
  derived and/or modified sequence
atggtgaccgtgatgcccctggagatggagaagaccatcagcaagttgatgtttgacttccaaaggaattcaacatcagatgacgatagtggatgtgcactcgaagagtatgcctgggtgccaccagggctgaagcctgaacaggttcaccagtactacagctgcttgcctgaagagaaagtcccctatgtgaacagtcctggagagaagctgcggattaagcagcttctacatcagctgcctccacatgacaatgaggtgcgctactgcaattccttggatgaggaagagaagcgagagctcaaactgttcagctctcagcgcaaaagggagaacctgggccgtggtaatgttcggccgttccccgtgaccatgaccggcgccatctgtgagcagtgtggcggtcaaatcaacggtggcgacattgcggtctttgcgtccagggcaggatag

SEQ ID NO: 327830 - DNA, 573 bp, Artificial Sequence
  derived and/or modified sequence
aaccccctttccccggctcccccgcagtttcccgggccggcagaggcgccgcagcgtcggagcaatgcaaggctaagccgggaagatctgcctgcactgcaagtgtccccaggaggagcacatggtgacagtgatgccgctggagatggagaagaccatcagcaaactcatgtttgactttcagaggaactcgacctcagatgatgactcaggctgtgctttggaagagtatgcctgggtcccgccgggtctgaagcctgaacaggtacaccagtactatagctgtctcccagaagagaaagtcccttatgtcaacagtcctggagagaaactgcgaatcaagcagctactacaccagctgccgccacatgacaatgaggttcgatattgcaactccctggatgaggaagagaagagggagctgaagcttttcagcagccagaggaaacgcgaaaacttgggccgcgggaatgtcaggcctttcccagtcaccatgacaggagctatttgtgaacagtgcggaggccagatcaatggtggagacatcgctgtgtttgcgtcacgcgctggcca

SEQ ID NO: 327831 - DNA, 453 bp, Artificial Sequence
  derived and/or modified sequence
atggtaactgtcatgcctctggagatggagaaaaccatcagcaagctcatgttcgattttcagagaaatagtacatctgacgatgactctggctgtgcccttgaagagtatgcgtgggtgcctccaggtttgaaaccggaacaggtccatcagtactactcctgcttgccggaagaaaaggtgccatatgtcaacagccccggagaaaagctgcggattaaacaactgctccaccagctgccaccacatgacaacgaggtgcgttattgcaattcacttgatgaagaggagaaacgtgagttgaagctctttagcagtcaacgcaaacgggagaatttaggaaggggaaatgtgcggccttttcccgtgactatgactggcgcaatttgcgagcaatgtggagggcagattaatggcggagatattgcagtgttcgcctcacgggctggttag

SEQ ID NO: 327832 - DNA, 453 bp, Artificial Sequence
  derived and/or modified sequence
atggtgaccgtgatgcccctggagatggagaagaccatcagcaagctgatgttcgacttccagagaaacagcaccagcgacgacgacagcggctgcgccctggaggagtacgcctgggtgccccccggcctgaagcccgagcaggtgcaccagtactacagctgcctgcccgaggagaaggtgccctacgtgaacagccccggcgagaagctgagaatcaagcagctgctgcaccagctgcccccccacgacaacgaggtgagatactgcaacagcctggacgaggaggagaagagagagctgaagctgttcagcagccagagaaagagagagaacctgggcagaggcaacgtgagacccttccccgtgaccatgaccggcgccatctgcgagcagtgcggcggccagatcaacggcggcgacatcgccgtgttcgccagcagagccggctag

SEQ ID NO: 327833 - DNA, 1785 bp, Artificial Sequence
  derived and/or modified sequence
atgccaaagtggctggaagagaccgagaacaagaaaatcggttgcaccgtcaacctcatgaatttctacaaatctgaaatcaacaaagaggagatgtatattcggtatatccacaagctgtgtgatatgcatttacaggcagagaattatactgaagctgcatttaccttgcttctctactgcgagctgttacaatgggaggatagacccttgcgcgaatttctgcactatccctcccaaaccgaatggcagcggaaggagggactgtgtcggaaaataatacactacttcaacaaaggcaagtcctgggagttcggcatacccctgtgtcgggagctcgcctgccagtacgaaagtctatacgactaccagtccctaagttggatacgaaagatggaggcttcctattacgataatattatggagcagcagaggctggagccagagttctttcgggtgggcttctacggcagaaagtttcctttcttcttaaggaacaaggagtacgtgtgtaggggacatgattatgaaaggctggaggcctttcagcaacgcatgctgtctgagttccctcaggctgttgctatgcagcatccgaatcaccctgatgatgctattctacagtgcgatgctcaatatctccaaatctacgccgtgactccaatccctgactacgtcgatgtgctgcagatggatagagtgcctgatagagtgaagtcattttatagagtcaacaacgtgcggaaattcagatatgatcggcctttccacaaaggcccaaaagacaaggagaacgaattcaaatctctgtggatcgagagaaccaccctgaccctgacccacagcttgccaggcatttctcggtggttcgaggtggaaaggcgggagctggtggaagtgtccccattggaaaacgcaatccaggtggtcgagaacaagaaccaggagttaaggtctctcatatcacaatatcagcacaagcaggtgcacggtaatatcaatctgctcagtatgtgcttgaacggcgtgatcgacgcagccgtgaatggaggtatagcgagatatcaggaggctttttttgataaggactacattaacaaacacccgggcgacgcggagaagatcacacagctgaaagaacttatgcaggagcaggtccatgtccttggggtgggcttagccgtgcatgagaaattcgtgcaccctgagatgcgaccactacacaagaagctaattgatcaattccagatgatgcgtgcttcactttaccacgaattcccagggctggataagttaagtcctgcttgctcaggcacaagcacccccagaggcaatgtcctggcctcacactcacctatgagccccgagtccattaaaatgacacatcgacactctcctatgaacctaatgggaactggtagacacagctctagttcacttagctctcacgcctcctctgaggcgggcaatatggtgatgttgggtgatgggtccatgggcgacgcacccgaggatctttatcaccacatgcagctcgcctatcccaatccacgctatcagggaagtgtaacaaatgtctcagtgctgtcatctagccaggcctcaccctcaagcagttctttatcctcgactcatagcgccccctctcaaatgattaccagcgccccctccagcgcgaggggaagccccagccttcctgacaagtaccggcatgccagggagatgatgctgctgcttcctacttaccgcgacaggccgagcagcgccatgtacccggccgcctag

SEQ ID NO: 327834 - DNA, 1785 bp, Artificial Sequence
  derived and/or modified sequence
atgcccaagtggctggaggagacagagaacaagaagattggctgcaccgtgaacctgatgaacttctacaagtctgagatcaacaaggaggagatgtacatccgctacatccacaagctgtgtgacatgcacctgcaggccgagaactacacagaagctgccttcaccctgctgctgtactgtgagctgctgcagtgggaggaccggcccctgcgggagttcctgcactaccccagccagacagagtggcagaggaaggagggcctgtgcaggaagatcatccactacttcaacaagggcaagtcctgggagtttggcatccccctgtgccgggagctggcctgccagtatgagagcctgtatgactaccagagcctgtcctggatcaggaagatggaggccagctactatgacaacatcatggagcagcagaggctggagcctgagttcttccgggtgggcttctacggcaggaagttccccttcttcctgaggaacaaggagtatgtgtgccggggccatgactatgaaaggctggaggccttccagcagaggatgctgtctgagttcccccaggccgtggccatgcagcaccccaaccacccagatgatgccatcctgcagtgtgatgcccagtacctgcagatctatgctgtgacccccatcccagactatgtggatgtgctgcagatggacagagtgcctgacagagtgaagagcttctacagagtgaacaacgtgaggaagttccgctatgaccggcccttccacaagggccccaaggacaaggaaaatgagttcaagagcctgtggattgaaagaaccaccctgaccctgacccacagcctgcccggcatcagccgctggtttgaggtggagcggcgggagctggtggaggtgagccccctggagaatgccatccaggtggtggagaacaagaaccaggagctgcggagcctcatcagccagtaccagcacaagcaggtgcacggcaacatcaacctgctgtccatgtgcctgaatggagtgattgatgctgctgtgaatggaggcatcgcccgctaccaggaggccttctttgacaaggactacatcaacaagcaccctggagatgctgagaagatcacccagctgaaggagctgatgcaggagcaggtgcacgtgctgggcgtgggcctggccgtgcatgagaagtttgtgcaccctgagatgaggcccctgcacaagaagctgattgaccagttccagatgatgagggccagcctgtaccacgagttccctggcctggacaagctgagccctgcctgcagcggcaccagcaccccaagaggaaatgtgctggccagccacagccccatgagccctgagagcatcaagatgacccaccgccacagccccatgaacctgatgggcaccggccgccacagcagcagcagcctgagcagccacgccagcagcgaggccggcaacatggtgatgctgggagatggctccatgggagatgcccctgaggacctgtaccaccacatgcagctggcctaccccaacccccgctaccagggctctgtgaccaacgtgtctgtgctgagcagcagccaggccagccccagcagcagcagcctgagcagcacccacagcgcccccagccagatgatcaccagcgcccccagcagcgcccggggcagccccagcctgcctgacaagtacagacatgcccgggagatgatgctgctgctgcccacctacagagaccggcccagcagcgccatgtacccagctgcctag

SEQ ID NO: 327835 - DNA, 1785 bp, Artificial Sequence
  derived and/or modified sequence
atgcccaagtggctggaggagaccgagaacaagaagatcggctgcaccgtcaatctgatgaatttttataaaagcgagatcaacaaagaagagatgtatatacggtacatccacaagctctgtgatatgcacttgcaggccgaaaactatacagaagcagcgtttaccctgctgctgtactgcgagcttcttcaatgggaggatagaccgctccgagagttcttacactacccttctcagactgaatggcaaagaaaggaaggcctgtgccggaagatcatccactacttcaataagggaaagtcttgggagtttggcatcccactatgcagggagctggcatgtcagtatgaaagtctgtacgattatcagtcattaagctggattagaaaaatggaagctagctactatgacaacatcatggagcagcaacggctggaacccgagttcttcagggtgggcttctatggccggaaatttcctttctttctgagaaataaggaatatgtatgcaggggccacgattatgaacgcctcgaagctttccagcagcggatgctgagtgagtttccacaggccgtggctatgcaacatcctaatcatccagacgatgctatcctgcaatgtgatgcacagtaccttcagatttatgctgtaactcccataccggattacgtagacgttctccaaatggacagagtgccagaccgggtaaagagcttttatcgcgtaaacaatgtccgtaaattcagatatgaccggccttttcacaaaggacctaaagataaggaaaatgagttcaagagtttgtggattgagaggactacacttacactgacccattcactcccaggaatctcaaggtggttcgaagtagaaaggagagagttagtggaggtgtctcccttggaaaacgcgatccaggtggtggagaacaagaaccaggagctcagaagtctcataagtcagtatcagcacaagcaggtccacgggaatattaacttgctttctatgtgtcttaatggggttatcgacgcagccgttaacgggggaatcgcccgctatcaggaggcattttttgataaggattacataaataagcaccctggcgacgccgagaagatcacacagttaaaggagctcatgcaggaacaagtgcatgtcctcggcgtgggactggcggtgcatgagaagtttgtgcatcctgagatgaggcctctccacaagaaactcattgatcagtttcagatgatgcgcgcatctctgtaccacgagtttccgggactggataagctgagtcctgcttgttctggaactagcacaccccgggggaacgtgctcgcaagtcattcaccaatgagccccgagagcattaagatgacccaccggcattcacctatgaacctcatgggtacaggcagacactcatcctctagtctctcgagtcatgcatcaagtgaggccggcaatatggtgatgttaggcgacgggtctatgggtgatgctccagaggacctataccatcacatgcaactggcctacccgaaccctcggtaccaggggagcgtcactaatgtatcggtgctttctagttcccaagcgtccccctcaagttcctctctttcaagcactcatagcgcaccaagccagatgattacatcggctccctcctccgccagagggtctccatccctgcctgacaaatacagacacgcgcgggaaatgatgcttctgcttccaacttacagagacagaccttctagtgctatgtatcctgcggcatag

SEQ ID NO: 327836 - DNA, 1785 bp, Artificial Sequence
  derived and/or modified sequence
atgccaaagtggctcgaggagaccgagaataagaaaataggctgcacggtcaacctcatgaatttctacaaaagcgagatcaacaaagaggaaatgtatataaggtatattcataagctgtgtgatatgcaccttcaagccgaaaactacaccgaagcggcatttacccttcttctgtattgcgaactgcttcaatgggaagatcggccattgcgggagttcttgcattacccgagtcagaccgaatggcagcgtaaggaggggctttgtcggaaaataatccactacttcaacaaggggaaatcttgggagtttggcataccgctctgccgcgagctggcctgccagtatgaatcactgtacgattaccagtcactaagttggatccgcaagatggaggctagttactatgacaatataatggagcagcagaggctggagccggagtttttccgcgtcggcttctacgggagaaaatttcccttctttctcagaaataaggagtacgtgtgtagggggcacgactacgagagattagaagccttccagcagcgaatgctgagcgagttcccccaggccgtggccatgcagcatccaaaccacccagatgatgccattctgcagtgcgacgctcagtacctgcagatctatgccgtaacacccattcccgattatgttgacgtgcttcaaatggaccgcgtccccgacagagtaaagtcattctaccgggtgaacaatgtgcgaaaatttcggtatgacaggccattccacaaaggcccaaaagataaagaaaacgagtttaaatctctatggattgaaaggacaacattgacgctgacacacagtcttcctggtattagtcgatggttcgaggtcgaaagacgggagctggtggaagtgtctccccttgaaaatgccatccaggtggttgagaataagaatcaggaactgagatctctgatatctcagtatcagcacaagcaagttcacgggaacattaacctgctgtccatgtgcctcaacggagtgatcgacgccgcagtgaatggcggtattgcgaggtaccaagaggcattcttcgataaagactatatcaataaacacccgggtgacgcggagaagatcacccagctgaaggaactgatgcaagagcaggtgcacgtcctcggggttggccttgctgtccatgagaagttcgtgcatcctgagatgcgcccattgcacaaaaagctgatagatcagttccagatgatgagagcaagcctttaccacgagtttccaggactggataagctctctcctgcttgcagtggcacaagcacgccaagggggaacgttctggcctctcattcgcccatgagtcctgagtctatcaagatgacccaccggcactcccccatgaacctgatgggcacaggcagacacagctctagtagtctctccagccatgcaagttctgaagcgggaaatatggtgatgctgggcgatgggtcaatgggagacgctccagaggatctctaccatcacatgcagctggcatacccaaacccccgataccaggggagtgtgacgaacgtgtctgtgttatcctcttctcaggcaagcccatcgagtagctctttgtcatcaacccatagcgcaccatctcagatgattacgtccgctccttcctccgcccgaggtagcccctctctgcccgacaagtatcgccacgccagggagatgatgcttttgctgccaacctatagagatagacctagcagtgctatgtatcccgcagcttag

SEQ ID NO: 327837 - DNA, 1785 bp, Artificial Sequence
  derived and/or modified sequence
atgcccaagtggctggaggagaccgagaacaagaagatcggctgcaccgtgaacctgatgaacttctacaagagcgagatcaacaaggaggagatgtacatcagatacatccacaagctgtgcgacatgcacctgcaggccgagaactacaccgaggccgccttcaccctgctgctgtactgcgagctgctgcagtgggaggacagacccctgagagagttcctgcactaccccagccagaccgagtggcagagaaaggagggcctgtgcagaaagatcatccactacttcaacaagggcaagagctgggagttcggcatccccctgtgcagagagctggcctgccagtacgagagcctgtacgactaccagagcctgagctggatcagaaagatggaggccagctactacgacaacatcatggagcagcagagactggagcccgagttcttcagagtgggcttctacggcagaaagttccccttcttcctgagaaacaaggagtacgtgtgcagaggccacgactacgagagactggaggccttccagcagagaatgctgagcgagttcccccaggccgtggccatgcagcaccccaaccaccccgacgacgccatcctgcagtgcgacgcccagtacctgcagatctacgccgtgacccccatccccgactacgtggacgtgctgcagatggacagagtgcccgacagagtgaagagcttctacagagtgaacaacgtgagaaagttcagatacgacagacccttccacaagggccccaaggacaaggagaacgagttcaagagcctgtggatcgagagaaccaccctgaccctgacccacagcctgcccggcatcagcagatggttcgaggtggagagaagagagctggtggaggtgagccccctggagaacgccatccaggtggtggagaacaagaaccaggagctgagaagcctgatcagccagtaccagcacaagcaggtgcacggcaacatcaacctgctgagcatgtgcctgaacggcgtgatcgacgccgccgtgaacggcggcatcgccagataccaggaggccttcttcgacaaggactacatcaacaagcaccccggcgacgccgagaagatcacccagctgaaggagctgatgcaggagcaggtgcacgtgctgggcgtgggcctggccgtgcacgagaagttcgtgcaccccgagatgagacccctgcacaagaagctgatcgaccagttccagatgatgagagccagcctgtaccacgagttccccggcctggacaagctgagccccgcctgcagcggcaccagcacccccagaggcaacgtgctggccagccacagccccatgagccccgagagcatcaagatgacccacagacacagccccatgaacctgatgggcaccggcagacacagcagcagcagcctgagcagccacgccagcagcgaggccggcaacatggtgatgctgggcgacggcagcatgggcgacgcccccgaggacctgtaccaccacatgcagctggcctaccccaaccccagataccagggcagcgtgaccaacgtgagcgtgctgagcagcagccaggccagccccagcagcagcagcctgagcagcacccacagcgcccccagccagatgatcaccagcgcccccagcagcgccagaggcagccccagcctgcccgacaagtacagacacgccagagagatgatgctgctgctgcccacctacagagacagacccagcagcgccatgtaccccgccgcctag

SEQ ID NO: 327838 - DNA, 2756 bp, Artificial Sequence
  derived and/or modified sequence
gcggtttgattctggggtggggcggcagcgggagcgcgcccgcttttcctaggccagcgggcggttgtctgtggctccgcgactgggcgccccgtcacgtaggttacacacacaatcactccccagggacggcccggagtccgtccaggcagctgcgccctccccagacccgggcaccgcggaggctggagccgcaatggtgctgatggagggcgggagatggagctgaccaggggccggaggggctgagaagagcctgcccaagtctgggccaagcacgaagccctttcccacccgtcgggctcctgggttcccgccagccgatttccagccgtcagggtcacgccactcgctggaaaccctgaactctgtgccccccaagccctgggccccctgcgggaatgttcaaaaatgagtaccagggaggtgcatttgttgaaattttcagtgctcaaggaaaaaatcctggagcaaaatggaagatccttggtagtccatctgtgatttggaaagagtttgataaagaagttaaaagttttgtgtttgtcctggaaggcagcagccaaacaaacaaaattcagttaccaaaggagaataagcaaagccttggattgatccagaggtttcttgtacttcagatttacgtacccctgggacaagacttctccactgaattgctaattactgatttagggaacatcaaaagaagattatatttatcaacggtccataaggaactatcctccacccctcttcatgcaaaaattccactcttcatgatcaaacgtaaaatttggtgcaatctatgcattgacttagtagcattcaccagtgaaatattcaagggggcagttttccagtcattggatggaattgttgtctcagctaactgtaagctacggaagatcttcaccttaaaatcaaagccacaagacactgctgataaggatggtatgttcagctgtctatggtgttcccttttcaacagatgagcctacagatattataccacgaagctgtcaactaatgacagatgttccacatgtcacacagctgctaaacatgactaaacttcgccaaactgaaataaaattcggaggccatcctctaagatcagcagaatcagatcagttcattaacagaggaacaagtattacacggaacagtaaaaatcaagatgtttgtcatatcgcatttggatccaaagttcttgggccacctccactctctggcagaaggaataacatgaagatatccagcgaggtaggagcaagacagtgagatccgttgggtccaaaaataaccgatcatgccagccgtccactgtagagaagtgtgttaatggtacagaaatgtcagccttgctgatacctgagtctgaggaacaaggaaataaagaaaatattcaccaaataaagcagactgtacctattcatgcagccaatctacatattatgcatccgcatccccctcaagaaccatcagcagataagaataataacagaagaagattacggttaaaaagtaccagcagagaaaggacagagacacccagcggtagctcttcaggaaataataggattgaagataaagcatcaactatcctcaccactgtgtcccaacaaggagcagagctgttgaactccggcactctaggaccccagtctcctgatcaatcagatgagtggatttcctgaaaatgctgatcacatttcatatctggcatccagcagacagtctctacttctgggtgatgactcctgcaacccatcacacctgtggctggaagccagcaaagagagtgaacacgaccagcaggcagaggaatcccagagtgttccaaaggacattttcactttttcatcaagaccacgatcagcacctcatggaaagactcagactatgtccccagaggagctctcatttattttggatctaaaagaggataacagtgtgacaagcagagacacccaatcagaggatgatttttacggcggcgacagcagtgaagagggtaaccacagtatccagggttctcgaggcccaacaactggtccttcagagttaactcagttaacattagagagcctgctggggaaggctgcaaagcggacaagtaaggaatatctaaggagcgcctacacagaagcaggagcaacagaaagccaggattcctcgatggagcaaatagatagaaataactttgaaatgagtttgttgcctacaacatgcctttctccaactggaagaaggtgtgggtcctgtcagaaaactccagagcccgtaatcaaagcgaaggatctatcagcccagcaagtgccagcttcactaaacaaaacctccctgaaagaaatctcaggggaaaggctgagctcgatccccgaagcatctgaatgactggcgaaactatcagccaagccagatgagtgaatccgagttacagatgctagcaagcctacggtggcaacaaaatgaagaactggaggatgctgggacctcccatggcctgagtgcctcccaggtggacaactgtaatgtcagcataagtaccagcagtgacgacacaaccacctggaactcctgcctgccacccggactggttaaatatgttgagcccaccaatcgttcctcccagtcaacagccggctgagcagcgtccagattcctgtgaaagtttgagtgttcaaggtgggactatgaaaaacgatatgcataagaaaataaaaataatttactataaatagagagaatccatc

SEQ ID NO: 327839 - protein, 238 aa, Artificial Sequence
  derived and/or modified sequence
MSGFPENADHISYLASSRQSLLLGDDSCNPSHLWLEASKESEHDQQAEESQSVPKDIFTFSSRPRSAPHGKTQTMSPEELSFILDLKEDNSVTSRDTQSEDDFYGGDSSEEGNHSIQGSRGPTTGPSELTQLTLESLLGKAAKRTSKEYLRSAYTEAGATESQDSSMEQIDRNNFEMSLLPTTCLSPTGRRCGSCQKTPEPVIKAKDLSAQQVPASLNKTSLKEISGERLSSIPEASE

SEQ ID NO: 327840 - DNA, 2650 bp, Artificial Sequence
  derived and/or modified sequence
gggaaccaatgggcgcggccggaacgcgggtggcgctcggcgctgctctttcgcggtttgattctggggtggggcggcagcgggagcgcgcccgcttttcctaggccagcgggcggttgtctgtggctccgcgactgggcgccccgtcacggaggtgcatttgttgaaattttcagtgctcaaggaaaaaatcctggagcaaaatggaagatccttggtagtccatctgtgatttggaaagagtttgataaagaagttaaaagttttgtgtttgtcctggaaggcagcagccaaacaaacaaaattcagttaccaaaggagaataagcaaagccttggattgatccagaggtttcttgtacttcagatttacgtacccctgggacaagacttctccactgaattgctaattactgatttagggaacatcaaaagaagattatatttatcaacggtccataaggaactatcctccacccctcttcatgcaaaaattccactcttcatgatcaaacgtaaaatttggtgcaatctatgcattgacttagtagcattcaccagtgaaatattcaagggggcagttttccagtcattggatggaattgttgtctcagctaactgtaagctacggaagatcttcaccttaaaatcaaagccacaagacactgctgataaggatgctgtctatggtgttcccttttcaacagatgagcctacagatattataccacgaagctgtcaactaatgacagatgttccacatgtcacacagctgctaaacatgactaaacttcgccaaactgaaataaaattcggaggccatcctctaagatcagcagaatcagatcagttcattaacagaggaacaagtattacacggaacagtaaaaatcaagatgtttgtcatatcgcatttggatccaaagttcttgggccacctccactctctggcagaaggaataacatgaagatatccagcgagacagtgagatccgttgggtccaaaaataaccgatcatgccagccgtccactgtagagaagtgtgttaatggtacagaaatgtcagccttgctgatacctgagtctgaggaacaaggaaataaagaaaatattcaccaaataaagcagactgtacctattcatgcagccaatctacatattatgcatccgcatccccctcaagaaccatcagcagataagaataataacagaagaagattacggttaaaaagtaccagcagagaaaggacagagacacccagcggtagctcttcaggaaataataggattgaagataaagcatcaactatcctcaccactgtgtcccaacaaggagcagagctgttgaactccggcactctaggaccccagtctcctgatcaatcagatgagtggatttttcctgaaaatgctgatcacatttcatatctggcatccagcagacagtctctacttctgggtgatgactcctgcaacccatcacacctgtggctggaagccagcaaagagagtgaacacgaccagcaggcagaggaatcccagagtgttccaaaggacattttcactttttcatcaagaccacgatcagcacctcatggaaagactcagactatgtccccagaggagctctcatttattttggatctaaaagaggataacagtgtgacaagcagagacacccaatcagaggatgatttttacggcggcgacagcagtgaagaggaatatgactggcgaaactatcagccaagccagatgagtgaatccgagttacagatgctagcaagcctacggtggcaacaaaatgaagaactggaggatgctgggacctcccatggcctgagtgcctcccaggtggacaactgtaatgtcagcataagtaccagcagtgacgacacaaccacctggaactcctgcctgccaccccctgtcaaccagggtcgccactatcagaaagaaatgaacccaccttctccttctaatccccgggactggttaaatatgttgagcccaccaatcgttcctcccagtcaacagccggctgagcagcgtccagattcctgtgaaagtttgagtgttcaaggtgaagaagacctcagtgtggaagaggacgaggaagtactgactttgttgtatgacccttgtctgaactgttactttgacccccaaacagggaaatactatgagttggtataatgcctccttccggggcagagagcaggcactcccagctggagcagaatagcagttcagggtcgcttaaggagtcaccacaacttatgtgttgggtgaccacaaaatcaacagtaactgagagaaacgaattcattttgtaaataatgttcaacgttaagaatacctatattccttttgtagatgagtatgattttgaaactgaagaaattaatacagaggcaagattttaggagtttgaattggttcttgtttgttctcattctacatataattttgtttatttcagataattttatgtaaacaaattaagagttattcattcaaattttttgcagtgttaatctgtaaatgatggcttgatgtacagaaaatgtatttttgcttaaaagatgcctgggtaccttttattttatggcatttgtattaaaaataaagtatgatggtaagaagaata

SEQ ID NO: 327841 - DNA, 1692 bp, Artificial Sequence
  derived and/or modified sequence
atgatcaagagaaagatctggtgcaacctgtgcatcgacctggtggccttcaccagcgagatcttcaagggcgccgtgttccagagcctggacggcatcgtggtgagcgccaactgcaagctgagaaagatcttcaccctgaagagcaagccccaggacaccgccgacaaggacgccgtgtacggcgtgcccttcagcaccgacgagcccaccgacatcatccccagaagctgccagctgatgaccgacgtgccccacgtgacccagctgctgaacatgaccaagctgagacagaccgagatcaagttcggcggccaccccctgagaagcgccgagagcgaccagttcatcaacagaggcaccagcatcaccagaaacagcaagaaccaggacgtgtgccacatcgccttcggcagcaaggtgctgggccccccccccctgagcggcagaagaaacaacatgaagatcagcagcgagaccgtgagaagcgtgggcagcaagaacaacagaagctgccagcccagcaccgtggagaagtgcgtgaacggcaccgagatgagcgccctgctgatccccgagagcgaggagcagggcaacaaggagaacatccaccagatcaagcagaccgtgcccatccacgccgccaacctgcacatcatgcacccccaccccccccaggagcccagcgccgacaagaacaacaacagaagaagactgagactgaagagcaccagcagagagagaaccgagacccccagcggcagcagcagcggcaacaacagaatcgaggacaaggccagcaccatcctgaccaccgtgagccagcagggcgccgagctgctgaacagcggcaccctgggcccccagagccccgaccagagcgacgagtggatcttccccgagaacgccgaccacatcagctacctggccagcagcagacagagcctgctgctgggcgacgacagctgcaaccccagccacctgtggctggaggccagcaaggagagcgagcacgaccagcaggccgaggagagccagagcgtgcccaaggacatcttcaccttcagcagcagacccagaagcgccccccacggcaagacccagaccatgagccccgaggagctgagcttcatcctggacctgaaggaggacaacagcgtgaccagcagagacacccagagcgaggacgacttctacggcggcgacagcagcgaggaggagtacgactggagaaactaccagcccagccagatgagcgagagcgagctgcagatgctggccagcctgagatggcagcagaacgaggagctggaggacgccggcaccagccacggcctgagcgccagccaggtggacaactgcaacgtgagcatcagcaccagcagcgacgacaccaccacctggaacagctgcctgcccccccccgtgaaccagggcagacactaccagaaggagatgaacccccccagccccagcaaccccagagactggctgaacatgctgagcccccccatcgtgccccccagccagcagcccgccgagcagagacccgacagctgcgagagcctgagcgtgcagggcgaggaggacctgagcgtggaggaggacgaggaggtgctgaccctgctgtacgacccctgcctgaactgctacttcgacccccagaccggcaagtactacgagctggtgtag

SEQ ID NO: 327842 - DNA, 1692 bp, Artificial Sequence
  derived and/or modified sequence
atgatcaagcggaagatctggtgcaatctctgtatcgatttggtcgcattcacctctgagatattcaagggagccgtgttccaatccctggatgggattgtcgtgtccgctaactgcaaactcagaaaaatattcaccctgaaatccaagccacaagacacagcagataaagatgccgtctacggagtgccttttagcaccgacgaacccactgacattatccccagatcatgtcaattaatgacggatgtgcctcacgttacccaattgctgaacatgactaaactacgccaaacggaaatcaaattcggcgggcaccccctccgctcagccgaatctgatcaattcatcaaccgggggacctccataactaggaacagtaagaaccaggacgtgtgtcatatcgctttcggaagcaaagtactgggcccgccccccctgtctggcaggcgtaacaatatgaagatctcatctgagaccgtgcggtcagtaggctcaaagaataaccggtcatgccagccttcaaccgtggagaagtgtgtcaatggtaccgagatgtccgcgcttctcatccccgaatccgaagaacaggggaataaagagaatattcaccagatcaagcaaacagttcccatccatgcagcaaacctgcacatcatgcacccgcaccctcctcaagagccatctgcagacaagaataacaaccgccgccgtctgaggctcaagtccacttcgcgggaaaggaccgagacgccttccggatcttctagcgggaacaacagaattgaagacaaagcatcaaccatcctgacaaccgtctcacagcagggggcggaactgctcaattccggcaccctaggaccccagagtccagaccagtctgatgagtggatcttccctgagaatgcggatcatatttcctacctggcctcttcacgtcagagcctgctgctgggcgacgattcatgcaatccatctcatctgtggttagaagctagtaaggagtctgaacatgaccagcaagccgaggagagccaatccgtgcccaaagacattttcaccttctcatctagaccgcgatctgcaccgcacggtaaaacacagaccatgtccccagaagagctaagtttcatcctggatttgaaagaggacaattctgttacgtctagggacacccaatcggaggatgacttctatgggggtgacagctcggaagaggagtatgactggcggaactaccaaccttcacaaatgtccgagagcgagctgcaaatgcttgcatcactgagatggcagcagaacgaggagctggaagacgccgggaccagccacggattgagcgcgagccaggttgacaactgtaacgtgtctatatcaaccagcagcgacgacaccaccacctggaactcctgtctgcccccgcctgtgaaccagggtcgccactatcagaaggaaatgaacccaccaagtccaagtaacccgagggactggctgaacatgctctctcccccgattgtgcctcccagccagcagccagccgagcaaaggcctgattcttgtgagagtctgtcggtgcaaggcgaagaagacctgagcgttgaggaagacgaagaagtgctaactctgctctacgacccttgtctgaactgttattttgatccacagacgggcaaatattatgaactggtctag

SEQ ID NO: 327843 - DNA, 1692 bp, Artificial Sequence
  derived and/or modified sequence
atgatcaagaggaagatctggtgcaacctgtgcatcgacctggtggccttcaccagcgagatcttcaagggagctgtgttccagagcctggatggcatcgtggtgtctgccaactgcaagctgaggaagatcttcaccctgaagagcaagccccaggacacagctgacaaggatgctgtgtatggagtgcccttcagcacagatgagcccacagacatcatccccaggagctgccagctgatgacagatgtgccccacgtgacccagctgctgaacatgaccaagctgcggcagacagagatcaagtttggaggccaccccctgcggtctgctgagagtgaccagttcatcaacagaggcaccagcatcaccaggaacagcaagaaccaggatgtgtgccacatcgccttcggcagcaaggtgctgggccccccacccctgagcggcagaagaaacaacatgaagatcagcagcgagaccgtgcgctctgtgggcagcaagaacaacagaagctgccagcccagcacagtggagaagtgtgtgaatggaacagagatgtctgccctgctgatccctgagagcgaggagcagggcaacaaggagaacatccaccagatcaagcagacagtgcccatccacgccgccaacctgcacatcatgcacccccaccccccccaggagcccagcgctgacaagaacaacaacagaagaaggctgcggctgaagagcaccagccgggagaggacagagaccccatctggcagcagcagcggcaacaacagaattgaggacaaggccagcaccatcctgaccaccgtgtcccagcagggcgctgagctgctgaacagcggcaccctgggcccccagagcccagaccagagtgatgagtggatcttcccagaaaatgctgaccacatctcctacctggccagcagccggcagagcctgctgctgggagatgacagctgcaaccccagccacctgtggctggaggccagcaaggagagcgagcatgaccagcaggccgaggagagccagagcgtgcccaaggacatcttcaccttcagcagccggcccaggtctgccccccacggcaagacccagaccatgagccctgaggagctgtccttcatcctggacctgaaggaggacaacagcgtgaccagccgggacacccagagtgaagatgacttctatggaggagacagcagcgaggaggagtatgactggaggaactaccagcccagccagatgtctgagagcgagctgcagatgctggccagcctgcgctggcagcagaatgaggagctggaggatgctggcaccagccacggcctgagcgccagccaggtggacaactgcaatgtgtccatcagcaccagcagtgatgacaccaccacctggaacagctgcctgcccccacctgtgaaccagggccgccactaccagaaggagatgaacccccccagccccagcaacccccgggactggctgaacatgctgagcccccccatcgtgccccccagccagcagcctgctgagcagaggccagacagctgtgagagcctgtctgtgcagggcgaggaggacctgtctgtggaggaggatgaggaggtgctgaccctgctgtatgacccctgcctgaactgctactttgacccccagacaggcaagtactatgagctggtgtag

SEQ ID NO: 327844 - DNA, 1692 bp, Artificial Sequence
  derived and/or modified sequence
atgatcaagcggaagatctggtgcaacctgtgcatcgacctggtggcgttcacctccgagatctttaaaggagccgtgtttcagtccctagacgggattgttgtctccgcaaactgcaaactcagaaaaatctttaccttaaagagtaaaccgcaggacaccgcagataaggatgccgtctacggcgtgcctttcagcacggatgaacccaccgatatcattccacgcagctgccagctcatgaccgacgtgcctcacgtgactcaactcttgaatatgaccaaactcagacagactgagataaagttcggtggtcatccccttagatcagccgaatccgaccagttcatcaaccgcggtacgtccatcacgcgaaattccaagaatcaagatgtgtgtcacatcgcattcgggtcgaaggtccttggtccaccccctctgagtggtcgccggaataacatgaagatatctagcgagacagtccgctctgttgggagtaagaacaaccggagctgccagccttctactgtcgagaaatgcgtgaatggaactgagatgagcgcactcctgatccccgagagcgaggagcaggggaataaggagaatatccatcagatcaaacaaaccgtgcccatccacgcggctaacctacatattatgcatccccaccccccgcaggaaccttcagctgacaaaaacaacaacagacgtcggcttcggctgaagtcaacttcacgggaacggaccgagacccccagtggatccagttccgggaataaccgcattgaagacaaagcaagtacaatcttgactactgtgtcccagcagggggccgagctgctgaattcaggaacccttgggccccagagccccgaccagtctgacgaatggatatttccggagaacgccgaccatatctcttatcttgcaagtagccgccagagcctcctcctgggcgacgactcatgcaatccttcccacctttggttggaggccagcaaggagagcgagcacgatcagcaggcagaggagtcccagtccgtgccgaaggatatcttcactttcagctcacggcctcgctcagcacctcatgggaagacacagaccatgtcaccagaagagctgtccttcattcttgatctcaaagaagacaactctgtcactagccgagatacccagtcagaggatgacttttatggtggggactccagcgaagaagagtacgattggcgaaattaccagccctctcagatgtcagagagcgaactgcaaatgctggcctcattgcggtggcaacagaacgaagaactcgaggacgcagggaccagtcatggactcagcgccagccaagtagataattgcaacgtttctatcagtacctcatccgacgataccacgacatggaactcatgcttgcccccccccgtgaaccaggggaggcactaccagaaagaaatgaaccccccatctccatcaaacccccgcgattggcttaatatgctgtcaccacccatcgtgccaccaagccagcaaccagcagaacaaagacctgatagctgcgagtctttgtcggttcaaggagaggaggatctgtcagttgaggaagacgaagaggtccttacgcttttgtacgatccctgtttaaattgctacttcgatcctcagactggaaagtactacgaactcgtctag

SEQ ID NO: 327845 - DNA, 1692 bp, Artificial Sequence
  derived and/or modified sequence
atgataaagcgaaagatttggtgtaatctctgtattgacctcgtggcattcacctccgagatcttcaagggcgctgtttttcaatcccttgacggcattgtcgtctcagcgaactgcaagctgaggaagatttttactttaaagtccaaaccgcaggacactgctgacaaggatgcagtgtacggtgtgccattttcaacagacgaacccaccgacatcattcctaggagctgtcagctcatgaccgacgtgccacatgtgacccaactcctgaacatgacgaagctacggcagaccgagattaaattcggaggccaccctctccgcagcgccgagagcgaccaatttataaatcggggtaccagcatcacgcggaatagtaagaaccaggatgtctgccacatcgcttttgggagcaaggtgctgggtccaccccctctctccgggcgaagaaacaacatgaagatcagctccgagaccgtgagatcagtgggctccaagaacaatcggtcttgccagccctctaccgtggagaaatgcgtcaacggcaccgagatgtccgcactcttaatacccgagtccgaggaacaaggaaataaggaaaacattcaccagataaaacaaacggtgccaattcacgcagctaacctccacatcatgcatccccacccaccgcaggagccctcggccgataagaacaacaaccgaagacgactaaggctgaagagtacctcacgggaaagaacggagaccccttcaggcagcagctccggcaacaacagaatcgaagacaaagccagcaccattctgactaccgtgtcacagcagggcgctgagctcttgaactcgggcactttaggtccccagagtccagaccaatctgacgagtggatctttccagagaacgctgaccacatctcctacctcgcctctagccgtcagagtctactgctgggcgacgacagttgtaaccccagccatctgtggctggaggcgtctaaggaaagcgaacatgaccagcaggctgaggagtcccagtccgttcccaaggatatattcacattctcctcccgaccgaggagcgctccacatggtaagactcagacaatgagccccgaggagctgagttttattctagatctcaaggaggataatagcgtcacttctcgggatactcagtcggaagatgacttttacgggggagactcctccgaagaagaatacgattggagaaactatcagccaagtcaaatgagcgagtcggagctgcagatgctggcttcgctccgatggcaacagaacgaagagctggaggacgcaggaaccagccacggcctgtcagcttctcaggtcgacaactgtaacgttagtatttctacatcttctgacgacacaaccacttggaatagttgcctaccaccaccggtgaaccagggcaggcactatcaaaaagagatgaacccaccttccccaagcaaccccagagattggctcaatatgctgtctccacctatcgtccctccaagccagcaaccagcagagcagcgcccagatagctgcgaaagcttatctgtgcaaggcgaggaagacttgtcggtggaggaggatgaagaagtgctgactctgctgtacgatccctgtctcaactgttatttcgaccctcagactggcaaatattatgagctggtatag

SEQ ID NO: 327846 - DNA, 717 bp, Artificial Sequence
  derived and/or modified sequence
atgagcggcttccccgagaacgccgaccacatcagctacctggccagcagcagacagagcctgctgctgggcgacgacagctgcaaccccagccacctgtggctggaggccagcaaggagagcgagcacgaccagcaggccgaggagagccagagcgtgcccaaggacatcttcaccttcagcagcagacccagaagcgccccccacggcaagacccagaccatgagccccgaggagctgagcttcatcctggacctgaaggaggacaacagcgtgaccagcagagacacccagagcgaggacgacttctacggcggcgacagcagcgaggagggcaaccacagcatccagggcagcagaggccccaccaccggccccagcgagctgacccagctgaccctggagagcctgctgggcaaggccgccaagagaaccagcaaggagtacctgagaagcgcctacaccgaggccggcgccaccgagagccaggacagcagcatggagcagatcgacagaaacaacttcgagatgagcctgctgcccaccacctgcctgagccccaccggcagaagatgcggcagctgccagaagacccccgagcccgtgatcaaggccaaggacctgagcgcccagcaggtgcccgccagcctgaacaagaccagcctgaaggagatcagcggcgagagactgagcagcatccccgaggccagcgagtag

SEQ ID NO: 327847 - DNA, 717 bp, Artificial Sequence
  derived and/or modified sequence
atgtcaggcttccctgagaatgccgaccatatatcatacctcgctagctccagacaatcgctgctgttgggtgatgacagctgtaatcctagtcacctgtggttggaggcttccaaggaaagtgaacatgaccagcaggccgaggagagccagtcagtccccaaggatattttcactttttcatccaggccaagaagtgcacctcacgggaagactcagactatgtcacctgaagaattatcctttatcctcgacttgaaggaggacaatagcgtgacaagcagagatacacagtcagaagacgacttctacggaggggatagcagcgaggagggtaatcattctatccagggaagtcgcgggcccaccacagggccatccgaattgactcaactgacgctggagtcgttgctcgggaaggccgcaaagaggactagtaaagagtatttacgttcagcctacaccgaagcaggtgctaccgagagccaagattcgtctatggagcagatcgataggaacaatttcgagatgtctctgttgccgaccacctgcctatcacccactggacggagatgcggatcatgccaaaaaacgcctgagccagtgatcaaggcaaaagacttaagcgcccaacaggtgcccgcttctctgaataagaccagtctcaaggagatcagcggtgagcggctcagctctattccagaagcgagcgagtag

SEQ ID NO: 327848 - DNA, 717 bp, Artificial Sequence
  derived and/or modified sequence
atgagcggcttcccagaaaatgctgaccacatctcctacctggccagcagccggcagagcctgctgctgggagatgacagctgcaaccccagccacctgtggctggaggccagcaaggagagcgagcatgaccagcaggccgaggagagccagagcgtgcccaaggacatcttcaccttcagcagccggcccaggtctgcccctcatggcaagacccagaccatgagccctgaggagctgtccttcatcctggacctgaaggaggacaacagcgtgaccagccgggacacccagagtgaagatgacttctacggcggggacagcagcgaggagggcaaccacagcatccagggcagccggggccccaccaccggccccagcgagctgacccagctgaccctggagagcctgctgggcaaggccgccaagaggaccagcaaggagtacctgcggagcgcctacacagaagctggggccacagagagccaggacagctccatggagcagattgacaggaacaactttgagatgagcctgctgcccaccacctgcctgagccccaccggccgccgctgtggcagctgccagaagaccccagagcctgtgatcaaggccaaggacctgagcgcccagcaggtgcctgccagcctgaacaagaccagcctgaaggagatcagcggggagcggctgagcagcatccctgaggccagcgagtag

SEQ ID NO: 327849 - DNA, 717 bp, Artificial Sequence
  derived and/or modified sequence
atgagcggcttccccgagaacgccgaccacatcagctacctggcctctagcaggcaatcattacttctgggtgatgacagttgcaatccctcccacctatggcttgaggccagtaaggaatcggagcacgatcaacaggcagaagagtctcagtcagtgcctaaagatatattcacattcagttcaaggccacggtctgctccccacggtaagacacagactatgtcacctgaggaactctccttcatcctcgacttaaaagaggacaacagcgtaaccagtagggatactcaaagcgaggatgacttttacggaggagactcttctgaggagggaaaccatagtattcagggctcccgaggaccgacgacagggccctctgagttgactcagctgactcttgagagtcttctgggtaaggctgctaaacgaaccagtaaggaatatctgcggtctgcttacacagaagcaggcgctactgaatcccaggacagtagcatggagcagattgaccgcaataacttcgaaatgtcactcctcccgactacgtgcctgtctcccaccgggcggaggtgcggctcttgtcagaagactccggaacccgtgatcaaggcaaaggacctgagtgcgcaacaagtccccgcaagccttaataaaacctctcttaaagagatctcaggtgagaggctgagttctatccccgaggcctctgagtag

SEQ ID NO: 327850 - DNA, 717 bp, Artificial Sequence
  derived and/or modified sequence
atgtctggattcccggaaaacgccgatcacatcagttatcttgccagctctaggcagtctcttttgctcggagatgatagttgcaacccctcccacctttggctagaggcctccaaagagtcagagcatgatcagcaagccgaggagtcgcagtctgtgccgaaggatatattcaccttttcttctagaccacggtctgcaccccatgggaaaacacaaacaatgtcgcctgaagaattatctttcatactcgacctaaaagaggacaacagtgtaacaagccgagacacacagagtgaggacgacttctacggaggtgactcttctgaagaaggaaaccattcaatccaggggagccggggacccaccacgggtccatctgaattgactcagttaacattagagagcctgctcggcaaagcagctaaaaggactagcaaggagtatctgaggtcagcatacaccgaagctggcgcaaccgagtcccaggactcaagcatggagcagatcgatagaaacaatttcgagatgtctctgctcccaacaacctgcctcagtcccactggtaggaggtgcggaagctgccagaaaacccccgagccagtcattaaagctaaggatctatcagcacagcaagtcccagcatctcttaataaaacatctcttaaggagatttccggggaaagactgtcgtctattccagaggcatctgaatag

SEQ ID NO: 327851 - DNA, 2070 bp, Artificial Sequence
  derived and/or modified sequence
atgatcaagagaaagatctggtgcaacctgtgcatcgacctggtggccttcaccagcgagatcttcaagggcgccgtgttccagagcctggacggcatcgtggtgagcgccaactgcaagctgagaaagatcttcaccctgaagagcaagccccaggacaccgccgacaaggacgccgtgtacggcgtgcccttcagcaccgacgagcccaccgacatcatccccagaagctgccagctgatgaccgacgtgccccacgtgacccagctgctgaacatgaccaagctgagacagaccgagatcaagttcggcggccaccccctgagaagcgccgagagcgaccagttcatcaacagaggcaccagcatcaccagaaacagcaagaaccaggacgtgtgccacatcgccttcggcagcaaggtgctgggccccccccccctgagcggcagaagaaacaacatgaagatcagcagcgagaccgtgagaagcgtgggcagcaagaacaacagaagctgccagcccagcaccgtggagaagtgcgtgaacggcaccgagatgagcgccctgctgatccccgagagcgaggagcagggcaacaaggagaacatccaccagatcaagcagaccgtgcccatccacgccgccaacctgcacatcatgcacccccaccccccccaggagcccagcgccgacaagaacaacaacagaagaagactgagactgaagagcaccagcagagagagaaccgagacccccagcggcagcagcagcggcaacaacagaatcgaggacaaggccagcaccatcctgaccaccgtgagccagcagggcgccgagctgctgaacagcggcaccctgggcccccagagccccgaccagagcgacgagtggatcttccccgagaacgccgaccacatcagctacctggccagcagcagacagagcctgctgctgggcgacgacagctgcaaccccagccacctgtggctggaggccagcaaggagagcgagcacgaccagcaggccgaggagagccagagcgtgcccaaggacatcttcaccttcagcagcagacccagaagcgccccccacggcaagacccagaccatgagccccgaggagctgagcttcatcctggacctgaaggaggacaacagcgtgaccagcagagacacccagagcgaggacgacttctacggcggcgacagcagcgaggagggcaaccacagcatccagggcagcagaggccccaccaccggccccagcgagctgacccagctgaccctggagagcctgctgggcaaggccgccaagagaaccagcaaggagtacctgagaagcgcctacaccgaggccggcgccaccgagagccaggacagcagcatggagcagatcgacagaaacaacttcgagatgagcctgctgcccaccacctgcctgagccccaccggcagaagatgcggcagctgccagaagacccccgagcccgtgatcaaggccaaggacctgagcgcccagcaggtgcccgccagcctgaacaagaccagcctgaaggagatcagcggcgagagactgagcagcatccccgaggccagcgagtacgactggagaaactaccagcccagccagatgagcgagagcgagctgcagatgctggccagcctgagatggcagcagaacgaggagctggaggacgccggcaccagccacggcctgagcgccagccaggtggacaactgcaacgtgagcatcagcaccagcagcgacgacaccaccacctggaacagctgcctgcccccccccgtgaaccagggcagacactaccagaaggagatgaacccccccagccccagcaaccccagagactggctgaacatgctgagcccccccatcgtgccccccagccagcagcccgccgagcagagacccgacagctgcgagagcctgagcgtgcagggcgaggaggacctgagcgtggaggaggacgaggaggtgctgaccctgctgtacgacccctgcctgaactgctacttcgacccccagaccggcaagtactacgagctggtgtag

SEQ ID NO: 327852 - DNA, 2070 bp, Artificial Sequence
  derived and/or modified sequence
atgatcaaaaggaaaatctggtgcaacctctgcatcgatttagtggcctttaccagcgagatttttaaaggtgccgtgttccagagccttgatggcatagtggtctccgctaactgcaagcttagaaagatatttactctgaagtcaaagccccaagacacagctgacaaggatgccgtctatggggtgccattctcaacagacgaacccaccgacatcatccctagatcctgtcagctgatgactgatgtgccacacgtgacacagcttcttaatatgaccaagctcagacaaacagaaatcaagtttggcggccacccactgcggagcgctgaaagtgatcagttcattaaccgtggaacaagtattacaagaaactcaaaaaatcaggacgtgtgccacatcgcttttggttcaaaagttctaggcccacctcccctctctgggcgtcggaacaacatgaaaatcagctccgaaacagtgcggtctgtgggttcgaagaataacagaagctgccaaccgtccaccgtcgaaaaatgtgtgaatggcaccgagatgtccgcattgctgatcccagaatctgaggaacagggaaacaaggaaaatatacatcagatcaaacagaccgtgcccattcatgccgccaacttgcacatcatgcacccgcatcccccacaggaaccatccgcggacaaaaataacaatcgtagacgcctccggttaaagtccaccagccgggagaggactgaaaccccaagcggctcaagttctggaaataatcgcattgaggacaaagcaagcacaatactgaccacagttagtcagcagggagccgagctgctgaattctggaacactgggtccacaatcgcccgaccaatccgatgagtggatttttcccgagaatgctgatcatatctcatacctagccagcagcagacagtctctactgttgggtgacgacagctgtaatccatcccatctttggttagaggcaagcaaagagtctgaacatgatcaacaggcagaggaatcacagtctgtcccaaaagatatttttacttttagcagccggcctcgctccgcccctcatggaaaaacccaaacaatgtctcccgaagagctgagcttcattctagacttaaaagaagacaactcagttacctcccgggacacacaaagcgaggatgacttctacggaggcgacagttctgaggaaggaaaccactccattcagggatcacgcggcccgaccacgggcccatcggaactcacacagttaacactggagagtttgctgggcaaagcggctaaacggacttctaaggaatacttgcgcagtgcttatactgaagctggtgcgactgagtctcaggacagcagtatggagcaaattgacagaaacaatttcgagatgagtctcttgccgaccacttgcctgagtccaaccggaaggcggtgtggatcatgtcagaagacaccagagcccgtgatcaaggctaaagacctaagcgcccagcaggtgccagccagcctgaataagacttctctgaaagagatttcaggcgaaagattatcttctatccccgaagcctctgagtatgactggaggaattatcagcccagccaaatgtccgaatctgagttgcaaatgctagcaagtttgcgatggcagcagaatgaggagctcgaagacgccgggacctcgcatggtctgtccgcttcacaggtggacaattgcaacgtgtccatctcgacttcttccgacgacaccacgacctggaattcttgtctaccacctcctgtgaatcagggtcgccattatcagaaagagatgaatcccccttcaccctcgaatccgcgggattggctaaatatgctcagcccaccaatagttccgccctctcagcagcctgcagagcagcggccggactcttgtgagagcctcagcgttcaaggggaagaggatctgtccgtcgaagaggacgaggaagtgctaaccctgctttatgatccgtgtcttaactgctactttgatccccagacgggaaagtactacgagttggtgtag

SEQ ID NO: 327853 - DNA, 2070 bp, Artificial Sequence
  derived and/or modified sequence
atgatcaagaggaagatctggtgcaacctgtgcatcgacctggtggccttcaccagcgagatcttcaagggagctgtgttccagagcctggatggcatcgtggtgtctgccaactgcaagctgaggaagatcttcaccctgaagagcaagccccaggacacagctgacaaggatgctgtgtatggagtgcccttcagcacagatgagcccacagacatcatccccaggagctgccagctgatgacagatgtgccccacgtgacccagctgctgaacatgaccaagctgcggcagacagagatcaagtttggaggccaccccctgcggtctgctgagagtgaccagttcatcaacagaggcaccagcatcaccaggaacagcaagaaccaggatgtgtgccacatcgccttcggcagcaaggtgctgggccccccacccctgagcggcagaagaaacaacatgaagatcagcagcgagaccgtgcgctctgtgggcagcaagaacaacagaagctgccagcccagcacagtggagaagtgtgtgaatggaacagagatgtctgccctgctgatccctgagagcgaggagcagggcaacaaggagaacatccaccagatcaagcagacagtgcccatccacgccgccaacctgcacatcatgcacccccaccccccccaggagcccagcgctgacaagaacaacaacagaagaaggctgcggctgaagagcaccagccgggagaggacagagaccccatctggcagcagcagcggcaacaacagaattgaggacaaggccagcaccatcctgaccaccgtgtcccagcagggcgctgagctgctgaacagcggcaccctgggcccccagagcccagaccagagtgatgagtggatcttcccagaaaatgctgaccacatctcctacctggccagcagccggcagagcctgctgctgggagatgacagctgcaaccccagccacctgtggctggaggccagcaaggagagcgagcatgaccagcaggccgaggagagccagagcgtgcccaaggacatcttcaccttcagcagccggcccaggtctgccccccacggcaagacccagaccatgagccctgaggagctgtccttcatcctggacctgaaggaggacaacagcgtgaccagccgggacacccagagtgaagatgacttctatggaggagacagcagcgaggagggcaaccacagcatccagggcagccggggccccaccaccggccccagcgagctgacccagctgaccctggagagcctgctgggcaaggccgccaagaggaccagcaaggagtacctgcggagcgcctacacagaggccggggccacagagagccaggacagctccatggagcagattgacaggaacaactttgagatgagcctgctgcccaccacctgcctgagccccactggaagaagatgtggcagctgccagaagaccccagagcccgtcatcaaggccaaggacctgagcgcccagcaggtgcctgccagcctgaacaagaccagcctgaaggagatctctggagagcggctgagcagcatccctgaggcctctgaatatgactggaggaactaccagcccagccagatgtctgagagcgagctgcagatgctggccagcctgcgctggcagcagaatgaggagctggaggatgctggcaccagccacggcctgagcgccagccaggtggacaactgcaatgtgtccatcagcaccagcagtgatgacaccaccacctggaacagctgcctgcccccacctgtgaaccagggccgccactaccagaaggagatgaacccccccagccccagcaacccccgggactggctgaacatgctgagcccccccatcgtgccccccagccagcagcctgctgagcagaggccagacagctgtgagagcctgtctgtgcagggcgaggaggacctgtctgtggaggaggatgaggaggtgctgaccctgctgtatgacccctgcctgaactgctactttgacccccagacaggcaagtactatgagctggtgtag

SEQ ID NO: 327854 - DNA, 2070 bp, Artificial Sequence
  derived and/or modified sequence
atgatcaagcggaagatctggtgcaacctgtgcatcgacctggtggccttcacatccgagatttttaagggagctgtgtttcagtctttggacgggattgtggtttctgctaactgtaagctgaggaaaatttttacactcaagagcaaaccccaggacacagctgacaaagacgccgtatacggtgtgcccttctccacagacgaaccgactgacataataccgaggagttgtcagctcatgactgatgtgccccacgtcacacagcttttaaatatgacgaaactccgtcagacagagataaaatttggaggccatcctctcagaagtgcagaatctgaccagtttatcaatagaggaacctctattactcgaaacagcaagaaccaagacgtatgtcacattgcctttggatcaaaagttttgggaccaccgccattgtccggtaggcggaataacatgaaaatttcctctgaaaccgttagaagcgttgggagtaaaaacaatagaagttgccaaccaagtactgtcgaaaaatgtgtgaacggtacagagatgtctgccctcctaattcctgagtctgaagaacagggcaacaaagagaacatacaccagattaaacaaactgttccgatacatgccgccaacctccacataatgcacccccatcccccacaggaaccatccgctgataagaataacaacaggagacgattaagattaaagagtacatcacgtgagcgcacggagacaccttcagggtctagctccgggaataatcgtattgaggacaaagccagcactatccttacaaccgtgagccagcaaggggccgagctcttgaattcaggcaccctgggcccccagtcgcccgaccagagtgacgaatggatttttcccgagaatgccgaccacatttcataccttgcttcaagtaggcagtctctccttctgggcgatgatagttgcaatccgagccacctgtggctcgaggcaagcaaggaatctgaacatgaccagcaggccgaagagtcccagtcggtgcctaaagatatctttacttttagtagtcgaccccgtagcgcacctcatggcaagacccaaacaatgagcccagaagaacttagttttatcctagacctgaaagaagacaacagcgtgactagtcgagacacccagtcagaagatgatttttacgggggtgatagctcagaggaggggaaccatagtatccagggcagccgtggccctaccacgggcccttcagagctcacacaactaaccctcgaatccttgctcggcaaggcagcaaagagaactagtaaagagtatctgcgttccgcatacaccgaagcaggcgccactgaaagccaggacagcagtatggagcagatagatcgtaacaacttcgagatgagcctactcccaactacttgtctgtcccctacgggacgccggtgcgggtcatgccaaaagaccccagagccagttattaaagctaaggatctgtccgcccagcaagtaccagctagtctaaataaaacgtcattgaaagagatcagcggcgaaaggctttcaagcatccccgaggcctcagaatatgattggaggaattaccagccatctcagatgtccgagtctgagctccagatgctcgcgtctttaagatggcagcagaatgaggaactggaggacgctggcaccagccatggcctttctgccagccaggtcgataactgcaatgtctctatttcgacctcttcagacgatacaaccacatggaactcttgcctgccaccacccgtgaatcaaggtagacattaccagaaggagatgaatccaccatctccttctaaccctagagactggctgaacatgttgtcacctcccattgtgccaccttcgcagcaacccgctgagcaaagacctgacagctgtgagagtctgtcagttcagggagaagaggacctttccgtggaagaagacgaagaggtgttgacactgttatacgatccctgtctaaattgctacttcgacccacagacaggaaagtattacgagctggtgtag

SEQ ID NO: 327855 - DNA, 2070 bp, Artificial Sequence
  derived and/or modified sequence
atgatcaaaagaaagatctggtgcaacctttgtatcgatttggtggcattcacgtctgagatatttaaaggggctgtctttcagtctctcgacgggattgtcgtgtctgctaactgcaaactgcgcaagatattcacactcaagtccaagccccaggatacagctgacaaggacgcagtgtatggtgtgcctttcagcactgacgaaccaacagacattattccccgttcatgccagctcatgacagacgtgcctcacgtgacgcaactgctgaacatgaccaaattaagacagaccgaaatcaagttcggcggtcatccattgagaagtgccgagtccgaccagttcatcaatagggggactagcatcacccggaattctaaaaatcaggacgtctgtcatatcgcctttggatcgaaggttcttgggcctcccccactgtcagggaggcgcaacaatatgaaaatatcctccgagacagtgcggtcagtcggatctaagaataatagatcttgccagccgtcgacagtggagaagtgtgtaaatggtacggagatgagcgctctgttaatacccgagtctgaagaacaagggaacaaggagaacatccatcagattaaacagaccgttcctatccacgcggctaatttgcacattatgcatccgcaccctcctcaggaaccctccgcagacaagaataacaacagaagacgcttgaggctgaagagcacctctcgcgagcggaccgagacccccagcggttctagctcagggaataacaggatcgaggataaagcatctaccatcctgacaactgtcagccaacagggggctgagctgctcaattcaggcacacttggtcctcagagtccagaccagagtgatgaatggatattcccggaaaatgccgatcatatatcttatctggccagttcacgccaaagtttattactgggagacgacagttgcaacccaagtcacctttggttggaagcttcgaaggagagtgaacacgatcagcaggcagaggagtcgcagtcagtccccaaggacatttttacgttcagttcccggcctagaagcgcccctcacggtaagactcagactatgagcccagaggaactatccttcatccttgatctcaaagaggacaattctgtcacttcccgagatacccagtcagaggacgatttctacggaggcgacagctctgaggaggggaaccatagcattcagggatcaaggggtcccaccactgggcctagcgagctgacccagctaacattggaaagtctactggggaaggcagcgaagcgtacctcaaaagaatacctcaggtccgcttataccgaggccggagcgacagaatcgcaggatagtagcatggaacagattgaccgcaataactttgagatgagtttactgcctaccacttgtctgtcgccaacaggccgaaggtgcgggtcttgccagaagacgccagagccagtcattaaagctaaagatctgtccgcccaacaagtccccgctagcctgaataagacttcactgaaagaaatttccggcgaaaggctcagcagcattcccgaggcttcagaatacgactggcgcaactatcaaccgtcccagatgtccgaatcagagctccagatgctcgcttcactgcgatggcagcaaaacgaggaacttgaggacgccggaacctctcacggcttgagcgcttcgcaagtcgataattgtaacgtcagtatctcaacttcctctgatgatacaacaacatggaacagctgcctaccccctcctgtcaaccaagggagacactatcaaaaagaaatgaaccctcctagcccctctaacccaagagactggttgaatatgctgagccccccaatcgtgcctcccagccagcagcccgctgagcagcggcctgacagctgtgagtctttatcagtccaaggtgaggaagacctgtccgtggaagaggacgaggaggtgctgacactgctgtacgatccatgtttaaactgttactttgaccctcagactggcaagtattacgaattagtctag

SEQ ID NO: 327856 - protein, 679 aa, Artificial Sequence
  derived and/or modified sequence
MFLLTGGVSLKSAEKNPDPTWLQDKSWEEICRASEFPAFRGLRQHFCEHIYEWREIYDSKEPHNAKFPAPMDKNLNELQKIIILRCLRPDKITPAITNYVTDKLGKKFVEPPPFDLTKSYLDSNCTIPLIFVLSPGADPMASLLKFANDKSMSGNKFQAISLGQGQGPIAAKMIKAAIEEGTWVCLQNCHLAVSWMPMLEKICEDFTSETCNSSFRLWLTSYPSSKFPVTILQNGVKMTNEPPTGLRLNLLQSYLTDPVSDPEFFKGCRGKELLFINEYDTIPFEAISYLTGECNYGGRVTDDWDRRLLLTMLADFYNLYIVENPHYKFSPSGNYFAPPKGTYEDYIEFIKKLPFTQHPEIFGLHENVDISKDLQQTKTLFESLLLTQGGSKQTGASGSTDQILLEITKDILNKLPSDFDIEMALRKYPVRYEESMNTVLVQEMERFNNLIITIRNTLRDLEKAIKGVVVMDSALEALSGSLLVGKVPEIWAKRSYPSLKPLGSYITDFLARLNFLQDWYNSGKPCVFWLSGFFFTQAFLTGAMQNYARKYTTPIDLLGYEFEVIPSDTSDTSPEDGVYIHGLYLDGARWDRESGLLAEQYPKLLFDLMPIIWIKPTQKSRIIKSDAYVCPLYKTSERKGTLSTTGHSTNFVIAMLLKTDQPTRHWIKRGVALLCQLDD

SEQ ID NO: 327857 - protein, 784 aa, Artificial Sequence
  derived and/or modified sequence
MSDANKAAIAAEKEALNLKLPPIVHLPENIGVDTPTQSKLLKYRRSKEQQQKINQLVIDGAKRNLDRTLGKRTPLLPPPDYPQTMTSEMKKKGFNYIYMKQCVESSPLVPIQQEWLDHMLRLIPESLKEGKEREELLESLINEVSSDFENSMKRYLVQSVLVKPPVKSLEDEGGPLPESPVGLDYSNPWHSSYVQARNQIFSNLHIIHPTMKMLLDLGYTTFADTVLLDFTGIRAKGPIDCESLKTDLSIQTRNAEEKIMNTWYPKVINLFTKKEALEGVKPEKLDAFYSCVSTLMSNQLKDLLRRTVEGFVKLFDPKDQQRLPIFKIELTFDDDKMEFYPTFQDLEDNVLSLVERIAEALQNVQTIPSWLSGTSTPVNLDTELPEHVLHWAVDTLKAAVHRNLEGARKHYETYVEKYNWLLDGTAVENIETFQTEDHTFDEYTEFIEKFLSLASEIMLLPQWIHYTMVRLDCEDLKTGLTNKAKAFANILLNDIASKYRKENECICSEFEAIKEHALKVPETTEEMMDLISYVEKARTVGIEELILRIQESKRQMSYFLDVFLFPQEDLALNATVLMWPRKINPIFDENDELIENAKHKKENELMAKREKLILEIEKESRRMEEFTEFAELERMQQYVTDVRQLQKRIQESEEAVQFINKEEELFKWELTKYPELDKLKVNIEPYQKFFNFVLKWQRSEKRWMDGGFLDLNGESMEADVEEFSREIFKTLKFFQTKLKKELQEKRKAARKRSLEEEKIEEEPKDNATITMCSTVMEQIKAFKV

SEQ ID NO: 327858 - DNA, 91 bp, Artificial Sequence
  derived and/or modified sequence
gtaacaaaacagactcatagaccaatagaacagaatagagaattcagaaataagactgcacttctatgaccatgtgatcttagacaaacct

SEQ ID NO: 327859 - DNA, 1156 bp, Artificial Sequence
  derived and/or modified sequence
atatctcaggctgatctaaaagaactggaaacaaaaaagaagatttcccaggtgatctgggcagcctctaccaatgtgatgcgaatgatgagaatgtgatggcgaagatgaggagcccctgacaaacgtagtcgggaatgacgaaaactgtccagcagcaacagaaccctggtggaccagatgaccttagaaaacacaaaatcaatgtgcaaaaatcatgagcattcctatacacaaataacagacaaacagagagccaaatcatgagtgaactcccattcacaattgcttcaaagagaataaaatacctaagaattcaacttacaagggatgtgaaggacctcttcaagaagaactacaaaccactgctcaatgaaataaaagaggacacaaacaaatggaagaacattccatgctcatggataggaagaatcaatatcatgaaaatggccatactacctaaggtaatttatagattcaatgccattcccatcaagctaccaatgactttcttcacaaaactggaaaaaactactttaaagttcatatggaaccaaaaaagagccctcattgccaagacaatcataagcaaaaagaacaaagctggaggcatcacactgcctgactttaaactatgctacaaggctacagtaaccaaaacagcatgctgctggtacctaaacagagatatagaccaatggaacagaacagaggtctcagaaataacaatacacatctacaaccatctgatctttgacaaacctgacaaaaacaagcaatggggaaaggattccctatttaataaatagtgctgggaaaactggctagccatatgtagaaagctgaaactggatcccttccttacaccttatacaaaaattaattcaagatggattaaagacttacatgttagacctaaaaccataaaaaccctagatgaaaacctaggtaataccattcgggacagaggcatgggcaaggacttcatgactaaaacaccaaaagtaatgacaacaaaagccaaaatagacaaatgggatctaattaaactgaagagcttctgcacaggaaaagaaactaccatcagagtgaacaggcaacctacagaatgggagaaaatttttgtagtctactcatctgacaaagggctaatatc

SEQ ID NO: 327860 - protein, 472 aa, Artificial Sequence
  derived and/or modified sequence
MWRLPGARAALRVIRTAVEKLSRAEAGSQTAAGAMERAVVRCVPSEPKLSLSFALADGSHKNMQRDQSEPLGRVLSRIATNALKGHAKAAAAKKSRKSRPNASGGAACSGPGPEPAVFCEPVVKLYYREEAVAEDVLNVDAWQDGAVLQIGDVKYKVERNPPAFTELQLPRYIMAGFPVCPKLSLEFGDPASSLFRWYKEAKPGAAEPEVGVPSSLSPSSPSSSWTETDVEERVYTPSNADIGLRLKLHCTPGDGQRFGHSRELESVCVVEAGPGTCTFDHRHLYTKKVTEDALIRTVSYNILADTYAQTEFSRTVLYPYCAPYALELDYRQNLIQKELTGYNADVICLQEVDRAVFSDSLVPALEAFGLEGVFRIKQHEGLATFYRKSKFSLLSQHDISFYEALESDPLHKELLEKLVLYPSAQEKVLQRSSVLQVSVLQSTKDSSKRICVANTHLYWHPKGRFYLVSQVT

SEQ ID NO: 327861 - DNA, 1419 bp, Artificial Sequence
  derived and/or modified sequence
atgtggagactgcccggcgccagagccgccctgagagtgatcagaaccgccgtggagaagctgagcagagccgaggccggcagccagaccgccgccggcgccatggagagagccgtggtgagatgcgtgcccagcgagcccaagctgagcctgagcttcgccctggccgacggcagccacaagaacatgcagagagaccagagcgagcccctgggcagagtgctgagcagaatcgccaccaacgccctgaagggccacgccaaggccgccgccgccaagaagagcagaaagagcagacccaacgccagcggcggcgccgcctgcagcggccccggccccgagcccgccgtgttctgcgagcccgtggtgaagctgtactacagagaggaggccgtggccgaggacgtgctgaacgtggacgcctggcaggacggcgccgtgctgcagatcggcgacgtgaagtacaaggtggagagaaacccccccgccttcaccgagctgcagctgcccagatacatcatggccggcttccccgtgtgccccaagctgagcctggagttcggcgaccccgccagcagcctgttcagatggtacaaggaggccaagcccggcgccgccgagcccgaggtgggcgtgcccagcagcctgagccccagcagccccagcagcagctggaccgagaccgacgtggaggagagagtgtacacccccagcaacgccgacatcggcctgagactgaagctgcactgcacccccggcgacggccagagattcggccacagcagagagctggagagcgtgtgcgtggtggaggccggccccggcacctgcaccttcgaccacagacacctgtacaccaagaaggtgaccgaggacgccctgatcagaaccgtgagctacaacatcctggccgacacctacgcccagaccgagttcagcagaaccgtgctgtacccctactgcgccccctacgccctggagctggactacagacagaacctgatccagaaggagctgaccggctacaacgccgacgtgatctgcctgcaggaggtggacagagccgtgttcagcgacagcctggtgcccgccctggaggccttcggcctggagggcgtgttcagaatcaagcagcacgagggcctggccaccttctacagaaagagcaagttcagcctgctgagccagcacgacatcagcttctacgaggccctggagagcgaccccctgcacaaggagctgctggagaagctggtgctgtaccccagcgcccaggagaaggtgctgcagagaagcagcgtgctgcaggtgagcgtgctgcagagcaccaaggacagcagcaagagaatctgcgtggccaacacccacctgtactggcaccccaagggcagattctacctggtgagccaggtgacctag

SEQ ID NO: 327862 - DNA, 1419 bp, Artificial Sequence
  derived and/or modified sequence
atgtggcgactccctggcgccagagccgccttgagggttatacgcactgctgtcgaaaagctatctcgcgccgaggcagggtcccagactgccgccggggccatggagagagctgtagtgcgctgtgtcccctcggaaccgaagctgtccttatcctttgcgctggccgatgggagccataagaatatgcagcgagatcagtcagagcccctgggccgcgtattgtcccggattgctaccaatgcactgaagggccacgcaaaggctgccgccgccaaaaagtcgcgtaaaagtcgcccgaatgcctcagggggagcggcctgctccggtcccggtcctgagcccgccgtgttctgtgaacccgtggtgaaattgtattaccgggaagaagcggtggcagaggacgtcctcaacgtcgatgcttggcaggatggcgctgtattacagattggcgacgtgaagtataaagttgagcggaaccctcctgcattcactgagctccagttgcctcgctatattatggctggcttccctgtctgccccaagcttagtctagagtttggtgatcccgccagttccctgttccgatggtacaaggaagcaaagcctggagctgcagagcccgaagtcggagtgcctagttccctgtctccttccagtccatctagctcttggactgagactgacgtagaagagcgagtgtatactcccagtaacgctgacataggtctacgcctgaaattgcactgtactccaggggacggccaacgcttcggccattccagggagctagaaagtgtgtgcgtcgtggaggcagggcccggcacttgtacttttgaccacaggcacctgtacactaagaaagttaccgaggacgccctgataagaaccgtgtcttataacatcctggcagatacttatgcacagacagaattctcccgcaccgtcctctatccttattgcgccccttacgccctggagttggattaccgtcagaatttaattcagaaagagctgactgggtacaatgctgatgtgatttgtttgcaggaggtggatcgggccgttttctctgattccctggttcctgccctggaggcctttggattagaaggagtcttccgcatcaagcagcacgaaggtctggcaaccttctatcgcaaatcaaagttcagcctgctgtcacagcacgatatttcgttctatgaagccttggagagtgaccctcttcacaaagagctgctggagaagctggtgctgtatcccagcgcccaggaaaaggtgcttcagagaagctccgtcttgcaggtttctgtgctgcagtccaccaaggacagctcgaaaagaatttgcgtggcgaatacccacctttattggcatccgaaagggaggttctatctggtcagtcaggtaacgtag

SEQ ID NO: 327863 - DNA, 1419 bp, Artificial Sequence
  derived and/or modified sequence
atgtggaggctgcccggggcccgggccgccctgcgggtcatcagaacagctgtggagaagctgagcagagctgaggccggcagccagacagctgctggggccatggagagagctgtggtgcgctgtgtgcccagcgagcccaagctgagcctgagctttgccctggctgatggcagccacaagaacatgcagagggaccagagcgagcccctgggccgggtgctgagccgcatcgccaccaatgccctgaagggccacgccaaggctgctgctgccaagaagagcaggaagagccggcccaatgccagcggcggggccgcctgcagcggccctggccctgagcctgctgtgttctgtgagcctgtggtgaagctgtactaccgggaggaggccgtggccgaggatgtgctgaatgtggatgcctggcaggatggagctgtgctgcagattggagatgtgaagtacaaggtggagagaaatcctccagccttcacagagctgcagctgccccgctacatcatggccggcttccctgtgtgccccaagctgagcctggagtttggagaccctgccagcagcctcttccgctggtacaaggaggccaagccaggagctgctgagcctgaggtgggcgtgcccagcagcctgagccccagcagccccagcagctcctggacagaaacagatgtggaggagcgggtgtacacccccagcaatgctgacatcggcctgcggctgaagctgcactgcaccccaggagatggccagcgcttcggccacagccgggagctggagagcgtgtgtgtggtggaggccggccctggcacctgcacctttgaccaccgccacctgtacaccaagaaggtgacagaagatgccctgatcagaacagtgtcctacaacatcctggccgacacctacgcccagacagagttcagcaggacagtgctgtacccctactgtgccccctatgccctggagctggactaccggcagaacctgatccagaaggagctgaccggctacaatgctgatgtgatctgcctgcaggaggtggacagagctgtgttcagtgacagcctggtgcctgccctggaggccttcggcctggagggcgtcttccgcatcaagcagcacgagggcctggccaccttctacaggaagagcaagttcagcctgctgagccagcacgacatctccttctatgaggccctggagagtgaccccctgcacaaggagctgctggagaagctggtgctgtaccccagcgcccaggagaaggtgctgcagaggagctctgtgctgcaggtgtctgtgctgcagagcaccaaggacagcagcaagaggatctgtgtggccaacacccacctgtactggcaccccaagggccgcttctacctggtgtcccaggtgacctag

SEQ ID NO: 327864 - DNA, 1419 bp, Artificial Sequence
  derived and/or modified sequence
atgtggcggctgcccggcgcccgggccgccctgcgggtgatccggaccgccgtggagaaactcagtagggcagaggcaggaagccagacggccgccggggctatggagcgggccgtcgtccgctgtgttccttcagagccaaagttgtccctctcatttgccctggccgacgggagtcacaaaaatatgcagcgggatcaaagcgagcccctcggtagggtcttgtccagaatcgccacaaatgccctaaagggacatgcaaaggccgccgcagctaagaagagcaggaagagtaggcctaacgcttccggcggcgcggcgtgcagcgggcccggtcccgagccggccgtattttgcgaacccgtcgtgaagctttactaccgggaggaggcggtcgcagaagacgtcctcaacgtggacgcttggcaggacggagcagttctgcagatcggcgatgtcaagtacaaagtggagagaaacccccctgctttcaccgaactgcagctgcctcgctacatcatggcaggctttccagtatgcccaaaactgtcattagaatttggagatccagcctcctctctatttcgctggtataaggaagctaagccgggcgcagccgagcccgaagtgggagtaccgagttccctgtctccatcttctcccagtagttcgtggacggagaccgacgtagaggaaagagtgtacacgccttccaacgctgatatcggactccggttgaaacttcactgcacacctggagacggccagcggttcggccacagtagagagctcgaatccgtgtgcgtggtcgaagcaggaccgggaacatgtacattcgaccaccggcacttgtataccaaaaaggtaaccgaagatgcactgatccgaactgtgtcctacaacattctggcggatacgtacgcccaaactgaattttccagaacagtgttgtatccgtattgcgccccctatgcattagagctggattatcgtcaaaatctgatccagaaagagttgacaggatacaatgccgacgtgatctgtctgcaagaagtggaccgagccgtgtttagcgattcattggtgcctgccctagaggcatttgggcttgagggagtttttcgaatcaagcagcacgaggggctggcgacgttttacagaaaaagcaagttctctcttctgtctcagcacgacatatctttttatgaggctctggagtcagatccgttacacaaggaactgctggagaagctcgtgttgtacccaagcgcacaggaaaaagtcctgcagagatctagtgtgctgcaggtgagtgtgctacagtcaacaaaggactcctccaaacgaatttgcgtggccaatactcatctgtactggcatcccaagggcaggttttatttggtgtctcaggtgacctag

SEQ ID NO: 327865 - DNA, 3040 bp, Artificial Sequence
  derived and/or modified sequence
gagatctgaatgagtcaaagccggcggcctcggctcctcagctccacctgacagtaggccgctgatcggccgcgggtcttgtcgaccgctaggccaccaggttcatgtggaggctcccaggcgcccgcgccgcgcttcgggtgatccggacggcggtggagaagctgagccgggctgaagcggggagccagacagcggcgggagcgatggagcgcgctgtagtgcgctgcgtaccttcggaacccaagctgagcctgtcattcgctttggctgatggtagccacaagaacatgcagcgcgaccagagcgagccgctgggtcgagtcctcagccgcatcgctaccaatgccctaaagggtcacgctaaggcggccgccgccaagaagagcaggaagagccggccgaatgctagcggcggtgcggcctgttcagggccggggcctgagccggctgtgttctgcgagcccgtggtgaagctgtactaccgggaagaggcagtggctgaggacgtgctcaacgtggatgcctggcaagacggcgcggtgctgcagatcggcgatgttaagtacaaggtggagcgcaacccgcccgccttcaccgaactgcagttgccgcgctacatcatggccgggttccctgtgtgccccaaactcagcctcgaatttggggatcccgccagctcccttttccgctggtataaggaagccaagcccggagcggcggagcccgaggtcggtgtcccctcgtcattgtctccctcctcaccttcttcttcttggactgagactgatgtggaggagcgtgtctacaccccgtccaatgccgacatcgggctaaggctcaagcttcactgcaccccaggcgatgggcagcgctttgggcacagccgggagttggaaagtgtgtgtgtggtagaggctgggcctggcacctgcacttttgaccaccggcatctctacacgaagaaggtgactgaggacgctctcatccgcactgtctcttacaacatcctggcagacacgtacgcgcagactgagttctcgcgaacggttctgtacccatactgtgccccctacgccctggagctcgactaccgccagaaccttatccagaaggaactcaccggctacaacgccgatgtcatctgtttgcaggaggttgaccgcgcagtgttttctgacagcttggtacccgccctagaggccttcgggctcgagggggtgtttcgaatcaagcagcacgaaggcctggccactttctaccgaaagtctaagttcagccttcttagccagcatgacatttcattctacgaagccctcgagtccgacccacttcacaaagaactgctggagaaactagttttgtacccatcagcgcaggagaaggtgctccagagatcttctgttcttcaggtttcagttcttcagtctacaaaggactcttctaaaaggatatgtgttgctaatacccatctttactggcatcctaaaggtaggttttatttggtatcacaagtgacttaaacacgcttaaagttgtttaaagtgttttacacaaatgcatatcttgaacgtcacccagagactgtaatttgtgtagtttttcttttttaacttaaagacaactttaaaaaatacttacattaatgttttttatattcataggtgggtatattcgcctcattcaaatggcagtagccttggctcacataagacatgtttcatgtgatctgtatcctggcataccagttatattttgtggggactttaatagtacaccatcaacaggaatgtatcattttgtcatcaatggcagcattccagaggatcatgaagactgggcttccaatggggaggaggaaagatgcaatatgtctcttacacatttcttcaagctgaaaagtgcttgtggtgaacctgcttacacaaattatgttggtggctttcatggatgtctagattacattttcattgacttaaatgctttagaggttgaacaggtgattccattacctagtcatgaagaagttaccacccaccaggccttacctagtgtttcccatccctctgatcacatagcacttgtatgtgatttaaaatggaaatagatgtgtgtttaatggaattgaagtctgaaaaggaagtagttattttagcagaaaatttaatatgaatcaaagcttatatgtaaacttcaaggaggaatggtaaaatgttcagccctcctagttatgttcctgatgtcttcgttatgaaactgttgatgtttgcatcatacatcttctctttccttgttttcctctacaattggaggagaaacaaatatatttcttactagcaaaatagaaaattgaattatttttctccaaattgagactctcagaaaaggaagattgaattagcgtgttttttgtttgtttgtttttgtttttgtttttgtttttttgagatggagtttcactcttgttgcccaggctggagtgcaatggcacaatctcggctcactgcaacctccgccccctgggtttaagcgattctcctgcctcagcttcccgagtagctgggattacaggcgtgcgccaacatgtctggctaatttttgtatttttagtagaaatggggtttcgccacgttggccaggctggtcttgaactcctgacctcaggtgatccacccacctcggcctcccaaagtgttgggattacaggcgtgagccaccgcacccggcccttgtgtacatttttataagagaatttttttagctaggagttcagaatttttaaagtaccatttgaatgatcttaatttttctttcatgacaacacattccaaaatgaatcatgcttatgtactaagagggaaaatgtatttaagttaagggtgagagacttaagttataggtgaccttagagacctaaggtgagagacttgacacatggaaggagtaacattagggtctacctctacctcaatttagttagcgatttactacaatttcagagctttaacaaaagataaaaataaatcgtcaccaattgtta

SEQ ID NO: 327866 - DNA, 1419 bp, Artificial Sequence
  derived and/or modified sequence
atgtggcgcttacccggtgctagagccgctctacgagtgatccgtacagcagtggagaagctgtcccgagcggaagcagggtcccaaactgcggctggagccatggagagggcagtcgtgcggtgtgtgccatcagaacccaagctctccctgagcttcgctctcgctgatggcagtcataaaaatatgcaacgagaccaaagcgagccattggggagggtgctcagcaggatcgccacaaacgcactgaaaggccatgctaaggctgccgcagccaagaaatcacgcaagtctcgacctaatgcgtctggaggcgctgcctgtagcggaccagggccagagcccgcagtgttctgcgagccagtggtgaaattgtattatagagaggaggccgttgccgaagacgtgttgaacgtcgacgcttggcaagatggcgcagtgttgcagattggagatgttaagtacaaggtggaaaggaaccctccagcttttacagagttgcagctccccagatacatcatggctggctttccggtgtgcccgaagctcagtttagagtttggcgatccagcctcaagcctatttaggtggtacaaagaggcgaaaccaggagcagccgaacctgaggtgggcgttccctcgtcactaagtcccagcagtccgagttcatcctggacagaaacagatgtcgaggaaagagtatataccccctctaatgcagacatcggactgcggctaaaactgcattgtacacccggtgatggccagcgtttcggccacagccgcgaactagagagcgtttgcgtggtcgaggccggacctggtacctgtacattcgaccatagacacctctatacaaagaaagtgaccgaggatgcgctcatcagaacagtgagttacaacatccttgccgacacctacgcgcagaccgagttttcaaggacagttttgtacccatactgtgcaccttacgctctggaactggattataggcagaatctgatccagaaggaactcacaggttataatgccgatgtgatctgcctgcaggaagtagatcgcgctgtgttttccgacagcctggtccctgcactggaagcctttggcctggaaggggtgtttcgtataaaacaacacgaaggcctcgccacattctaccgcaagtcgaagtttagcctgctgtcccagcacgatatcagcttctacgaggctctcgaatcagacccactacacaaggaactgctggagaagctggttctgtatccctctgctcaggagaaagttttacaacggagctcggtacttcaggtgagcgtcctccagtcgactaaggattcaagcaagagaatctgcgtggccaatacgcatctttactggcatcctaaaggcaggttctatctcgtgtcacaagtcacctag

SEQ ID NO: 327867 - DNA, 345 bp, Artificial Sequence
  derived and/or modified sequence
atggagtcagtggttagacggtgtccctttctatctagggtccctcaagctttcttacagaaagcggggaaaagcctgttattctacgcccaaaactgcccgaagatgatggaagtcggcgccaagcctgccccacgcgcactgtctactgctgccgtccactatcaacagatcaaagagacacctcccgcttccgagaaggacaagactgccaaagcgaaggtgcagcaaacacctgacgggagccagcagtcccccgacggaacccagttccgcctcgacaccccttgtctcccccaagctagggcccttcaggccaatgcactgtcctggcagcaccgctag

SEQ ID NO: 327868 - DNA, 345 bp, Artificial Sequence
  derived and/or modified sequence
atggagagcgtggtgcggcgctgccccttcctgagccgggtgccccaggccttcctgcagaaggccggcaagagcctgctcttctacgcccagaactgccccaagatgatggaggtgggcgccaagccagccccccgggccctgagcacagctgctgtgcactaccagcagatcaaggagaccccaccagccagcgagaaggacaagacagccaaggccaaggtgcagcagaccccagatggcagccagcagagcccagatggcacccagttccggctggacaccccctgcctgccccaggcccgggccctgcaggccaatgccctgtcctggcagcacaggtag

SEQ ID NO: 327869 - DNA, 345 bp, Artificial Sequence
  derived and/or modified sequence
atggagagcgtggtgcggcggtgccccttcctgagccgggtgccccaggcctttttgcagaaggccggaaaaagtttacttttttatgcccagaactgccccaagatgatggaagtgggcgctaaacccgccccccgggccctgtcaacagctgcggtgcattaccagcagattaaagagacccccccagcttctgaaaaagacaaaaccgcgaaagccaaagtccagcagactcccgacggctcccagcagtcccctgacgggacacagtttaggttggacactccctgtctgccccaggctcgcgccttacaagcaaacgccctctcctggcagcaccgctag

SEQ ID NO: 327870 - DNA, 345 bp, Artificial Sequence
  derived and/or modified sequence
atggagtccgttgttcggcgatgtcccttcctttcccgtgtacctcaagcctttctgcaaaaagcaggaaagagcctgctgttttacgcccagaactgcccgaagatgatggaggtgggggctaagcctgcacccagagcgctgtcgaccgccgctgttcactaccaacagataaaagagactccgcctgcaagcgaaaaggacaagacagcgaaggctaaagtgcagcaaacccctgatgggagccaacaaagtcctgacggaacgcagttcaggctcgataccccatgtttgcctcaagccagggcgctgcaagctaatgccctttcatggcagcaccggtag

SEQ ID NO: 327871 - DNA, 345 bp, Artificial Sequence
  derived and/or modified sequence
atggagagcgtggtgagaagatgccccttcctgagcagagtgccccaggccttcctgcagaaggccggcaagagcctgctgttctacgcccagaactgccccaagatgatggaggtgggcgccaagcccgcccccagagccctgagcaccgccgccgtgcactaccagcagatcaaggagaccccccccgccagcgagaaggacaagaccgccaaggccaaggtgcagcagacccccgacggcagccagcagagccccgacggcacccagttcagactggacaccccctgcctgccccaggccagagccctgcaggccaacgccctgagctggcagcacagatag

SEQ ID NO: 327872 - protein, 1249 aa, Artificial Sequence
  derived and/or modified sequence
MVSKRRLSKSEDKESLTEDASKTRKQPLSKKTKKSHIANEVEENDSIFVKLLKISGIILKTGESQNQLAVDQIAFQKKLFQTLRRHPSYPKIIEEFVSGLESYIEDEDSFRNCLLSCERLQDEEASMGASYSKSLIKLLLGIDILQPAIIKTLFEKLPEYFFENKNSDEINIPRLIVSQLKWLDRVVDGKDLTTKIMQLISIAPENLQHDIITSLPEILGDSQHADVGKELSDLLIENTSLTVPILDVLSSLRLDPNFLLKVRQLVMDKLSSIRLEDLPVIIKFILHSVTAMDTLEVISELREKLDLQHCVLPSRLQASQVKLKSKGRASSSGNQESSGQSCIILLFDVIKSAIRYEKTISEAWIKAIENTASVSEHKVFDLVMLFIIYSTNTQTKKYIDRVLRNKIRSGCIQEQLLQSTFSVHYLVLKDMCSSILSLAQSLLHSLDQSIISFGSLLYKYAFKFFDTYCQQEVVGALVTHICSGNEAEVDTALDVLLELVVLNPSAMMMNAVFVKGILDYLDNISPQQIRKLFYVLSTLAFSKQNEASSHIQDDMHLVIRKQLSSTVFKYKLIGIIGAVTMAGIMAADRSESPSLTQERANLSDEQCTQVTSLLQLVHSCSEQSPQASALYYDEFANLIQHEKLDPKALEWVGHTICNDFQDAFVVDSCVVPEGDFPFPVKALYGLEEYDTQDGIAINLLPLLFSQDFAKDGGPVTSQESGQKLVSPLCLAPYFRLLRLCVERQHNGNLEEIDGLLDCPIFLTDLEPGEKLESMSAKERSFMCSLIFLTLNWFREIVNAFCQETSPEMKGKVLTRLKHIVELQIILEKYLAVTPDYVPPLGNFDVETLDITPHTVTAISAKIRKKGKIERKQKTDGSKTSSSDTLSEEKNSECDPTPSHRGQLNKEFTGKEEKTSLLLHNSHAFFRELDIEVFSILHCGLVTKFILDTEMHTEATEVVQLGPPELLFLLEDLSQKLESMLTPPIARRVPFLKNKGSRNIGFSHLQQRSAQEIVHCVFQLLTPMCNHLENIHNYFQCLAAENHGVVDGPGVKVQEYHIMSSCYQRLLQIFHGLFAWSGFSQPENQNLLYSALHVLSSRLKQGEHSQPLEELLSQSVHYLQNFHQSIPSFQCALYLIRLLMVILEKSTASAQNKEKIASLARQFLCRVWPSGDKEKSNISNDQLHALLCIYLEHTESILKAIEEIAGVGVPELINSPKDASSSTFPTLTRFMKRNSSTGTWLFETSVSSST

SEQ ID NO: 327873 - protein, 79 aa, Artificial Sequence
  derived and/or modified sequence
MSFRFGQHLIKPSVVFLKTELSFALVNRKPVVPGHVLVCPLRPVERFHDLRPDEVADLFQTTQRVGTVVEKHFHGTSLT

SEQ ID NO: 327874 - DNA, 240 bp, Artificial Sequence
  derived and/or modified sequence
atgagcttcagattcggccagcacctgatcaagcccagcgtggtgttcctgaagaccgagctgagcttcgccctggtgaacagaaagcccgtggtgcccggccacgtgctggtgtgccccctgagacccgtggagagattccacgacctgagacccgacgaggtggccgacctgttccagaccacccagagagtgggcaccgtggtggagaagcacttccacggcaccagcctgacctag

SEQ ID NO: 327875 - DNA, 240 bp, Artificial Sequence
  derived and/or modified sequence
atgagcttccgcttcggccagcacctgataaaaccatcagtggttttcctgaaaacagagctatctttcgcgctggtgaaccggaaaccagtggtgcccggacatgtgctggtctgtcctctgcgtccggttgagagatttcacgaccttaggcccgacgaggtggcagacttgttccagaccactcagcgagtcggtaccgtggtggagaaacacttccacggcacgtcactcacgtag

SEQ ID NO: 327876 - DNA, 601 bp, Artificial Sequence
  derived and/or modified sequence
cctctgttcccgggtccctcaggcggccacccagtgggcacactcccaggcggcgctccggccccgcgctccctccctctgcctttcattcccagctgtcaacatcctggaagctttgaagctcaggaaagaagagaaatccactgagaacagtctgtaaaggtccgtagtgctatctacatccagacggtggaagggagagaaagagaaagaaggtatcctaggaatacctgcctgcttagaccctctataaaagctctgtgcatcctgccactgaggactccgaagaggtagcagtcttctgaaaggtaccgtgactggatcacatggagccccaggatttttagtacttcaactgtgaggacatgtcgttcagatttggccaacatctcatcaagccctctgtagtgtttctcaaaacagaactgtccttcgctcttgtgaataggaaacctgtggtaccaggacatgtccttgtgtgcccgctgcggccagtggagcgcttccatgacctgcgtcctgatgaagtggccgatttgtttcagacgacccagagagtcgggacagtggtggaaaaacatttccatgggacctctctcac

SEQ ID NO: 327877 - DNA, 240 bp, Artificial Sequence
  derived and/or modified sequence
atgtccttccgcttcggccagcacctgatcaagcccagcgtggtgttcctgaagacagagctgagctttgccctggtgaacaggaagcctgtggtgcccggccacgtgctggtgtgccccctgcggcctgtggagcgcttccatgacctgcggccagatgaggtggccgacctcttccagaccacccagagggtgggcaccgtggtggagaagcacttccacggcaccagcctgacctag

SEQ ID NO: 327878 - DNA, 240 bp, Artificial Sequence
  derived and/or modified sequence
atgagcttccggttcggccagcacctgatcaagcccagcgtggtgtttctcaaaaccgagctcagttttgcgctggtaaatagaaaaccagtcgttccaggacacgtcctggtgtgcccactgaggccagtcgagcgtttccacgatctgagacccgacgaggtggcggatctgtttcagaccacacagagggtaggtactgtcgttgagaagcacttccatggtacatctctgacctag

SEQ ID NO: 327879 - DNA, 240 bp, Artificial Sequence
  derived and/or modified sequence
atgtccttccgtttcggacagcatttaatcaagccaagtgtggttttcctcaagacagagctcagcttcgcattagttaaccggaaacccgtggtccctggacacgtgttagtatgccctctccgccctgtggaacgctttcatgatctgcgccctgacgaggtcgccgatctatttcaaacaacacagagggtgggaactgtcgtggagaagcactttcacggtaccagcttgacatag

SEQ ID NO: 327880 - DNA, 5293 bp, Artificial Sequence
  derived and/or modified sequence
gataaattcactcctcccccagttcccagcaagccctgagatgaacagcagactttttgttccactttaatttttaggcaaaaccgaatgcccatcacaaagccccgttctccttgctactccccttcccccaacctagaggtatcacatttttgggtgcgtcattttctgtttggggtggcttaacaagatgagctgatagggttcccaggctgcctggagttacataacccattgtgcttccaggacagctcacaatcttaggatttgccctaacaagcaaactcagaaaactgctgaggaaggcacgggagggtggctgtgcgaggtactgccggggctgagctctcatggaggctctctctgttctctgaagtgcctttggagtttatgtctgcacatggcattggtttttcaattcgggcagcccgtcagggctcagcctctgccaggactctgccacggcaagctcattcggacaaacgcctgtgatgtgtgcaacagcaccgatcttccggaagtcgagatcattagcctgctggaggagcagctgccccattataagttaagagccgacaccatctacggttatgaccacgacgactggctccatacacctctcatttctccagatgccaacattgacctcacaaccgagcaaattgaagagacgttaaaatacttccttttatgtgctgaaagagttggccagatgactaagacatataatgacatagatgctgtcactcggcttcttgaggagaaagagcgggatttagaattggccgctcgcatcggccagtcgttgttgaagaagaacaagaccctaaccgagaggaacgagctgctggaggagcaggtggaacacatcagggaggaggtgtctcagctccggcatgagctgtccatgaaggatgagctgcttcagttctacaccagcgctgcggaggagagtgagcccgagtccgtttgctcaaccccgttgaagaggaatgagtcgtcctcctcagtccagaattactttcatttggattctcttcaaaagaagctgaaagaccttgaagaggagaatgttgtacttcgatccgaggccagccagctgaagacagagaccatcacctatgaggagaaggagcagcagctggtcaatgactgcgtgaaggagctgagggatgccaatgtccagattgctagtatctcagaggaactggccaagaagacggaagatgctgcccgccagcaagaggagatcacacacctgctatcgcaaatagttgatttgcagaaaaaggcaaaagcttgcgcagtggaaaatgaagaacttgtccagcatctgggggctgctaaggatgcccagcggcagctcacagccgagctgcgtgagctggaggacaagtacgcagagtgcatggagatgctgcatgaggcgcaggaggagctgaagaacctccggaacaaaaccatgcccaataccacgtctcggcgctaccactcactgggcctgtttcccatggattccttggcagcagagattgagggaacgatgcgcaaggagctgcagttggaagaggccgagtctccagacatcactcaccagaagcgtgtctttgagacagtaagaaacatcaaccaggttgtcaagcagagatctctgaccccttctcccatgaacatccccggctccaaccagtcctcggccatgaactccctcctgtccagctgcgtcagcaccccccggtccagcttctacggcagcgacataggcaacgtcgtcctcgacaacaagaccaacagcatcattctggaaacagaggcagccgacctgggaaacgatgagcggagtaagaagccggggacgccgggcaccccaggctcccacgacctggagacggcgctgaggcggctgtccctgcgccgggagaactacctctcggagaggaggttctttgaggaggagcaagagaggaagctccaggagctggcggagaagggcgagctgcgcagcggctccctcacacccactgagagcatcatgtccctgggcacgcactcccgcttctccgagttcaccggcttctctggcatgtccttcagcagccgctcctacctgcctgagaagctccagatcgtgaagccgctggaaggttccgccacacttcaccactggcagcagttggcccaacctcaccttgggggcatcctggacccccggcccggtgtggtcaccaagggcttccggacgctggatgttgacctggacgaagtgtactgccttaacgactttgaagaagatgacacaggtgaccacatttctctcccacgcctagctacctccactccagttcagcacccagagacctcagcgcaccatcctgggaagtgcatgtctcagaccaactccaccttcaccttcaccacctgtcgcatcctgcatccttcagatgagctcactcgggtcacaccaagccttaactcagccccaactccagcttgtggcagcaccagccacttgaaatccacgccggtggccacaccatgcactccacggagactgagcctggctgagtccttcactaacacccgtgagtccacgaccaccatgagcacatccctggggctcgtgtggctgttgaaggagcggggcatttctgctgccgtgtacgacccccagagctgggacagggccggccggggctccctcctgcactcctacacgcccaagatggctgtgatcccctctactccgccgaactcgcctatgcagacacccacatcctccccaccctcctttgagttcaagtgcacgagccctccctacgacaatttcctggcttccaagccagccagctccatcctgagggaagtgagagaaaagaacgtccgcagcagcgagagccagaccgacgtgtccgtctccaacctcaacctcgtggacaaagtcaggaggtttggggtggccaaagtggtgaactcagggcgagcccatgtccccaccttgactgaggagcagggacccctcctctgtgggcccccggggccagcaccagcccttgttcccagaggcctggtacctgagggcctgcccctcagatgccccactgtcaccagtgccatcggtgggctgcagctcaatagtggcatccggcggaatcgcagcttccccaccatggtgggatctagcatgcagatgaaagctcctgtgactctcacctcgggcatcttgatgggtgctaagctctccaaacaaactagcttacggtgaggactggaggggggccggttgccctagaggagacccacgttctcctctcttgctcccacctccctctcttccccccacagtgcactccctccctctgcccttctctgtccaccccctcctaagctagacaaatcaacctcgtgcctaatggaggaagtgtggaaactttgtaaaatgtgtacataggacttggagaccttgtgtccgccctgctctttcttccgatcccacaggaagtgcccctgcactgtcatcactctcacgaggacgtcacctgtgctaacctgggggaaggtggggtcctttcttctttccttttgagaagcactgaaactcccaagtgtgttcttatcccatggataggaaaccagtgaattccgtggctggcacaccacgagctgtcacgcggcacgggtcataacacatctgggtgtcatcggacacctcacctcgcccaccctgtaggagcgtaaggagcctccatcctcagccacgtgcagctgacgtggctttcctgatcggagggcttttcttttatgggtggcccagcttcttcaagaccttcactgctctgcctcagtggacagtcgtttcttttttgaggtgtgaccttttgttttcatgccttccccttgaagtcatcctgtgttttgtaatcagctgtcaggccaaatgtctgacccgaaagagaatgtatttacactcatgctgcgttgttcagcagcccctctgtgttctgtgtgatttgttttatttttccttttttttacatatatatgcagggaagtaatggtactggtagtgtatgttttctatgtggttcaaatatgaatttcgaacacaccaagccgctaatgagatagcagcttttttctgggacccagagtcacaaccaaattgatttaagaccggacccaagacacctttaacaataggactgaaaggaaaaaggatagggaaaaagcttattaaagaaatgtgtcaacaccaaatgtagaggggaagaaccacaaccaggcataataccaaaccggttccagggggaaacaaggctttggtattccgctggctccagcgctttttctgaaacccgaggctggccagggtgctgtcaccatgcggtctttgattgcagccattcaatgcccacatgcttttccttcttgtttcagaacagcacatggtcacaacaagatattttctttccctccaaagccttttgtctccttgtgcctctttttatccttaggaaaagatccaggtgcttgtgaaaagaatcatgaatgcaacaagggaggctggtcctgttgctgtcgccgattaagttttaaacttttatttattatttatgtctgccgtattttaaataaacattctcgttccttccagtttcagtcatagtgtgtctgtggcattccagtccaaccatgtgacttatttattctaatttgagggctgcactgtacaccatggtgtcctgtgacaccgtgttccagacatttatggaaggaaaacatcccatataaatgaaactgtcatgctgtgtcctccccggcagcagaagatgtgtccttccattgagtgagggtaaccttatgtccaccaaggatactttgagaaagcccctaaggaacaagcctcagtcccacggtttcagactatttattctctgaacacaagagtattggttaattatgttctcagctctccctgctgttgtatgtgtgcattcactgcaagtaacttatatctttttatttgaatgtattttaaagcagtagatagaataacaaaggaatatgaaaaccatggactgaatggaccattttatgtattcagagagagaagccactcatcattgccagaaataccatgtaaaaattggcagttcagaggttgcaatacttagtatagtaaataaataaacggtcaacattgtgcaaccactaccaaaaagtgtgttgtaatgcatcaaaaatcaacacaattttattcactaatgagtatcaataaaataagttcaaatgatgg

SEQ ID NO: 327881 - protein, 526 aa, Artificial Sequence
  derived and/or modified sequence
MWKLVMMEQMTYLPLTVCPQRLPLQSRKMFLLQLSQDQYLVYWAQSIWWQLQDNKTFLAMLNHVLNVDGFYFSTTYDLTHTLQRLSNTSPEFQEMSLLERADQRFVWNGHLLRELSAQPEVHRFALPVLHGFITMHSCSINGKYFDWILISRRSCFRAGVRYYVRGIDSEGHAANFVETEQIVHYNGSKASFVQTRGSIPVFWSQRPNLKYKPLPQISKVANHMDGFQRHFDSQVIIYGKQVIINLINQKGSEKPLEQTFATMVSSLGSGMMRYIAFDFHKECKNMRWDRLSILLDQVAEMQDELSYFLVDSAGQVVANQEGVFRSNCMDCLDRTNVIQSLLARRSLQAQLQRLGVLHVGQKLEEQDEFEKIYKNAWADNANACAKQYAGTGALKTDFTRTGKRTHLGLIMDGWNSMIRYYKNNFSDGFRQDSIDLFLGNYSVDELESHSPLSVPRDWKFLALPIIMVVAFSMCIICLLMAGDTWTETLAYVLFWGVASIGTFFIILYNGKDFVDAPRLVQKEKID

SEQ ID NO: 327882 - DNA, 1581 bp, Artificial Sequence
  derived and/or modified sequence
atgtggaaactggtgatgatggagcaaatgacctatctcccactgaccgtttgcccgcagcgcctaccccttcagagccgcaaaatgttcctcctgcagctgagccaggatcaatatctggtatactgggcacagagtatttggtggcagcttcaagacaataaaacgttcctcgccatgctgaaccatgtactcaacgtggacggcttttatttcagtaccacgtacgacttgacacatacactccaacggctgtcaaatacgtcgcctgagttccaggagatgtcgctgctcgaaagagcagaccagcgcttcgtctggaacggacatctgctgagggagctgtccgcccagcctgaggtgcaccggttcgctctgccagtgcttcacggattcatcacgatgcatagctgttcgattaacggaaaatattttgattggatactcattagccgccgcagttgcttcagagcaggggtaaggtattacgttcgcgggattgattccgagggtcacgccgccaatttcgtcgaaacagagcagatcgtgcactataacgggtccaaagcctccttcgttcagaccagaggatcaatcccagtgttctggagtcagcgaccaaacctcaagtataagcccctgccccagattagcaaggtagctaatcatatggacggcttccaacgccactttgactcacaagtgattatatacgggaagcaggtgattatcaacctgatcaatcagaagggatcagagaaaccgttggagcagacattcgccaccatggtgtcctccctggggtccggcatgatgcggtacatcgccttcgattttcacaaagaatgcaagaacatgcggtgggataggcttagcatcctcttagatcaggtagccgagatgcaggatgagctgtcttactttctggtcgactctgctggacaggtggtggctaaccaggagggggtttttcgtagtaattgcatggattgtctggatcggacaaacgttatccagtcattgttggctcgccgctctttgcaagcccagcttcaaaggctgggcgtgcttcatgttggtcagaagctggaggagcaggatgaattcgaaaagatttacaaaaatgcctgggctgacaacgctaacgcttgcgcgaagcaatacgccggcacaggcgccttaaaaaccgattttacgagaactggcaaacggactcacctcgggttaatcatggatggatggaactcaatgattagatactataaaaataatttcagcgatgggtttcggcaagactctatagatctttttctaggcaactactctgtggacgagctggagagccacagtccgctctcggtgccacgggattggaaattccttgccttgccaatcattatggttgttgccttttcaatgtgtattatctgtctgctcatggcaggggacacgtggactgaaactctcgcctatgtgctcttttggggtgttgccagtatagggaccttttttatcatcttgtataacggtaaggacttcgtcgatgccccgcggttggtacagaaagagaaaattgactag

SEQ ID NO: 327883 - DNA, 1581 bp, Artificial Sequence
  derived and/or modified sequence
atgtggaagctggtgatgatggagcagatgacctacctgcccctgactgtgtgcccccagaggctgcccctgcagagcaggaagatgttcctgctgcagctgagccaggaccagtacctggtgtactgggcccagagcatctggtggcagctgcaggacaacaagaccttcctggccatgctgaaccacgtgctgaatgtggatggcttctacttcagcaccacctatgacctgacccacaccctgcagaggctgagcaacaccagccctgagttccaggagatgagcctgctggagagagctgaccagagatttgtgtggaatggccacctgctgcgggagctgagcgcccagcctgaggtgcacagatttgccctgcctgtgctgcacggcttcatcaccatgcacagctgcagcatcaatggcaagtactttgactggatcctgatcagccgccgcagctgcttccgggccggcgtgcgctactacgtgcggggcattgattctgagggccatgctgccaactttgtggagacagagcagatcgtgcactacaacggcagcaaggccagctttgtgcagacccggggcagcatccctgtgttctggagccagaggcccaacctgaagtacaagcccctgccccagatcagcaaggtggccaaccacatggatggcttccagaggcactttgacagccaggtgatcatctacggcaagcaggtgatcatcaacctgatcaaccagaagggcagcgagaagcccctggagcagacctttgccaccatggtgagcagcctgggcagcggcatgatgagatacatcgcctttgacttccacaaggagtgcaagaacatgcgctgggaccggctgagcatcctgctggaccaggtggccgagatgcaggatgagctgagctacttcctggtggacagcgctggccaggtggtggccaaccaggagggcgtcttccgcagcaactgcatggactgcctggacaggaccaacgtcatccagagcctgctggcccggcgcagcctgcaggcccagctgcagaggctgggcgtgctgcacgtgggccagaagctggaggagcaggatgaatttgagaagatctacaagaatgcctgggccgacaatgccaatgcctgtgccaagcagtatgccggcactggagccctgaagacagacttcaccaggacaggcaagaggacccacctgggcctcatcatggatggctggaacagcatgatccgctactacaagaacaacttcagtgatggcttccggcaggacagcattgacctcttcctgggcaactacagcgtggatgagctggagagccacagccccctgtctgtgccccgggactggaagttcctggccctgcccatcatcatggtggtggccttctccatgtgcatcatctgcctgctgatggccggggacacctggacagagaccctggcctacgtgctcttctggggcgtggccagcatcggcaccttcttcatcatcctgtacaacgggaaggactttgtggatgccccccggctggtgcagaaggagaagattgattag

SEQ ID NO: 327884 - DNA, 1581 bp, Artificial Sequence
  derived and/or modified sequence
atgtggaagctggtgatgatggagcagatgacctacctgcccctgaccgtgtgtccgcagcggctgccgctccagagcagaaagatgttcctgttgcaactctctcaggatcagtatctcgtctactgggcccagtcaatttggtggcagctccaggacaataaaacctttctggccatgctcaaccatgttctcaatgtggatggtttctatttctcaactacatatgacttaacccatacactccagcggctcagcaacacatcccctgagttccaggaaatgtctctcctggaacgcgctgaccaaaggtttgtgtggaatggccacttgctgagagagttgagtgctcaacccgaggtacatcggtttgccctgccagtgctgcatggctttattaccatgcactcttgcagcatcaatggtaagtacttcgattggatcctgatttcacggcggtcttgctttcgggctggtgtgcgatactacgtcagagggatcgactctgagggccacgcggctaactttgtcgaaaccgagcagatcgtgcattataacggtagtaaagcttcgttcgtccagaccaggggatctatccccgtcttttggtcacagcggcccaacctgaagtacaagcctctccctcagatctccaaagtggccaaccacatggacgggttccaaaggcattttgacagtcaggtgattatctatggtaagcaagtaataattaatctcattaaccagaagggctctgagaagccgcttgagcagacctttgctacaatggtgagcagtctgggcagcgggatgatgcgatatatcgctttcgattttcacaaagagtgtaagaacatgaggtgggaccgcctcagtatactgttggatcaggtagcagaaatgcaggatgagctcagctattttctggtggatagcgctggccaggtggtggctaatcaggagggggtcttccgcagcaattgtatggactgccttgacagaaccaatgtcatccagtctctcctggcccgccgttccctgcaagcacaattacagagactcggtgtgctgcatgtcgggcaaaagttggaagaacaggacgaatttgaaaagatttataaaaatgcctgggccgataacgccaacgcatgcgcaaagcagtacgctggtacgggagccctgaagaccgatttcacgaggacggggaaacgcactcacttaggcctaatcatggacggctggaactctatgattagatattacaagaataatttcagcgatggttttagacaggatagtattgatctttttctcggcaactattcggtcgatgagcttgaaagccactcgccactctcggttccccgtgattggaaatttctggccctgcctattatcatggttgtggcgttcagcatgtgcatcatttgtctgttaatggctggagatacgtggactgaaactctcgcctatgtcctgttctggggggtggcctccattggaacattctttattattctgtacaacggtaaagacttcgtcgatgctccgagactggtacagaaagaaaagatcgattag

SEQ ID NO: 327885 - DNA, 1581 bp, Artificial Sequence
  derived and/or modified sequence
atgtggaaattggttatgatggagcagatgacgtacttacccctgactgtctgcccccagcgactcccactacagagccggaaaatgttcctgttacagttaagtcaagatcagtacctcgtatattgggcccaatccatctggtggcagctgcaagacaataaaacctttctcgccatgctaaaccatgtactgaatgtcgatggattctatttttctactacctacgatctgacccatacgctgcagaggctgtctaatacctcgcctgaattccaggagatgagtttgttggaaagagctgaccagcggtttgtatggaacggacacctcctgcgcgagttgagtgctcaacccgaggtgcacagatttgccttgcctgtgctccacggatttattaccatgcactcatgttctatcaacggcaagtacttcgactggatactaatttcccgacgtagctgtttccgtgctggcgtccgctactacgtgcgaggaatcgacagtgaaggccacgctgccaattttgtggaaaccgaacagatagtccactataacggcagtaaagcttcctttgtgcagacccggggatccatccctgtgttctggagtcagcgccctaacttgaagtacaagccacttccacagatcagcaaagtggccaaccacatggatggtttccagcgacatttcgactcccaggtgattatctatggaaagcaggttatcatcaatctgataaaccagaaaggctctgagaagccactggagcagacatttgcaacaatggtctcatctctgggtagcggaatgatgaggtatatagctttcgatttccacaaagagtgcaagaatatgagatgggataggctgtcaatactactcgaccaggttgccgagatgcaggacgaactgagttactttcttgttgacagcgctggacaagtggtggccaaccaagagggagtgttcaggtctaactgtatggattgtcttgaccggaccaatgtgattcagtcattactagcgaggcgctctctgcaggctcagctgcagaggcttggggtgctgcatgtaggccagaagttagaagaacaggacgaattcgagaagatctataagaacgcctgggccgataacgcaaatgcttgcgcaaagcagtacgctgggacaggcgctcttaagacagactttaccagaacagggaagcgaacccaccttgggctgattatggatggatggaactctatgatccgttattataagaacaatttctccgatggtttcaggcaggactcaattgacctgttcctgggcaactacagtgtggacgaactcgagtcccattcccctctatcggtaccacgagactggaaattcctggcactgcccatcattatggtcgtagccttcagtatgtgtattatttgcctcctcatggcaggagatacgtggaccgaaacactggcatacgttcttttttggggagtcgcctccatcggaactttctttataattctctacaatggcaaggactttgtcgatgcacctcgtctggtgcagaaggaaaagatcgactag

SEQ ID NO: 327886 - DNA, 1909 bp, Artificial Sequence
  derived and/or modified sequence
gtgcaggatggcgacggcggcctacgagcagctgaagctgcatatcacacctgaaaaattttatgtggaagcttgtgatgatggagcagatgacgtacttaccattgaccgtgtgtccacagaggttacccttgcagtcaagaaagatgttcctccttcagctgtcacaagaccaatatttggtatactgggcacaatccatctggtggcagttacaagataataaaaccttcctagcgatgctaaaccatgtcttgaatgtggatggattttacttttcaacaacatatgatttgacccatactttgcagcggctatccaacactagtcctgaattccaagaaatgagtctcttggaaagggcagatcagcggtttgtatggaatggtcatcttctaagagaactttctgcacagccagaggttcatcggtttgcccttccagtgttacatggctttattaccatgcattcatgttctattaatggaaaatactttgattggattctcatctcgaggaggagctgtttcagagctggtgtgcgctattatgtaagaggaattgattcggaaggccatgcagctaactttgtagaaacagaacaaattgtgcactacaatgggagcaaagcttcgtttgtacagactcgaggatcaatacctgttttctggtcccaaagaccaaacctcaagtacaaaccactgccacagatcagcaaagtagcaaatcacatggacggtttccaaaggcattttgattcccaagtaattatttatggaaaacaagttataatcaatctgattaaccagaagggctcggagaagccacttgagcagacatttgcaacaatggtgtcttccttgggaagtggaatgatgagatacattgcctttgacttccataaggaatgtaaaaatatgagatgggatcgactaagtattttattggatcaggtagcagaaatgcaagatgaattaagttattttctagtggactctgctggccaggtggtggcaaaccaggaaggcgtgttccgaagcaattgcatggattgtctagatagaaccaatgtgatccagagtttgttagctcgtcgttcacttcaggcccaacttcagagactaggagttttgcatgtgggacaaaagcttgaagaacaagatgaatttgagaagatttacaaaaatgcctgggctgacaacgcaaatgcttgtgccaagcaatatgcgggaactggtgccttgaagactgactttaccagaactggaaagagaactcatttgggacttataatggatggctggaactcaatgatacgatattataagaacaacttttccgatggatttagacaagattccatagacttatttcttggaaactattcagtggatgaattagaatctcatagtcctttaagtgttccaagggactggaaattcctggctttgcctattatcatggttgttgccttttcaatgtgcattatctgtttgcttatggctggtgacacttggacagaaacactggcctatgtgctcttctggggagttgcaagcattggaacattttttatcattctttacaatggcaaagattttgtcgatgctcccagactggtccagaaagaaaagatagactgaatttgtatttgtggaaagcggcttggcttggaagattccattgtgcagaactggagtctttactgacccgctttccacatcagcccaaggtctttttaatgcctttatccaaaagcacatcttgtgctccatgcaggatgatgacagaattgatctgatgttactgccttgatggtctctttactattgggacagttagatttataatttgaagctattctgtaattaaaatataacctgaattcagcttgcagaatggaagctga

SEQ ID NO: 327887 - DNA, 1581 bp, Artificial Sequence
  derived and/or modified sequence
atgtggaagctggtgatgatggagcagatgacctacctgcccctgaccgtgtgcccccagagactgcccctgcagagcagaaagatgttcctgctgcagctgagccaggaccagtacctggtgtactgggcccagagcatctggtggcagctgcaggacaacaagaccttcctggccatgctgaaccacgtgctgaacgtggacggcttctacttcagcaccacctacgacctgacccacaccctgcagagactgagcaacaccagccccgagttccaggagatgagcctgctggagagagccgaccagagattcgtgtggaacggccacctgctgagagagctgagcgcccagcccgaggtgcacagattcgccctgcccgtgctgcacggcttcatcaccatgcacagctgcagcatcaacggcaagtacttcgactggatcctgatcagcagaagaagctgcttcagagccggcgtgagatactacgtgagaggcatcgacagcgagggccacgccgccaacttcgtggagaccgagcagatcgtgcactacaacggcagcaaggccagcttcgtgcagaccagaggcagcatccccgtgttctggagccagagacccaacctgaagtacaagcccctgccccagatcagcaaggtggccaaccacatggacggcttccagagacacttcgacagccaggtgatcatctacggcaagcaggtgatcatcaacctgatcaaccagaagggcagcgagaagcccctggagcagaccttcgccaccatggtgagcagcctgggcagcggcatgatgagatacatcgccttcgacttccacaaggagtgcaagaacatgagatgggacagactgagcatcctgctggaccaggtggccgagatgcaggacgagctgagctacttcctggtggacagcgccggccaggtggtggccaaccaggagggcgtgttcagaagcaactgcatggactgcctggacagaaccaacgtgatccagagcctgctggccagaagaagcctgcaggcccagctgcagagactgggcgtgctgcacgtgggccagaagctggaggagcaggacgagttcgagaagatctacaagaacgcctgggccgacaacgccaacgcctgcgccaagcagtacgccggcaccggcgccctgaagaccgacttcaccagaaccggcaagagaacccacctgggcctgatcatggacggctggaacagcatgatcagatactacaagaacaacttcagcgacggcttcagacaggacagcatcgacctgttcctgggcaactacagcgtggacgagctggagagccacagccccctgagcgtgcccagagactggaagttcctggccctgcccatcatcatggtggtggccttcagcatgtgcatcatctgcctgctgatggccggcgacacctggaccgagaccctggcctacgtgctgttctggggcgtggccagcatcggcaccttcttcatcatcctgtacaacggcaaggacttcgtggacgcccccagactggtgcagaaggagaagatcgactag

SEQ ID NO: 327888 - protein, 431 aa, Artificial Sequence
  derived and/or modified sequence
MRRLICKRICDYKSFDDEESVDGNRPSSAASAFKVPAPKTSGNPANSARKPGSAGGPKVGGASKEGGAGAVDEDDFIKAFTDVPSIQIYSSRELEETLNKIREILSDDKHDWDQRANALKKIRSLLVAGAAQYDCFFQHLRLLDGALKLSAKDLRSQVVREACITVAHLSTVLGNKFDHGAEAIVPTLFNLVPNSAKVMATSGCAAIRFIIRHTHVPRLIPLITSNCTSKSVPVRRRSFEFLDLLLQEWQTHSLERHAAVLVETIKKGIHDADAEARVEARKTYMGLRNHFPGEAETLYNSLEPSYQKSLQTYLKSSGSVASLPQSDRSSSSSQESLNRPFSSKWSTANPSTVAGRVSAGSSKASSLPGSLQRSRSDIDVNAAAGAKAHHAAGQSVRSGRLGAGALNAGSYASLECEAFWRSGRTAKLYSV

SEQ ID NO: 327889 - protein, 1063 aa, Artificial Sequence
  derived and/or modified sequence
MRRLICKRICDYKSFDDEESVDGNRPSSAASAFKVPAPKTSGNPANSARKPGSAGGPKVGELLSIMIYSSRELEETLNKIREILSDDKHDWDQRANALKKIRSLLVAGAAQYDCFFQHLRLLDGALKLSAKDLRSQVVREACITVAHLSTVLGNKFDHGAEAIVPTLFNLVPNSAKVMATSGCAAIRFIIRHTHVPRLIPLITSNCTSKSVPVRRRSFEFLDLLLQEWQTHSLERHAAVLVETIKKGIHDADAEARVEARKTYMGLRNHFPGEAETLYNSLEPSYQKSLQTYLKSSGSVASLPQSDRSSSSSQESLNRPFSSKWSTANPSTVAGRVSAGSSKASSLPGSLQRSRSDIDVNAAAGAKAHHAAGQSVRSGRLGAGALNAGSYASLEDTSDKLDDLFSDNGRVRAKLSAPLAGMGNAKADSRGRSRTKMVSQSQRSSSPDKNEGSQSANTIGAGSRSGSPGRVLTTTALSTVSSGVQRVLVNSASAQKRSKIPRSQGCSREASPSRLSVARSSRIPRPSVSQGCSREASRESSRDTSPVRSFQPLGPGYGISQSSRLSSSVSAMRVLNTGSDVEEAVADALVLFDFKTKKKPARRRYESYGMHSDDDANSDASSACSERSYSSRNGSIPTYMRQTEDVAEVLNRCASSNWSERKEGLLGLQNLLKNQRTLSRVELKRLCEIFTRMFADPHGKVFSMFLETLVDFIQVHKDDLQDWLFVLLTQLLKKMGADLLGSVQAKVQKALDVTRESFPNDLQFNILMRFTVDQTQTPSLKVKVAILKYIETLAKQMDPGDFINSSETRLAVSRVITWTTEPKSSDVRKAAQSVLISLFELNTPEFTMLLGALPKTFQDGATKLLHNHLRNTGNGTQSSMGSPLTRPTPRSPANWSSPLTSPTNTSQNTLSPSAFDYDTENMNSEDIYSSLRGVTEAIQNFSFRSQEDMNEPLKRDSKKDDGDSMCGGPGMSDPRAGGDATDSSQTALDNKASLLHSMPTHSSPRSRDYNPYNYSDSISPFNKSALKEAMFDDDADQFPDDLSLDHSDLVAELLKELSNHNERV

SEQ ID NO: 327890 - DNA, 3192 bp, Artificial Sequence
  derived and/or modified sequence
atgcgcaggctgatatgtaaaaggatttgtgactataaatcttttgatgatgaagagagtgttgacggcaataggccatctagcgccgcgtccgcattcaaagtcccagcccccaagaccagtggtaatccagctaactctgctcggaaaccaggctctgctggcggtcccaaagtgggagaactgctctccatcatgatatactcgtcgagggaactagaggagacactcaataaaattagggaaattctgtctgatgataaacatgattgggaccagcgagcaaatgcgctaaagaagattagaagtttgctggttgccggtgcggcccagtatgattgcttctttcaacatctgcggttgctggatggagccctcaaactgtcagccaaagatctacgctctcaggtggtgcgcgaagcgtgtatcaccgtggcccaccttagcactgttttggggaataaatttgatcatggggctgaagcaatcgtacccaccttatttaacttagtgccaaatagtgcaaaagtaatggccacatctggctgtgcagcaatacgcttcataatcagacacacacacgtccccagactgatccccctgattacatcaaactgtacctctaaaagcgtgcccgtacgcaggcgatcattcgagttccttgacctcttgttacaggagtggcagacccattcactcgagcgccatgccgccgtgttagtcgagaccatcaagaaaggaattcatgacgcggacgccgaagcacgagtggaggctcgtaagacctatatgggtctgaggaaccactttcccggggaggccgagaccctatacaatagtttagagccttcctaccagaaatcccttcagacttacctcaaaagctccggaagtgtcgcctcactcccgcagtcggaccgctcttcttccagctcccaggaatcgctcaaccgtcctttcagctcaaaatggtccacggctaacccgtccacggtggcaggtcgtgtgagcgccggaagttctaaagcctcaagcctgcccgggtcactccagagaagccggagcgatattgacgtcaatgcagccgccggggcaaaagcccaccatgccgccggccagagtgtcagaagcggccgccttggggccggggcactcaacgcaggctcatatgcatctcttgaggacacatcggataagctggacgacctgttctcagacaacgggcgggttagggccaaactgtcagcgcccctcgccggcatggggaatgccaaagcagacagccgaggaagatcgagaaccaaaatggtgtcccagtcccagagatcatcttcccctgataagaatgagggatcacagagtgctaacaccatcggcgcaggctcccgttctggcagcccaggcagagtgctcaccacaactgccttgtctacagttagttctggagtgcagcgtgtactggtgaatagcgcctcagcacagaagcggtctaagatacccaggtcacagggatgcagtagggaggcctcaccctcgagactctccgtggctcgctcgagtcgcatccccagaccctccgttagccagggctgcagtcgcgaggcttccagggaaagtagcagagatacctcaccagtacggagctttcagcccctgggaccgggatatggaatcagtcagtccagccgcttatcctcttcagtcagtgcaatgagggtactgaacaccgggtccgatgttgaagaggccgtcgccgatgctttggttcttttcgattttaaaactaagaagaagcctgctaggcgccgatacgagagctacggcatgcactcagatgacgatgccaactccgacgcctccagtgcttgctcagaacggtcctatagttctcgtaatggaagcattcccacctacatgcgacaaacggaagacgtcgccgaggtgctgaaccggtgcgcttcatccaactggagcgagcgcaaagaaggacttctgggcttacagaacctcctcaagaatcagcgcaccctgtctcgcgtcgagttaaagcgcctgtgcgagatttttacaagaatgtttgcagaccctcatggaaaggtgtttagcatgtttctagaaacacttgtggacttcattcaggtgcacaaggatgatcttcaggattggctattcgtgctactgacacagctgctcaagaagatgggagctgacctgctgggcagcgtccaggctaaggtacagaaagctcttgacgtcactcgcgagtcgtttccaaatgatctgcagtttaacatactcatgcggtttacggtcgaccaaacccagacgccctccctgaaggtaaaggtagccatcctaaaatatatagaaacactcgcgaaacagatggatcccggggattttatcaactcttctgaaactagattggctgttagccgagtgattacttggacaaccgaacccaaatcatcggatgttagaaaggccgctcaatccgtgctcattagtcttttcgaattaaatacacctgagtttactatgttactgggcgcccttccaaagacctttcaagatggcgctaccaagctgcttcacaatcatctgcggaatacagggaacgggacgcaatccagtatgggcagtccgctgacaaggccaacaccgagaagccctgccaactggtcttcccctctgacttcccccaccaacacttcccagaacaccctctcgcctagtgccttcgactacgacaccgagaacatgaattccgaagacatttattcatcactccgtggggtcaccgaggccatccagaacttttctttcagaagtcaggaggatatgaatgagccgttgaagagagacagtaagaaggacgacggagacagtatgtgtggaggtcctggcatgagtgatccgagggctggcggagacgctacagactcatcccagacggccttggacaacaaagcaagtctcctgcattcaatgcctacacattcaagcccccggagtagagattacaacccctataattattcagactctatatccccgtttaataaatctgctctgaaagaggccatgttcgatgacgacgcagatcaatttcctgacgacctcagcctggatcattctgacctggtggccgagctcctgaaggagctttcgaatcataatgaacgggtgtag

SEQ ID NO: 327891 - DNA, 3192 bp, Artificial Sequence
  derived and/or modified sequence
atgaggaggctcatctgcaagaggatctgtgactacaagagctttgatgatgaggagagcgtggatggcaaccggcccagcagcgctgccagcgccttcaaggtgcctgcccccaagaccagcggcaacccagccaacagcgccaggaagccaggcagcgctgggggccccaaggtgggggagctgctgagcatcatgatctacagcagccgggagctggaggagaccctgaacaagatccgggagatcctgagtgatgacaagcatgactgggaccagagggccaatgccctgaagaagatccgcagcctgctggtggccggggccgcccagtatgactgcttcttccagcacctgcggctgctggatggagccctgaagctgagcgccaaggacctgcggagccaggtggtgcgggaggcctgcatcaccgtggcccacctgagcacagtgctgggcaacaagtttgaccacggggctgaggccatcgtgcccaccctcttcaacctggtgcccaacagcgccaaggtgatggccaccagcggctgtgccgccatccgcttcatcatccgccacacccacgtgcccaggctcatccccctcatcaccagcaactgcaccagcaagtctgtgcctgtgagaagaagaagctttgagttcctggacctgctgctgcaggagtggcagacccacagcctggagagacatgctgctgtgctggtggagaccatcaagaagggcatccatgatgctgatgctgaggcccgggtggaggccaggaagacctacatgggcctgaggaaccacttccctggagaggccgagaccctgtacaacagcctggagcccagctaccagaagagcctgcagacctacctgaagagcagcggctctgtggccagcctgccccagagcgacaggagcagcagcagcagccaggagagcctgaaccggcccttcagcagcaagtggagcacagccaaccccagcacagtggccggccgggtgtctgctggcagcagcaaggccagcagcctgcccggcagcctgcagaggagcagaagtgacattgatgtgaatgctgctgctggggccaaggcccaccacgccgccggccagagcgtgcgcagcggccgcctgggcgctggggccctgaatgccggcagctatgccagcctggaggacaccagtgacaagctggatgacctcttcagtgacaatggccgggtgcgggccaagctgagcgcccccctggccggcatgggaaatgccaaggctgacagccggggccgcagcaggaccaagatggtgtcccagagccagaggagcagcagcccagacaagaatgaaggcagccagagcgccaacaccatcggggccggcagccgcagcggcagccctggccgggtgctgaccaccacagccctgagcacagtgtcctctggagtgcagagggtgctggtgaacagcgccagcgcccagaagaggagcaagatccccaggagccagggctgcagccgggaggccagccccagccggctgtctgtggcccggagcagccgcatcccccggcccagcgtgtcccagggctgcagccgggaggccagccgggagagcagccgggacaccagccctgtgcgctccttccagcccctgggccctggctacggcatcagccagagcagccggctgagcagctctgtgtctgccatgagggtgctgaacacaggcagtgatgtggaggaggccgtggctgatgccctggtgctgtttgacttcaagaccaagaagaagccagcccggcggcgctatgagagctatggcatgcacagtgatgatgatgccaacagtgatgccagcagcgcctgcagcgagaggagctacagcagcagaaatggcagcatccccacctacatgaggcagacagaagatgtggccgaggtgctgaacagatgtgccagcagcaactggagcgagaggaaggagggcctgctgggcctgcagaacctgctgaagaaccagaggaccctgagccgggtggagctgaagaggctgtgtgagatcttcaccaggatgtttgctgacccccacggcaaggtgttctccatgttcctggagaccctggtggacttcatccaggtgcacaaggatgacctgcaggactggctgtttgtgctgctgacccagctgctgaagaagatgggcgctgacctgctgggctctgtgcaggccaaggtgcagaaggccctggatgtgacccgggagagcttccccaatgacctgcagttcaacatcctgatgaggttcaccgtggaccagacccagacccccagcctgaaggtgaaggtggccatcctgaagtacatcgagaccctggccaagcagatggaccccggggacttcatcaacagcagcgagacccggctggccgtgtccagggtcatcacctggaccacagagcccaagagcagtgatgtgaggaaggccgcccagagcgtgctgatcagcctgtttgagctgaacaccccagagttcaccatgctgctgggcgccctgcccaagaccttccaggatggagccaccaagctgctgcacaaccacctgagaaatactggaaatggcacccagagctccatgggcagccccctgacccggcccacccccaggagccctgccaactggagcagccccctgaccagccccaccaacaccagccagaacaccctgagccccagcgcctttgattatgacacagagaacatgaacagcgaggacatctacagcagcctgcggggcgtgacagaggccatccagaacttctccttccgcagccaggaggacatgaatgagcccctgaagagggacagcaagaaggatgatggagacagcatgtgtggcggccctggcatgtctgaccccagggctggaggagatgccacagacagcagccagacagccctggacaacaaggccagcctgctgcacagcatgcccacccacagcagccccaggagccgggactacaacccctacaactacagcgacagcatcagccccttcaacaagagcgccctgaaggaggccatgtttgatgatgatgctgaccagttcccagatgacctgagcctggaccacagcgacctggtggccgagctgctgaaggagctgagcaaccacaatgaaagagtgtag

SEQ ID NO: 327892 - DNA, 3192 bp, Artificial Sequence
  derived and/or modified sequence
atgcggcggctgatctgcaagcggatctgcgactacaagagcttcgacgacgaagaatcggttgatggcaaccggccgtctagtgcagccagcgcttttaaggtgcctgcaccaaagaccagcggtaacccagcaaactcagcccgaaagcctggttcagctggggggcctaaagtgggtgagcttctgagtattatgatctacagcagcagggagttggaggagaccctgaacaagattagagaaattctctcggacgacaaacacgattgggaccagagggccaatgctttaaaaaaaattaggtcactcctcgtcgccggggccgcacaatatgactgtttcttccaacacttgcgtttgctggatggggctctgaagcttagcgctaaagacctgcgatcccaagtggtccgggaggcctgtattacagtcgcccacctatctacagtcctgggaaacaagttcgaccatggtgccgaggctatcgttcccaccctgttcaatttagtccctaattcagccaaagtaatggctacctctggctgcgctgccatccgcttcattattcggcatacccacgtgccccgcctcatcccacttatcacgtctaactgtacctctaagtccgttcccgtgcgtaggcgtagtttcgagttcttggatctactgcttcaggagtggcagacacattcactcgagcggcatgcagcggtcctggttgaaacgatcaaaaagggtattcacgacgctgatgcagaggccagagtcgaagcccgcaaaacatatatggggcttcggaaccacttcccaggtgaagccgagacgctttacaactccctagaaccttcataccagaaaagtttacaaacttaccttaagtcctcaggctcagtggccagtctgccccaatctgacaggagctcctcgtccagccaggaatccctgaaccgacctttctcgtcaaaatggtctacagcaaacccctccaccgtggctggtcgcgtcagcgctgggtcaagcaaagcctcgtcgctgcctgggtcactgcagcgatccagatctgacatcgacgttaatgccgcagcaggtgctaaggcacaccacgctgcgggccagagcgtccgctctggacggctcggcgccggggcacttaacgctggctcctacgccagcctggaggatacctcagacaagcttgatgacttgttttcggacaacggaagagtgcgggcaaagttatccgctcccttggccgggatgggtaacgcgaaagccgatagcaggggccgcagcagaacaaagatggtgtcacagagccagagaagtagttctcccgacaagaatgagggttcccagagcgcgaacacgataggagccgggtcaaggagcgggtccccaggaagagtcctgactacaaccgccctctccacagtgtccagcggcgtccagcgcgtcctggtgaatagtgcttccgcccagaaaaggagtaaaattcccagatcccagggatgttcacgtgaggcttctccttcaagactctccgttgcccggtcaagccggattccacggccatctgtgtctcagggatgctccagagaggcctccagagagagttccagggatacaagtccagtgcgctctttccagcccttgggtcccggctacggcatatctcagagcagcaggctttcatcgagtgtctccgcaatgagggtgctcaacaccgggtcagacgtggaggaggcagtggccgatgccctggtgctctttgacttcaaaactaagaagaaaccagcaaggaggcggtacgaaagttacggaatgcactcagacgatgacgcaaactctgatgcatcaagcgcttgttcggaaaggtcatattcttcccgcaacggttcgatccctacctacatgcggcagacagaggatgtggctgaagtattgaatagatgcgctagcagtaactggtccgaaagaaaagagggacttctggggctgcaaaatctgctgaagaatcagcggaccctgtctcgcgtggagttgaagcgcctgtgtgagatcttcacacggatgttcgctgaccctcacggtaaggtgttttctatgtttcttgaaacattggtggacttcattcaagttcacaaggacgacttgcaggactggctgttcgtcctgctaacccagctgctcaagaagatgggcgcagacttgcttggcagtgtgcaggcgaaggtgcagaaagctttagacgtaactcgtgagagtttccccaacgatcttcagttcaacatactcatgaggttcaccgtggatcagactcagacccctagcttgaaggtaaaggttgcgatattgaagtatatcgaaaccctcgctaaacagatggatcccggcgattttattaatagtagcgaaacaagacttgcagttagtcgggtaatcacctggaccactgagcccaaaagttctgatgtgagaaaagctgctcaaagcgtgttgatctcactatttgagctgaatacccccgaattcacaatgttactgggagcactacccaaaaccttccaggacggagcaactaaactgcttcataatcatctgagaaacaccggaaatggaacacaatcgtcaatgggaagccccctcacgagaccaacacctcgatctccggctaactggtcctctccattgacttcgccgaccaacaccagtcagaacaccctgtctccctcagcatttgactacgacacggaaaatatgaacagcgaagacatttacagcagcttgcgtggggtgacagaagctatacagaacttcagctttcggtcccaggaggacatgaatgagccgctgaaacgcgacagtaaaaaagatgatggtgatagcatgtgcggggggcctggcatgtcagatccccgggcgggaggcgacgccacagatagtagccagacggctctcgacaacaaggccagcctcctgcatagcatgccaactcacagctcaccacggagccgtgactataacccttataattactctgactcaatcagcccattcaacaaaagtgcgttgaaggaagctatgttcgacgatgatgctgaccagtttcccgacgacttgtctctagatcactcagacttggtcgctgagttgttgaaggagttgagtaatcacaacgaacgggtttag

SEQ ID NO: 327893 - DNA, 3192 bp, Artificial Sequence
  derived and/or modified sequence
atgagacgtctgatctgcaagcgaatttgcgattacaagagttttgatgacgaggagtccgttgacgggaatcgaccaagtagcgccgcaagcgccttcaaggttcccgcaccaaaaaccagcggcaacccagctaacagcgcgaggaagcctgggtccgccggagggcctaaggtaggtgagcttttatcgatcatgatttacagctcaagggagctggaggagactttgaacaagatcagagaaatcctgagcgatgacaagcacgactgggatcaacgcgcaaatgcattgaagaagattcgaagccttcttgtggctggcgcagctcaatatgactgcttttttcaacatctccggctcttagatggtgcattgaaactcagcgctaaagaccttagatctcaggtcgtccgcgaggcctgtattacagtagcgcatctgagtacagtattgggaaacaaatttgatcacggagccgaagcgatcgtaccaacgctgttcaacttggtccccaattcagcgaaggtgatggccacctccggctgcgctgccataagattcataatccgccacacccatgtgccaagattaattccactgatcaccagcaactgtacctccaagtccgtccccgtgagaaggagatcgtttgagtttcttgatcttctgttgcaggaatggcagacacactccctggagagacacgccgcagtgctagtggaaaccataaagaagggcatccacgatgccgacgcagaggccagggtggaagctagaaaaacatatatgggcctacgaaaccacttccctggggaggccgaaacgctatacaactctctggagccctcataccagaaatcactgcagacatatctcaagagtagcggaagcgttgcgagtttgccccagtccgatcgcagttcgagctcctctcaggagtctctgaaccgcccattcagtagtaagtggagtacagcaaaccctagcaccgtggcagggagagtgtccgccggatcttctaaggcctcgtccctaccagggagtctgcagaggagcaggtctgacattgacgtaaacgcagcagctggcgcaaaggcccatcatgcagcaggacagtccgttcgctccggcagactaggcgctggcgctctcaatgccggtagctacgcatctcttgaagacactagcgataagctggacgacctgttctcagacaacgggagggtacgagccaaactgtcggccccactagccggtatggggaatgccaaagccgattctcgtgggagaagtcgcaccaaaatggtgagccaatcgcagcgctccagtagccctgataagaatgaggggagccaatctgctaatactatcggcgcaggaagtaggtccggctccccgggtcgggtgctcaccactacggccctgtcgacggtgtcttccggagtgcagcgcgtgttggttaactccgcttccgcccagaaacggagtaagatcccccgttcccagggatgtagcagggaagcctcaccctcccggttgtcagttgctaggagcagtcgcatacctcggccatctgtgagtcaggggtgcagcagagaggcttctagagagagcagcagagatactagtccggttcgctcgtttcaacccttagggcctggatatggaatttcccagtcatccagactatccagtagtgtgagcgctatgagagttttgaacaccgggagcgatgttgaagaggcggttgccgacgctctggtcctcttcgactttaaaaccaaaaaaaaaccagctaggcgtcgttacgagtcctatggcatgcactcagatgatgatgcaaatagtgacgcatcctctgcctgctcggagcgttcttattcctcacggaatggttcaatcccaacatacatgcgacagacagaagatgtagccgaggtcctgaatagatgcgcatccagtaattggtctgagcggaaagagggcctgttgggactccaaaacctgttaaagaaccagaggacactttcacgcgttgagttgaagaggttgtgtgagatcttcacaaggatgttcgctgaccctcatgggaaagttttctctatgtttcttgaaactttggttgatttcattcaagttcacaaggacgacctgcaagactggcttttcgtactgctaacacaactgctcaagaagatgggagctgatttactgggatccgtacaagcgaaagtgcaaaaagctctggatgtaactagagagagctttcccaacgatctgcaatttaatattcttatgcggttcactgttgaccagacccagactccatcactgaaagtgaaagtggccatactgaagtacattgagaccctggctaagcagatggaccccggtgatttcatcaactcttctgaaacccgcctggctgtatctagagtgatcacctggacaaccgagcctaaatccagtgacgtgaggaaagcagcccagagtgttctgatctcactgttcgagctgaacactcctgagtttactatgcttttgggtgccctgccaaagactttccaagatggcgcaactaagcttctccataaccatctgcggaataccggaaacggcacgcagtctagtatgggctctcctttaaccaggcctacacctaggtcccctgctaactggtctagccctctgacttctcctacaaatacttcccaaaataccctctcccctagtgcctttgactacgatacagaaaatatgaactccgaagacatttactcctcattacggggagtcacagaggctatccagaactttagcttccgatcccaggaggatatgaacgagccccttaagagagactcaaagaaagatgatggcgattcaatgtgcggcggacccggaatgtctgatccacgtgccggaggtgacgctacggactcgtcgcagactgctctggacaacaaggcctctttgctgcactcaatgcccactcactcctcacctagaagccgcgactacaacccttacaattactctgacagcatttccccattcaataaatccgccctgaaggaagccatgtttgacgatgacgccgatcaattccccgatgacctgtcccttgaccactcagatcttgtggccgaactgctgaaggagcttagcaaccataatgagagggtgtag

SEQ ID NO: 327894 - DNA, 6234 bp, Artificial Sequence
  derived and/or modified sequence
atgaggcgactgatttgcaaacggatctgtgattataaaagcttcgatgatgaagaatcagtggatggaaataggccatcatcagctgcatcagccttcaaggttcctgcacctaaaacatccggaaatcctgccaacagtgcaaggaagcctggttcagcaggtggccctaaggttggagaattattgtctataatgatttattctagtcgagaactcgaagaaacattaaataaaatcagggaaattttgtcagatgataaacatgactgggatcagcgtgccaatgcactgaagaaaattcgatcactgcttgttgctggagctgcacagtatgattgcttttttcaacatttacgattgttggatggagcacttaaactttcagctaaggatcttagatcccaggtggttagagaagcttgtattactgtagcccacctttcaacagttttgggaaacaagtttgatcatggcgctgaagccattgtacctacactttttaatctcgtccccaatagtgcaaaagtcatggcaacttctggatgtgcagcaatcagatttatcattcggcatactcatgtacccagacttatacctttaataacaagcaattgcacatcaaaatcagttcccgtgaggagacgttcatttgaatttttagatttattgttgcaagagtggcagactcattcattggaaagacatgcagccgtcttggttgaaactattaaaaagggaattcatgatgctgacgctgaggccagagtggaggcaagaaagacatacatgggtcttagaaaccactttcctggtgaagctgaaacattatataattcccttgagccatcttatcagaagagtcttcaaacttacttaaagagttctggcagtgtagcatctcttccacaatcagacaggtcctcatccagctcacaggaaagtctcaatcgccctttttcttccaaatggtctacagcaaatccatcaactgtggctggaagagtatcagcaggcagcagcaaagccagttcccttccaggaagcctgcagcgttcacgaagtgacattgatgtgaatgctgctgcaggtgccaaggcacatcatgctgctggacagtctgtgcgaagcgggcgcttaggtgcaggtgccctgaatgcaggttcctatgcgtcactagaggatacttctgacaagctggatgacttatttagtgataatggccgggtgagagcaaaactttcagcaccacttgctggcatgggaaatgccaaggcagattctagaggaagaagtcgaacaaaaatggtgtctcaatcacagcgttcatcatcacctgacaaaaatgaaggatcacaatctgctaataccattggtgctggtagccggtctgggtctccaggaagagttctgaccacaacagccctgtccactgtgagctctggtgttcaaagagtcctggtcaattcagcctcagcacaaaaaagaagcaagataccacggagccagggctgtagcagagaggctagtccatctaggctttcagtggcccgaagcagtcgtattcctcgaccaagtgtgagtcaaggatgcagccgggaagctagtcgggagagcagcagagacacaagtcctgttcgctcttttcagcccctcggtccaggttatgggatcagccaatcaagtcgactgtcgtcttctgttagtgccatgcgagtcctgaacacaggttctgatgtggaggaggcggtggcagatgccttggtactctttgattttaaaacaaaaaaaaaaccagctcgaagaagatatgaatcatatggaatgcattcagatgatgacgccaacagcgatgcatctagtgcttgttcagaacgctcctatagttctcgaaatggtagtattcctacatatatgaggcagacggaagatgtggcagaagtcctcaatagatgtgctagttccaattggtcagaaaggaaagaaggcctcctaggtctgcagaacttattaaaaaatcagagaacactaagtcgagttgaactgaaaagattatgtgaaattttcacaagaatgtttgctgaccctcatggcaaggtattcagcatgtttttggagactctagtggatttcatacaagtccacaaagatgatcttcaagattggttgtttgtactgctgacacaactactaaaaaaaatgggtgctgatttgcttggatctgttcaggcaaaagttcagaaagcccttgatgttacaagagagtcttttccaaatgatcttcagttcaatattctaatgagatttacagttgatcagacccagacaccaagcttaaaggtgaaggttgctatccttaaatacatagaaactctggccaaacagatggatccaggagattttataaattccagtgaaactcgcctagcagtgtctcgggtcatcacttggacaacagaacccaaaagttctgatgttcggaaggcagcacagtcagtgctgatttcattatttgaactcaataccccagagtttacaatgttattaggagctttaccaaaaacttttcaggatggtgctaccaagcttcttcataatcaccttcgaaacactggcaatggaacccagagttccatggggagtcctttgacaagaccaacaccacgatcaccagctaactggtccagtcctcttacttctcctaccaatacatcacagaatactttatctccaagtgcatttgattatgacacagaaaatatgaactctgaagatatttatagctctcttagaggtgtcactgaagcaatccagaatttcagcttccgtagccaagaagatatgaatgagccattgaaaagggattctaaaaaagatgatggcgattcaatgtgtggtggtcctgggatgtctgacccaagagcaggaggtgatgctactgactcaagtcaaacagctcttgataataaagcttcattgctccattcaatgcctactcactcctctccacgctctcgagactataatccatataactattcagatagcatcagtcccttcaacaagtctgccctcaaggaagccatgtttgatgatgatgctgaccagtttcctgacgatctttccctagatcattctgacctagttgcagagttgttgaaggagctgtctaaccataatgagcgtgtagaagaaagaaaaattgccctctatgaacttatgaaactgacacaggaagaatcttttagtgtttgggatgaacacttcaaaacaatattgcttttattgcttgaaacgcttggagataaagagcctacaatcagggctttggcattaaaggttttaagagaaatcctaaggcatcaaccagcaagatttaaaaactatgcagaattgactgtcatgaaaacattggaagcacataaagatcctcataaggaggtggtgagatctgctgaggaagcggcatcagtgttggccacttcaattagtccagagcagtgcatcaaagtgctttgtcctatcattcaaactgcagactacccaattaatctggctgcaatcaaaatgcaaacaaaagtgatagagagagtgtccaaggaaaccctaaacctgcttttgccagagattatgccaggtctaatacagggttatgataattcagagagcagtgttcggaaagcttgtgtcttctgcctggtggctgttcatgcggtaattggtgatgaactaaaaccacatctcagtcaacttactggcagtaaaatgaagctactgaatctttacatcaaacgtgcacaaacaggttctggaggagctgatcccactactgatgtttctggacaaagttagtgaagctcatcacagcgaaccaggtctctcaaaagaaaggacagatagaccaccctcatcaatgaaaggaagttctcaaacacatcctttggaacttactattgtttcccagttttagttttttgtttcgtttcgttttgtattttctgtaacagaggactatcctcagtctgcatgtaacttttatgatagttattccaaattcaagaagaagcagtattaacatcaattgatcgacacaaagtaatttttaatttaattcatcatttcacatgtttgtactttgtcttcccattaacctttgccagtgttatgattgtataaatttttttaaatgctggttaaacaggaatgcttaaagctttaaaagtttaacagtctaaaacatttttgcttttattcaactgcagaataatatttttattgctactttgagttttgtttcgtatcatgtcctatgctagaaatatttaaatgatgtgaaacaaagcaggactaatttgaactacagctggactccgtttgtgtgatggtgatacatgtcattagttgcaacttctttggggtgatctatagtttgaaaactaaaacctcaaagacagatgttacagaatcagccagttctgtaaaactgatattgtctattggttattgatcttgccatctttatttaaaaccatgtcccttctatgatcccttaagaaagctgcaccaaatcatctgcctgttttttcttgatacttactgaaatagaaggttttattgcagggtttattttggtttgtttatatctttgttgtgaatgatgcttttttgtatttattaatatcaaattcacttatgaataaacttgataatggaaacggacaaaaaaaatcaagtgcgtgtgtgtccttgaccgtcttctgtttctcacgtaataaacaaattatcgagacatgggagtgaccagcaccttttctttaaatggtggaacctggtttccttttaccatgaaattgtcttacttgaaaatattgatcctgatgagagagaagatggtgccaaggctgtctttgtataatgggctcaaattctctacctcttcagggctaatacttttaactgagctgctgcctatagtgtcttttggaaaactacttaaagggtgattttctgttactttttagcaaatttttttaatcacctcttgctacacccattcttttcatgtgcagccgactcaaaaattaccagttttggtgaaaggctaaattagataatttggaaccaggatactaatgatttctcatctttacttttttttaatcctaatataaagtgaatttgattgaaaaggcaaatagctattagggaagcagtttgccattgttgcagagttatctgtactttgtttaactgaaaaaaatgtagaaatatatgtaaagaatttaagacaagagtactgaatggatgatttgtcataggctttcccctttctttctgttctagcagcaggaaaagtttctctatatcctctccctctacctgtaacaattttgttttctactgttaattacattgtgtatttatagttctatgcttactgttgtgcatatactggcaataaaactgtacataacattacttgaaaaagttaataatgtatatcagtttttctgtctcactgtgtaacaagtcactcagttttattttaactttagacggtcttgtatcagtggtggtctcttgaattttgtaagttcatctgaggagaaaagatttttcaggtgtagctaccacaatcaaaggtatatagctacatacgcatgtatatattacagcttatctgtaagaagaaaatgcattttaaacacaactcttctcagtagcattttatgacctttggatatgtttgtaatcatttcgaatcaaaatattgatttaattttgacctctggtttaagatactgctttaactactgttgacaaccaagtagagtgacttaagctgaacagtaactaactggaaaattagataagcacctggcatctaatggcaggcaggcactcaagaaatgaattaactacataatggaaaagtatggtttaatgtgtccaaatgaaagctagtagatgtaaacatggaaaaattgtgtttacaattttataatctcagttgataagactataagaaagctgattatttaaatcactatatacaatacacccttaatttgttcattccagaaacatactgagatgtcagctacttaaaaatggtcacaaaaagctactgtttatatttttcctcctgctattctctcccaaattaattattaataagtgttgttcatttactgcactgctgagaactaattaaaattatatattccagattgt

SEQ ID NO: 327895 - DNA, 3192 bp, Artificial Sequence
  derived and/or modified sequence
atgagaagactgatctgcaagagaatctgcgactacaagagcttcgacgacgaggagagcgtggacggcaacagacccagcagcgccgccagcgccttcaaggtgcccgcccccaagaccagcggcaaccccgccaacagcgccagaaagcccggcagcgccggcggccccaaggtgggcgagctgctgagcatcatgatctacagcagcagagagctggaggagaccctgaacaagatcagagagatcctgagcgacgacaagcacgactgggaccagagagccaacgccctgaagaagatcagaagcctgctggtggccggcgccgcccagtacgactgcttcttccagcacctgagactgctggacggcgccctgaagctgagcgccaaggacctgagaagccaggtggtgagagaggcctgcatcaccgtggcccacctgagcaccgtgctgggcaacaagttcgaccacggcgccgaggccatcgtgcccaccctgttcaacctggtgcccaacagcgccaaggtgatggccaccagcggctgcgccgccatcagattcatcatcagacacacccacgtgcccagactgatccccctgatcaccagcaactgcaccagcaagagcgtgcccgtgagaagaagaagcttcgagttcctggacctgctgctgcaggagtggcagacccacagcctggagagacacgccgccgtgctggtggagaccatcaagaagggcatccacgacgccgacgccgaggccagagtggaggccagaaagacctacatgggcctgagaaaccacttccccggcgaggccgagaccctgtacaacagcctggagcccagctaccagaagagcctgcagacctacctgaagagcagcggcagcgtggccagcctgccccagagcgacagaagcagcagcagcagccaggagagcctgaacagacccttcagcagcaagtggagcaccgccaaccccagcaccgtggccggcagagtgagcgccggcagcagcaaggccagcagcctgcccggcagcctgcagagaagcagaagcgacatcgacgtgaacgccgccgccggcgccaaggcccaccacgccgccggccagagcgtgagaagcggcagactgggcgccggcgccctgaacgccggcagctacgccagcctggaggacaccagcgacaagctggacgacctgttcagcgacaacggcagagtgagagccaagctgagcgcccccctggccggcatgggcaacgccaaggccgacagcagaggcagaagcagaaccaagatggtgagccagagccagagaagcagcagccccgacaagaacgagggcagccagagcgccaacaccatcggcgccggcagcagaagcggcagccccggcagagtgctgaccaccaccgccctgagcaccgtgagcagcggcgtgcagagagtgctggtgaacagcgccagcgcccagaagagaagcaagatccccagaagccagggctgcagcagagaggccagccccagcagactgagcgtggccagaagcagcagaatccccagacccagcgtgagccagggctgcagcagagaggccagcagagagagcagcagagacaccagccccgtgagaagcttccagcccctgggccccggctacggcatcagccagagcagcagactgagcagcagcgtgagcgccatgagagtgctgaacaccggcagcgacgtggaggaggccgtggccgacgccctggtgctgttcgacttcaagaccaagaagaagcccgccagaagaagatacgagagctacggcatgcacagcgacgacgacgccaacagcgacgccagcagcgcctgcagcgagagaagctacagcagcagaaacggcagcatccccacctacatgagacagaccgaggacgtggccgaggtgctgaacagatgcgccagcagcaactggagcgagagaaaggagggcctgctgggcctgcagaacctgctgaagaaccagagaaccctgagcagagtggagctgaagagactgtgcgagatcttcaccagaatgttcgccgacccccacggcaaggtgttcagcatgttcctggagaccctggtggacttcatccaggtgcacaaggacgacctgcaggactggctgttcgtgctgctgacccagctgctgaagaagatgggcgccgacctgctgggcagcgtgcaggccaaggtgcagaaggccctggacgtgaccagagagagcttccccaacgacctgcagttcaacatcctgatgagattcaccgtggaccagacccagacccccagcctgaaggtgaaggtggccatcctgaagtacatcgagaccctggccaagcagatggaccccggcgacttcatcaacagcagcgagaccagactggccgtgagcagagtgatcacctggaccaccgagcccaagagcagcgacgtgagaaaggccgcccagagcgtgctgatcagcctgttcgagctgaacacccccgagttcaccatgctgctgggcgccctgcccaagaccttccaggacggcgccaccaagctgctgcacaaccacctgagaaacaccggcaacggcacccagagcagcatgggcagccccctgaccagacccacccccagaagccccgccaactggagcagccccctgaccagccccaccaacaccagccagaacaccctgagccccagcgccttcgactacgacaccgagaacatgaacagcgaggacatctacagcagcctgagaggcgtgaccgaggccatccagaacttcagcttcagaagccaggaggacatgaacgagcccctgaagagagacagcaagaaggacgacggcgacagcatgtgcggcggccccggcatgagcgaccccagagccggcggcgacgccaccgacagcagccagaccgccctggacaacaaggccagcctgctgcacagcatgcccacccacagcagccccagaagcagagactacaacccctacaactacagcgacagcatcagccccttcaacaagagcgccctgaaggaggccatgttcgacgacgacgccgaccagttccccgacgacctgagcctggaccacagcgacctggtggccgagctgctgaaggagctgagcaaccacaacgagagagtgtag

SEQ ID NO: 327896 - protein, 980 aa, Artificial Sequence
  derived and/or modified sequence
MTEGRHCQVHLLDDRRLELLVQPKLLARELLDLVASHFNLKEKEYFGITFIDDTGQQNWLQLDHRVLDHDLPKKPGPTILHFAVRFYIESISFLKDKTTVELFFLNAKACVHKGQIEVESETIFKLAAFILQSPKVSLTHDENARKDLKTLPAFPTKTLQEHPSLAYCEDRVIEHYLKIKGLTRGQAVVQYMKIVEALPTYGVHYYAVKDKQGLPWWLGISYKGIGQYDIQDKVKPRKLFQWKQLENLYFREKKFAVEVHDPRRISVSRRTFGQSGLFVQTWYANSSLIKSIWVMAISQHQFYLDRKQSKAKIPSARSLDEIAMDLTETGTQRASKLVTLETKSQFIMASNGSLISSGSQDSEVSEEQKREKILELKKKEKLLQEKLLKKVEELKKICLREAELTGKMPKEYPLNIGEKPPQVRRRVGTAFKLDDNLLPSEEDPALQELESNFLIQQKLVEAAKKLANEPDLCKTVKKKRKQDYTDAMKKLQEIENAINEYRIRCGKKPSQKATVLPEDIIPSESSSLSDTTTYDDPSDAFTFPGQRSSSVPHSPRILPPKSLGIERIHFRKSSINEQFVDTRQSREMLSTHSSPYKTLERRPQGGRSMPTTPVLTRNAYSSSHLEPESSSQHCRQRSGSLESQSHLLSEMDSDKPFFSLSKSQRSSSTEILDDGSSYTSQSSTEYYCVTPVTGPYYTTQTLDTRTRGRRRSKKQNVSTSNSGSMPNLAQKDSLRNGVYSKSQEPPSSSYYIAGYTPYAECDFYYSGGYVYENDTEGQYSVNPSYRSSAHYGYERQRDYSRSFHEDEVDRVPHNPYATLRLPRKAAAKSEHITKNIHKALVAEHLRGWYQRASGQKDQGHSPQTSFDSDRGSQRCLGFAGLQVPCSPSSRASSYSSVSSTNASGNWRTQLTIGLSDYETPAHSSYTSCYGNVYNPLPSPSRQYTEISQLDGTDGNQLEDNLESSEQRLFWHEDSKPGTLV

SEQ ID NO: 327897 - DNA, 2943 bp, Artificial Sequence
  derived and/or modified sequence
atgaccgagggcagacactgccaggtgcacctgctggacgacagaagactggagctgctggtgcagcccaagctgctggccagagagctgctggacctggtggccagccacttcaacctgaaggagaaggagtacttcggcatcaccttcatcgacgacaccggccagcagaactggctgcagctggaccacagagtgctggaccacgacctgcccaagaagcccggccccaccatcctgcacttcgccgtgagattctacatcgagagcatcagcttcctgaaggacaagaccaccgtggagctgttcttcctgaacgccaaggcctgcgtgcacaagggccagatcgaggtggagagcgagaccatcttcaagctggccgccttcatcctgcagagccccaaggtgagcctgacccacgacgagaacgccagaaaggacctgaagaccctgcccgccttccccaccaagaccctgcaggagcaccccagcctggcctactgcgaggacagagtgatcgagcactacctgaagatcaagggcctgaccagaggccaggccgtggtgcagtacatgaagatcgtggaggccctgcccacctacggcgtgcactactacgccgtgaaggacaagcagggcctgccctggtggctgggcatcagctacaagggcatcggccagtacgacatccaggacaaggtgaagcccagaaagctgttccagtggaagcagctggagaacctgtacttcagagagaagaagttcgccgtggaggtgcacgaccccagaagaatcagcgtgagcagaagaaccttcggccagagcggcctgttcgtgcagacctggtacgccaacagcagcctgatcaagagcatctgggtgatggccatcagccagcaccagttctacctggacagaaagcagagcaaggccaagatccccagcgccagaagcctggacgagatcgccatggacctgaccgagaccggcacccagagagccagcaagctggtgaccctggagaccaagagccagttcatcatggccagcaacggcagcctgatcagcagcggcagccaggacagcgaggtgagcgaggagcagaagagagagaagatcctggagctgaagaagaaggagaagctgctgcaggagaagctgctgaagaaggtggaggagctgaagaagatctgcctgagagaggccgagctgaccggcaagatgcccaaggagtaccccctgaacatcggcgagaagcccccccaggtgagaagaagagtgggcaccgccttcaagctggacgacaacctgctgcccagcgaggaggaccccgccctgcaggagctggagagcaacttcctgatccagcagaagctggtggaggccgccaagaagctggccaacgagcccgacctgtgcaagaccgtgaagaagaagagaaagcaggactacaccgacgccatgaagaagctgcaggagatcgagaacgccatcaacgagtacagaatcagatgcggcaagaagcccagccagaaggccaccgtgctgcccgaggacatcatccccagcgagagcagcagcctgagcgacaccaccacctacgacgaccccagcgacgccttcaccttccccggccagagaagcagcagcgtgccccacagccccagaatcctgccccccaagagcctgggcatcgagagaatccacttcagaaagagcagcatcaacgagcagttcgtggacaccagacagagcagagagatgctgagcacccacagcagcccctacaagaccctggagagaagaccccagggcggcagaagcatgcccaccacccccgtgctgaccagaaacgcctacagcagcagccacctggagcccgagagcagcagccagcactgcagacagagaagcggcagcctggagagccagagccacctgctgagcgagatggacagcgacaagcccttcttcagcctgagcaagagccagagaagcagcagcaccgagatcctggacgacggcagcagctacaccagccagagcagcaccgagtactactgcgtgacccccgtgaccggcccctactacaccacccagaccctggacaccagaaccagaggcagaagaagaagcaagaagcagaacgtgagcaccagcaacagcggcagcatgcccaacctggcccagaaggacagcctgagaaacggcgtgtacagcaagagccaggagccccccagcagcagctactacatcgccggctacaccccctacgccgagtgcgacttctactacagcggcggctacgtgtacgagaacgacaccgagggccagtacagcgtgaaccccagctacagaagcagcgcccactacggctacgagagacagagagactacagcagaagcttccacgaggacgaggtggacagagtgccccacaacccctacgccaccctgagactgcccagaaaggccgccgccaagagcgagcacatcaccaagaacatccacaaggccctggtggccgagcacctgagaggctggtaccagagagccagcggccagaaggaccagggccacagcccccagaccagcttcgacagcgacagaggcagccagagatgcctgggcttcgccggcctgcaggtgccctgcagccccagcagcagagccagcagctacagcagcgtgagcagcaccaacgccagcggcaactggagaacccagctgaccatcggcctgagcgactacgagacccccgcccacagcagctacaccagctgctacggcaacgtgtacaaccccctgcccagccccagcagacagtacaccgagatcagccagctggacggcaccgacggcaaccagctggaggacaacctggagagcagcgagcagagactgttctggcacgaggacagcaagcccggcaccctggtgtag

SEQ ID NO: 327898 - DNA, 2943 bp, Artificial Sequence
  derived and/or modified sequence
atgaccgagggtaggcactgtcaggtgcacctccttgacgacaggaggctggagctgctggtgcaacctaagctgctggctcgggaactgctggacctcgtcgcttcacattttaacctgaaggaaaaggagtatttcggaatcacatttatcgacgataccggccagcagaactggttacagctggaccatcgggtgttggaccatgatctccccaagaaacctggtccaacaatactgcatttcgccgttcggttttacatcgaatcgatctccttccttaaagataagacgaccgtagaactcttcttcctgaatgccaaagcatgtgtacacaaagggcagatcgaagtggagagcgaaactatcttcaagctcgccgcttttattctccagtctccgaaggtaagcctcacccatgatgagaacgcaagaaaggatctcaagactctccctgcctttcctactaaaaccctccaggaacatccgtctttggcatactgcgaggatcgggtgatcgaacactacctgaaaatcaaaggtttgactcgcgggcaggcagtggttcaatacatgaaaatcgtggaagctctgccaacctacggcgtccattattacgcagtcaaggataaacagggacttccatggtggctcgggatcagctacaagggtattggccaatatgacatccaggataaagtcaagccgagaaagctatttcagtggaagcagcttgaaaatctatattttcgtgagaagaagttcgcggtcgaggttcacgacccccgcaggatcagtgtgtcaagaagaaccttcggccagtcaggcttgtttgtgcagacatggtatgcaaatagcagtctcatcaaatccatctgggtcatggccatcagccagcaccagttttatctagaccgaaagcagtccaaggctaagattccctcagcgcgatccctggatgaaattgccatggacctcactgaaactggcactcaacgggccagcaagttggtgacacttgagacaaaaagccagttcataatggcctctaatggctctctgatttcctccggttctcaggattccgaggtgagcgaagagcagaagcgcgaaaagattttagaactgaagaagaaggagaagctgctccaggagaaactgctcaaaaaggtggaggagcttaaaaaaatctgccttagagaggctgaactgactgggaaaatgcccaaggaatacccactgaacatcggcgaaaagccccctcaggtaagaaggcgggttgggaccgccttcaaacttgatgataacctgctaccctccgaagaggaccctgctctgcaggagctggagagcaactttttgatacaacagaaactcgttgaagctgctaagaagcttgccaacgagcctgacttgtgcaaaaccgtgaagaaaaagagaaagcaagactataccgatgcaatgaagaaattgcaggagatcgaaaacgctattaatgagtacagaatccgatgtggaaaaaaacctagccagaaagccactgttctcccagaagatataattccttcggagagctcatctttgtccgacaccacaacttacgacgaccctagtgacgcctttacattccctggccagcggtcatcgagcgtgccgcatagccccagaattttgcctccgaaatccctgggcattgaaaggatccattttcgcaagtcgagcatcaatgagcagttcgtagatacccggcagagtagagagatgctctctacccacagttccccctataaaacactggagcgccggcctcagggaggcaggtccatgcctacaacgcccgttctcacccgcaatgcatactccagttctcacttagaacctgaaagtagttctcagcactgtcgacaaaggagcgggtccttggagagtcagtcccatctgttgagcgaaatggactcagataagccgttctttagtctgagtaagtctcagagaagcagtagcaccgagatactcgatgacggctccagctacacctcacagtctagtactgagtattactgtgttactccggtgactggcccttattatactactcagactttagacacccgcactcggggtcggcgccggtccaagaagcaaaacgtgtctacctctaactcaggaagcatgcccaatttggcacagaaagatagcctacgtaatggcgtctattcaaagagccaggagcctcctagctcatcatattacatcgcagggtatacaccctacgctgagtgtgatttctactactcagggggctacgtgtacgagaacgataccgagggccaatacagtgtgaatccatcatatagatcttcggctcattacggttatgaacgccagagagattattctagatcatttcatgaagacgaagtggatcgcgtccctcacaacccatacgctactttgcggttgcctcggaaggccgctgcgaagtccgagcatatcaccaagaacattcataaagccctggtcgcagagcatctaagagggtggtaccagcgggctagtgggcaaaaagaccaggggcactcacctcagacctcatttgattcagaccgaggctcccagcgctgtcttggttttgctggactgcaggtaccttgttccccatcatcacgcgcatcatcctactcttccgtttctagtactaacgcctcgggcaactggcgaacccagctgacgatagggctgtctgattacgaaacacccgcgcattcttcttacactagctgctatggaaacgtatacaacccattgccctcgccttccaggcagtatacggagatctcacagctggacggtacagacggaaaccagctcgaagacaacttggaaagttcagaacagcgactgttctggcacgaggactccaagccaggtaccttagtgtag

SEQ ID NO: 327899 - DNA, 2943 bp, Artificial Sequence
  derived and/or modified sequence
atgacagagggccgccactgccaggtgcacctgctggatgaccggcggctggagctgctggtgcagcccaagctgctggcccgggagctgctggacctggtggccagccacttcaacctgaaggagaaggagtacttcggcatcaccttcattgatgacaccggccagcagaactggctgcagctggaccaccgggtgctggaccatgacctgcccaagaagccaggccccaccatcctgcactttgctgtgcgcttctacatcgagagcatctccttcctgaaggacaagaccaccgtggagctgttcttcctgaatgccaaggcctgtgtgcacaagggccagatcgaggtggagagcgagaccatcttcaagctggccgccttcatcctgcagagccccaaggtgtccctgacccatgatgaaaatgccaggaaggacctgaagaccctgcctgccttccccaccaagaccctgcaggagcaccccagcctggcctactgtgaagatagagtgattgagcactacctgaagatcaagggcctgacccggggccaggccgtggtgcagtacatgaagatcgtggaggccctgcccacctatggagtgcactactatgctgtgaaggacaagcagggcctgccctggtggctgggcatctcctacaagggcatcggccagtatgacatccaggacaaggtgaagcccaggaagctgttccagtggaagcagctggagaacctgtacttccgggagaagaagtttgctgtggaggtgcatgacccccggcgcatctctgtgtccaggaggaccttcggccagagcggcctgtttgtgcagacctggtacgccaacagcagcctcatcaagagcatctgggtgatggccatcagccagcaccagttctacctggacaggaagcagagcaaggccaagatccccagcgcccggagcctggatgagatcgccatggacctgacagaaacaggcacccagagggccagcaagctggtgaccctggagaccaagagccagttcatcatggccagcaatggcagcctcatcagcagcggcagccaggacagcgaggtgtctgaggagcagaagcgggagaagatcctggagctgaagaagaaggagaagctgctgcaggagaagctgctgaagaaggtggaggagctgaagaagatctgcctgcgggaggccgagctgaccgggaagatgcccaaggagtaccccctgaacatcggggagaagccaccccaggtgagaagaagagtgggcacagccttcaagctggatgacaacctgctgcccagcgaggaggaccctgccctgcaggagctggagagcaacttcctgatccagcagaagctggtggaggccgccaagaagctggccaatgaaccagacctgtgcaagacagtgaagaagaagaggaagcaggactacacagatgccatgaagaagctgcaggagattgaaaatgccatcaatgagtaccgcatccgctgtgggaagaagcccagccagaaggccaccgtgctgcctgaggacatcatccccagcgagagcagcagcctgagtgacaccaccacctatgatgaccccagtgatgccttcaccttccctggccagaggagcagctctgtgccccacagcccccgcatcctgccccccaagagcctgggcatcgagcgcatccacttcaggaagagcagcatcaatgagcagtttgtggacacccggcagagccgggagatgctgagcacccacagcagcccctacaagaccctggagcggcggccccagggcggccgctccatgcccaccacccctgtgctgaccagaaatgcctacagcagcagccacctggagcctgagagcagcagccagcactgccggcagaggagcggcagcctggagagccagagccacctgctgtctgagatggacagcgacaagcccttcttcagcctgagcaagagccagaggagcagcagcacagagatcctggatgatggcagcagctacaccagccagagcagcacagagtactactgtgtgacccctgtgacaggcccctactacaccacccagaccctggacaccaggacccggggcagaagaagaagcaagaagcagaatgtgtccaccagcaacagcggctccatgcccaacctggcccagaaggacagcctgagaaatggagtgtacagcaagagccaggagccccccagcagcagctactacatcgccggctacaccccctatgcagaatgtgacttctactacagcggcggctacgtgtatgaaaatgacacagagggccagtacagcgtgaaccccagctaccgcagcagcgcccactacggctatgagcggcagagggactacagccgctccttccatgaagatgaggtggacagagtgccccacaacccctatgccaccctgcggctgcccaggaaggccgccgccaagtctgagcacatcaccaagaacatccacaaggccctggtggccgagcacctgcggggctggtaccagagggccagcggccagaaggaccagggccacagcccccagaccagctttgacagcgaccggggcagccagcgctgcctgggctttgctggcctgcaggtgccctgcagccccagcagccgggccagcagctacagctctgtgagcagcaccaatgccagcggcaactggaggacccagctgaccatcggcctgagtgactatgagaccccagcccacagcagctacaccagctgctatggaaatgtgtacaaccccctgcccagccccagccggcagtacacagagatcagccagctggatggaacagatggcaaccagctggaggacaacctggagagcagcgagcagaggctcttctggcatgaggacagcaagccaggcaccctggtgtag

SEQ ID NO: 327900 - DNA, 2943 bp, Artificial Sequence
  derived and/or modified sequence
atgaccgagggccggcactgccaggtgcacctgctggacgaccggagactggaactgctagtccagcctaaacttctggcaagggagctgctcgatctcgttgcctcccatttcaatctcaaagagaaggaatattttggcatcactttcattgacgataccggccaacagaattggctgcaacttgaccatcgcgtcttggaccacgacctgcccaagaagccaggacctaccatcctccacttcgctgttaggttctacatcgagagcattagctttctgaaggataaaactaccgtggagctcttcttcttaaacgcgaaagcttgtgttcacaagggccagatcgaggtggagagcgagaccatctttaaactcgccgcattcattttgcagtcccccaaggtgagcctgactcatgatgagaatgcccggaaggacctcaaaacattaccggctttccctacaaaaactttgcaggagcatccaagtcttgcatattgcgaggatcgtgtgattgaacactacctgaagattaaaggattaacacgaggccaggcagtcgtacaatatatgaaaatcgttgaggctctccctacgtacggggtccattactacgcagttaaagataaacagggactgccttggtggctggggatcagctataagggcataggacagtacgacattcaggacaaggtgaagcccaggaagctgttccagtggaaacaactggaaaacttgtactttcgggagaagaaatttgccgtggaggtgcatgatcctcggcgaatctccgtaagtcggaggacctttgggcagagcggcctgttcgtgcagacgtggtacgctaattccagcctgattaagtctatttgggtaatggccatctcccagcatcagttctacttagataggaaacagagcaaagcaaaaattccttcggcccgcagcttggacgagattgccatggatttgacagagactggaactcaaagggcctctaaactagttaccctcgagacaaaatctcagttcatcatggcctccaacggaagcttaatctccagtgggtctcaggatagcgaggtgagcgaagaacagaagcgcgaaaagatcctggaactgaagaagaaggaaaagctacttcaggagaaactcttgaaaaaggtagaagaattgaaaaagatttgcttacgggaggcagagcttactggcaaaatgcccaaggagtaccccctgaacataggcgaaaagcccccgcaggtaaggaggagggttggcaccgccttcaaactggacgataacctgctccccagcgaggaagacccggccctgcaagagctggagagtaacttcctaattcagcagaagctggtggaggctgccaagaagctggccaatgagcccgatctgtgtaaaactgttaaaaagaagcgaaaacaggactacaccgacgccatgaaaaaattgcaagaaatagaaaatgctattaacgagtataggatacggtgtgggaagaaaccctcacaaaaagccacagtgctccctgaagacatcattccaagcgagagttcaagcttgagtgacactacaacttatgatgatccaagcgacgctttcacattcccgggacagagaagtagctccgtaccccatagcccccgaattcttcctcctaagagtcttggcatagaaaggatccacttcaggaaaagtagcatcaacgaacagttcgttgacaccaggcagagtagggaaatgctgtcaacacattcaagcccctataagaccctggagaggaggcctcaaggcggtcgcagcatgccaacgacacccgttctcacgcgaaatgcatatagctcgagccatcttgaacctgagtccagttctcagcattgccgccagagatctggctccttggagtcacaatctcatctcctgtcagagatggacagtgacaagccatttttcagcttgagtaagtcccagcggagcagttcaactgagattcttgacgacggctcttcctacaccagtcagtcctctaccgagtattattgcgtcacccccgtgacgggaccatattataccactcagacactagatacacgcacacgaggtcgccgccgcagtaagaagcaaaatgtgagcacctccaacagtggctccatgccaaatctagcccagaaggatagcctccgtaacggggtctattccaagtctcaggagcccccttcctcaagctactatatcgccggatatacaccgtacgccgagtgtgacttctactatagcggcgggtatgtctacgaaaatgacactgagggccaatattcggtcaatccctcataccggagttccgctcattacggctacgagcggcagagagactactcccggtcgttccacgaggatgaagttgaccgtgtcccccacaacccctatgccaccctgaggttaccacgtaaagccgcagctaaaagcgagcacatcaccaagaatatccacaaggccctggtcgcggaacatttgcgagggtggtaccagcgggcatcgggccagaaggatcagggccatagccctcaaacctcttttgacagcgatcgcgggagtcagaggtgtctaggttttgcaggcttgcaggtaccctgcagccctagctctcgcgcgagcagctactccagtgttagctcgaccaatgccagtgggaactggcgcacacagttgaccatcggtctttcggactatgaaacaccggctcattcttcctatacctcctgttacgggaatgtgtataatcctctccctagcccttccagacagtacactgagatctcccagttggatggcacagatggcaaccaactagaagataacctcgaatcctctgagcaacggctgttttggcacgaggacagtaagcctggaacgctggtatag

SEQ ID NO: 327901 - DNA, 2943 bp, Artificial Sequence
  derived and/or modified sequence
atgacagagggaaggcactgtcaggtccacctgttggatgataggagacttgagttgttagttcagcctaaattgctggcacgtgaacttctggacttggtggcttcacattttaatttgaaagaaaaagagtacttcgggattacctttatcgatgacaccggacagcagaactggctgcagttggaccaccgggtgctggaccatgatctgcctaaaaagccaggccctaccatcttacacttcgccgtgaggttttacatcgaaagcatatcatttctcaaggacaagaccaccgttgagctgtttttcctcaacgccaaagcttgcgtgcacaaggggcagatagaagtggagagcgagacaattttcaaacttgccgctttcattttgcagtcgccaaaggtgagcctcactcacgatgagaatgcacggaaagacttgaaaaccctgcctgcgttcccaaccaaaacactgcaggaacaccctagtctagcatactgtgaagaccgggtgattgaacactacctcaaaatcaaggggctgaccagggggcaggccgttgtccagtacatgaagatcgtggaggcccttcctacttatggcgtgcattattatgcagttaaagacaagcagggcctgccctggtggctaggtatctcatacaagggtatcggacagtacgacatacaggataaagtgaaacccagaaagctgtttcagtggaaacagttggaaaacttatatttcagggaaaaaaagtttgccgttgaagtgcacgatcctaggcggatcagtgtatcccggaggactttcggtcagtcagggctgttcgttcaaacctggtacgccaattctagcctgataaaaagcatctgggtgatggcaattagccagcatcaattctaccttgacagaaagcagtccaaggccaaaataccctctgctcgctcactggatgagattgctatggatctgactgagacagggacccagcgggcatcgaaactcgtaacactggagactaagtcacaattcatcatggcgtcgaatggtagtttaatctcctcaggttcgcaagacagtgaggttagcgaggagcagaagcgggagaaaatactcgaactcaagaagaaggagaaactgcttcaggaaaagctgctgaagaaagttgaagagctgaagaagatatgtcttcgcgaagctgaactgactggaaagatgccgaaggagtaccctctcaatatcggggaaaagccaccccaggttagacggagagtgggcaccgcgtttaagctggacgacaacctgctgccctcagaagaggatcctgcactgcaggaattggagagcaactttctcatccagcagaaactggtggaggccgcaaagaagctggctaacgagccagatctgtgcaagactgtcaagaaaaagcggaagcaagactacaccgatgcaatgaagaagctacaagagattgaaaacgcgatcaacgagtataggatccgctgtggaaaaaaacccagtcagaaggctaccgttcttcctgaagacattataccgagcgaaagcagcagtctgtccgatacaacaacgtatgacgacccttctgatgcttttacatttcctgggcagaggagcagttctgtgcctcacagtcctaggattctgcctcccaaatccctcggcatcgagcgtattcattttcggaaatccagcattaatgaacagttcgtcgatacacggcagagcagagagatgctctccactcacagcagcccatataagacgttggagcgcaggccccaaggcggaagaagtatgcccacgaccccagtattgacaagaaacgcttactcttccagtcatctggaacctgaatcttcttctcagcactgcaggcagcgttctggctccctggaatcacagagccacctgctgagtgaaatggacagtgacaagccttttttctctctctccaagagccagagatcatccagtaccgagatcctggacgatggctcctcctatacaagccagagctctacagagtactattgcgtcactccagtcactggcccatactatacgacccagaccctggatactcgaacccggggaagacggcgtagtaagaagcagaacgtgtccacttccaacagtggatctatgcccaacctagcccagaaagacagccttaggaatggagtttattcgaagagccaggagcctccatcctcaagctattacatcgcaggttacacaccttatgcggaatgtgacttctactattctggaggctacgtgtacgagaacgacacggaaggccagtattcagtaaatccaagctatcggtcctctgcccattacgggtacgagcgccagagggactacagtagatcattccacgaggacgaggtggaccgggtcccacataatccatatgccacactaaggttgccccgaaaggctgctgctaaatcagagcacattacaaagaacattcacaaagctcttgtcgcagaacacctgcgaggctggtatcaacgcgctagcggccagaaagaccagggtcattcaccgcagacgtcattcgactcagaccggggatcccagcggtgcctggggtttgccggacttcaggtaccctgtagtcctagctcaagagctagttcctattcaagcgtcagctcaaccaacgccagcgggaattggcgcactcagctgaccattggtctgtcagattacgaaacccctgcccacagtagctacactagttgttatggaaacgtctacaaccctctcccctctccttccagacagtacacagaaattagtcagctggacggcaccgacggcaatcaactagaggacaatctggagtcatcggagcagcggcttttctggcatgaggactctaagcccggaactctcgtgtag

SEQ ID NO: 327902 - protein, 1003 aa, Artificial Sequence
  derived and/or modified sequence
MSQFEMDTYAKSHDLMSGFWNACYDMLMSSGQRRQWERAQSRRAFQELVLEPAQRRARLEGLRYTAVLKQQATQHSMALLHWGALWRQLASPCGAWALRDTPIPRWKLSSAETYSRMRLKLVPNHHFDPHLEASALRDNLGEVPLTPTEEASLPLAVTKEAKVSTPPELLQEDQLGEDELAELETPMEAAELDEQREKLVLSAECQLVTVVAVVPGLLEVTTQNVYFYDGSTERVETEEGIGYDFRRPLAQLREVHLRRFNLRRSALELFFIDQANYFLNFPCKVGTTPVSSPSQTPRPQPGPIPPHTQVRNQVYSWLLRLRPPSQGYLSSRSPQEMLRASGLTQKWVQREISNFEYLMQLNTIAGRTYNDLSQYPVFPWVLQDYVSPTLDLSNPAVFRDLSKPIGVVNPKHAQLVREKYESFEDPAGTIDKFHYGTHYSNAAGVMHYLIRVEPFTSLHVQLQSGRFDCSDRQFHSVAAAWQARLESPADVKELIPEFFYFPDFLENQNGFDLGCLQLTNEKVGDVVLPPWASSPEDFIQQHRQALESEYVSAHLHEWIDLIFGYKQRGPAAEEALNVFYYCTYEGAVDLDHVTDERERKALEGIISNFGQTPCQLLKEPHPTRLSAEEAAHRLARLDTNSPSIFQHLDELKAFFAEVTVSASGLLGTHSWLPYDRNISNYFSFSKDPTMGSHKTQRLLSGPWVPGSGVSGQALAVAPDGKLLFSGGHWDGSLRVTALPRGKLLSQLSCHLDVVTCLALDTCGIYLISGSRDTTCMVWRLLHQGGLSVGLAPKPVQVLYGHGAAVSCVAISTELDMAVSGSEDGTVIIHTVRRGQFVAALRPLGATFPGPIFHLALGSEGQIVVQSSAWERPGAQVTYSLHLYSVNGKLRASLPLAEQPTALTVTEDFVLLGTAQCALHILQLNTLLPAAPPLPMKVAIRSVAVTKERSHVLVGLEDGKLIVVVAGQPSEVRSSQFARKLWRSSRRISQVSSGETEYNPTEAR

SEQ ID NO: 327903 - DNA, 3012 bp, Artificial Sequence
  derived and/or modified sequence
atgtcacagttcgagatggatacctatgctaagtctcatgaccttatgtccggattttggaacgcttgttacgacatgctcatgagtagtggccaacgtcgacagtgggaacgggcacaatcgcggcgggcatttcaggagctcgtgctggaacctgcacagcggcgggctcgcctcgaaggcctgcggtataccgccgtgctgaagcagcaggccacccagcactccatggcacttcttcattggggggccttatggcggcagttggcctctccttgtggtgcgtgggctctgagagacacacccatcccccgctggaagctgtcatccgccgagacctacagccgcatgagactcaagctggttcctaaccatcactttgatccccatttagaggcttcagctctaagagacaacctgggggaggtaccgttgacacctaccgaggaggccagcttgccattggcggtgactaaggaagcgaaggtcagcaccccccctgagttgcttcaggaagatcagctgggcgaggatgagctggcggaactggagacacccatggaagcagccgagctagatgaacagcgcgagaagctagtgctatcagccgaatgtcagttggtgaccgtcgtggccgttgttccaggcttgcttgaggtcaccactcagaacgtctatttctacgacggaagtacagaaagagttgagacagaagagggcattgggtatgactttaggcgacctttagcgcagctgcgcgaagtacacttgagacgattcaacttgcgccgatctgcccttgagctcttttttatagatcaggcgaactattttctcaattttccctgcaaagtcggaaccactcccgtctcctcccccagtcagacgcctcgcccgcagccgggtccgattccccctcacacccaggtaaggaatcaggtgtatagctggcttctgaggctgcgacccccgtcacagggatacctgtccagcaggtccccccaggagatgcttcgggcaagcggcctgacccagaaatgggtgcaacgcgaaatttcaaacttcgagtacttaatgcagctcaacaccatagccgggaggacctataacgatctttctcagtatcccgtgttcccctgggttctgcaggattacgtgagtcctaccctcgatctgagcaaccccgcagtcttccgtgatttgtccaaacctattggcgtggtcaaccctaagcatgcacagctggtgcgagaaaagtatgaaagttttgaagatccagccggtactatcgacaaattccactacggcacacattattctaatgctgccggtgtgatgcattatctgattcgggtcgaaccatttacctcattgcacgtgcagctacagtctggcaggttcgactgctctgataggcagtttcattctgtggccgcagcctggcaggccaggctggagtcccccgctgacgttaaagagctcattccagaattcttctacttccctgactttctcgagaaccaaaatggcttcgatctcgggtgtctgcaactgaccaacgaaaaggtgggagatgtcgtgttgcccccctgggcctcctcccctgaggactttattcaacagcaccgacaagcgctagaatctgaatacgtgtccgcacacttgcacgagtggattgacctaattttcgggtacaaacagcgagggcccgctgccgaagaggcactcaatgtattctactattgtacctatgagggcgccgtcgatttagatcacgtcactgacgaacgagagcgcaaggcgctcgaggggataatttccaattttggccagaccccatgtcaactgctgaaagaaccccatcccacgagactttctgccgaggaagctgcccacagactggcaagactggacaccaattcccccagcatctttcaacacttagacgaactgaaagcctttttcgctgaagtgacagtgtcggcgtccgggctcctggggactcatagttggctgccttatgaccgtaacatctccaactatttctcatttagcaaggatcctacaatgggcagccacaagacccaaaggctgttaagcggcccgtgggttcctggtagcggcgtttctggccaggccctcgccgtcgcccccgatgggaaactcctctttagcggaggccactgggacgggagcctgcgcgtcaccgctttaccacgaggaaagttgctgagccagctcagctgtcatctggacgtggtaacatgtctggccctagatacatgcggcatctacctgataagtgggagtcgcgatacgacttgtatggtgtggcgtcttctgcaccaaggcgggctctcagtcggattggcacccaaaccagttcaggtgctgtatggccatggcgctgccgtatcctgtgtagctatatcgacggaactggatatggctgtttccggaagtgaggacggcacagtaatcattcacaccgtcaggaggggacaatttgttgccgctctcagacccctgggcgctacctttcctggcccaattttccatttagccctggggtcggaaggtcaaatcgttgtacaatcttcggcgtgggaaaggcctggggctcaggtgacttattctttacacctatattccgtcaacggtaaactgagagccagcctcccattagctgagcagcctacggccctgactgttactgaagattttgttctccttgggacagcacaatgcgcccttcacatcctgcagttgaatacactactcccggcagctccccctttgccaatgaaggtggcaattaggtcggtggcagttacaaaggaacggtctcacgtgctggttggtctggaagacggtaagttaatcgttgtggttgccggacaaccgtctgaggtgcgatcctcccagttcgctcggaagctatggaggagcagcagaaggataagccaggtctcttctggtgaaactgaatataatccgacggaggcaagatag

SEQ ID NO: 327904 - DNA, 3012 bp, Artificial Sequence
  derived and/or modified sequence
atgagccagtttgagatggacacctacgccaagagccatgacctgatgagcggcttctggaatgcctgctatgacatgctgatgagcagcggccagaggcggcagtgggagcgggcccagagccggcgggccttccaggagctggtgctggagcccgcccagaggcgggcccggctggagggcctgcgctacacagctgtgctgaagcagcaggccacccagcacagcatggccctgctgcactggggcgccctgtggaggcagctggccagcccctgtggggcctgggccctgcgggacacccccatcccccgctggaagctgagcagcgctgagacctacagcaggatgaggctgaagctggtgcccaaccaccactttgacccccacctggaggccagcgccctgcgggacaacctgggggaggtgcccctgacccccacagaggaggccagcctgcccctggccgtgaccaaggaggccaaggtgtccaccccacctgagctgctgcaggaggaccagctgggagaagatgagctggccgagctggagacccccatggaggccgctgagctggatgagcagcgggagaagctggtgctgtctgctgagtgccagctggtgacagtggtggccgtggtgcccggcctgctggaggtgaccacccagaatgtgtacttctatgatggcagcacagagcgggtggagacagaggagggcatcggctatgacttccggcggcccctggcccagctgcgggaggtgcacctgcggcgcttcaacctgcggcgcagcgccctggagctgttcttcatcgaccaggccaactacttcctgaacttcccctgcaaggtgggcaccacccctgtgagcagccccagccagaccccccggccccagcccggccccatccccccccacacccaggtgaggaaccaggtgtacagctggctgctgcggctgcggccccccagccagggctacctgagcagccgcagcccccaggagatgctgcgggccagcggcctgacccagaagtgggtgcagcgggagatcagcaactttgagtacctgatgcagctgaacaccatcgccggccgcacctacaatgacctgagccagtaccctgtgttcccctgggtgctgcaggactatgtgagccccaccctggacctgagcaacccagctgtgttccgggacctgagcaagcccatcggcgtggtgaaccccaagcacgcccagctggtgcgggagaagtatgagagctttgaggaccctgctggcaccatcgacaagttccactacggcacccactacagcaatgctgctggggtgatgcactacctgatccgggtggagcccttcaccagcctgcacgtgcagctgcagagcggccgctttgactgcagcgaccggcagttccacagcgtggccgccgcctggcaggcccggctggagagccctgcagatgtgaaggagctgatccctgagttcttctacttcccagacttcctggagaaccagaatggatttgacctgggctgcctgcagctgaccaatgagaaggtgggagatgtggtgctgcccccctgggccagcagccctgaggacttcatccagcagcaccggcaggccctggagagtgaatatgtgtctgcccacctgcacgagtggattgacctgatcttcggctacaagcagaggggccctgctgctgaggaggccctgaatgtgttctactactgcacctatgagggcgctgtggacctggaccacgtgacagatgagcgggagaggaaggccctggagggcatcatcagcaactttggccagaccccctgccagctgctgaaggagccccaccccacccggctgtctgctgaggaggccgcccaccggctggcccggctggacaccaacagccccagcatcttccagcacctggatgagctgaaggccttctttgctgaggtgacagtgtctgccagcggcctgctgggcacccacagctggctgccctatgacaggaacatcagcaactacttctccttcagcaaggaccccaccatgggcagccacaagacccagaggctgctgagcggcccctgggtgcccggcagcggcgtgtctggccaggccctggccgtggccccagatggcaagctgctcttcagcggcggccactgggatggcagcctgcgggtgacagccctgccccggggcaagctgctgagccagctgagctgccacctggatgtggtgacctgcctggccctggacacctgtggcatctacctgatcagcggcagccgggacaccacctgcatggtgtggaggctgctgcaccagggcggcctgtctgtgggcctggcccccaagcctgtgcaggtgctgtatggccatggagctgctgtgtcctgtgtggccatcagcacagagctggacatggctgtgtctggctctgaagatggcaccgtcatcatccacacagtgcggcggggccagtttgtggccgccctgcggcccctgggcgccaccttccctggccccatcttccacctggccctgggcagcgagggccagatcgtggtgcagagcagcgcctgggagaggcctggggcccaggtgacctacagcctgcacctgtacagcgtgaatggcaagctgcgggccagcctgcccctggccgagcagcccacagccctgactgtgacagaggactttgtgctgctgggcacagcccagtgtgccctgcacatcctgcagctgaacaccctgctgcctgctgccccacccctgcccatgaaggtggccatccgctctgtggccgtgaccaaggagaggagccacgtgctggtgggcctggaggatggcaagctgattgtggtggtggccggccagcccagcgaggtgcgcagcagccagtttgccaggaagctgtggaggagcagccgccgcatcagccaggtgagcagcggggagacagagtacaaccccacagaggccaggtag

SEQ ID NO: 327905 - DNA, 3012 bp, Artificial Sequence
  derived and/or modified sequence
atgagccagttcgagatggacacctacgccaagagccacgacctgatgtccggtttctggaacgcttgttatgacatgctgatgtctagtggccagcggcggcaatgggagcgggcgcagtcccgccgggcttttcaggagttggtcctcgaaccagcacaaagaagggcccggctggaaggcctccgctacaccgcagtgttgaagcagcaggccacccaacacagcatggccttactccattggggtgctctttggagacagctggcaagtccttgtggcgcttgggctctacgggatacccccatccccagatggaaactctcaagtgccgagacatacagcagaatgcgactgaagctcgttccaaaccatcacttcgacccacaccttgaagcctccgccctgcgcgacaacttaggtgaggtgcccttgaccccaactgaggaggccagtcttcctctggccgtgaccaaggaggccaaggtctctacgcccccagagctacttcaagaggaccagctgggcgaggatgagctggccgagcttgaaaccccgatggaggcagcggaactggacgaacaacgcgaaaagttggtgttgagcgcagagtgccaactggtcacggttgtggccgtggtccctgggctcttagaagtgacaacccaaaatgtttatttttacgatggctctaccgaacgtgtggagactgaggaggggattggatacgatttccgccggccacttgctcagctgcgggaggttcacttacgaaggtttaacctcagaaggtctgccttggagcttttttttatcgatcaggccaactacttccttaatttcccttgtaaagttggcaccaccccagtgagcagccccagccagactcccaggcctcagccggggcccattcccccccacacacaggtcagaaaccaggtctacagctggctgcttcgattaaggccgccctcacaagggtatctgtccagtaggagccctcaagagatgcttagggcttccgggttaactcagaagtgggtgcaacgggagatcagcaactttgagtatctcatgcagttaaataccatagctggcaggacttacaatgacttaagtcagtaccctgtatttccctgggtcttgcaggattacgttagcccgacattggacctgagtaacccggcagtgtttcgcgacctttctaagccgatcggagtcgtgaacccgaaacatgcacaactcgtaagagagaagtacgagtcgttcgaggaccctgcaggaactatcgataaatttcattacgggacacattattccaacgcggcaggcgtgatgcattatctaatacgggtggaaccttttacttctctgcatgtgcagcttcagagcgggcgctttgactgtagcgaccgacagtttcacagcgtggctgccgcatggcaggcgaggctggagtctcctgccgacgtcaaggaattgatacctgagtttttctacttccctgactttctagagaaccagaatggctttgacctggggtgccttcagttgaccaacgagaaagtcggtgacgtggtgctccctccatgggcttcatcccccgaagattttattcagcaacatcggcaggccctcgagagtgaatacgtttcggctcatctgcacgagtggatcgacttgatcttcggctacaaacaacgagggcccgccgctgaggaggccttaaatgtcttctattattgcacctatgagggagctgtggatctggatcacgtaactgacgaaagagaacgtaaagcactggaggggattatcagcaattttgggcagaccccgtgtcagctgctcaaggagccacaccccacgcggctcagtgctgaggaggcagcccatcgtctggctcgcctggacaccaacagccctagcatcttccaacatctggacgagttgaaggcatttttcgccgaagttaccgtgtccgcctctggactcctcggaacccacagctggcttccatatgatcgcaatatctcgaactacttctcctttagcaaggatccaactatgggtagccacaaaacacaacgtttattatccgggccctgggtgccaggatcaggggtttctgggcaggctctcgcagtcgcaccggacggtaagctgctctttagtggcggccactgggacggttcacttagagttaccgccttgcctcgaggcaagctattaagccaactttcttgtcacctcgatgtggtgacctgcttggccctcgacacatgcggaatctacctcatctccgggtcaagggatactacatgcatggtttggcgcttgcttcatcagggcgggctgtccgtgggcctggctcctaaaccagtgcaggtgctatatggccatggcgcggctgtttcctgtgtggcgatctccactgagcttgatatggcggtgtccggaagtgaagatggcacggtgatcatacataccgtgagacgcggacagtttgttgcagctcttcgccccctgggcgccacctttcccgggccaatatttcacctggctcttggctccgaagggcagatcgtggttcagtcatctgcttgggagagacccggtgcccaggtgacctacagcctgcatctgtatagcgttaatggaaaactgcgggctagcctccctcttgccgaacagccaaccgctctcaccgtgactgaggacttcgtcctcctgggtactgctcagtgcgccttacacatacttcagctaaatacactacttcctgcagccccgcccctgcctatgaaagtcgctattaggagcgttgcagtcactaaggaaaggagccacgtcctagtcggactcgaggacgggaagttaattgtggttgtggcagggcagccatctgaggtgcgctcttcacagttcgctcgcaaactctggcgttccagtcggcggatcagtcaagtatcctctggggagaccgaatataatccgaccgaggctaggtag

SEQ ID NO: 327906 - DNA, 8737 bp, Artificial Sequence
  derived and/or modified sequence
agcagacttgggtggctctgcgccgcggaggccacagccgcagacttccccagtagtaccgcgccgctccgccccggagtgacgccctccgcccatgggcctggccgagggcaaccggcgggcggcgcggaggaggcggcgacaggtggcgcgcagcagggccggagccgggccgggccatggccgcctcggagcggctgtacgagttgtggctgctctactacgcgcagaaggacctgggttacctgcagcagtggctgaaggcctttgtaggtgccttcaagaagagcatctcactgtcctctctggagccacgaaggccagaggaggcaggtgcagaggtcccgctgctaccactggatgagctgcatgtgctggccgaacagctgcaccaggctgacctggagcaagccctcctgctgctcaagctcttcatcattctctgcaggaacctggagaacatagaggcaggccggggccaagtgctagtgccccgagtgctggcactgttgaccaagttggtggcggagctgaaaggatgcccaccaccccagggccgaggcacgcagttggagaatgtggccctacatgctctgcttctctgcgagggcctctttgacccttaccaaacctggcggcgccagcgcagtggggaagtcatcagctccaaggagaagagcaaatacaagttccctcctgctgctttgccccaggaattcagcgccttcttccaagagagcctacagaatgcagaccacttgcctcccatactgctgttacgtctcatccacctcttctgcgccgtcctcgctggaggaaaggagaacgggcagatggctgtaagtgatggctctgtgaagggcctgctgagtgtggtgcggggctggagccgtgggccagccccggacccgtgcctagtgccactggctctagaggcactggtaggtgcagtccatgtcttgcatgccagccgcgcacctcctcgtggcccagagcttcgtgccctgcttgagagctacttccatgtccttaatgctgactggccagctggtctgagctcaggccccgaagaggcccttgtcaccctccgggtcagcatgctcgacgccatccccatgatgctggcatgtgaagaccggccagtgctgcaagccaccttcctcagcaacaattgctttgaacacctcactcggctcattcagaacagcaagctgtacctgcagtcccgggcgccccccgagggggacagtgacctggctacccggttactgactgagcccgatgtccaaaaggtcctggaccaagacacagacgccattgcagtccatgtagtcagagtgctgacctgcatcatgagtgactccccctcggccaaggaggtgtttaaggagcgcatcggctaccctcacctgcaggaggttctgcagagccatggtccccccacccatcggctgttgcaagagctgctcaacatggctgtggagggtgaccacagcatgtgcccacctccaccaatccgcaacgagcagccggtactggtgctggcgcagtggctgccgtcattgcccaccgctgagctgcggctcttcctagcgcaacgcctcaggtggctctgtgacagctgccctgccagccgtgccacctgtgtgcaggcaggcctggtgggctgcctgttggagacactcagcacagggctagccctggaggcccgctgccaagagcagctgctggcactgctacaagcactgggccgtgtatcaataaggcccatggagctgcgtcacctgctgcgcccccggccaggattggactcggaaccaggcggagctgaggctggaaaggcccgacacgcaggtgctgtcatccgcacattatcaggcatggccaggcaccagggtcctgcacgtgctctgcgctactttgacctcacgcccagcatggcgggcatcatggtaccccctgtacagcgatggccagggcctggcttcacctttcatgcctggctctgtctgcaccctatggatacagcacctacccctgcccccacccgaccactccagcgaaagcagctgtacagcttctttaccagcagcggctcagggtttgaggccttcttcacggcggccgggaccctggtggtggctgtgtgcacacggaaggagtatttgaccatgagtttgcccgaagtgtcctttgccgactctgcctggcactgcgtggctatcgtccatgtgcctgggcgccggcccttcagccagaacctggtccatgtctacaaagacggccatctggtcaagacagcaccccttcgctgcccctccctcagtgagcctttctcctcctgctgtatcggctccgctggataccgcacaacgaccaccaccacagggctgcccacaccaccagtccccgccaccctggcctacactcaccccgccctcacccgctcccagtcagtcccagcctccacagggcttggctgggggtccgggctggtggcccccctgcaggagggcagcatcgactctaccctcgcaggcacccaggacactcggtggggcagccccacatccctggagggtgagctgggggctgtggccatctttcacgaagccctgcaggcgacggctctgaggaccctgtgcaccctggggcccaatgagacggcacccttcaagcctgagggggagctgcatgagctcagcaccaggctgctcctccattactcacctcaggcttgtaagaacaacatctgcctggacctgtcccccagtcatgggcttgatgggcgcctgacgggccacagagtggagacctgggatgtgaaggatgtggtgaactgcgttgggggtatgggtgccctgctgcccctgctggagcgagtagctgcacagcccaaagaggctgaagcaggtccagctgaaacgcatgacctcgtgggtcctgaactgacctctggtcacaacacccagggcctggttctcccattgggtaaatcttcagaggaacggatggagaggaacgcagtggctgcttttctgctgatgctgcggaacttccttcagggtcacatggtgaaccaagagagcctggtgcagtgccaggggcctgccatcatcggggccctcctgcgaaaggtcccaagctgggccatggacatgaacgtgctcatgtccgcccagctgctgatggagcaggtggcagctgagggcagcgggcccctcctgtacctactctaccagcatttgctcttcaactttcacctctggaccctcagtgacttcgccgtgcgcctcggtcacatccagtacatgtccagcatagttcgggagcacagacagaagctgcggaagaagtacggcgtccagtttatcttggatgctctgcgcacccactacagcccgcagcgggagcgccccctggctgctgacgacctacgcaccgtgcagacctccctcctgggcctggcgagggagttcctggtgcggagtctctcagcagatgacgtgcaggtcacgcagaccatgctgagctttttggcggccacaggcgatgacggtcaggcggtgggtgcgctggacctgctgctggccctgctgcacggttccctggtgcaggagtccttggctgtctttctgttggagccagggaacctcgaagtgctactggccctgctagtgcggccagggtcactgcccctgctgcccgatcgagtctgcaagatcctgcgcagactgcagcagaatgagcggctacctgagcggagccgccagcgcctccggctgcgggagtgtggtctccagggtctggttgcctgcttgcctgaggggactgtttccccccagctctgccagggcctctacaagctgttcctgggggcagattgcctgaacctctcagatctgctggctgtggtacagctgtccctccaggctgacctcagcgttcgcctagacatctgtcgccagcttttccacctcatctacggacagccagatgtagtgcggcttctggcccgacaggctggctggcaagatgtgctgacccggctatatgtcctggaggctgccacagccggcagcccccctccgtcttccccagagtcacctacctcccccaagccagccccacccaagccacccactgagtcacctgctgagccttcagatgtcttcctgccctcagaggccccctgccctgaccctgatggcttttaccatgctctctccccattctgcacgccctttgacctgggcctggaacggtctagtgtaggatcaggcaacactgctggtggtggcggcagcagtgggactcttactccagccagccagcccggcactccttcgccactggatgggccgcggccctttcctgctgctcctggccgccacagctccagtctctccaatgtgctggaggacggcagcctcccggagcccaccattagcggggatgatacctcgaacaccagcaacccacagcaaacctctgaggaagagttgtgcaatctgctcaccaacgtgctgttctcggtgacgtggcgtggcgtggaaggcagcgatgaggctgcctggcgggagcgtggccaggttttctcagtgctcacccagctgggggcctcagccacacttgtgcgcccaccagactgcatcaagcgcagcctcctggagatgatgctggagtcagccctgaccgacatcaaagaggcccccgtgggggtcctggccagcctcacccagcaagcgctttggctgctgcgtctgctgcaggacttcctgtgtgctgaaggccatggtaaccaggaactgtggagtgagaagctctttgaaggtgtatgcagcctacttgatcgcctgggagcctggccccacctggccaacggcacagctgatctccgtgagatggcgcagattggcctacggcttgtacttggctacatcctgctggaagacccacagctgcatgcccaggcctacgtgagattgcacatgctgctacagactgcagtgccagcccgccgcgaggaggcctgctatgtgctctccaagctggaggctgcactggggcgggtgctgaacacctcttccttggagtcagccactgatgaggcagggtccccacttgcagctgcagcagctgcagcagctgcagagcgctgctcctggctggtgccactggtgcgcacgctgctagaccgtgcctatgagccgctggggctgcagtggggactgccctccctgccacccaccaatggcagccccaccttctttgaagacttccaggctttttgtgccacacccgaatggcgccacttcatcgacaaacaggtacagccaaccatgtcccagttcgaaatggacacgtatgctaagagccacgaccttatgtcaggtttctggaatgcctgctatgacatgcttatgagcagtgggcagcggcgccagtgggagcgcgcccagagtcgtcgggccttccaggagctggtgctggaacctgcgcagaggcgggcgcgcctggaggggctacgctacacggcagtgctgaagcagcaggcaacgcagcactccatggccctgctgcactggggggcgctgtggcgccagctcgccagcccatgtggggcctgggcgctgagggacactcccatcccccgctggaaactgtccagcgccgagacatattcacgcatgcgtctgaagctggtgcccaaccatcacttcgaccctcacctggaagccagcgctctccgagacaatctgggtgaggttcccctgacacccaccgaggaggcctcactgcctctggcagtgaccaaagaggccaaagtgagcaccccacccgagttgctgcaggaggaccagctcggcgaggacgagctggctgagctggagaccccgatggaggcagcagaactggatgagcagcgtgagaagctggtgctgtcggccgagtgccagctggtgacggtagtggccgtggtcccagggctgctggaggtcaccacacagaatgtatacttctacgatggcagcactgagcgcgtggaaaccgaggagggcatcggctatgatttccggcgcccactggcccagctgcgtgaggtccacctgcggcgtttcaacctgcgccgttcagcacttgagctcttctttatcgatcaggccaactacttcctcaacttcccatgcaaggtgggcacgaccccagtctcatctcctagccagactcccagaccccagcctggccccatcccaccccatacccaggtacggaaccaggtgtactcgtggctcctgcgcctacggcccccctctcaaggctacctaagcagccgctccccccaggagatgctgcgtgcctcaggccttacccagaaatgggtacagcgtgagatatccaacttcgagtacttgatgcaactcaacaccattgcggggcggacctacaatgacctgtctcagtaccctgtgttcccctgggtcctgcaggactacgtgtccccaaccctggacctcagcaacccagccgtcttccgggacctgtctaagcccatcggtgtggtgaaccccaagcatgcccagctcgtgagggagaagtatgaaagctttgaggacccagcagggaccattgacaagttccactatggcacccactactccaatgcagcaggcgtgatgcactacctcatccgcgtggagcccttcacctccctgcacgtccagctgcaaagtggccgctttgactgctccgaccggcagttccactcggtggcggcagcctggcaggcacgcctggagagccctgccgatgtgaaggagctcatcccggaattcttctactttcctgacttcctggagaaccagaacggttttgacctgggctgtctccagctgaccaacgagaaggtaggcgatgtggtgctacccccgtgggccagctctcctgaggacttcatccagcagcaccgccaggctctggagtcggagtatgtgtctgcacacctacacgagtggatcgacctcatctttggctacaagcagcgggggccagccgccgaggaggccctcaatgtcttctattactgcacctatgagggggctgtagacctggaccatgtgacagatgagcgggaacggaaggctctggagggcattatcagcaactttgggcagactccctgtcagctgctgaaggagccacatccaactcggctctcagctgaggaagcagcccatcgccttgcacgcctggacactaactcacctagcatcttccagcacctggacgaactcaaggcattcttcgcagaggtgactgtgagtgccagtgggctgctgggcacccacagctggttgccctatgaccgcaacataagcaactacttcagcttcagcaaagaccccaccatgggcagccacaagacgcagcgactgctgagtggcccgtgggtgccaggcagtggtgtgagtggacaagcactggcagtggccccggatggaaagctgctattcagcggtggccactgggatggcagcctgcgggtgactgcactaccccgtggcaagctgttgagccagctcagctgccaccttgatgtagtaacctgccttgcactggacacctgtggcatctacctcatctcaggctcccgggacaccacgtgcatggtgtggcggctcctgcatcagggtggtctgtcagtaggcctggcaccaaagcctgtgcaggtcctgtatgggcatggggctgcagtgagctgtgtggccatcagcactgaacttgacatggctgtgtctggatctgaggatggaactgtgatcatacacactgtacgccgcggacagtttgtagcggcactacggcctctgggtgccacattccctggacctattttccacctggcattggggtccgaaggccagattgtggtacagagctcagcgtgggaacgtcctggggcccaggtcacctactccttgcacctgtattcagtcaatgggaagttgcgggcttcactgcccctggcagagcagcctacagccctgacggtgacagaggactttgtgttgctgggcaccgcccagtgcgccctgcacatcctccaactaaacacactgctcccggccgcgcctcccttgcccatgaaggtggccatccgcagcgtggccgtgaccaaggagcgcagccacgtgctggtgggcctggaggatggcaagctcatcgtggtggtcgcggggcagccctctgaggtgcgcagcagccagttcgcgcggaagctgtggcggtcctcgcggcgcatctcccaggtgtcctcgggagagacggaatacaaccctactgaggcgcgctgaacctggccagtccggctgctcgggccccgcccccggcaggcctggcccgggaggccccgcccagaagtcggcgggaacaccccggggtgggcagcccaggggggtgagcggggcccaccctgcccagctcagggattggcgggcgatgttaccccctcagggattggcgggcggaagtcccgcccctcgccggctgaggggccgccctgagggccagcactggcgtctgcggccgcagcagcactttttgcacagtctggggcggggttccccggcttccaagtcgctgtttcgtcaaagcacgagggccgcctgtggccttaattcctaacggcggccccggttctcccttctcggcaataaaccaggcctagttttgtagc

SEQ ID NO: 327907 - DNA, 3012 bp, Artificial Sequence
  derived and/or modified sequence
atgagccagttcgaaatggatacgtacgccaaaagtcacgacctgatgagcggtttttggaacgcctgttacgatatgcttatgtcatctggtcaacggcgacagtgggaacgggcacagtccagacgtgcttttcaggagctggtcctagagccggctcagcgccgagccagactcgaaggcctgcggtacacagccgtcctaaagcagcaggcaacccagcactccatggctttgcttcactggggcgctctctggcggcagcttgcatccccctgcggcgcttgggcattgagggacactccgatccccagatggaaattgtcctccgccgaaacatatagcagaatgagactcaaactggtgcctaaccaccacttcgatccacatctcgaggccagcgccctgagggataatctgggcgaagtgcccttgacacccaccgaggaggcttcactccctcttgcggtcacaaaggaggctaaggtgagcactccgcctgaactgctgcaggaggatcaattgggagaagatgagctggcggaattggagaccccgatggaggcagccgaactggacgagcaacgagagaagctggttctctccgccgaatgccagctcgttacagtcgtagccgtggtacctgggttattggaggtcacaacccagaatgtttacttctatgacggatctactgaacgtgtcgaaacagaggagggtatcggttatgactttcggagacccctggcacaactgcgggaagtacacctgcgcagattcaacctgcggagatcagctctcgaactctttttcattgatcaagccaactattttctcaatttcccctgtaaagtcggcacaacacctgtgagcagcccctctcagacccctcgtccccagcccggacccatccctccacatacacaagtgaggaatcaggtgtattcgtggttgttaagactgcgtcccccatctcaaggttatctgagctctcggtccccccaggagatgttacgtgcttcaggcctcacccagaagtgggtacagcgagagatatccaacttcgaatatctgatgcagctcaatactatcgccggacgaacctacaacgacctttctcagtatcccgtgtttccctgggtccttcaagattatgtgtctccaacacttgacctcagcaacccagctgtgtttcgcgatttgagcaagcctatcggagtggttaatcccaagcacgcccaactagtgagggaaaaatatgagtcttttgaggaccctgcagggaccattgataaatttcactatggaactcactattcgaatgccgcaggagtcatgcattacctgataagagtcgagcctttcacgtccctgcatgtgcagttgcagtccggcagatttgactgttctgatcggcagtttcacagtgtggccgctgcttggcaggcccgactggagtcacctgcagacgttaaagagctgattcccgagttcttttatttccccgatttcttagaaaaccagaacgggtttgacctgggatgtttacagttgaccaatgagaaggtgggcgatgtggtgctgccaccttgggcatcctcgccggaggactttatccagcagcacagacaggctcttgagagcgaatacgtgtcagcccacttacatgaatggatcgaccttatatttgggtacaagcagcgaggaccggcagctgaggaggctttgaacgttttctactattgcacgtacgagggcgctgtagatctggaccacgtgacagacgagcgcgaaagaaaagcgttagaggggattatcagtaactttggtcagacgccatgccagcttctgaaggagccacacccaaccagactctcagcagaggaagcagctcaccgcctcgctcgcctggatacgaattcaccaagtattttccagcatttagacgaactgaaagcattttttgcagaggtgacagtctctgcctctgggctgctgggaacccacagctggcttccgtatgatcggaacatctctaattacttctctttctctaaagaccctactatgggttcacacaaaacgcagagattgttgtcaggcccatgggtccctggctccggggtctccggacaggccctcgccgtggctcccgacggcaagctgctttttagcggcggacactgggatgggtcgctgcgagtgaccgccttgcctagaggtaaactgctaagccagctcagctgccatctggacgtggtcacctgtctcgcattggatacttgcggtatctacctgatctcggggagcagggatactacatgtatggtttggaggttgttacaccaagggggacttagcgtgggtctcgctcctaagccagttcaggtactgtatgggcacggggctgctgtatcttgcgtagcaatcagcactgagctagacatggctgtttctgggtctgaagatggcacggtcatcattcacacagttagaagggggcagtttgtggccgctcttcgaccactgggcgctacgttccccggtcctatcttccaccttgcgcttggctctgaaggacaaatcgtggtccaatcttccgcatgggagagacccggagctcaggttacttacagcctccacctttattcggttaacggcaaactgcgcgcaagtctacccctggccgagcagcccacagcactgacagtcacagaagactttgtgctgctgggcaccgcccagtgcgcactccatatattgcagctgaataccttgctacccgctgctcctccactgcccatgaaggtggctatacggtccgtggcggtaacaaaggaaaggagtcacgttctggtaggactcgaagatggaaaactcatagtcgtggtggctggacaaccttctgaagtgaggagttcacaattcgcaagaaagctgtggcgatcaagcagacgcatctctcaggtgtcctctggcgagacagaatacaaccctaccgaggcgagatag

SEQ ID NO: 327908 - DNA, 3012 bp, Artificial Sequence
  derived and/or modified sequence
atgagccagttcgagatggacacctacgccaagagccacgacctgatgagcggcttctggaacgcctgctacgacatgctgatgagcagcggccagagaagacagtgggagagagcccagagcagaagagccttccaggagctggtgctggagcccgcccagagaagagccagactggagggcctgagatacaccgccgtgctgaagcagcaggccacccagcacagcatggccctgctgcactggggcgccctgtggagacagctggccagcccctgcggcgcctgggccctgagagacacccccatccccagatggaagctgagcagcgccgagacctacagcagaatgagactgaagctggtgcccaaccaccacttcgacccccacctggaggccagcgccctgagagacaacctgggcgaggtgcccctgacccccaccgaggaggccagcctgcccctggccgtgaccaaggaggccaaggtgagcaccccccccgagctgctgcaggaggaccagctgggcgaggacgagctggccgagctggagacccccatggaggccgccgagctggacgagcagagagagaagctggtgctgagcgccgagtgccagctggtgaccgtggtggccgtggtgcccggcctgctggaggtgaccacccagaacgtgtacttctacgacggcagcaccgagagagtggagaccgaggagggcatcggctacgacttcagaagacccctggcccagctgagagaggtgcacctgagaagattcaacctgagaagaagcgccctggagctgttcttcatcgaccaggccaactacttcctgaacttcccctgcaaggtgggcaccacccccgtgagcagccccagccagacccccagaccccagcccggccccatccccccccacacccaggtgagaaaccaggtgtacagctggctgctgagactgagaccccccagccagggctacctgagcagcagaagcccccaggagatgctgagagccagcggcctgacccagaagtgggtgcagagagagatcagcaacttcgagtacctgatgcagctgaacaccatcgccggcagaacctacaacgacctgagccagtaccccgtgttcccctgggtgctgcaggactacgtgagccccaccctggacctgagcaaccccgccgtgttcagagacctgagcaagcccatcggcgtggtgaaccccaagcacgcccagctggtgagagagaagtacgagagcttcgaggaccccgccggcaccatcgacaagttccactacggcacccactacagcaacgccgccggcgtgatgcactacctgatcagagtggagcccttcaccagcctgcacgtgcagctgcagagcggcagattcgactgcagcgacagacagttccacagcgtggccgccgcctggcaggccagactggagagccccgccgacgtgaaggagctgatccccgagttcttctacttccccgacttcctggagaaccagaacggcttcgacctgggctgcctgcagctgaccaacgagaaggtgggcgacgtggtgctgcccccctgggccagcagccccgaggacttcatccagcagcacagacaggccctggagagcgagtacgtgagcgcccacctgcacgagtggatcgacctgatcttcggctacaagcagagaggccccgccgccgaggaggccctgaacgtgttctactactgcacctacgagggcgccgtggacctggaccacgtgaccgacgagagagagagaaaggccctggagggcatcatcagcaacttcggccagaccccctgccagctgctgaaggagccccaccccaccagactgagcgccgaggaggccgcccacagactggccagactggacaccaacagccccagcatcttccagcacctggacgagctgaaggccttcttcgccgaggtgaccgtgagcgccagcggcctgctgggcacccacagctggctgccctacgacagaaacatcagcaactacttcagcttcagcaaggaccccaccatgggcagccacaagacccagagactgctgagcggcccctgggtgcccggcagcggcgtgagcggccaggccctggccgtggcccccgacggcaagctgctgttcagcggcggccactgggacggcagcctgagagtgaccgccctgcccagaggcaagctgctgagccagctgagctgccacctggacgtggtgacctgcctggccctggacacctgcggcatctacctgatcagcggcagcagagacaccacctgcatggtgtggagactgctgcaccagggcggcctgagcgtgggcctggcccccaagcccgtgcaggtgctgtacggccacggcgccgccgtgagctgcgtggccatcagcaccgagctggacatggccgtgagcggcagcgaggacggcaccgtgatcatccacaccgtgagaagaggccagttcgtggccgccctgagacccctgggcgccaccttccccggccccatcttccacctggccctgggcagcgagggccagatcgtggtgcagagcagcgcctgggagagacccggcgcccaggtgacctacagcctgcacctgtacagcgtgaacggcaagctgagagccagcctgcccctggccgagcagcccaccgccctgaccgtgaccgaggacttcgtgctgctgggcaccgcccagtgcgccctgcacatcctgcagctgaacaccctgctgcccgccgccccccccctgcccatgaaggtggccatcagaagcgtggccgtgaccaaggagagaagccacgtgctggtgggcctggaggacggcaagctgatcgtggtggtggccggccagcccagcgaggtgagaagcagccagttcgccagaaagctgtggagaagcagcagaagaatcagccaggtgagcagcggcgagaccgagtacaaccccaccgaggccagatag

SEQ ID NO: 327909 - protein, 2570 aa, Artificial Sequence
  derived and/or modified sequence
MAASERLYELWLLYYAQKDLGYLQQWLKAFVGAFKKSISLSSLEPRRPEEAGAEVPLLPLDELHVLAEQLHQADLEQALLLLKLFIILCRNLENIEAGRGQVLVPRVLALLTKLVAELKGCPPPQGRGTQLENVALHALLLCEGLFDPYQTWRRQRSGEVISSKEKSKYKFPPAALPQEFSAFFQESLQNADHLPPILLLRLIHLFCAVLAGGKENGQMAVSDGSVKGLLSVVRGWSRGPAPDPCLVPLALEALVGAVHVLHASRAPPRGPELRALLESYFHVLNADWPAGLSSGPEEALVTLRVSMLDAIPMMLACEDRPVLQATFLSNNCFEHLTRLIQNSKLYLQSRAPPEGDSDLATRLLTEPDVQKVLDQDTDAIAVHVVRVLTCIMSDSPSAKEVFKERIGYPHLQEVLQSHGPPTHRLLQELLNMAVEGDHSMCPPPPIRNEQPVLVLAQWLPSLPTAELRLFLAQRLRWLCDSCPASRATCVQAGLVGCLLETLSTGLALEARCQEQLLALLQALGRVSIRPMELRHLLRPRPGLDSEPGGAEAGKARHAGAVIRTLSGMARHQGPARALRYFDLTPSMAGIMVPPVQRWPGPGFTFHAWLCLHPMDTAPTPAPTRPLQRKQLYSFFTSSGSGFEAFFTAAGTLVVAVCTRKEYLTMSLPEVSFADSAWHCVAIVHVPGRRPFSQNLVHVYKDGHLVKTAPLRCPSLSEPFSSCCIGSAGYRTTTTTTGLPTPPVPATLAYTHPALTRSQSVPASTGLGWGSGLVAPLQEGSIDSTLAGTQDTRWGSPTSLEGELGAVAIFHEALQATALRTLCTLGPNETAPFKPEGELHELSTRLLLHYSPQACKNNICLDLSPSHGLDGRLTGHRVETWDVKDVVNCVGGMGALLPLLERVAAQPKEAEAGPAETHDLVGPELTSGHNTQGLVLPLGKSSEERMERNAVAAFLLMLRNFLQGHMVNQESLVQCQGPAIIGALLRKVPSWAMDMNVLMSAQLLMEQVAAEGSGPLLYLLYQHLLFNFHLWTLSDFAVRLGHIQYMSSIVREHRQKLRKKYGVQFILDALRTHYSPQRERPLAADDLRTVQTSLLGLAREFLVRSLSADDVQVTQTMLSFLAATGDDGQILRRLQQNERLPERSRQRLRLRECGLQGLVACLPEGTVSPQLCQGLYKLFLGAGSGNTAGGGGSSGTLTPASQPGTPSPLDGPRPFPAAPGRHSSSLSNVLEDGSLPEPTISGDDTSNTSNPQQTSEEELCNLLTNVLFSVTWRGVEGSDEAAWRERGQVFSVLTQLGASATLVRPPDCIKRSLLEMMLESALTDIKEAPVGVLASLTQQALWLLRLLQDFLCAEGHGNQELWSEKLFEGVCSLLDRLGAWPHLANGTADLREMAQIGLRLVLGYILLEDPQLHAQAYVRLHMLLQTAVPARREEACYVLSKLEAALGRVLNTSSLESATDEAGSPLAAAAAAAAAERCSWLVPLVRTLLDRAYEPLGLQWGLPSLPPTNGSPTFFEDFQAFCATPEWRHFIDKQVQPTMSQFEMDTYAKSHDLMSGFWNACYDMLMSSGQRRQWERAQSRRAFQELVLEPAQRRARLEGLRYTAVLKQQATQHSMALLHWGALWRQLASPCGAWALRDTPIPRWKLSSAETYSRMRLKLVPNHHFDPHLEASALRDNLGEVPLTPTEEASLPLAVTKEAKVSTPPELLQEDQLGEDELAELETPMEAAELDEQREKLVLSAECQLVTVVAVVPGLLEVTTQNVYFYDGSTERVETEEGIGYDFRRPLAQLREVHLRRFNLRRSALELFFIDQANYFLNFPCKVGTTPVSSPSQTPRPQPGPIPPHTQVRNQVYSWLLRLRPPSQGYLSSRSPQEMLRASGLTQKWVQREISNFEYLMQLNTIAGRTYNDLSQYPVFPWVLQDYVSPTLDLSNPAVFRDLSKPIGVVNPKHAQLVREKYESFEDPAGTIDKFHYGTHYSNAAGVMHYLIRVEPFTSLHVQLQSGRFDCSDRQFHSVAAAWQARLESPADVKELIPEFFYFPDFLENQNGFDLGCLQLTNEKVGDVVLPPWASSPEDFIQQHRQALESEYVSAHLHEWIDLIFGYKQRGPAAEEALNVFYYCTYEGAVDLDHVTDERERKALEGIISNFGQTPCQLLKEPHPTRLSAEEAAHRLARLDTNSPSIFQHLDELKAFFAEVVSDGVPLVLALVPHRQPHSFITQGSPDLLVTVSASGLLGTHSWLPYDRNISNYFSFSKDPTMGSHKTQRLLSGPWVPGSGVSGQALAVAPDGKLLFSGGHWDGSLRVTALPRGKLLSQLSCHLDVVTCLALDTCGIYLISGSRDTTCMVWRLLHQGGLSVGLAPKPVQVLYGHGAAVSCVAISTELDMAVSGSEDGTVIIHTVRRGQFVAALRPLGATFPGPIFHLALGSEGQIVVQSSAWERPGAQVTYSLHLYSVNGKLRASLPLAEQPTALTVTEDFVLLGTAQCALHILQLNTLLPAAPPLPMKVAIRSVAVTKERSHVLVGLEDGKLIVVVAGQPSEVRSSQFARKLWRSSRRISQVSSGETEYNPTEAR

SEQ ID NO: 327910 - protein, 697 aa, Artificial Sequence
  derived and/or modified sequence
MLRASGLTQKWVQREISNFEYLMQLNTIAGRTYNDLSQYPVFPWVLQDYVSPTLDLSNPAVFRDLSKPIGVVNPKHAQLVREKYESFEDPAGTIDKFHYGTHYSNAAGVMHYLIRVEPFTSLHVQLQSGRFDCSDRQFHSVAAAWQARLESPADVKELIPEFFYFPDFLENQNGFDLGCLQLTNEKVGDVVLPPWASSPEDFIQQHRQALESEYVSAHLHEWIDLIFGYKQRGPAAEEALNVFYYCTYEGAVDLDHVTDERERKALEGIISNFGQTPCQLLKEPHPTRLSAEEAAHRLARLDTNSPSIFQHLDELKAFFAEVVSDGVPLVLALVPHRQPHSFITQGSPDLLVTVSASGLLGTHSWLPYDRNISNYFSFSKDPTMGSHKTQRLLSGPWVPGSGVSGQALAVAPDGKLLFSGGHWDGSLRVTALPRGKLLSQLSCHLDVVTCLALDTCGIYLISGSRDTTCMVWRLLHQGGLSVGLAPKPVQVLYGHGAAVSCVAISTELDMAVSGSEDGTVIIHTVRRGQFVAALRPLGATFPGPIFHLALGSEGQIVVQSSAWERPGAQVTYSLHLYSVNGKLRASLPLAEQPTALTVTEDFVLLGTAQCALHILQLNTLLPAAPPLPMKVAIRSVAVTKERSHVLVGLEDGKLIVVVAGQPSEVRSSQFARKLWRSSRRISQVSSGETEYNPTEAR

SEQ ID NO: 327911 - protein, 1086 aa, Artificial Sequence
  derived and/or modified sequence
MSRVCIVVLEEVEDESPAFISKLPQENKSLHSPPSGNVLVRYPSLVQAIFNGDPDEVRALIFKKEDVNFQDNEKRTPLHAAAYLGDAEIIELLILSGARVNAKDSKWLTPLHRAVASCSEEAVQVLLKHSADVNARDKNWQTPLHIAAANKAVKCAEALVPLLSNVNVSDRAGRTALHHAAFSGHGEMVKLLLSRGANINAFDKKDRRAIHWAAYMGHIEVVKLLVSHGAEVTCKDKKSYTPLHAAASSGMISVVKYLLDLGVDMNEPNAYGNTPLHVACYNGQDVVVNELIDCGAIVNQKNEKGFTPLHFAAASTHGALCLELLVGNGADVNMKSKDGKTPLHMTALHGRFSRSQTIIQSGAVIDCEDKNGNTPLHIAARYGHELLINTLITSGADTAKRGIHGMFPLHLAALSGFSDCCRKLLSSGFDIDTPDDFGRTCLHAAAAGGNLECLNLLLNTGADFNKKDKFGRSPLHYAAANCNYQCLFALVGSGASVNDLDERGCTPLHYAATSDTDGKCLEYLLRNDANPGIRDKQGYNAVHYSAAYGHRLCLQLIASETPLDVLMETSGTDMLSDSDNRATISPLHLAAYHGHHQALEVLVQSLLDLDVRNSSGRTPLDLAAFKGHVECVDVLINQGASILVKDYILKRTPIHAAATNGHSECLRLLIGNAEPQNAVDIQDGNGQTPLMLSVLNGHTDCVYSLLNKGANVDAKDKWGRTALHRGAVTGHEECVDALLQHGAKCLLRDSRGRTPIHLSAACGHIGVLGALLQSAASMDANPATADNHGYTALHWACYNGHETCVELLLEQEVFQKTEGNAFSPLHCAVINDNEGAAEMLIDTLGASIVNATDSKGRTPLHAAAFTDHVECLQLLLSHNAQVNSVDSTGKTPLMMAAENGQTNTVEMLVSSASAELTLQDNSKNTALHLACSKGHETSALLILEKITDRNLINATNAALQTPLHVAARNGLTMVVQELLGKGASVLAVDENGYTPALACAPNKDVADCLALILATMMPVSSSSPLSSLTFNAINRYTNTSKTVSFEALPIMRNEPSSYCSFNNIGGEQEYLYTDVDELNDSDSETY

SEQ ID NO: 327912 - DNA, 3261 bp, Artificial Sequence
  derived and/or modified sequence
atgtcacgtgtatgtattgtcgtgttggaggaggtagaggatgaaagtccagcgttcataagtaagctgcctcaagagaataagagcctccatagcccaccatccggcaatgttctcgtcagatacccaagcctggtccaggccatcttcaacggggatccggacgaggtgcgtgctctcatttttaaaaaggaagacgttaattttcaggacaacgagaaaagaacccctttacatgctgcagcatatctaggtgacgcggagatcatcgaattgctgatcctgagcggcgccagagttaatgcaaaggattcaaaatggttgacacccctccacagggccgtagcctcctgctcagaggaagccgtccaggtgctgctgaagcatagcgcggatgttaacgcccgcgataagaactggcagacgccgctgcacattgccgccgccaacaaagctgtgaaatgcgccgaagctcttgtccctctgctgtcaaatgtgaatgtatcagacagagccggcaggacggccctccaccacgccgccttcagcgggcacggcgaaatggtgaaacttctattgtctaggggagctaatattaacgcgtttgacaagaaggatcggagagccatccactgggcagcatacatgggccatattgaggtcgtgaagctcctggttagtcatggcgcagaagtcacttgcaaggataaaaagtcttatactcctctgcacgcggctgcgtctagcggtatgatctccgtggtgaaatatctccttgacctcggagttgatatgaatgaacctaatgcttatggtaataccccattacatgtggcgtgctataatggccaggacgtcgtcgtaaatgaattgattgattgtggcgccatcgtgaaccagaagaacgaaaaggggttcacgcctctgcattttgctgcagcctccacccatggggctctgtgcctcgagctgctcgtgggaaacggcgccgacgtgaacatgaagtccaaagatggcaaaactcccctacacatgaccgcactgcacggcaggttttccaggagccaaacaattatccaaagtggagcagtgatagactgtgaagacaaaaatggaaacacacccctgcatatcgccgctcggtacggacatgagttactgatcaacaccctcatcacttcgggagccgataccgcaaagcgggggatccacggcatgtttcctctgcacctagctgccctgtccgggtttagcgattgctgtcggaagctgttaagcagcggctttgacattgatacgccagatgacttcggccgcacctgtcttcatgcagccgctgcaggaggaaatctagagtgcctgaatctattgctcaacaccggggctgactttaacaaaaaagacaagtttgggaggtcacctttgcattatgccgccgcgaattgtaactatcagtgtctttttgcattggtcgggagtggcgctagcgttaatgacttggacgagcgaggttgcacacctctgcactatgcagccacctccgacaccgatggaaaatgcttagaataccttttacgcaacgacgctaacccaggcattagggataagcaaggttacaacgcagtccactatagtgcagcatacggccacagactgtgcctacagctcatcgcatcggagacccctttggacgtgctaatggagacatcgggtaccgacatgctgagcgatagcgacaatcgggctactatctctccactccacctggcagcataccatggccatcaccaggccctcgaggttctggtccagtctctgctggacctggacgtgagaaactcatcgggtcgcactcctttggatctggccgcctttaagggacatgtggagtgtgtggacgttctgatcaaccagggcgcctcaattctcgtaaaggattacatcctgaaacggacccctatccacgctgccgcaacgaacggacatagcgagtgcctgcgcctcctgattggcaatgcggagccccagaatgccgttgatatacaggatggaaacggtcagacccccctgatgctatctgtcctgaatggtcacacggattgcgtgtattctctcctcaacaaaggcgctaacgtcgatgcgaaggacaaatggggccggacagcacttcaccgtggagctgtcactggccacgaagaatgcgtcgacgccctgcttcagcatggcgctaagtgtcttttgcgagattctcgcggaagaacacccatccacctttccgccgcatgtggacacatcggagtactgggagccttgttacagagcgccgcaagcatggacgctaatcccgcaactgctgacaaccacggttacacagccctccactgggcttgctataacggtcatgagacctgtgtcgaattattactggagcaagaggtgtttcagaagactgaaggcaatgctttcagccccctgcactgcgcagtgatcaacgacaacgagggggctgccgagatgctaatcgatactctgggggcttcgattgtgaatgcgacagatagtaagggcaggacacccctgcatgccgcggcttttactgaccacgttgagtgtctgcagctactcctgtcccacaatgcgcaagtaaatagtgtcgacagtactggaaagaccccattgatgatggcagccgagaatggtcaaaccaacaccgtagagatgctagtgagttcagccagtgcagagctgaccctgcaggacaacagtaaaaacaccgcgctccatctcgcctgttccaagggacatgaaacttcggcacttctgatcctcgaaaagatcaccgacagaaatctcataaatgctacaaatgctgccctacaaacaccgctgcatgttgccgcacgtaacggcttgaccatggtggtccaggagctgcttgggaaaggcgcttcagttctggctgtggacgagaacggatatactccagcgctcgcttgcgcccccaataaggatgttgcagattgcctggccctgattctcgccacaatgatgccagtaagctcctcttcaccactttcctctctgacttttaacgccattaaccggtatacaaacacgtcaaagacagtttcctttgaagcacttcccattatgcggaacgagccttcaagttactgctcattcaacaacatcggaggagagcaggagtatctgtataccgatgtcgacgagctcaacgactccgactctgagacatactag

SEQ ID NO: 327913 - DNA, 3261 bp, Artificial Sequence
  derived and/or modified sequence
atgagccgggtgtgcatcgtggtgctggaggaggtggaggatgagagccctgccttcatcagcaagctgccccaggagaacaagagcctgcacagccccccatctggaaatgtgctggtgcgctaccccagcctggtgcaggccatcttcaatggagaccctgatgaggtgcgggccctgatcttcaagaaggaggatgtgaacttccaggacaatgagaagaggacccccctgcacgccgccgcctacctgggagatgctgagatcatcgagctgctgatcctgagcggggcccgggtgaatgccaaggacagcaagtggctgacccccctgcacagagctgtggccagctgcagcgaggaggccgtgcaggtgctgctgaagcacagcgcagatgtgaatgcccgggacaagaactggcagacccccctgcacatcgccgccgccaacaaggctgtgaagtgtgccgaggccctggtgcccctgctgagcaatgtgaatgtgtctgaccgggccggccgcacagccctgcaccacgccgccttcagcggccatggagagatggtgaagctgctgctgagcagaggagccaacatcaatgcctttgacaagaaggacagaagagccatccactgggccgcctacatgggccacatcgaggtggtgaagctgctggtgagccacggggctgaggtgacctgcaaggacaagaagagctacacccccctgcatgctgctgccagcagcggcatgatctctgtggtgaagtacctgctggacctgggcgtggacatgaatgagcccaatgcctacggcaacacccccctgcacgtggcctgctacaacggccaggatgtggtggtgaatgagctgattgactgtggggccatcgtgaaccagaagaatgagaagggcttcacccccctgcactttgctgctgccagcacccatggagccctgtgcctggagctgctggtgggcaatggagcagatgtgaacatgaagagcaaggatggcaagacccccctgcacatgacagccctgcacggccgcttcagccgcagccagaccatcatccagagcggggctgtgattgactgtgaggacaagaatggaaacacccccctgcacatcgccgcccgctatggccacgagctgctgatcaacaccctcatcaccagcggggctgacacagccaagaggggcatccacggcatgttccccctgcacctggccgccctgagcggcttcagtgactgctgcaggaagctgctgagcagcggctttgatattgacaccccagatgactttggaagaacctgcctgcacgccgctgctgctgggggcaacctggagtgcctgaacctgctgctgaacacaggagctgacttcaacaagaaggacaagtttggccgcagccccctgcactacgccgccgccaactgcaactaccagtgcctgtttgccctggtgggcagcggggcctctgtgaatgacctggatgagcggggctgcacccccctgcactatgctgccaccagtgacacagatggcaagtgcctggagtacctgctgagaaatgatgccaaccctggcatccgggacaagcagggctacaatgctgtgcactacagcgctgcctacggccaccggctgtgcctgcagctgattgccagcgagacccccctggatgtgctgatggagaccagcggcacagacatgctgagtgacagcgacaacagagccaccatcagccccctgcacctggccgcctaccacggccaccaccaggccctggaggtgctggtgcagagcctgctggacctggatgtgaggaacagcagcggccgcacccccctggacctggccgccttcaagggccacgtggagtgtgtggatgtgctgatcaaccagggcgccagcatcctggtgaaggactacatcctgaagaggacccccatccacgccgccgccaccaacggccacagcgagtgcctgcggctgctgattggaaatgctgagccccagaatgctgtggacatccaggatggaaatggccagacccccctgatgctgtctgtgctgaatggccacacagactgtgtgtacagcctgctgaacaagggggccaacgtggatgccaaggacaagtggggccgcacagccctgcacagaggagctgtgactggacatgaagaatgtgtggatgccctgctgcagcacggggccaagtgcctgctgcgggacagccggggccgcacccccatccacctgtctgctgcctgtggccacatcggcgtgctgggcgccctgctgcagagcgctgcctccatggatgccaacccagccacagctgacaaccacggctacacagccctgcactgggcctgctacaatggacatgagacctgtgtggagctgctgctggagcaggaggtgttccagaagacagagggcaatgccttcagccccctgcactgtgccgtcatcaatgacaatgaaggagctgctgagatgctgattgacaccctgggcgccagcatcgtgaatgccacagacagcaaaggaagaacacccctgcacgccgccgccttcacagaccacgtggagtgcctgcagctgctgctgagccacaatgcccaggtgaacagcgtggacagcacaggcaagacccccctgatgatggctgctgaaaatggccagaccaacacagtggagatgctggtgtcctctgccagcgctgagctgaccctgcaggacaacagcaagaacacagccctgcacctggcctgcagcaaaggacatgagaccagcgccctgctgatcctggagaagatcacagacaggaacctgatcaatgccaccaatgctgccctgcagacccccctgcacgtggccgccagaaatggcctgaccatggtggtgcaggagctgctgggcaaaggagcctctgtgctggccgtggatgaaaatggctacaccccagccctggcctgtgcccccaacaaggatgtggccgactgcctggccctgatcctggccaccatgatgcctgtgagcagcagcagccccctgagcagcctgaccttcaatgccatcaaccgctacaccaacaccagcaagacagtgtcctttgaggccctgcccatcatgagaaatgagcccagcagctactgcagcttcaacaacatcggcggggagcaggagtacctgtacacagatgtggatgagctgaatgacagcgacagcgagacctactag

SEQ ID NO: 327914 - DNA, 3261 bp, Artificial Sequence
  derived and/or modified sequence
atgagccgggtgtgcatcgtggtgctggaggaggtggaggacgagtcacccgcatttatctctaagctgcctcaggagaataaatcccttcattcacccccctcagggaacgttctcgtcaggtatccgtccctcgtgcaggcaatattcaatggcgacccggatgaagttcgggcattaatttttaagaaggaggacgtcaatttccaagacaacgagaagcggacccccctccatgctgccgcctatctgggcgatgctgagatcatcgaacttttgatcctgtccggggctcgggtgaatgcaaaagattctaagtggctgacgcccctccacagggccgtcgcctcttgttccgaagaggctgtgcaagtcctgctcaagcactcagccgacgtgaatgcgcgcgacaagaactggcaaacccctctgcacatcgccgcagcgaacaaggccgtaaagtgtgcagaggccctggtgccacttctgagcaatgtcaacgtctcagatagagcaggacggactgcattacaccacgctgccttctccggtcatggcgagatggtcaaactgctcctgagcagaggtgccaacatcaatgccttcgataaaaaggaccgaagggcgatccactgggcagcctacatggggcacattgaggtcgtgaaactgttagtgtcgcacggcgctgaagttacctgtaaagacaagaagtcctacacgccactgcatgctgcagccagctccggaatgataagtgtggtgaagtatttacttgatttaggagtcgatatgaacgagcccaacgcctatgggaacaccccccttcacgtggcctgctacaacggccaggacgtggttgtgaatgagttgatcgactgtggagccatcgtaaatcaaaagaacgagaagggattcacgcctctgcactttgccgcagcatcgacccacggagcactctgtctagaactgctcgtgggaaatggcgctgatgtgaatatgaagagcaaggatggtaaaactcccttacatatgaccgcactccacggcaggttctctaggagccagaccattatccagagcggtgccgtgatcgactgtgaggacaagaatggcaacactcctttgcacatagcagccaggtatggacatgaacttttgatcaatactctgataaccagcggtgccgacaccgcaaagcgtggcattcacggtatgtttccattgcatctggccgccttgagtggttttagcgactgctgcagaaagctgttatcgtccgggtttgacattgacacacctgatgactttgggagaacttgcttacatgccgcagcagccggtggaaatctggagtgcctgaatctcttgctgaataccggtgccgactttaacaagaaagacaaatttggaaggagcccgctgcattatgcggccgccaattgcaattatcagtgtctgttcgcactcgtaggaagtggtgcaagcgtgaacgacctcgacgaacgggggtgcacccctctgcactatgcagccacaagtgataccgacggaaagtgcctggagtatctgctgagaaacgacgcaaacccgggaattcgcgataagcagggctataatgccgttcattattccgctgcatacgggcataggctgtgcctgcagctaatcgcgagcgaaacacccttagacgtgttgatggaaacttccgggaccgacatgctttccgactctgataacagggccactatcagtccgctgcatctggctgcataccacggccatcaccaggccctggaggtcctggttcagtcacttttggatcttgacgtgagaaatagctccggaagaactcctctagacctagcggcttttaaaggccacgttgagtgtgtggacgtgctgatcaatcaaggggccagcattttggtcaaagactacatactgaaacgcacccccatccacgcagccgctaccaatggccactccgagtgtctcagacttctgattgggaacgctgaaccccagaacgcagtggacattcaggacggaaatgggcagaccccgcttatgctgagcgtcttaaacggtcacactgattgtgtgtatagtcttctgaataagggtgctaatgtggacgccaaggacaagtgggggagaacagccctgcaccggggggctgtgacagggcatgaagaatgtgtggatgccctgcttcagcatggtgcaaagtgcctgctgcgagatagccgcggcagaacccctatccatctgagcgccgcctgtggccatataggcgtgctgggcgcattactgcaatccgcagcttcaatggatgcaaatcctgctacagcagataaccatggctacaccgccctccattgggcctgctacaatggccacgaaacttgcgtggagctcctcctcgaacaggaagtcttccagaagactgagggcaacgccttctcccccctccattgcgctgtcatcaacgacaatgaaggtgccgctgagatgctcatagatactctcggcgcctccatcgtgaatgccactgactcaaaaggtcgcacaccgctgcatgcagcagctttcacagaccacgtggaatgtctgcagttacttctgtcccacaacgcccaggtgaatagcgtggattccaccggtaaaaccccattgatgatggcagcagagaacggacagacgaatactgtcgagatgctcgtcagctcagccagcgccgagctgactctgcaggacaactctaaaaacaccgccttgcacttggcctgctcaaaaggccatgagactagcgccttgctcatcctggagaagattaccgatcggaatctcattaacgcaactaacgcagctctgcagacaccactgcatgtagccgctcgcaacggcctcactatggtggtgcaggaattgctggggaagggagcgtcagtgctggctgttgacgagaatgggtacactcctgctctggcttgtgcgcctaacaaggacgtggcagactgcctggccctgatcctcgccaccatgatgccagtcagctctagcagtccacttagctccctgacattcaatgccatcaaccgctacaccaacacctccaagactgtctcatttgaggctctgcctatcatgcggaatgagcccagcagttactgttcatttaataacatcggcggagagcaggaatatctgtacactgacgtggatgagctcaacgattccgactccgaaacatattag

SEQ ID NO: 327915 - DNA, 6295 bp, Artificial Sequence
  derived and/or modified sequence
atgagtcgagtgtgtattgttgttttggaggaggtagaagatgaatctcctgcattcatttctaaattgccacaggaaaataaatccctacattctccaccttctggaaatgtattggtaagatatccatcactggtgcaagctatatttaacggagatcctgatgaagttcgagcactaatatttaagaaagaagatgttaactttcaggacaatgaaaagcgaaccccattgcacgccgcagcttaccttggagatgcagaaatcattgaacttcttattttatctggagctagagttaatgccaaagacagcaaatggttgacacctttacacagagcagttgcatcttgtagtgaggaagcagttcaggtacttttgaagcattctgcagatgttaatgctcgagacaaaaattggcaaacccctttacatatagctgctgctaataaagctgtaaagtgtgctgaagctttggtacctcttctgagtaatgtaaacgtatctgatcgagcagggaggactgcattacatcatgcagctttcagtggacatggtgagatggtcaaactactcttgtctagaggtgccaatattaatgcttttgacaagaaagataggcgtgctatccattgggcagcatatatgggtcacattgaagtagtgaaattgcttgtgtcgcatggagctgaagtgacatgcaaggataaaaagtcttatacacctcttcatgcagcagcctctagtggaatgatcagcgtagtcaagtaccttctagatcttggagttgatatgaatgaaccaaatgcctatggaaatacacctcttcatgtagcctgctataatggacaagatgttgtagtgaatgaacttatagactgtggtgctattgtgaatcaaaagaatgaaaaaggatttactcctttgcactttgctgctgcatcaacacatggagcattgtgtttagagcttctagttggcaatggggccgatgtcaatatgaagagtaaagatgggaaaaccccactacacatgactgctctccacggtagattctcccgatcacaaaccattatccagagtggagctgtaatcgactgtgaggataagaatggaaatacccctttgcacatagcagcacggtatggccatgagctgctgatcaacactcttattacaagtggtgctgacactgcaaagcgtggcatacatggaatgttccccctccatttggcagccttaagcggcttttcagattgctgcagaaaacttctttcttcaggatttgatatagataccccagatgattttggcaggacttgtctacatgcagctgcagctggagggaatttggagtgcctaaaccttctgctgaatactggtgcagactttaataaaaaggacaaatttgggagatctccactgcactacgctgctgccaactgcaattaccagtgcctgtttgctcttgtgggatcaggagcaagtgtgaatgaccttgatgaaagaggctgcacacccctgcactatgcagctacatcagacacagatggcaagtgcctggaatacttattaagaaacgatgcaaatccagggatccgtgataagcaaggatacaacgcagttcattattcagctgcttatggtcaccgtctatgtcttcagctgattgcaagtgaaactcctctagatgttttaatggaaacctcaggaacagacatgctgagtgattcagataatagagcaacaataagccctttacacttggctgcctatcatggtcaccatcaagcactggaagtgttggtacagtctttgttagatcttgatgtcagaaatagtagtggaagaacacccctagatcttgcagcttttaagggccatgttgaatgtgtggatgtactcattaatcagggagcctcaatcttagtaaaagattacattttgaagaggacacctattcatgcagcagcaacaaatggtcattcagaatgcttacggctattaataggaaatgcagaaccacagaatgcagtggatattcaagatggaaatggacagacgcctctgatgctatctgttctcaacgggcacacagactgtgtttactcattgctgaacaaaggagcaaatgtagatgccaaagataagtggggaaggacagcgttgcatagaggggcagttacaggccatgaagaatgtgtagatgcattacttcaacatggtgctaagtgcttacttcgggatagcaggggccggacgcctatacacctgtctgctgcctgtggacacattggtgttcttggagcccttttgcagtcagcagcatctatggatgcaaatccagccacagcagacaatcatggatatacggcacttcactgggcttgctacaatggtcacgagacatgtgtagaactgcttttagaacaggaagttttccagaaaacggaaggaaatgcttttagtccattgcattgtgccgtgataaatgacaacgaaggtgctgctgagatgttaattgatacattaggtgccagcattgtgaacgccacagattcaaaaggaagaactcctctccatgcagccgccttcacagaccatgtagagtgtttacagctgctgctcagccataatgctcaagtcaattctgtggactctacagggaaaacacctcttatgatggctgcagaaaatggacaaacaaatacagttgagatgctggttagcagtgctagtgcagaactgactttacaagataacagtaaaaatactgccctccatttggcttgtagcaagggtcatgaaactagtgccttgttaatactggaaaagataacagatagaaacctcatcaatgcaaccaacgcagccttgcaaacacctctgcatgttgctgcccgaaatgggctaacaatggtggttcaggaacttttgggaaaaggagcaagtgtgcttgcagtagatgaaaatggctataccccagctttggcctgtgctcccaataaggatgtggctgattgcctggctctcattttggccaccatgatgcctgtctcatcaagtagtcctttatcatccttaacattcaatgccattaaccgttataccaacacctcaaaaacagtcagctttgaagctttgcccatcatgaggaatgaacctagctcctattgcagtttcaataacattggaggggaacaggagtacttatacactgacgtggatgagctcaacgactccgattctgagacctactgagaggctgaggaggagggagttctcacagtaaagcttcaaactgtgctttttcaggaaaaaggcactttgatattcacgtagaaattcaacctaagaggaaagatcccacagtgagccaatgttaagagatctgatggcattaggaggaagagttttaaaggcaagttttacaaaaggaacttctagaatcttgaaatagacctgactgaggaaaacacattgatgtcagaattctttgtggaattgtttaatttggttttgcagtgccaggaacaattggggacactgtgcactctaacctgcttacacaagcaacactattgtaacagaagaaataaagacactagatttaaattttatcaataaaattacaactaaatttaaaggcaataaaagtttggtacagtaggcattatgtgcacagcaaattgcaaaaggaccaaataactgaaaggtttttttaataaaatgccattttgtggaaactggagtagattaaatgaaacattacctaaaccaaactgcaatatttctggaaatgaagctgagatttggttttaaatgttgagtttttttgggttttgttttttttttaagaaaacatctgaaagccttccaatgctgtattaaaccatgagagaaagcagatgtatttttacatttttttcttttacagaactatttcaaatttccaatttttatactattagaattaaaaaccagctgactgggtgcaatacgggtgaaaatacttgtgacatagacattgagatggattggggtcaggctgttgccctgttttgaatggtttgggtttaaaatagtactatttttgtttgaaaatgtaaagaatttcctagaaaaaaattcatgaaatcaaaaagtagactatttcaccctattgcagctaagtggtcctggggcatggagtcttcaacctctctatgaatggcacaccttagtcacttatgttacttttgtgtccccaccatgggttgggggattttttgtttattctgatctatgagttttgaaaaagtgaataatcaaaaggaaaataattccttgttgttcataaattaagcatcactaaagtctcttgaaaggcatttctgtattgggcaagatttaaaatactaaagccttaggtcctattcatatttaaagtagcatgtttgtaacctgttactatttggagagagaagcagttgcctgccaaattgaagactacctttcaaatagcaaaagagagagagaaggctgatatttcggcttttaaataaagatttgtgtggttctgcttttactgtaactgtcactttcccagtgaaaatgatttcatatacattgagggtcttacaggtatgggtaaagttctataaattgcaacaaaatgatacccaatttcattttatcctttttgtattgtgaaactggaaactttatgacattgtaaattatcagctggtttttctgaatataaagtgtgaaaacacagaacagtattttgatctatttgataattttgtgggttttttgaagaattaatgagcatgtacatagaaatagtgactgcttgaatactgtatttacttgcactctttcagtacatcaagattcctgtatattttagagtataataaaacacagatgtgagttgtatttaatgaataatgtatttgtatctgtgcatattatctacaaatctataaagtttctagggcattgactactagattttaagcattttttctaaaatatttacagaaattataaatctaatcccccatcttttctttataatataaagaagtcataatgaacccttcctaattattagtagtaggaaggtgaatatgcattttaatgacagtggactacattttctattgtaccttttgaaaaaaaaaaaaatcaagcagattctaaaagtatacatatgtgtgctttctctttccttttaggaattctcttctgaattccctgagggaattttctagaatctcagaattgaaagagacctgaggttcatccagtctctaacctcttaacaaatgcaggagtcccttctacaagggtgatctttccaccttgaacacttccaagtgactctacctcaccaagcagtccattcagttgttgagcagctctaactgttagaaaggtcttccttagatggagttgaagcctccctcccggtaacttctgtctttgggcctgggtctgtcctccaagagaaccctgagaatgttggaaggatgaatctcgcacattctgccatgtcttctcttttacaggctgtttgacttctctgctgaagtgatttccagaaggactcatttgacacactattagatttaccacatctaatgaaatccaaggtgtagctataaagtgacaagctgtttttaatttatcacatacaccagaacttctatcctgcatcacttatatgtaaatgatgctgttaccaaaaacattaaggtagttcttgcgaatgccaccccactaagaaaactatttcattacttttgtaatccatctgtgagagtctgccccccagcttaaccacttcctttggtctgcacccaatgaagggaaaccccaaagtactgtctcaaatggtatttgaactacgccagtattgttggaataagtacattaattacttgaatgaatgaacacagcaccgtagaaatttcctttatggttacaccttgtatgtctaaagcattcaggccctgttctgtagtgtttcttatcctcacacagagtagaaaagcctgtttgctttatttaacttatacataaaagatgacatctgaaatatctgatgtgtattataataccagcttctgctctagaactactttgggtgaaatggtggtaatagcaaatgacctcctttaacaagacactcatctcaaacaatgccatttagttcaggagatctctaagtgtagctgtaaattttggggttaatttggcttatattggaccttttaaaagaaataaagttttttaatgcaataaa

SEQ ID NO: 327916 - DNA, 3261 bp, Artificial Sequence
  derived and/or modified sequence
atgagcagagtctgcatcgtcgtgctggaggaagttgaggatgaatcaccagcctttattagcaaactgccccaggagaacaaaagcctccattcaccaccttccggtaacgtcctcgttcgttacccctcccttgtccaggcgatctttaacggcgaccctgacgaggtgcgggcattgatcttcaagaaagaggatgtcaactttcaggacaacgagaaacgcacaccactccacgctgcagcatacctcggcgatgctgaaatcatagagttgcttatcctgagtggggcaagagtgaatgccaaggacagcaaatggttaactccgctccacagagcagttgcatcttgcagcgaagaggcggttcaggttctgctgaagcatagcgccgacgttaatgctcgggataaaaactggcaaacaccacttcatatcgctgcagctaataaggctgtaaaatgcgctgaagccttagtaccccttctgagcaacgttaatgtgagcgacagagctggtcgtactgccctgcaccatgctgccttctctggccatggcgagatggttaaactgttgctcagccgaggcgctaacattaacgccttcgacaaaaaagatcgcagggccatacactgggccgcatatatggggcatatagaagtggtgaaattgctggtgtcccacggggctgaagtcacctgtaaagacaaaaaaagctatacacctctgcacgctgcagcctcttccggcatgatctctgtagtgaaatatctgctagacctcggcgtagatatgaacgagcccaacgcatatggcaacactccattacacgttgcttgctataacggccaagatgtggtggtgaatgaactgatcgactgcggggctatcgttaaccagaaaaacgaaaagggattcactccgttacacttcgccgcagccagtacccatggggctctatgtctggagcttttggtcgggaacggagctgacgtgaacatgaagtcgaaagacggtaaaacacctctgcacatgactgctctgcatgggcgtttctcccggagccagactatcatccagagtggcgcagtcatcgattgtgaggacaagaacggaaacaccccactgcatatcgcagcacggtacggacacgagctcctgattaacacacttatcacctctggtgccgataccgcaaagcgtgggatccatgggatgtttcctctccacctggccgctctgagtggtttttcagattgttgtcggaagctgctcagttcaggtttcgacatcgacaccccagatgattttgggcgaacctgtttgcacgccgctgcagccggtgggaaccttgagtgcctgaacctactgttgaatactggcgcagattttaacaagaaggacaagtttggcagaagtcccctgcactatgctgcagctaactgcaactatcagtgcctgtttgcattggtgggatcaggcgcaagtgtaaatgacctggacgagcggggttgcactccattgcattacgctgcaacatccgacactgatggaaagtgtcttgaatatctgctgcgcaatgacgcaaatccgggaattagggacaagcaaggctataacgccgttcattactccgctgcatacggacaccgactgtgcctccagttgattgcttcagaaacgcctctcgatgtgctgatggaaacctcaggcacagatatgctgagtgattcagacaatagagccaccatctcacccctgcatctcgcagcttaccatggccaccaccaggctttagaagtattggtgcagtcgcttttagacttggacgtgcgaaacagctcggggaggaccccactcgatttggcagcttttaaggggcatgtcgagtgcgtggatgtgctgattaaccagggcgctagcatactggttaaggactacattctaaaacggacaccaattcatgctgcagcgactaacgggcacagcgagtgtctgcgactgctaataggcaacgctgagcctcagaacgccgtggacattcaagatgggaacggccagaccccgcttatgctctccgtgctgaacggccacacagactgcgtgtactccctgcttaacaagggtgctaacgtggatgcaaaagacaaatggggaagaactgctctgcatcggggagccgtgaccggacacgaggagtgtgtcgacgcactcctgcaacatggggctaagtgcttactaagggacagccggggtcggaccccaatccacctgtcagcagcttgcggccatattggggtattgggggcattacttcagtctgccgcaagtatggacgctaatcctgccaccgccgataatcacggttatactgcactccattgggcttgttacaatggccacgagacttgtgtggagctgctgcttgagcaggaggtatttcaaaagacagaaggtaacgctttctccccactgcattgcgcagttattaacgataatgaaggggcagcggagatgttgatcgacaccctgggggcaagcatcgtcaacgcaactgactcgaaaggtagaacccctctccatgcagctgcatttaccgaccacgtcgaatgcctacagctcctgctgagtcacaacgcccaggtgaactctgtagacagtacaggcaagactcccctcatgatggcagcagaaaacggtcaaaccaacaccgtcgaaatgttagtgagcagtgcctctgccgaactgacactgcaggataacagcaagaacaccgcccttcacctagcttgttcaaagggtcatgaaacgtccgccttactcatcctagagaagatcacagatcggaaccttatcaacgctaccaatgcagccttgcagactcctctccacgtggctgccagaaacgggctcactatggtggtacaagagttgctcggcaaaggtgcatctgtattggcagttgacgagaacggttatacgccagccctcgcatgcgcaccaaataaagacgttgcagattgcctggctctaattttggcaaccatgatgccagtctcttcctcctccccgctgagctctctgacatttaacgccattaatcggtacaccaacacaagcaagaccgtctcatttgaagctctcccaatcatgcgtaacgagccctcatcgtattgcagcttcaacaatattggcggagagcaagagtatctgtacacggatgtcgacgaattgaatgactcggatagcgagacttattag

SEQ ID NO: 327917 - DNA, 3261 bp, Artificial Sequence
  derived and/or modified sequence
atgagcagagtgtgcatcgtggtgctggaggaggtggaggacgagagccccgccttcatcagcaagctgccccaggagaacaagagcctgcacagcccccccagcggcaacgtgctggtgagataccccagcctggtgcaggccatcttcaacggcgaccccgacgaggtgagagccctgatcttcaagaaggaggacgtgaacttccaggacaacgagaagagaacccccctgcacgccgccgcctacctgggcgacgccgagatcatcgagctgctgatcctgagcggcgccagagtgaacgccaaggacagcaagtggctgacccccctgcacagagccgtggccagctgcagcgaggaggccgtgcaggtgctgctgaagcacagcgccgacgtgaacgccagagacaagaactggcagacccccctgcacatcgccgccgccaacaaggccgtgaagtgcgccgaggccctggtgcccctgctgagcaacgtgaacgtgagcgacagagccggcagaaccgccctgcaccacgccgccttcagcggccacggcgagatggtgaagctgctgctgagcagaggcgccaacatcaacgccttcgacaagaaggacagaagagccatccactgggccgcctacatgggccacatcgaggtggtgaagctgctggtgagccacggcgccgaggtgacctgcaaggacaagaagagctacacccccctgcacgccgccgccagcagcggcatgatcagcgtggtgaagtacctgctggacctgggcgtggacatgaacgagcccaacgcctacggcaacacccccctgcacgtggcctgctacaacggccaggacgtggtggtgaacgagctgatcgactgcggcgccatcgtgaaccagaagaacgagaagggcttcacccccctgcacttcgccgccgccagcacccacggcgccctgtgcctggagctgctggtgggcaacggcgccgacgtgaacatgaagagcaaggacggcaagacccccctgcacatgaccgccctgcacggcagattcagcagaagccagaccatcatccagagcggcgccgtgatcgactgcgaggacaagaacggcaacacccccctgcacatcgccgccagatacggccacgagctgctgatcaacaccctgatcaccagcggcgccgacaccgccaagagaggcatccacggcatgttccccctgcacctggccgccctgagcggcttcagcgactgctgcagaaagctgctgagcagcggcttcgacatcgacacccccgacgacttcggcagaacctgcctgcacgccgccgccgccggcggcaacctggagtgcctgaacctgctgctgaacaccggcgccgacttcaacaagaaggacaagttcggcagaagccccctgcactacgccgccgccaactgcaactaccagtgcctgttcgccctggtgggcagcggcgccagcgtgaacgacctggacgagagaggctgcacccccctgcactacgccgccaccagcgacaccgacggcaagtgcctggagtacctgctgagaaacgacgccaaccccggcatcagagacaagcagggctacaacgccgtgcactacagcgccgcctacggccacagactgtgcctgcagctgatcgccagcgagacccccctggacgtgctgatggagaccagcggcaccgacatgctgagcgacagcgacaacagagccaccatcagccccctgcacctggccgcctaccacggccaccaccaggccctggaggtgctggtgcagagcctgctggacctggacgtgagaaacagcagcggcagaacccccctggacctggccgccttcaagggccacgtggagtgcgtggacgtgctgatcaaccagggcgccagcatcctggtgaaggactacatcctgaagagaacccccatccacgccgccgccaccaacggccacagcgagtgcctgagactgctgatcggcaacgccgagccccagaacgccgtggacatccaggacggcaacggccagacccccctgatgctgagcgtgctgaacggccacaccgactgcgtgtacagcctgctgaacaagggcgccaacgtggacgccaaggacaagtggggcagaaccgccctgcacagaggcgccgtgaccggccacgaggagtgcgtggacgccctgctgcagcacggcgccaagtgcctgctgagagacagcagaggcagaacccccatccacctgagcgccgcctgcggccacatcggcgtgctgggcgccctgctgcagagcgccgccagcatggacgccaaccccgccaccgccgacaaccacggctacaccgccctgcactgggcctgctacaacggccacgagacctgcgtggagctgctgctggagcaggaggtgttccagaagaccgagggcaacgccttcagccccctgcactgcgccgtgatcaacgacaacgagggcgccgccgagatgctgatcgacaccctgggcgccagcatcgtgaacgccaccgacagcaagggcagaacccccctgcacgccgccgccttcaccgaccacgtggagtgcctgcagctgctgctgagccacaacgcccaggtgaacagcgtggacagcaccggcaagacccccctgatgatggccgccgagaacggccagaccaacaccgtggagatgctggtgagcagcgccagcgccgagctgaccctgcaggacaacagcaagaacaccgccctgcacctggcctgcagcaagggccacgagaccagcgccctgctgatcctggagaagatcaccgacagaaacctgatcaacgccaccaacgccgccctgcagacccccctgcacgtggccgccagaaacggcctgaccatggtggtgcaggagctgctgggcaagggcgccagcgtgctggccgtggacgagaacggctacacccccgccctggcctgcgcccccaacaaggacgtggccgactgcctggccctgatcctggccaccatgatgcccgtgagcagcagcagccccctgagcagcctgaccttcaacgccatcaacagatacaccaacaccagcaagaccgtgagcttcgaggccctgcccatcatgagaaacgagcccagcagctactgcagcttcaacaacatcggcggcgagcaggagtacctgtacaccgacgtggacgagctgaacgacagcgacagcgagacctactag

SEQ ID NO: 327918 - DNA, 345 bp, Artificial Sequence
  derived and/or modified sequence
atggccagtgtgtggcagcggcttgggttttatgcctcactgcttaaacgtcaactcaatggcggacctgatgtcataaagtgggagaggcgggtgatcccagggtgtactagatcaatctactcagccaccggcaaatggacgaaagagtacaccctgcagactcgtaaagacgtagagaaatggtggcaccaacgtatcaaggaacaggcctccaagatttccgaggcggataagtcaaagcctaagttctatgtcctgagcatgttcccgtacccaagcggaaaactccacatgggtcacgtgagggtgtatacaatctcggacactattgcgagattttag

SEQ ID NO: 327919 - DNA, 345 bp, Artificial Sequence
  derived and/or modified sequence
atggcctctgtgtggcagaggctgggcttctacgccagcctgctgaagaggcagctgaatggaggcccagatgtgatcaagtgggagcggcgggtcatccctggctgcaccaggagcatctacagcgccaccgggaagtggaccaaggagtacaccctgcagaccaggaaggatgtggagaagtggtggcaccagaggatcaaggagcaggccagcaagatcagcgaggccgacaagagcaagcccaagttctacgtgctgtccatgttcccctaccccagcggcaagctgcacatgggccacgtgcgggtgtacaccatcagtgacaccatcgcccgcttctag

SEQ ID NO: 327920 - DNA, 566 bp, Artificial Sequence
  derived and/or modified sequence
agtgctcgcctaaaggtggagaacgaggagtagaggagccgcaggccagagcctgtgagcaggtcgttttcacgttagggctcggaggtcctcagaaagatgaggttccagacgagaaatccgcctgaggtcacagatccagacctacagataaaaaacattatttaatctatctgggatttactccggcttatgatttgagggccttctcaccttctgaagaatggcttctgtttggcagagattgggtttttatgcctctcttctgaaaagacagctaaatggtgggccagatgtcatcaagtgggaaaggagagtaattcccggatgtaccagaagcatctacagtgccacgggaaagtggacaaaagagtatacattgcagacaagaaaggatgttgagaaatggtggcatcaacgaataaaagaacaggcctccaaaatttcagaagctgataaatcgaagccaaaattttacgtgctttccatgttcccttatccttctggtaagctgcacatgggccatgtgcgtgtctacaccatcagcgacaccatagcacggttcc

SEQ ID NO: 327921 - DNA, 345 bp, Artificial Sequence
  derived and/or modified sequence
atggccagcgtgtggcagcggctgggcttctacgccagcctgctgaagcgccagttgaatggcggacccgatgtcattaagtgggagcgtagagtcattcccggatgcacacgctctatctactccgcaacgggcaagtggacaaaggagtacacactccagacacggaaagacgtggagaagtggtggcatcagagaattaaagagcaggcatcgaaaattagcgaggccgataagtctaagcccaagttctatgtgctgtctatgttcccctaccccagtgggaagcttcatatgggtcacgtcagagtgtatactatctccgacaccatagccagattttag

SEQ ID NO: 327922 - DNA, 345 bp, Artificial Sequence
  derived and/or modified sequence
atggcgtctgtctggcagcgattggggttctacgcttcgctgctaaagaggcagctgaacggcggaccagatgttatcaaatgggaacggagagtaattccaggttgcactagaagtatctatagcgctactgggaagtggaccaaagagtacaccttgcagacaagaaaagatgttgaaaaatggtggcaccaacggattaaagagcaggcttcaaagatttcggaggccgataagagtaaaccgaagttctatgtactttccatgttcccttatccttccgggaagctgcacatgggacacgtgcgtgtctacacgatcagcgacacaatcgccaggttctag

SEQ ID NO: 327923 - DNA, 345 bp, Artificial Sequence
  derived and/or modified sequence
atggccagcgtgtggcagagactgggcttctacgccagcctgctgaagagacagctgaacggcggccccgacgtgatcaagtgggagagaagagtgatccccggctgcaccagaagcatctacagcgccaccggcaagtggaccaaggagtacaccctgcagaccagaaaggacgtggagaagtggtggcaccagagaatcaaggagcaggccagcaagatcagcgaggccgacaagagcaagcccaagttctacgtgctgagcatgttcccctaccccagcggcaagctgcacatgggccacgtgagagtgtacaccatcagcgacaccatcgccagattctag

SEQ ID NO: 327924 - DNA, 495 bp, Artificial Sequence
  derived and/or modified sequence
atggatctggaggaatgcatcctgattaccgattccaccctaatccagctgtcgattcattgccctaaactccaggctctggtttccttaagcttcagcgacatcattcacttactgaaaatgaaggagccaagccatcacaacaagaagctctttggctttagtttttgcaagtcactgtcccactgcgagcttattactgacgatgggatccttcacttatctaactctacctgtgggcacgaaagacttagagtgctggaactggacaactgtcttctcattactgatgtggcgctggagcatcttgagaactgccgcgggttagagcgacttgaactctacgattgtcagcaggtgactagggcaggcatcaaaaggatgcgtgcacaactcccccatgtgaaagttcacgcatattttgcccctgtaacgcccccgaccgccgtggccggcagcggccagcgcctctgtaggtgttgcgtgatcttgtag

SEQ ID NO: 327925 - DNA, 495 bp, Artificial Sequence
  derived and/or modified sequence
atggacctggaggagtgcatcctgatcacagacagcaccctcatccagctgagcatccactgccccaagctgcaggccctggtgtccctgtccttcagtgacatcatccacctgctgaagatgaaggagcccagccaccacaacaagaagctgtttggcttctccttctgcaagagcctgagccactgtgagctgatcacagatgatggcatcctgcacctgagcaacagcacctgtggccacgagcggctgcgggtgctggagctggacaactgcctgctgatcacagatgtggccctggagcacctggagaactgccggggcctggagcggctggagctgtatgactgccagcaggtgaccagggctggcatcaagaggatgagggcccagctgccccacgtgaaggtgcacgcctactttgcccctgtgaccccacccacagctgtggccggcagcggccagaggctgtgccgctgctgcgtcatcctgtag

SEQ ID NO: 327926 - DNA, 495 bp, Artificial Sequence
  derived and/or modified sequence
atggacctggaggagtgcatcctgatcaccgacagcaccctgatccagctgtctatacactgcccaaagctgcaggcgctagtcagcctgagcttcagtgatatcattcacctccttaagatgaaggaaccgagccaccataataaaaagctgttcgggttctctttttgtaaatccttgagccattgtgagctaatcaccgatgacggaatcttgcatttgtctaattctacctgcggccatgaaaggttgcgggttctggagctcgacaattgcctgctgatcacagatgtcgccctcgagcaccttgagaattgccgcgggcttgagagactggagttgtacgattgtcaacaggtgaccagggccgggattaaacggatgagagctcagctcccacacgtaaaggttcatgcctactttgctccggtgactccgcctaccgccgtcgctggatccgggcagcggttatgccgttgctgcgtcatcctctag

SEQ ID NO: 327927 - DNA, 495 bp, Artificial Sequence
  derived and/or modified sequence
atggacctggaggaatgcattttgatcactgactcaacccttatccagttgagtattcattgtcccaagctacaggccctggtgagcctgtctttttcagatattattcatcttctgaaaatgaaagaaccaagccaccataataaaaagctcttcgggttttctttttgtaagtcactcagccactgtgagctcatcactgatgacgggattctacatctcagcaattcaacctgtggtcacgagcggctgcgagttcttgagctggacaattgtctactgattaccgatgtagccttagaacacctggagaactgtagaggcctggagcgcctggagttatatgattgtcaacaggtgacccgggctggtataaagagaatgcgggcacagctgccacatgtgaaggttcatgcttatttcgctccagtcacccccccaaccgccgtggcagggagcggccagagactgtgtcgatgttgtgtgattctatag

SEQ ID NO: 327928 - DNA, 495 bp, Artificial Sequence
  derived and/or modified sequence
atggacctggaggagtgcatcctgatcaccgacagcaccctgatccagctgagcatccactgccccaagctgcaggccctggtgagcctgagcttcagcgacatcatccacctgctgaagatgaaggagcccagccaccacaacaagaagctgttcggcttcagcttctgcaagagcctgagccactgcgagctgatcaccgacgacggcatcctgcacctgagcaacagcacctgcggccacgagagactgagagtgctggagctggacaactgcctgctgatcaccgacgtggccctggagcacctggagaactgcagaggcctggagagactggagctgtacgactgccagcaggtgaccagagccggcatcaagagaatgagagcccagctgccccacgtgaaggtgcacgcctacttcgcccccgtgaccccccccaccgccgtggccggcagcggccagagactgtgcagatgctgcgtgatcctgtag

SEQ ID NO: 327929 - DNA, 91 bp, Artificial Sequence
  derived and/or modified sequence
gacaagagttcagaaaggaagactacacagaaatacgcattttaaagtcactgacatggagatgacacttaaaaccatgaacatggatggg

SEQ ID NO: 327930 - protein, 172 aa, Artificial Sequence
  derived and/or modified sequence
MELEIKKMAKIGNKEACKVLAKQLVHLRKQKTRTFAVSSKVTSMSTQTKVMNSQMKMAGAMSTTAKTMQAVNKKMDPQKTLQTMQNFQKENMKMEMTEEMINDTLDDIFDGSDDEEESQDIVNQVLDEIGIEISGKMAKAPSAARSLPSASTSKATISDEEIERQLKALGVD

SEQ ID NO: 327931 - protein, 891 aa, Artificial Sequence
  derived and/or modified sequence
EKDNGLDVFKLSDRDFLRSMENAIRFGKPCLLENVGEELDPALEPVLLKQTYKQQGNTVLKLGDTVIPYHEDFRMYITTKLPNPHYTPEISTKLTLINFTLSPSGLEDQLLGQVVAEERPDLEEAKNQLIISNAKMRQELKDIEDQILYRLSSSEGNPVDDMELIKVLEASKMKAAEIQAKVRIAEQTEKDIDLTRMEYIPVAIRTQILFFCVSDLANVDPMYQYSLEWFLNIFLSGIANSERADNLKKRISNINRYLTYSLYSNVCRSLFEKHKLMFAFLLCVRIMMNEGKINQSEWRYLLSGGSISIMTENPAPDWLSDRAWRDILALSNLPTFSSFSSDFVKHLSEFRVIFDSLEPHREPLPGIWDQYLDQFQKLLVLRCLRGDKVTNAMQDFVATNLEPRFIEPQTANLSVVFKDSNSTTPLIFVLSPGTDPAADLYKFAEEMKFSKKLSAISLGQGQGPRAEAMMRSSIERGKWVFFQNCHLAPSWMPALERLIEHINPDKVHRDFRLWLTSLPSNKFPVSILQNGSKMTIEPPRGVRANLLKSYSSLGEDFLNSCHKVMEFKSLLLSLCLFHGNALERHKFGPLGFNIPYEFTDGDLRICISQLKMFLDEYDDIPYKVLKYTAGEINYGGRVTDDWDRRCIMNILEDFYNPDVLSPEHSYSASGIYHQIPPTYDLHGYLSYIKSLPLNDMPEIFGLHDNANITFAQNETFALLGTIIQLQPKSSSAGSQGREEIVEDVTQNILLKVPEPINLQWVMAKYPVLYEESMNTVLVQEVIRYNRLLQVITQTLQDLLKALKGLVVMSSQLELMAASLYNNTVPELWSAKAYPSLKPLSSWVMDLLQRLDFLQAWIQDGIPAVFWISGFFFPQAFNRHSAEFCPQICHLH

SEQ ID NO: 327932 - protein, 528 aa, Artificial Sequence
  derived and/or modified sequence
  misc_feature (1)..(1): Xaa can be any naturally occurring amino acid
XRSQLQPEPAKTKALQTVIEMKDTKIASLERNIRDLEDEIQMLKANGVLNTEDREEEIKQIEVYKSHSKFMKTKIDQLKQELSKKESELLALQTKLETLSNQNSDCKQHIEVLKESLTAKEQRAAILQTEVDALRLRLEEKESFLNKKTKQLQDLTEEKGTLAGEIRDMKDMLEVKERKINVLQKKIENLQEQLRDKDKQLTNLKDRVKSLQTDSSNTDTALATLEEALSEKERIIERLKEQRERDDRERLEEIESFRKENKDLKEKVNALQAELTEKESSLIDLKEHASSLASAGLKRDSKLKSLEIAIEQKKEECSKLEAQLKKQAEQLFNQMYNPAHNIEDDSRMNPEFADQIKQLDKEASYYRDECGKAQAEVDRLLEILKEVENEKNDKDKKIAELERHMKDQNKKVANLKHNQQLEKKKNAQLLEEVRRREDSMADNSQHLQIEELMNALEKTRQELDATKARLASTQQSLAEKEAHLANLRIERRKQLEEILEMKQEALLAAISEKDANIALLELSASKKK

SEQ ID NO: 327933 - DNA, 1587 bp, Artificial Sequence
  derived and/or modified sequence
tgaagaagccagctgcagcccgagcccgccaagaccaaggccctgcagaccgtgatcgagatgaaggacaccaagatcgccagcctggagagaaacatcagagacctggaggacgagatccagatgctgaaggccaacggcgtgctgaacaccgaggacagagaggaggagatcaagcagatcgaggtgtacaagagccacagcaagttcatgaagaccaagatcgaccagctgaagcaggagctgagcaagaaggagagcgagctgctggccctgcagaccaagctggagaccctgagcaaccagaacagcgactgcaagcagcacatcgaggtgctgaaggagagcctgaccgccaaggagcagagagccgccatcctgcagaccgaggtggacgccctgagactgagactggaggagaaggagagcttcctgaacaagaagaccaagcagctgcaggacctgaccgaggagaagggcaccctggccggcgagatcagagacatgaaggacatgctggaggtgaaggagagaaagatcaacgtgctgcagaagaagatcgagaacctgcaggagcagctgagagacaaggacaagcagctgaccaacctgaaggacagagtgaagagcctgcagaccgacagcagcaacaccgacaccgccctggccaccctggaggaggccctgagcgagaaggagagaatcatcgagagactgaaggagcagagagagagagacgacagagagagactggaggagatcgagagcttcagaaaggagaacaaggacctgaaggagaaggtgaacgccctgcaggccgagctgaccgagaaggagagcagcctgatcgacctgaaggagcacgccagcagcctggccagcgccggcctgaagagagacagcaagctgaagagcctggagatcgccatcgagcagaagaaggaggagtgcagcaagctggaggcccagctgaagaagcaggccgagcagctgttcaaccagatgtacaaccccgcccacaacatcgaggacgacagcagaatgaaccccgagttcgccgaccagatcaagcagctggacaaggaggccagctactacagagacgagtgcggcaaggcccaggccgaggtggacagactgctggagatcctgaaggaggtggagaacgagaagaacgacaaggacaagaagatcgccgagctggagagacacatgaaggaccagaacaagaaggtggccaacctgaagcacaaccagcagctggagaagaagaagaacgcccagctgctggaggaggtgagaagaagagaggacagcatggccgacaacagccagcacctgcagatcgaggagctgatgaacgccctggagaagaccagacaggagctggacgccaccaaggccagactggccagcacccagcagagcctggccgagaaggaggcccacctggccaacctgagaatcgagagaagaaagcagctggaggagatcctggagatgaagcaggaggccctgctggccgccatcagcgagaaggacgccaacatcgccctgctggagctgagcgccagcaagaagaagtag

SEQ ID NO: 327934 - DNA, 1585 bp, Artificial Sequence
  derived and/or modified sequence
gaagaagccaacttcagccggagccagccaagacgaaggctctccagactgtcatcgaaatgaaggacacaaaaatcgcttcattggaacgaaacataagggatcttgaggatgagatccagatgttaaaagccaatggtgtgctgaacactgaggaccgcgaagaagagatcaaacaaattgaggtttacaaaagtcactccaagtttatgaagaccaagattgatcagctgaagcaggaactttcaaagaaagagtcggaacttcttgccttacaaacaaagcttgaaaccctcagcaatcaaaattcagattgcaagcaacacattgaagtgctcaaagagtcacttactgccaaagaacagagggctgccatccttcagactgaggtagatgcgctgagattacgactggaagaaaaagaatctttcctcaataaaaaaacaaaacagctacaggacctcacagaagagaaggggacactggccggtgaaattcgtgacatgaaagatatgttagaagtgaaggaaagaaaaatcaatgttcttcagaaaaagattgaaaacttgcaagaacaacttagggataaagacaagcaactgaccaacctgaaagacagagtgaagtccttgcagacggattccagtaatacagatactgcactggcgacgctagaggaagctctgtcagagaaggagagaataattgagcgcttgaaagaacagcgagaaagagatgatcgggaaagactagaagagatagaatccttccgaaaagagaacaaagacctgaaagagaaggtcaatgctttacaggctgaactgactgagaaagagtctagtttaattgacctcaaagaacatgcatcttcattagcctctgcggggctgaaaagggattccaaattaaaatctctagaaatagccattgaacaaaagaaagaggaatgtagcaaattggaagcacagttaaaaaagcaagctgagcagttgttcaatcagatgtacaacccagcacataatattgaagatgactccaggatgaaccctgagtttgcagaccaaataaaacagctcgataaagaggcgtcttactaccgcgacgagtgtggcaaggcccaagcggaagtggaccggttgctggagatcctcaaggaggtggagaatgagaagaatgacaaggacaagaagatcgcagaactggagaggcatatgaaagatcagaataagaaggtggccaacctcaagcacaatcaacagttggaaaagaagaaaaatgctcagttactagaagaagtgcgcaggcgagaagacagcatggctgacaactcacagcatttgcagatagaggaactgatgaatgcactggagaagaccagacaggaactggatgccaccaaagcacgcctcgcctccacacaacagtccctggccgaaaaagaagcgcacttggccaacctccggattgagaggaggaaacagctggaggagatcctggagatgaaacaggaagcactacttgcagccatcagtgaaaaagatgcaaacattgccttgctggaattgtctgcctccaaaaagaaaaa

SEQ ID NO: 327935 - DNA, 1587 bp, Artificial Sequence
  derived and/or modified sequence
taaagaagccagctgcaaccagaacccgccaagactaaagccctgcagaccgtcatagaaatgaaggatacaaagatcgcatccttggaacggaacattcgggacctagaagacgagatccagatgctcaaagctaacggcgttctgaataccgaagaccgtgaggaggaaatcaagcaaatcgaggtctataaatcccatagtaaatttatgaagacgaagattgatcaactcaagcaagaactgtctaaaaaggagtctgaactgctggcccttcagaccaaacttgaaacccttagcaatcaaaactccgactgcaaacagcacatcgaagttctcaaagagtctctgacagccaaggagcagcgggccgcaatcctgcagacagaagttgacgctctgcggctgagactggaagaaaaagagagcttcctcaataagaagaccaaacagttgcaggacctgaccgaggaaaaggggacacttgcaggtgagatcagggacatgaaagacatgctggaagttaaagagcggaagattaacgtgcttcagaagaaaatcgaaaatctgcaagagcagctaagagataaagataagcagctaaccaacctcaaggatagagtgaaatcgttgcaaacggactcctctaacacagacactgccttggctacactggaagaagccctgagtgaaaaggagcgaatcatcgagcgtctgaaggagcagcgcgagcgcgacgaccgggaacgcttggaagagatagaatcttttcggaaggagaataaagacctcaaggaaaaggtaaatgctttgcaggccgagctgaccgagaaagaaagctcactgatcgatttgaaggagcacgccagtagtcttgcctccgccggtcttaagagggatagtaagctgaagagccttgaaatcgccattgaacagaaaaaagaggagtgttctaaactcgaggcacagctgaagaaacaagctgagcagctgttcaatcagatgtataaccccgctcacaatatagaggatgacagcaggatgaacccggagtttgccgaccagatcaagcaactcgacaaagaagccagctactatagagacgaatgcggaaaagcccaggcagaagtggaccgattgctggaaatactaaaagaagtggaaaatgagaagaatgataaggataagaagatagctgagttggagcggcatatgaaagatcaaaacaaaaaggtggcgaacctgaaacataatcagcaattggagaaaaaaaagaacgcacagttgctggaggaagtgagaagacgcgaagattccatggctgacaacagccagcatttacagatcgaggaactgatgaacgctctggaaaagactagacaggagctcgacgctacaaaagctcgcctggcttcaacccagcagtctctggccgagaaagaggcacaccttgcaaaccttcgtattgagcgccgaaaacagctggaagaaattctggaaatgaaacaggaggcattgctcgcagcgatatctgaaaaagatgccaatattgcactgctggaattaagcgccagcaagaagaaatag

SEQ ID NO: 327936 - DNA, 1587 bp, Artificial Sequence
  derived and/or modified sequence
tgaagaagccagctgcagcctgagcccgccaagaccaaggccctgcagacagtgattgagatgaaggacaccaagatcgccagcctggagaggaacatccgggacctggaggatgagatccagatgctgaaggccaacggggtgctgaacacagaggaccgggaggaggagatcaagcagatcgaggtgtacaagagccacagcaagttcatgaagaccaagattgaccagctgaagcaggagctgagcaagaaggagagcgagctgctggccctgcagaccaagctggagaccctgagcaaccagaacagcgactgcaagcagcacatcgaggtgctgaaggagagcctgacagccaaggagcagagagctgccatcctgcagacagaggtggatgccctgcggctgcggctggaggagaaggagagcttcctgaacaagaagaccaagcagctgcaggacctgacagaggagaagggcaccctggccggggagatccgggacatgaaggacatgctggaggtgaaggagaggaagatcaacgtgctgcagaagaagattgagaacctgcaggagcagctgcgggacaaggacaagcagctgaccaacctgaaggacagagtgaagagcctgcagacagacagcagcaacacagacacagccctggccaccctggaggaggccctgtctgagaaggagcgcatcatcgagcggctgaaggagcagcgggagagagatgaccgggagcggctggaggagattgagagcttcaggaaggagaacaaggacctgaaggagaaggtgaatgccctgcaggccgagctgacagagaaggagagcagcctgattgacctgaaggagcacgccagcagcctggccagcgctggcctgaagagggacagcaagctgaagagcctggagatcgccatcgagcagaagaaggaggagtgcagcaagctggaggcccagctgaagaagcaggccgagcagctgttcaaccagatgtacaacccagcccacaacattgaagatgacagcaggatgaaccctgagtttgctgaccagatcaagcagctggacaaggaggccagctactacagagatgaatgtgggaaggcccaggccgaggtggaccggctgctggagatcctgaaggaggtggagaatgagaagaatgacaaggacaagaagattgctgagctggagcggcacatgaaggaccagaacaagaaggtggccaacctgaagcacaaccagcagctggagaagaagaagaatgcccagctgctggaggaggtgagaagaagagaagattccatggctgacaacagccagcacctgcagatcgaggagctgatgaatgccctggagaagacccggcaggagctggatgccaccaaggcccggctggccagcacccagcagagcctggccgagaaggaggcccacctggccaacctgagaattgaaagaaggaagcagctggaggagatcctggagatgaagcaggaggccctgctggccgccatcagcgagaaggatgccaacatcgccctgctggagctgagcgccagcaagaagaagtag

SEQ ID NO: 327937 - DNA, 1587 bp, Artificial Sequence
  derived and/or modified sequence
tgacggagccagctgcagcccgagcccgccaagaccaaggccctgcagacagtgattgagatgaaagatactaagatcgccagcctcgaacgcaatatcagggatcttgaggacgaaatacaaatgctaaaggccaatggggtcttgaataccgaagatcgcgaagaagagatcaagcagattgaggtatataagtcccactccaagttcatgaagacaaaaattgatcagttgaagcaggagctgtcaaagaaggaaagcgaactgctcgctctccagaccaagttggaaacactaagtaaccagaactccgactgtaagcagcatattgaggtccttaaggaatctctgactgctaaggaacagagggcggccatcttgcagaccgaagtggatgccttaagactaaggctggaagaaaaggagtcttttctcaacaagaagacaaaacagctgcaggacctgaccgaagaaaagggtactctggcaggcgagatccgggatatgaaggacatgctggaggtcaaggaacgcaagatcaatgtactgcaaaagaagattgagaatttacaagaacagttgcgtgacaaggataagcaattgaccaatttaaaagatcgggtcaaaagtcttcagactgactcttcaaacactgatactgctctggcgaccctcgaagaagccctgtcagaaaaggagagaataattgagagactgaaagagcagagggagagggacgatcgtgaacgcctggaagagatcgagtccttcaggaaagagaataaagacctcaaggagaaggtcaacgctctgcaggctgaactcactgaaaaagaatcatcactgatcgaccttaaagagcatgcttctagcctagcgtctgcaggtctgaaacgggactcaaaacttaagagcctcgagatagccattgaacaaaaaaaagaggagtgttctaaactcgaagcacagcttaaaaaacaggccgaacagctgtttaatcagatgtataaccccgcccacaatatcgaagacgacagccggatgaaccccgagttcgccgaccagataaagcaactggacaaggaggcttcatactatcgggacgaatgtgggaaagcacaagctgaagtcgataggctcctggagatccttaaagaggtcgagaacgaaaaaaatgacaaggacaagaaaatcgctgaactggaaagacatatgaaggaccagaacaaaaaagtcgctaacctgaagcataatcagcagctggagaagaagaaaaacgcacagctccttgaggaggtgagacgacgtgaggattctatggcagataactcccagcatctgcagattgaggaactgatgaatgcccttgagaagacaagacaggagttagacgctacaaaggccaggctggcttccacccagcagagtctggccgaaaaagaagcacatctggctaatctaagaatagagcgccgcaaacagctggaagagatccttgaaatgaaacaggaagcgctcctggcggctatcagtgagaaagatgccaatatagcactacttgaactctccgcctcaaaaaagaaatag

SEQ ID NO: 327938 - DNA, 1587 bp, Artificial Sequence
  derived and/or modified sequence
tgaagatcacaactccagccggaacccgctaaaacgaaagctttgcagacagtgatcgaaatgaaggatacaaaaattgcctcactggagaggaatatccgcgacttagaggacgagatccaaatgctgaaagcaaacggggtgctgaacaccgaggaccgagaggaggagatcaagcagatcgaagtctataaatcacacagcaagttcatgaagaccaaaatagatcagctgaagcaagaattgtcgaagaaggagagtgaactacttgctttgcaaaccaaactggagactctcagcaatcagaactctgactgtaaacagcacatagaagtgctgaaggagtctctgacagctaaggagcagagagctgccattctgcagactgaggtcgacgctttgaggcttagactcgaagaaaaggagtccttcctgaataagaaaactaaacagctccaggatctgaccgaggaaaagggtactctggcaggggaaatcagagatatgaaagatatgctggaagtaaaagagcggaaaattaatgttctccagaaaaaaatagagaacctgcaggaacagctgagagataaggataaacagctgactaatctgaaggatagggtgaaaagtttgcagactgatagttctaatactgatacagcgctggcgactctagaggaggcattgtctgaaaaggagcggataattgagcggttgaaggagcagcgagagagggacgacagagagcgcctggaggagattgagtcatttaggaaggaaaataaggacctgaaggaaaaggtgaatgcgctgcaggctgaattgaccgaaaaggagtccagtttgattgacttgaaggaacacgccagttctctggcaagcgcaggattgaagagggatagcaagctgaagtccctcgagatagcgatcgaacaaaaaaaagaagagtgcagcaaactggaggctcaactgaaaaaacaagcggaacagttgttcaatcagatgtacaacccagctcacaacatcgaagatgatagcaggatgaaccctgaatttgccgaccaaatcaaacaacttgataaggaggcttcatattatcgggatgagtgcgggaaggcacaggcggaagtagacagactcctggaaatcctcaaagaggtggagaatgaaaagaacgataaggataaaaagatagcagaattagagcggcatatgaaagatcagaacaagaaagttgcaaatctgaaacataaccagcagttggaaaaaaaaaaaaatgcccagctactggaggaagttagaaggagagaagacagcatggccgataattctcaacaccttcagattgaggagctaatgaatgctctagagaagacccggcaagagctggacgccaccaaagctaggctggcctctacccagcagtctctggcagaaaaagaagctcatctggcaaatctcagaatagaacgtcgcaaacaactggaagaaattcttgagatgaagcaggaagctctgctcgcggcaatatctgagaaggacgccaacattgccttgctggagctgagtgctagtaagaaaaagtag

SEQ ID NO: 327939 - DNA, 6138 bp, Artificial Sequence
  derived and/or modified sequence
gctcgctcggtctccggctccggcgccggctcctgctcctcctggccgcccggggccaaggcgacgagaggttgtaaaaatccatgtgggacggccccggggcgagcatcggaaagatctctgagtggagttattttctggtacggactgtgaaaagaatgcggtgaaaattctggacaatcgtggaaatattagctcaaaccccaacttaatatagcatttcttctcttcagtaacacctcataatacaagaaaaatgtatggaagtgcaagaacaatcaccaatctggaaggtagcccttccagatcccctcgtttgccaaggtctcctcgtttgggccaccgaagaacaagtagtgggggaggtggaggaacaggcaagactctgtctatggagaatatccagtccctcaatgcagcctatgctacgtctggacccatgtatctgagtgatcatgaaggggtggcttcaacaacctacccaaagggcactatgactctgggaagggctacaaatcgagctgtatatggaggccgtgtcacagccatggggagtagtcccaatattgcttctgctggactttcccacacagatgtcctttcatacacagatcaacatggtgggctgactggctcatcccatcatcaccaccaccaggtcccctccatgttgaggcaggtaagagacagcacaatgttagatcttcaggcccagctgaaagaactgcagagagagaatgacctcctccggaaagagctagacatcaaggacagcaaattgggatcttccatgaacagtattaagactttctggagtcctgagcttaagaaggagagagtcttgaggaaagaagaggcagcgcggatgtctgtcctcaaggagcagatgagggtttcccatgaagaaaatcagcacctacagttgacaatccaggcccttcaagatgagctgcgaacccagagagacctcaaccacctcctccagcaagagagtggcaaccgaggagcggagcacttcaccatcgagctgaccgaggagaactttaggcggctccaagccgagcatgacaggcaggctaaggagctgttccttttgaggaagacattagaggaaatggagctgagaattgaaacgcagaaacaaaccctcaatgcccgagatgagtcaattaaaaaacttcttgagatgttgcaaagtaaaggcttgccatccaaaagcctggaggatgacaatgagcgaacgcggcggatggcagaggctgagtctcaggtcagccacttggaagtgattttagatcagaaagagaaggaaaacatacatcttagagaggaattgcaccgaagaagccaacttcagccggagccagccaagacgaaggctctccagactgtcatcgaaatgaaggacacaaaaatcgcttcattggaacgaaacataagggatcttgaggatgagatccagatgttaaaagccaatggtgtgctgaacactgaggaccgcgaagaagagatcaaacaaattgaggtttacaaaagtcactccaagtttatgaagaccaagattgatcagctgaagcaggaactttcaaagaaagagtcggaacttcttgccttacaaacaaagcttgaaaccctcagcaatcaaaattcagattgcaagcaacacattgaagtgctcaaagagtcacttactgccaaagaacagagggctgccatccttcagactgaggtagatgcgctgagattacgactggaagaaaaagaatctttcctcaataaaaaaacaaaacagctacaggacctcacagaagagaaggggacactggccggtgaaattcgtgacatgaaagatatgttagaagtgaaggaaagaaaaatcaatgttcttcagaaaaagattgaaaacttgcaagaacaacttagggataaagacaagcaactgaccaacctgaaagacagagtgaagtccttgcagacggattccagtaatacagatactgcactggcgacgctagaggaagctctgtcagagaaggagagaataattgagcgcttgaaagaacagcgagaaagagatgatcgggaaagactagaagagatagaatccttccgaaaagagaacaaagacctgaaagagaaggtcaatgctttacaggctgaactgactgagaaagagtctagtttaattgacctcaaagaacatgcatcttcattagcctctgcggggctgaaaagggattccaaattaaaatctctagaaatagccattgaacaaaagaaagaggaatgtagcaaattggaagcacagttaaaaaaggcacataatattgaagatgactccaggatgaaccctgagtttgcagaccaaataaaacagctcgataaagaggcgtcttactaccgcgacgagtgtggcaaggcccaagcggaagtggaccggttgctggagatcctcaaggaggtggagaatgagaagaatgacaaggacaagaagatcgcagaactggagagcttgactctcaggcatatgaaagatcagaataagaaggtggccaacctcaagcacaatcaacagttggaaaagaagaaaaatgctcagttactagaagaagtgcgcaggcgagaagacagcatggctgacaactcacagcatttgcagatagaggaactgatgaatgcactggagaagaccagacaggaactggatgccaccaaagcacgcctcgcctccacacaacagtccctggccgaaaaagaagcgcacttggccaacctccggattgagaggaggaaacagctggaggagatcctggagatgaaacaggaagcactacttgcagccatcagtgaaaaagatgcaaacattgccttgctggaattgtctgcctccaaaaagaaaaagacgcaggaagaagtcatggccctcaagcgggaaaaagaccgactagtacatcaattaaagcagcagacccagaacagaatgaagttgatggcagacaactatgatgatgaccatcaccattaccaccaccaccaccatcaccaccaccatcgatctcctgggaggtcgcaacattccaatcacaggccctctccggaccaggatgacgaggagggcatatgggcatagccgggcctgtaaaccaaagttccagttttgttttgagggctattagaagggctgaataaagggaacatgcagctctgcagcaatattctgataatgtattgcagtgcggctcacatcactgtccaccaccacctggagcggctcatcagaactgaaggggagttttcacttaccttattgagcgtgattctgttctacttgatatttccttcaccacctcatgtcatttctcatggatttggttatgatggaaaggaagaatgcagaggaggagaaaagtgacagatcctccatttttgttgggatgcgggcattttgaatgtgatcatctttgctgaatgtcattatttgataacattttgtttatgttacttaaacatcattggataaatttgaactccatgggattttatctgtggattcagcttctgttggacaactagcctcatctccagtatcctgctggttcactctaattggtcattcctaatgcattagattatcaaaaagtataaattcgctgtgagtgagtggtgttggcagtgtttgtataccatgatgcatggagtgtttgacgaagaaacaaaaaacaccaaaaattgcgagcctttaccctcctctatttctttaatctgttgtttgaagaaccgcattttgagggtgtaaccagtagtcacctctgggccaggttggaaaagaaatcaattttttaaaccactaatgcttgccaagaaatcgccttatgagaacatggtgtgtgtctctgacaatgcgtggcacatctaaattgatcattcataattttatctacccagtcatgtactggagagtggcaaaagtctgaggcacctgcatatctctagtccctgtgttctgcacatccccacggtggggacgccaccaagcctcagactcttaccatcccggtgcatgcaggtctccatgaagaagctgggactcattcacatttcaagatccaaatgctgtgcaaacagtgtaagcttagattttctgtaaatgaagggtcatttctctttttttttttttttaaagaaaatgtgtctgcaacatggattccaaagcattttcagcatcaaacatgaaaacattgatgaatgaggaacaatcacaaaagctgtgtctctgtatatagctctacacaacatgtatgtggatacagtcattatttaaagcacatgccagggaaaaagaccaaattttgaggtcttttacatacagtgatatggtactaaggagaattaaactcctactgcttcctctgaatattaagaaacaatttaaattgttataacttcataaaactcatgactgagtctggcaaacatgtgcaactcttgtattgctccattttcttgtcaatggaagaaacccttccacgtgtatgcaagtgggagatgaaaacctgcatttttaaaggacaaacagtgaatttaagcatgagtggccttaataaatatagttgtctttctttgctgctgtggaaaggattctaaacagatgtccctgaagtcttgcattgaatttagtcattattattactttttaaaatgttggtgcaattaactctggacctctcttgtgagccatagagatatttaaaagacaaacaccttatttgtcggggaagatgaaaccgtccctgagttgcaccattctttcttggtgcattcgcggttaagatactcaagcaggtttcttgcttctggctttgttcttgtcatcagtaagtataacaaactatgtaatgcttatgtgttgcataaacaatccaaatgcattcatgttttaaaagtttgtcctttaactatcagagggatctaggtcttggttagagaagtaagcagagttctttgcaagcttatttagcacattttgacacaatgttgcactgaaaacccaggccacaaatgtgtcccagtgaacagtttggatgtcctcaaagaagtggttctcactgcctcctacaaccaggtcttgacctgaactctgcaactgaatacttgaagtaggaagtaggaaatccagtagggaaaatagggtccttgaaacagaaaaaaaaaaccaacccatgtatagctagctatttctatgtatgtgccaattttgtcacagctcttgtttggagggatcattttctgcccaactttcattggttaaaatattactgatcttacctttatgaggtcgtataatttagtcccttaaaaattaaattctctctaacataacaacctttcccatttcgtgtaatattctctgatgtttgggggttaccaaaaatatccctttttcacatattaagaatagtctctgggtttacaacaaacactgtgatgttgggaagctatttcctttgcgcaaactttaacaggttttcttctaatcataacatagttgaaaaaagaagtttgggctaacatttaggagaagttggtcttactttgtgcaaaagcaggcttgtgctttataccccatttgatttcgatgtacagtctcaattttgtatttaatgatttttgtgtatccagtatgcacgttaacagcgtgtcaactttcatttgaaagtgggtttcaatttactttttaaacagtgtttatgacgagacctcagatgtgttgacgtaagctctatctgcaatgtttttgtgtagagtggcgattgaatgctgcccagggtcagtgtatctaattccccgagaccctcgtttgatagtgcttcttgtaatatttcttcaagtgagtggcatgtgggttgtgatattgaccatgtgattatggacatcgatatgaaaaataaataaataaaactaaggaaccctggaaactaccagtgggcatgtattagccagtcattgtaacctcgtgtctagtagaacaatgtacaaggtatgtacagttcataaatttgttgtcatgtgtatgagaagtactttgtgctgatcgccttatttatattcatcaaataaaccttgtttctttctgaagtg

SEQ ID NO: 327940 - protein, 251 aa, Artificial Sequence
  derived and/or modified sequence
MSSYGYGDLFSDTWNAFTDYDVIHLKTYDSKRVCFKEAVFSLLPRMRYGLFYNTPLISGCQNTGLFRAFAQHVLHRLNITQEGPKDGKIRVTILARSTEYRKILNQNELVNALKTVSTFEVQIVDYKYRELGFLDQLRITHNTDIFIGMHGAGLTHLLFLPDWAAVFELYNCEDERCYLDLARLRGVHYITWRRQNKVFPQDKGHHPTLGEHPKFTNYSFDVEEFMYLVLQAADHVLQHPKWPFKKKHDEL

SEQ ID NO: 327941 - DNA, 399 bp, Artificial Sequence
  derived and/or modified sequence
atgctaatgttattcgtgtttggtgtcctcttgcatgaggtgtccttaagtgggcagaacgaagccccaccaaacacacattctatccctggtgagccgctctacaattatgcttcaatccgtttgccggaggaacacattcctttttttttgcacaacaatcggcacattgccaccgtctgccggaaggacagtctgtgtccctacaagaaacatctggaaaaactgaagtattgctggggctacgagaaatcctgtaagcctgaattccgcttcgggtacccggtctgcagctacgtggacatgggctggaccgacaccctcgagtcagcggaggacatattctggaagcaagccgattttgggtatgcaagggaaaggctcgaggagatgcattag

SEQ ID NO: 327942 - DNA, 375 bp, Artificial Sequence
  derived and/or modified sequence
atgctcatgcttttcgtgttcggcgttctgctgcacgaagtgtcactgagtgggcagaatgaagcccctcccaacacacattccatccccggagagcccctgtacaattatgcctcaatccgactgcctgaggaacatatcccattttttctccacaataacaggcatattgccacagtttgcaggaaggattcactctgtccctataaaaaacacttggagaaactgaagtattgctggggctatgaaaagtcatgtaagccagagtttagattcgggtatccagtctgtagctacgtggacatggggtggaccgataccctcgagagtgccgaggacatcttctggaagcaagcagatttcggctacgcgtag

SEQ ID NO: 327943 - DNA, 924 bp, Artificial Sequence
  derived and/or modified sequence
gtagttcacggctgccccggctccaggcctgtggaaatcgaatcaagggtttctggagtggagtgattccagctgctttgagctgaaggaaaagtagcctggccagtaaagcgtccgtgtgctggaggagtgcagccacccatcccggcgggccttgcaggacgaccgacaccaggaaggctttgtgccaggcccagcagccacccccagccgccttatgcaagtgggtacatgccctcgccagacgccagctttctgatctgcgtctttagattttttccatcgcctaagcgttacttctccactgatcggtgagtttagtgatggccagagctcactggaggacaatggacttggataaccaaaggtcagggcttggtcataacaatgactttattaccgggaaggacgagtcaaaaaataggaaggcctgggaaccctcaggctcgccactctaggttttagagacctgaaacatcacagaagcttctgagtggttctgaagattcaagaggtttgcaggttgctatgttaatgttgtttgtctttggagtcttacttcatgaagtctcactgagtggtcagaatgaagctcctcctaatactcacagcattccaggcgaacctctgtataactatgccagcatccgcttgccagaggagcacattcccttctttttgcacaacaataggcatattgccactgtctgtaggaaagactctctttgtccatataagaaacacctagagaagctaaagtactgctggggttatgagaaatcctgcaaaccagagttcaggtttggttacccagtttgcagctatgtcgacatgggatggacggacactcttgagtcagctgaggacatattttggaaacaagctgactttggatatgccagagagaggctggaggagatgcat

SEQ ID NO: 327944 - DNA, 399 bp, Artificial Sequence
  derived and/or modified sequence
atgctgatgttattcgtgtttggcgtgctattacatgaagtctccttaagcgggcagaatgaagcgccacccaacactcattccatcccaggcgaacccctttataactatgcttcaattcgcctcccagaagaacatatcccattcttcctgcataacaaccgtcacatcgctacagtctgtcgcaaagactccctctgtccatacaagaagcacctggaaaaactaaaatattgctggggctatgaaaagagctgcaagcctgaattcagatttggttatcctgtgtgctcctatgtcgacatgggttggaccgatacactggagtccgccgaggacatcttttggaagcaggccgattttggctacgctcgggaaaggctcgaagagatgcactag

SEQ ID NO: 327945 - DNA, 375 bp, Artificial Sequence
  derived and/or modified sequence
atgcttatgctattcgtgtttggcgtactgctgcacgaagttagtttgagcggtcaaaacgaggccccaccaaatactcatagcatccccggagagccactctacaactacgcatccattcgtctccctgaagagcacatcccttttttcctgcataataaccggcatattgcgactgtctgccgtaaagactcgctttgtccctacaagaaacatcttgagaaactgaagtactgttggggatatgaaaagagttgcaaacctgaattccgttttggataccccgtgtgctcatacgtcgatatgggttggacagacacacttgagtcagccgaggatatattttggaagcaggcagatttcggctacgcctag

SEQ ID NO: 327946 - DNA, 736 bp, Artificial Sequence
  derived and/or modified sequence
ggtgagcggcagtagccggttatgacgactccctcctctggaacagccgccgtctcctccgcctcctcctcggtagttcacggctgccccggctccaggcctgtggaaatcgaatcaagggtttctggagtggagtgattccagctgctttgagctgaaggaaaagtagcctggccagtaaagcgtccgtgtgctggaggagtgcagccacccatcccggcgggccttgcaggacgaccgacaccaggaaggctttgtgccaggcccagcagccacccccagccgccttatgcaagttttagagacctgaaacatcacagaagcttctgagtggttctgaagattcaagaggtttgcaggttgctatgttaatgttgtttgtctttggagtcttacttcatgaagtctcactgagtggtcagaatgaagctcctcctaatactcacagcattccaggcgaacctctgtataactatgccagcatccgcttgccagaggagcacattcccttctttttgcacaacaataggcatattgccactgtctgtaggaaagactctctttgtccatataagaaacacctagagaagctaaagtactgctggggttatgagaaatcctgcaaaccagagttcaggtttggttacccagtttgcagctatgtcgacatgggatggacggacactcttgagtcagctgaggacatattttggaaacaagctgactttggatatgc

SEQ ID NO: 327947 - DNA, 399 bp, Artificial Sequence
  derived and/or modified sequence
atgctgatgcttttcgtgtttggggtccttctccacgaggtttcactctccggacagaacgaagcccccccgaatactcacagcatccctggcgagcccctgtataattacgcttccataagattacccgaggagcatatcccattcttcctacataataaccggcatatcgctaccgtctgtcgcaaggattccctctgtccatataaaaaacacctcgaaaagcttaaatactgttggggttatgaaaagtcttgcaagcccgagtttcgttttggatacccagtctgttcatacgtggacatgggttggacagatactctagaatctgcagaggatatattttggaaacaggctgattttggctatgcacgagaaagactggaagagatgcattag

SEQ ID NO: 327948 - DNA, 375 bp, Artificial Sequence
  derived and/or modified sequence
atgttaatgctgttcgttttcggcgttcttcttcacgaagtgtccctaagcggtcagaatgaggccccaccaaatacacacagcatccctggggaaccactctataattatgccagcattagactcccagaagaacacatcccttttttcctccacaacaatagacacatcgcaactgtctgtcggaaggacagtctttgtccttacaagaaacatctcgagaagctgaagtactgttggggctatgaaaaatcttgtaagcctgagttccgttttggctacccggtatgttcctacgtagacatgggatggactgacactcttgaaagcgctgaagacatcttttggaagcaggccgattttggatatgcatag

SEQ ID NO: 327949 - DNA, 399 bp, Artificial Sequence
  derived and/or modified sequence
atgctgatgctgttcgtgttcggcgtgctgctgcacgaggtgagcctgagcggccagaacgaggccccccccaacacccacagcatccccggcgagcccctgtacaactacgccagcatcagactgcccgaggagcacatccccttcttcctgcacaacaacagacacatcgccaccgtgtgcagaaaggacagcctgtgcccctacaagaagcacctggagaagctgaagtactgctggggctacgagaagagctgcaagcccgagttcagattcggctaccccgtgtgcagctacgtggacatgggctggaccgacaccctggagagcgccgaggacatcttctggaagcaggccgacttcggctacgccagagagagactggaggagatgcactag

SEQ ID NO: 327950 - DNA, 375 bp, Artificial Sequence
  derived and/or modified sequence
atgctgatgctgttcgtgttcggcgtgctgctgcacgaggtgagcctgagcggccagaacgaggccccccccaacacccacagcatccccggcgagcccctgtacaactacgccagcatcagactgcccgaggagcacatccccttcttcctgcacaacaacagacacatcgccaccgtgtgcagaaaggacagcctgtgcccctacaagaagcacctggagaagctgaagtactgctggggctacgagaagagctgcaagcccgagttcagattcggctaccccgtgtgcagctacgtggacatgggctggaccgacaccctggagagcgccgaggacatcttctggaagcaggccgacttcggctacgcctag

SEQ ID NO: 327951 - DNA, 399 bp, Artificial Sequence
  derived and/or modified sequence
atgctcatgctctttgtattcggggtgctcttgcacgaagtttctctctctggacagaacgaggcccctccaaatacacattccattccgggagagccactctacaattacgcctcaatccgcctgccagaggagcatattccattctttctccataacaataggcatatcgccaccgtgtgccgtaaggattctctttgtccttacaagaagcacctcgagaagctgaagtattgctgggggtacgagaagtcctgtaagcccgaattcagattcgggtatcctgtttgctcatacgtggatatggggtggactgacacgctcgaaagtgctgaggacatcttctggaagcaggcagacttcggatacgctagggaaagattggaggagatgcattag

SEQ ID NO: 327952 - DNA, 375 bp, Artificial Sequence
  derived and/or modified sequence
atgctgatgctgttcgttttcggcgtcttgctacatgaggtgtctctaagcggccagaatgaagctccgcctaacacccatagtatcccaggcgagcctctctacaactacgcttctattcgcttgccagaggagcacatccctttcttcttgcataataatagacacatcgctaccgtctgccgaaaggactccttgtgcccctacaagaagcatttggagaagctgaaatactgctggggttacgaaaaatcctgtaagccagaatttagatttgggtatccggtctgttcctatgtggacatgggttggacagataccctcgaatccgcagaggacattttttggaagcaggccgatttcggctatgcgtag

SEQ ID NO: 327953 - DNA, 399 bp, Artificial Sequence
  derived and/or modified sequence
atgctgatgctgtttgtgtttggagtgctgctgcacgaggtgtccctgagcggccagaatgaggccccacccaacacccacagcatccctggagagcccctgtacaactatgccagcatccggctgcctgaggagcacatccccttcttcctgcacaacaacagacacatcgccaccgtgtgcaggaaggacagcctgtgcccctacaagaagcacctggagaagctgaagtactgctggggctatgagaagagctgcaagccagagttccgcttcggctaccctgtgtgcagctatgtggacatgggctggacagacaccctggagagcgctgaggacatcttctggaagcaggccgactttggctacgcccgggagcggctggaggagatgcactag

SEQ ID NO: 327954 - DNA, 375 bp, Artificial Sequence
  derived and/or modified sequence
atgctgatgctgtttgtgtttggagtgctgctgcacgaggtgtccctgagcggccagaatgaggccccacccaacacccacagcatccctggagagcccctgtacaactatgccagcatccggctgcctgaggagcacatccccttcttcctgcacaacaacagacacatcgccaccgtgtgcaggaaggacagcctgtgcccctacaagaagcacctggagaagctgaagtactgctggggctatgagaagagctgcaagccagagttccgcttcggctaccctgtgtgcagctatgtggacatgggctggacagacaccctggagagcgctgaggacatcttctggaagcaggccgactttggctacgcctag

SEQ ID NO: 327955 - DNA, 399 bp, Artificial Sequence
  derived and/or modified sequence
atgctgatgctgttcgtgttcggcgtgctgctgcacgaggtgagcctgagcgggcagaacgaggccccacccaacactcattctatccctggagaacctctttacaattacgcatccattcgactacctgaggagcacatcccattctttttacacaataatcggcacattgccacagtttgtcgcaaggacagcctttgtccttacaaaaaacatttggagaagctgaagtactgctggggttacgaaaagagctgtaaaccggagtttcggtttggatacccggtttgtagttacgtcgacatgggctggactgacactctggaaagcgctgaagacattttttggaagcaggcggattttgggtacgcgcgcgagcgacttgaggagatgcactag

SEQ ID NO: 327956 - DNA, 375 bp, Artificial Sequence
  derived and/or modified sequence
atgctgatgctgttcgtgttcggcgtgctgctgcacgaggtgagcttgtctggccagaatgaagcaccacccaacacccattccatcccaggcgaaccgctctacaactacgctagtattagactacccgaggaacatattcctttctttctccacaacaaccggcacatagcaacagtctgccgcaaggactcactctgtccctataagaagcacctggaaaagctgaagtattgttggggctacgaaaagtcgtgcaagcccgagtttagatttgggtaccccgtatgcagctacgtggatatgggctggacagacacgttggagagcgcagaagacatcttctggaaacaggctgatttcggctatgcctag

SEQ ID NO: 327957 - RNA, 399 nt, Artificial Sequence
  derived and/or modified sequence
augcugauguuauucguguuuggcgugcuauuacaugaagucuccuuaagcgggcagaaugaagcgccacccaacacucauuccaucccaggcgaaccccuuuauaacuaugcuucaauucgccucccagaagaacauaucccauucuuccugcauaacaaccgucacaucgcuacagucugucgcaaagacucccucuguccauacaagaagcaccuggaaaaacuaaaauauugcuggggcuaugaaaagagcugcaagccugaauucagauuugguuauccugugugcuccuaugucgacauggguuggaccgauacacuggaguccgccgaggacaucuuuuggaagcaggccgauuuuggcuacgcucgggaaaggcucgaagagaugcacuag

SEQ ID NO: 327958 - RNA, 375 nt, Artificial Sequence
  derived and/or modified sequence
augcuuaugcuauucguguuuggcguacugcugcacgaaguuaguuugagcggucaaaacgaggccccaccaaauacucauagcauccccggagagccacucuacaacuacgcauccauucgucucccugaagagcacaucccuuuuuuccugcauaauaaccggcauauugcgacugucugccguaaagacucgcuuugucccuacaagaaacaucuugagaaacugaaguacuguuggggauaugaaaagaguugcaaaccugaauuccguuuuggauaccccgugugcucauacgucgauauggguuggacagacacacuugagucagccgaggauauauuuuggaagcaggcagauuucggcuacgccuag

SEQ ID NO: 327959 - RNA, 399 nt, Artificial Sequence
  derived and/or modified sequence
augcugaugcuuuucguguuugggguccuucuccacgagguuucacucuccggacagaacgaagcccccccgaauacucacagcaucccuggcgagccccuguauaauuacgcuuccauaagauuacccgaggagcauaucccauucuuccuacauaauaaccggcauaucgcuaccgucugucgcaaggauucccucuguccauauaaaaaacaccucgaaaagcuuaaauacuguugggguuaugaaaagucuugcaagcccgaguuucguuuuggauacccagucuguucauacguggacauggguuggacagauacucuagaaucugcagaggauauauuuuggaaacaggcugauuuuggcuaugcacgagaaagacuggaagagaugcauuag

SEQ ID NO: 327960 - RNA, 375 nt, Artificial Sequence
  derived and/or modified sequence
auguuaaugcuguucguuuucggcguucuucuucacgaagugucccuaagcggucagaaugaggccccaccaaauacacacagcaucccuggggaaccacucuauaauuaugccagcauuagacucccagaagaacacaucccuuuuuuccuccacaacaauagacacaucgcaacugucugucggaaggacagucuuuguccuuacaagaaacaucucgagaagcugaaguacuguuggggcuaugaaaaaucuuguaagccugaguuccguuuuggcuacccgguauguuccuacguagacaugggauggacugacacucuugaaagcgcugaagacaucuuuuggaagcaggccgauuuuggauaugcauag

SEQ ID NO: 327961 - protein, 426 aa, Artificial Sequence
  derived and/or modified sequence
MAAPALGLVCGRCPELGLVLLLLLLSLLCGAAGSQEAGTGAGAGSLAGSCGCGTPQRPGAHGSSAAAHRYSREANAPGPVPGERQLAHSKMVPIPAGVFTMGTDDPQIKQDGEAPARRVTIDAFYMDAYEVSNTEFEKFVNSTGYLTEAEKFGDSFVFEGMLSEQVKTNIQQAVAAAPWWLPVKGANWRHPEGPDSTILHRPDHPVLHVSWNDAVAYCTWAGKRLPTEAEWEYSCRGGLHNRLFPWGNKLQPKGQHYANIWQGEFPVTNTGEDGFQGTAPVDAFPPNGYGLYNIVGNAWEWTSDWWTVHHSVEETLNPKGPPSGKDRVKKGGSYMCHRSQEYYDPYFQDVASEMLRRHTASRWKAFSSLEPCCSIRRHQQYAAIERLTCGKFELRCASLRKIDCLNTNIACSYSMRQDGPRLHCVD

SEQ ID NO: 327962 - protein, 428 aa, Artificial Sequence
  derived and/or modified sequence
MAAPALGLVCGRCPELGLVLLLLLLSLLCGAAGSQEAGTGAGAGSLAGSCGCGTPQRPGAHGSSAAAHRYSREANAPGPVPGERQLAHSKMVPIPAGVFTMGTDDPQIKQDGEAPARRVTIDAFYMDAYEVSNTEFEKFVNSTGYLTEAEKFGDSFVFEGMLSEQVKTNIQQAVAAAPWWLPVKGANWRHPEGPDSTILHRPDHPVLHVSWNDAVAYCTWAGKRLPTEAEWEYSCRGGLHNRLFPWGNKLQPKGQHYANIWQGEFPVTNTGEDGFQGTAPVDAFPPNGYGLYNIVGNAWEWTSDWWTVHHSVEETLNPKGPPSGKDRVKKGGLSKAHQRISQEYYDPYFQDVASEMLRRHTASRWKAFSSLEPCCSIRRHQQYAAIERLTCGKFELRCASLRKIDCLNTNIACSYSMRQDGPRLHCVD

SEQ ID NO: 327963 - DNA, 1281 bp, Artificial Sequence
  derived and/or modified sequence
atggccgcccccgccctgggcctggtgtgcggcagatgccccgagctgggcctggtgctgctgctgctgctgctgagcctgctgtgcggcgccgccggcagccaggaggccggcaccggcgccggcgccggcagcctggccggcagctgcggctgcggcaccccccagagacccggcgcccacggcagcagcgccgccgcccacagatacagcagagaggccaacgcccccggccccgtgcccggcgagagacagctggcccacagcaagatggtgcccatccccgccggcgtgttcaccatgggcaccgacgacccccagatcaagcaggacggcgaggcccccgccagaagagtgaccatcgacgccttctacatggacgcctacgaggtgagcaacaccgagttcgagaagttcgtgaacagcaccggctacctgaccgaggccgagaagttcggcgacagcttcgtgttcgagggcatgctgagcgagcaggtgaagaccaacatccagcaggccgtggccgccgccccctggtggctgcccgtgaagggcgccaactggagacaccccgagggccccgacagcaccatcctgcacagacccgaccaccccgtgctgcacgtgagctggaacgacgccgtggcctactgcacctgggccggcaagagactgcccaccgaggccgagtgggagtacagctgcagaggcggcctgcacaacagactgttcccctggggcaacaagctgcagcccaagggccagcactacgccaacatctggcagggcgagttccccgtgaccaacaccggcgaggacggcttccagggcaccgcccccgtggacgccttcccccccaacggctacggcctgtacaacatcgtgggcaacgcctgggagtggaccagcgactggtggaccgtgcaccacagcgtggaggagaccctgaaccccaagggcccccccagcggcaaggacagagtgaagaagggcggcagctacatgtgccacagaagccaggagtactacgacccctacttccaggacgtggccagcgagatgctgagaagacacaccgccagcagatggaaggccttcagcagcctggagccctgctgcagcatcagaagacaccagcagtacgccgccatcgagagactgacctgcggcaagttcgagctgagatgcgccagcctgagaaagatcgactgcctgaacaccaacatcgcctgcagctacagcatgagacaggacggccccagactgcactgcgtggactag

SEQ ID NO: 327964 - DNA, 1287 bp, Artificial Sequence
  derived and/or modified sequence
atggccgcccccgccctgggcctggtgtgcggcagatgccccgagctgggcctggtgctgctgctgctgctgctgagcctgctgtgcggcgccgccggcagccaggaggccggcaccggcgccggcgccggcagcctggccggcagctgcggctgcggcaccccccagagacccggcgcccacggcagcagcgccgccgcccacagatacagcagagaggccaacgcccccggccccgtgcccggcgagagacagctggcccacagcaagatggtgcccatccccgccggcgtgttcaccatgggcaccgacgacccccagatcaagcaggacggcgaggcccccgccagaagagtgaccatcgacgccttctacatggacgcctacgaggtgagcaacaccgagttcgagaagttcgtgaacagcaccggctacctgaccgaggccgagaagttcggcgacagcttcgtgttcgagggcatgctgagcgagcaggtgaagaccaacatccagcaggccgtggccgccgccccctggtggctgcccgtgaagggcgccaactggagacaccccgagggccccgacagcaccatcctgcacagacccgaccaccccgtgctgcacgtgagctggaacgacgccgtggcctactgcacctgggccggcaagagactgcccaccgaggccgagtgggagtacagctgcagaggcggcctgcacaacagactgttcccctggggcaacaagctgcagcccaagggccagcactacgccaacatctggcagggcgagttccccgtgaccaacaccggcgaggacggcttccagggcaccgcccccgtggacgccttcccccccaacggctacggcctgtacaacatcgtgggcaacgcctgggagtggaccagcgactggtggaccgtgcaccacagcgtggaggagaccctgaaccccaagggcccccccagcggcaaggacagagtgaagaagggcggcctgagcaaggcccaccagagaatcagccaggagtactacgacccctacttccaggacgtggccagcgagatgctgagaagacacaccgccagcagatggaaggccttcagcagcctggagccctgctgcagcatcagaagacaccagcagtacgccgccatcgagagactgacctgcggcaagttcgagctgagatgcgccagcctgagaaagatcgactgcctgaacaccaacatcgcctgcagctacagcatgagacaggacggccccagactgcactgcgtggactag

SEQ ID NO: 327965 - DNA, 1281 bp, Artificial Sequence
  derived and/or modified sequence
atggcagcccctgccctggggctggtgtgtgggaggtgccctgaacttggcttagttcttctgctgctattgttaagcttgctctgtggcgccgcagggagccaggaggctggcacaggagctggagctggctccctggccggcagttgcggttgcggtactccgcagaggcccggagcccatgggtccagtgccgcagcacatcggtactctagggaagccaacgcacccgggccggtccccggggagaggcaactggctcacagcaagatggttcccatcccggccggggtgttcacaatgggaacagacgacccgcagatcaaacaggatggagaggctcctgccagaagagtgacaattgacgcattttatatggatgcctatgaggtctctaataccgagtttgaaaagttcgttaattccacaggctatcttactgaggctgaaaagtttggagactccttcgtgtttgagggtatgctcagtgagcaggtgaaaacaaatattcaacaggctgtcgccgccgcaccctggtggctacctgtgaaaggcgcgaactggcgtcaccccgagggaccggatagcactatcttacacaggcccgatcatccagtcttgcacgtctcttggaatgacgcggtggcttattgcacctgggccgggaaaaggttgcctaccgaggccgaatgggaatatagctgcagaggcggcttacacaataggttgttcccatggggcaacaagctgcagccaaaaggccagcactacgccaatatttggcagggggaatttcccgtgaccaacacgggtgaggacggattccagggtaccgctccagtggatgcattccctcctaacggctatggcctgtacaatatcgtaggcaacgcgtgggaatggacatctgactggtggaccgtgcaccattctgttgaagagaccctcaacccgaaagggccgccctccggaaaagatagggtgaagaaaggcggatcttacatgtgtcataggtcccaagaatattacgatccatattttcaggatgtcgcctcagagatgctccgtcggcataccgctagccgctggaaagctttcagcagtctggagccctgctgcagtatccggaggcatcagcagtatgccgccatcgagagactgacttgcgggaagttcgaactccggtgtgcgtccctacgaaaaatagattgtctgaacacaaatattgcttgcagttattcaatgcggcaggatgggccacgcttgcactgcgtggactag

SEQ ID NO: 327966 - DNA, 1287 bp, Artificial Sequence
  derived and/or modified sequence
atggcagctcccgccctcgggcttgtgtgtgggaggtgccctgagctagggctcgttctgctccttttgcttctgtccctgctttgtggcgctgccggttctcaagaggccgggaccggtgcgggagccggatctctggccggatcttgtggttgtgggactccgcaacggcctggggcccatggcagctctgcagcggcacatcgctatagccgggaggccaatgctccgggtcccgtgcccggggaacgccagctagctcactcaaaaatggttcccatacccgcgggggtgttcacgatgggcaccgacgacccccagatcaaacaggacggggaagcgcccgccaggcgagtcaccatagacgcattttatatggatgcttacgaggtgtcaaataccgagtttgagaagtttgtgaacagtacaggatacctgactgaggctgaaaaattcggtgacagtttcgtgtttgaaggcatgctatccgaacaagttaaaacaaatattcaacaggccgtggcggcggctccctggtggctgcctgtgaagggcgcgaattggcgccacccagaaggcccagactccactattctgcaccgcccagatcatcctgtccttcacgtgagctggaatgacgccgtggcctattgcacttgggcgggaaagaggctaccaacagaggctgagtgggaatacagttgcagaggcgggctgcacaacagactgtttccctgggggaataaattacagcccaagggacaacattatgccaacatctggcaaggcgagtttccggtgactaatacaggggaagatggattccagggcaccgccccagtggatgcattccctcccaacggctatggcctgtataatatcgtgggcaatgcctgggagtggacctcagattggtggacagtgcaccatagcgttgaggagacgttgaaccctaaagggcctcccagtgggaaagaccgggttaagaaggggggccttagtaaagcccatcaaagaattagccaggaatactatgacccctactttcaagatgtcgccagcgagatgcttagacggcacactgcaagtagatggaaggcgttttcttcacttgagccctgttgctcgataagacgtcatcaacagtacgccgccattgaaagattgacttgtgggaagtttgaattgcgttgcgcgagcctgcggaagattgactgccttaatactaacatagcgtgtagctatagtatgcggcaggacgggcctaggcttcattgcgtcgactag

SEQ ID NO: 327967 - DNA, 1281 bp, Artificial Sequence
  derived and/or modified sequence
atggccgccccagccctgggcctggtgtgtggccgctgcccagagctgggcctggtgctgctgctgctgctgctgagcctgctgtgtggggccgccggcagccaggaggccggcactggagctggagctggcagcctggccggcagctgtggctgcggcaccccccagaggcctggggcccacggcagcagcgctgctgcccaccgctacagccgggaggccaatgcccctggccctgtgcctggagagcggcagctggcccacagcaagatggtgcccatcccagctggggtcttcaccatgggcacagatgacccccagatcaagcaggatggagaggccccagcccggcgggtgaccattgatgccttctacatggatgcctatgaggtgagcaacacagaatttgagaagtttgtgaacagcacaggctacctgacagaagctgagaagtttggagacagctttgtgtttgagggcatgctgtctgagcaggtgaagaccaacatccagcaggccgtggccgccgccccctggtggctgcctgtgaagggggccaactggaggcaccctgagggccctgacagcaccatcctgcacaggccagaccaccctgtgctgcacgtgtcctggaatgatgctgtggcctactgcacctgggccggcaagaggctgcccacagaagctgagtgggagtacagctgccggggcggcctgcacaacagactcttcccctggggcaacaagctgcagcccaagggccagcactacgccaacatctggcagggcgagttccctgtgaccaacacaggagaagatggcttccagggcacagcccctgtggatgccttccccccaaatggctacggcctgtacaacatcgtgggcaatgcctgggagtggaccagtgactggtggacagtgcaccacagcgtggaggagaccctgaaccccaagggccccccatctgggaaggacagagtgaagaagggcggcagctacatgtgccacaggagccaggagtactatgacccctacttccaggatgtggccagcgagatgctgcggcggcacacagccagccgctggaaggccttcagcagcctggagccctgctgcagcatccgccgccaccagcagtatgctgccatcgagcggctgacctgtgggaagtttgagctgcgctgtgccagcctgaggaagattgactgcctgaacaccaacatcgcctgcagctacagcatgaggcaggacggcccccggctgcactgtgtggactag

SEQ ID NO: 327968 - DNA, 1287 bp, Artificial Sequence
  derived and/or modified sequence
atggccgccccagccctgggcctggtgtgtggccgctgcccagagctgggcctggtgctgctgctgctgctgctgagcctgctgtgtggggccgccggcagccaggaggccggcactggagctggagctggcagcctggccggcagctgtggctgcggcaccccccagaggcctggggcccacggcagcagcgctgctgcccaccgctacagccgggaggccaatgcccctggccctgtgcctggagagcggcagctggcccacagcaagatggtgcccatcccagctggggtcttcaccatgggcacagatgacccccagatcaagcaggatggagaggccccagcccggcgggtgaccattgatgccttctacatggatgcctatgaggtgagcaacacagaatttgagaagtttgtgaacagcacaggctacctgacagaagctgagaagtttggagacagctttgtgtttgagggcatgctgtctgagcaggtgaagaccaacatccagcaggccgtggccgccgccccctggtggctgcctgtgaagggggccaactggaggcaccctgagggccctgacagcaccatcctgcacaggccagaccaccctgtgctgcacgtgtcctggaatgatgctgtggcctactgcacctgggccggcaagaggctgcccacagaagctgagtgggagtacagctgccggggcggcctgcacaacagactcttcccctggggcaacaagctgcagcccaagggccagcactacgccaacatctggcagggcgagttccctgtgaccaacacaggagaagatggcttccagggcacagcccctgtggatgccttccccccaaatggctacggcctgtacaacatcgtgggcaatgcctgggagtggaccagtgactggtggacagtgcaccacagcgtggaggagaccctgaaccccaagggccccccatctgggaaggacagagtgaagaagggcggcctgagcaaggcccaccagaggatcagccaggagtactatgacccctacttccaggatgtggccagcgagatgctgcggcggcacacagccagccgctggaaggccttcagcagcctggagccctgctgcagcatccgccgccaccagcagtatgctgccatcgagcggctgacctgtgggaagtttgagctgcgctgtgccagcctgaggaagattgactgcctgaacaccaacatcgcctgcagctacagcatgaggcaggacggcccccggctgcactgtgtggactag

SEQ ID NO: 327969 - DNA, 1281 bp, Artificial Sequence
  derived and/or modified sequence
atggccgcccccgccctgggcctggtgtgcggccggtgccccgagctcggtttggtgctgcttctactcctgctgagcttgctgtgtggagccgcaggctcccaggaggcgggcaccggcgccggtgcagggtcattagctggaagttgtggatgcggcacaccccagagacctggtgcacacggctctagtgcagccgcacaccggtatagtcgtgaggctaatgccccaggtccagtaccaggagaaaggcagctggcacactcaaaaatggttcctatcccagctggcgtgtttaccatgggcaccgacgacccgcagataaagcaagatggcgaagccccagccagacgggtcaccatcgatgccttctacatggacgcatatgaagtgtctaataccgaatttgagaagtttgtgaatagtaccgggtatctcaccgaggcagaaaaattcggcgattcttttgtctttgaaggcatgttaagtgagcaggtgaaaaccaacattcagcaggctgtagccgccgcgccttggtggcttccggtgaaaggggcaaactggcggcatcccgagggcccagatagcactattcttcacaggccagaccaccctgtgctacacgtgtcttggaacgatgccgttgcttactgtacttgggccggcaagaggctgcccacagaggccgagtgggagtacagttgtcgcggcggtctccacaacaggctcttcccgtggggtaacaagttacagccaaagggccaacactacgctaatatttggcagggagagtttcccgtgacaaatacaggcgaggacggtttccagggaaccgcgcctgtggatgcctttccgccaaacggatacgggctctataacattgtagggaatgcttgggaatggacgtccgattggtggaccgtgcaccacagtgttgaagagaccttgaaccctaaaggccctccttcaggtaaagacagggtgaaaaagggtggcagctacatgtgtcataggtctcaagaatattatgatccctacttccaggacgtggcttctgagatgctgcgaagacatacagcttctcgatggaaagcatttagcagcctggagccatgctgcagcattcggcgccaccagcaatacgcagccattgaaaggcttacctgtggaaagttcgagctgcgctgcgctagcttgcgtaagattgactgcctgaacaccaacatagcttgcagctactcaatgcgacaagacggtccccgcttgcattgtgtcgactag

SEQ ID NO: 327970 - DNA, 1287 bp, Artificial Sequence
  derived and/or modified sequence
atggccgcccccgccctgggcctggtgtgcggccggtgccccgagctcgggttagtgctgctgcttctcctgttgtcgttgctgtgcggcgctgctggcagccaggaagctgggactggcgctggggctggttctctggcaggatcgtgtggatgtggaacgccacagcgaccaggagcacacggtagttccgcggccgcccatcgctactcaagggaggccaatgctcctggccccgtaccaggggagcgtcagctggcacacagcaagatggtgcccattcccgctggcgtctttaccatgggtaccgacgacccgcagatcaagcaggatggggaggccccagctagaagggtcaccatcgatgctttctacatggatgcatacgaagttagtaacacagagttcgagaagttcgtgaactcaaccggataccttaccgaggcggagaaatttggcgacagtttcgtcttcgaagggatgctctctgaacaggtcaagacaaatatccagcaagctgttgctgcagccccatggtggcttcctgtcaagggcgcaaattggagacaccctgagggccccgactccaccatcctgcaccggccggaccacccagttctccatgtgtcctggaacgatgcagtcgcttactgcacgtgggctggtaaacggctcccaacagaggctgagtgggagtactcctgtcgtggagggctacataaccgactctttccctggggcaacaagttgcagcccaaaggccagcactacgcaaacatctggcaaggcgagtttcccgtgacaaatacaggggaagacggctttcagggtacggctcctgtggacgcgttcccacccaacggctacggcttatataacatcgtgggtaacgcctgggagtggacttcagactggtggaccgttcaccactctgtggaagaaacactgaacccaaaggggccaccatctggcaaagatagagtcaagaaggggggcctgagtaaagcccaccagagaattagccaggagtactatgacccttattttcaggacgtggccagcgagatgttaaggcgtcatacggcctcccgctggaaagcattctctagcttagaaccatgctgctcgataagaagacatcagcagtatgcggcaatcgagcggctcacatgtggcaagtttgaattgagatgtgcatccctccggaaaatcgactgcctgaataccaatatcgcgtgttcgtactcgatgcgacaggacggcccaagactgcattgcgtggattag

SEQ ID NO: 327971 - DNA, 1281 bp, Artificial Sequence
  derived and/or modified sequence
atggccgctccagcccttggcctagtgtgcggcaggtgcccagagctggggttggtgctcctcctgttactgctgtctctcctctgcggggctgctggctcccaggaagccggtacaggtgccggagcaggctcccttgcaggaagctgcgggtgtgggacaccgcagaggcccggagcccatggaagcagtgcagccgcacatcgttattctcgcgaagccaatgcacctggccctgtgccaggcgaacgtcagctcgcgcactctaagatggtgccaatacccgctggtgttttcactatggggaccgacgatcctcagattaagcaagacggtgaggctcccgcaagaagggtgacgattgatgccttttacatggacgcctatgaggtgagcaacacagagttcgagaagttcgtgaactccacagggtacttgacagaagccgaaaaattcggggatagcttcgtattcgagggcatgctgtctgaacaggtgaagactaacatccaacaggccgtcgctgccgctccctggtggttgccagtgaaaggtgctaactggcggcatccagagggacctgactcaaccatcctgcatcgccctgaccaccctgttcttcatgtaagctggaacgacgctgtcgcctattgcacgtgggccggaaagcggttgccaacagaggccgaatgggaatacagctgccgcggtggcctccacaataggctgtttccgtggggaaataaactgcagccgaaagggcaacactatgctaacatttggcagggtgaatttccagtcacaaataccggcgaagacggctttcagggaacagcaccagtggacgcctttccaccaaacggctacggcttatataacatcgtcggtaacgcgtgggagtggacaagtgactggtggactgtgcaccactctgtcgaagagacactgaatccgaaaggccctccttccggcaaagatcgagtgaaaaaaggcggatcctacatgtgccaccgatcccaggagtattacgacccctatttccaggacgtggccagcgagatgctgcggagacacactgcctcacggtggaaagcttttagctctctggaaccatgctgttccattaggcgacaccagcagtatgccgcaatcgagagactgacctgtgggaaatttgagctgcgttgtgcgtctctgagaaaaattgactgtttaaacactaatatcgcttgtagctattccatgcgccaggatggcccacgcctgcattgtgtcgattag

SEQ ID NO: 327972 - DNA, 1287 bp, Artificial Sequence
  derived and/or modified sequence
atggcagcaccagccctgggattggtgtgtggcagatgccctgaacttggcttggtgttgctgctgctgctcctatcactcctgtgcggtgccgcagggtcccaggaagccggtaccggggctggggctggcagcctggctggaagctgtggatgcggaaccccgcagaggcctggcgcacatggcagcagcgctgcagctcatagatattcacgcgaagctaacgccccagggccagtgcccggagagcggcaactggctcacagcaagatggtccccatacctgccggtgtcttcactatgggaacagatgatccccagattaaacaggatggtgaagccccagcgagaagagtgacaatcgacgccttctatatggacgcctatgaggtgtctaacaccgaatttgagaagttcgtgaatagcacaggctacctcaccgaagccgaaaagttcggagatagcttcgtgttcgaaggaatgttatccgaacaggtgaagacaaacattcaacaagctgtggcggcagccccttggtggctgcccgtaaaaggggcaaattggaggcaccctgagggcccagactcaactatcctgcacagaccggaccatccggtgctgcatgtatcttggaatgatgccgttgcctattgcacctgggccggaaagcgattgcctacagaagccgaatgggagtacagttgtcggggtggactacacaacaggctgttcccttggggcaacaagctgcagcccaaaggccagcactacgcgaatatttggcagggcgagttccctgtgaccaacactggggaggatggctttcaaggcaccgcgccagtggatgcctttcctcctaacggctacggtctttacaacatcgtcggcaatgcttgggagtggaccagtgattggtggacagtacaccacagtgtcgaagagactttgaaccccaaggggccaccctctgggaaggaccgggtcaaaaaaggcggactgtcaaaagcacaccagagaatttcacaggaatactacgatccctactttcaggatgtagcatccgagatgctgcgtcgccacaccgctagtaggtggaaagcgtttagctccctcgagccctgctgctccatccggagacaccagcaatacgctgccattgaacgtctgacctgcggaaaatttgaactgcgctgtgctagcctgcggaaaatcgattgcctaaacaccaatatcgcgtgcagctatagtatgcgacaagatggcccaaggctgcactgtgtcgactag

SEQ ID NO: 327973 - DNA, 1281 bp, Artificial Sequence
  derived and/or modified sequence
atggctgcgcccgcactagggctggtgtgtggacgttgccctgagctgggtctcgtcctcttgctgctgctgctctcgctgctgtgtggagcggcagggagccaggaggccgggaccggtgcgggcgcggggtcccttgcgggttcttgcggctgcggcacgccccagcggcctggcgcccatggcagttcggcagccgctcaccgatactcgcgggaggctaacgctccgggccccgtacccggagagcggcaactcgcgcactcaaagatggtccccatccctgctggagtatttacaatgggcacagatgatcctcagataaagcaggatggggaagcacctgcgaggagagttactattgatgccttttacatggatgcctatgaagtcagtaatactgaatttgagaagtttgtgaactcaactggctatttgacagaggctgagaagtttggcgactcctttgtctttgaaggcatgttgagtgagcaagtgaagaccaatattcaacaggcagttgcagctgctccctggtggttacctgtgaaaggcgctaactggagacacccagaagggcctgactctactattctgcacaggccggatcatccagttctccatgtgtcctggaatgatgcggttgcctactgcacttgggcagggaagcggctgcccacggaagctgagtgggaatacagctgtcgaggaggcctgcataatagacttttcccctggggcaacaaactgcagcccaaaggccagcattatgccaacatttggcagggcgagtttccggtgaccaacactggtgaggatggcttccaaggaactgcgcctgttgatgccttccctcccaatggttatggcttatacaacatagtggggaacgcatgggaatggacttcagactggtggactgttcatcattctgttgaagaaacgcttaacccaaaaggtcccccttctgggaaagaccgagtgaagaaaggtggatcctacatgtgccataggtcccaagagtactatgatccctattttcaagatgtggcatctgagatgttgagaagacacacagccagcaggtggaaggccttctcatctctagaaccatgctgctcaatacgtaggcatcagcaatatgcagctattgaacgtttgacatgtggcaagtttgaattgagatgtgctagtttaagaaaaatagattgcctcaacaccaacattgcctgtagctactccatgaggcaagatggacccagactccactgtgtggactga

SEQ ID NO: 327974 - DNA, 3157 bp, Artificial Sequence
  derived and/or modified sequence
atggcccgcgggacaacatggctgcgcccgcactagggctggtgtgtggacgttgccctgagctgggtctcgtcctcttgctgctgctgctctcgctgctgtgtggagcggcagggagccaggaggccgggaccggtgcgggcgcggggtcccttgcgggttcttgcggctgcggcacgccccagcggcctggcgcccatggcagttcggcagccgctcaccgatactcgcgggaggctaacgctccgggccccgtacccggagagcggcaactcgcgcactcaaagatggtccccatccctgctggagtatttacaatgggcacagatgatcctcagataaagcaggatggggaagcacctgcgaggagagttactattgatgccttttacatggatgcctatgaagtcagtaatactgaatttgagaagtttgtgaactcaactggctatttgacagaggctgagaagtttggcgactcctttgtctttgaaggcatgttgagtgagcaagtgaagaccaatattcaacaggcagttgcagctgctccctggtggttacctgtgaaaggcgctaactggagacacccagaagggcctgactctactattctgcacaggccggatcatccagttctccatgtgtcctggaatgatgcggttgcctactgcacttgggcagggaagcggctgcccacggaagctgagtgggaatacagctgtcgaggaggcctgcataatagacttttcccctggggcaacaaactgcagcccaaaggccagcattatgccaacatttggcagggcgagtttccggtgaccaacactggtgaggatggcttccaaggaactgcgcctgttgatgccttccctcccaatggttatggcttatacaacatagtggggaacgcatgggaatggacttcagactggtggactgttcatcattctgttgaagaaacgcttaacccaaaaggtcccccttctgggaaagaccgagtgaagaaaggtggattatcaaaggctcaccagaggatttcacaggagtactatgatccctattttcaagatgtggcatctgagatgttgagaagacacacagccagcaggtggaaggccttctcatctctagaaccatgctgctcaatacgtaggcatcagcaatatgcagctattgaacgtttgacatgtggcaagtttgaattgagatgtgctagtttaagaaaaatagattgcctcaacaccaacattgcctgtagctactccatgaggcaagatggacccagactccactgtgtggactgacctcccagaaggatcctcctgtccctgaaggccactctgccttcagctacaggccccagtgctgattgtgatacttaacaagggctttcagatgtctgaaacaagagtatagcataaagttaagaatgcggcttctggagagacagacttggtttcaaattcagctctgtgaccttgggtgcacagcaaagtcttcttctccccccgatgaaagaatgggaaggactcaggaaggctcaacttgcaaactccccagtatcaagtggctgccttcaaaatccaacccttctcttcccagctcatttccagtatgtattttcaaaggccatgtcatttttgaagtgcctgagaagaaaacagaactgccagcagactatgggacaaacgactaaatgccctccagacgttccagagtcctctgcctctcaggcttcagttcttcctgaaggaatctggagctggaaagcaggaagcaatttgctgtggaattttttccatcacagactccaagttcctcagcctttggactcttgaacttacaccagtgttttggcaggagcgctcgggcctttggccacagactgaaggctgcattgtcagcttccctacttttgaggttttgggactcagactgatccaccactggcttccttgctcttcaacttgaagacggcctatcgtgagactttacctcgtgattatgtgagtcaattctcctaataaactccccttcgtatgtacatataccctattacttctgtccctttagagaaccctgactaatacagtagagattgcctggacttattaataataatgactctgtttagttaatgtaacagacagataaagacaaatgagtgacacccatgcaattaaaataattttggtggggagtgagaggagttggttctccactcacagtggaaagttttagcgtatactgctgcacatgacatgggagtattttgcacttccactggaaaaaagtaaggggaataaaaacccctggattctacttgctgacttgagagtgactaaagcgatttatctgaaggttccccagggtggattcatagtggactcaggccagattctctgctgatgctttgaacttatgtccagagcatcatctccaccacaaaagagcttgcctgctctgtgtcctggccaaagagatgcacgtgctctctcactgggttgtggctcttgagtaactcctggaattacccagctggaatttctattcctttggaccacaaatttcatatcttcacctgctgcctatatcatgctaaaagatggaaatgtctcaactaaaccatgtaggtggactagcctcattaacaagataagcaatgggccattttctcactggttattaactatgtacattatctatgaaataacatatctggtcatggttactactctattctgtagggtggaatagaaaaaggtagaggatatatatttcagttgcatttttaaaattgtttattttgttttttaattgacaaataatattaggttggtgcaaaagtaattgcagtttttgccattaaaggtagacaaggctgggcacggtggctcagcacgcttgtaatcccagcactttgggaggcagaggcgggcagatcacaaggtcaggagaccgagaccatcctggctaacacggtgaaaccccatctctactaaaaatacaaaaaattagccgggtgtggtggtgggcacctgtagtcccagctactcgggaggctgaggcaggagaatggcgtgaacctgggaggtggagcttgtagtgagctgcaccactgcactccagcctgggcaacagagcaagaccccatatc

SEQ ID NO: 327975 - protein, 70 aa, Artificial Sequence [sequence omitted]

SEQ ID NO: 327976 - DNA, 213 bp, Artificial Sequence
  derived and/or modified sequence
atgggctctcttctggcccttttagctctgttgctcctatggggcgctgtggcagagggacctgctaaaaaggtgctgacactggagggcgatctagttcttggaggactattcccggttcaccagaaaggaggtcccgcagaagactgtggccccgtgaacgaacataggggcattcagaggctggaagcaatgctgttcgcactggattag

SEQ ID NO: 327977 - DNA, 590 bp, Artificial Sequence
  derived and/or modified sequence
ctttctgtctgtgcctccgtctttgtctcaacctctcaggcttgctcgctccctgcccagattttgtggcccaggctcctggctgtctgactccgggtttctgtccccttcctgcctctgagcttccgtctgggcctcccctctgggagacttgcgacttgaccagttttggcttcagcccccatctgggtccctgtctccatctgtgctggtcttcctccctgcttctccctcgcttgcctgggagctgggtcccttcgcatctctcttcttgtctgtcctttcctggtccctgtttcctcctctctttgccttcgctgcttctaatctcatcccctggagacccaggtctgcgggacccatccatcccctttggggccatgggatcgctgcttgcgctcctggcactgctgctgctgtggggtgctgtggctgagggcccagccaagaaggtgctgaccctggagggagacttggtgctgggtgggctgttcccagtgcaccagaagggcggcccagcagaggactgtggtcctgtcaatgagcaccgtggcatccagcgcctggaggccatgctttttgcactggac

SEQ ID NO: 327978 - DNA, 213 bp, Artificial Sequence
  derived and/or modified sequence
atgggcagcctgctggccctgctggccctgctgctgctgtggggcgctgtggccgagggccctgccaagaaggtgctgaccctggagggggacctggtgctgggcggcctcttccctgtgcaccagaagggcggccctgctgaggactgtggccctgtgaatgagcaccggggcatccagaggctggaggccatgctgtttgccctggactag

SEQ ID NO: 327979 - DNA, 213 bp, Artificial Sequence
  derived and/or modified sequence
atgggcagcctgctggccctgctggccctgctgctgctgtggggcgctgttgcagaagggccggctaaaaaagtgctcaccttggagggcgacctggtgttgggtgggcttttccccgtgcaccaaaaaggcgggccagctgaagattgcggacccgttaacgaacaccgcggcatacaacgacttgaagcgatgctgttcgctctggattag

SEQ ID NO: 327980 - DNA, 213 bp, Artificial Sequence
  derived and/or modified sequence
atggggtccctgttggcacttttggcactgctgctcttatggggtgctgttgctgagggtccagctaagaaggtcctcacccttgagggtgatctcgtcctggggggattatttcccgtccatcagaaaggtggccctgccgaggattgtgggcctgtgaacgagcataggggaattcagcggctggaggctatgttattcgcactggactag

SEQ ID NO: 327981 - DNA, 213 bp, Artificial Sequence
  derived and/or modified sequence
atgggcagcctgctggccctgctggccctgctgctgctgtggggcgccgtggccgagggccccgccaagaaggtgctgaccctggagggcgacctggtgctgggcggcctgttccccgtgcaccagaagggcggccccgccgaggactgcggccccgtgaacgagcacagaggcatccagagactggaggccatgctgttcgccctggactag

SEQ ID NO: 327982 - protein, 126 aa, Artificial Sequence
  derived and/or modified sequence
MSLADRGNPGNITSRLMEKEKARDCLIPMGITSENVAERFGISREKQDTFALASQQKAARAQSKGCFQAEIVPVTTTVHDDKGTKRSITVTQDEGIRPSTTMEGLAKLKPAFKKDGSTTAGETGPG

SEQ ID NO: 327983 - protein, 150 aa, Artificial Sequence
  derived and/or modified sequence
MTNAFISIIDDLSKYDVQVRAAVSSMCREAGLWSEWSQPIYVGNDEHKPLREWFVIVIMATICFILLILSLICKICHLWIKLFPPIPAPKSNIKDLFVTTNYEVLCIFIYILDSADNFLQKKKAGSSETEIEVICYIEKPGVETLEDSVF

SEQ ID NO: 327984 - DNA, 453 bp, Artificial Sequence
  derived and/or modified sequence
atgaccaatgctttcatcagcattatcgacgacctgagtaagtacgacgtccaggtcagagcggcagtttcatctatgtgtcgagaggctgggctgtggagcgagtggagccagccgatttacgtgggcaacgacgaacataaaccgcttcgggaatggtttgtcatcgtgatcatggccacaatatgttttattctgctgatcctttcactcatttgtaaaatctgtcatctgtggatcaagctcttcccacccatccctgccccgaagtctaatatcaaagatctgtttgtgaccaccaattacgaagtcctgtgcatattcatctacattctcgattccgctgacaattttctgcagaagaagaaagctggatcttctgaaaccgagatcgaggtcatctgctacatcgaaaagcccggcgttgaaactctggaggatagcgtattctag

SEQ ID NO: 327985 - DNA, 2403 bp, Artificial Sequence
  derived and/or modified sequence
aaacaaaacagaaatgcaacgctttagagtacccacggaaaacttgtttaccttgtcaccatgagtaaaagttaattcccactcctgaagagagcaaaccaactctgaaagagagtgaaaatgcagacaagacagttatcagataatggctatctggacgagagattctttcgtttgacagcagtttggttgttgggagttccagttcagctcctgcacagttgctctgtacaaatcctcctccatatttgcttagagaaaacgtgttgccatcccatcatgaaggaagctgcctgagagtttttaaccattacagccgtgatgatgaaagagtgaagaaccgcctctaagttaaaaagtgcacccagagataaggttcgttctcaatgccctgccgctgcttctcatcgcatggccaccgcatttctcaggccaggcacattgagcattggtcctgtgcctgacgctatgctagatgctggggttgcagccacgagcatagacacgacagacacggtcctcgccatcttctgttgagtactggtcggaacaagaggatcgtctgtagacaggatatgatcatcgtggcgcatgtattactcatccttttgggggccactgagatactgcaagctgacttacttcctgatgaaaagatttcacttctcccacctgtcaatttcaccattaaagttactggtttggctcaagttcttttacaatggaaaccaaatcctgatcaagagcaaaggaatgttaatctagaatatcaagtgaaaataaacgctccaaaagaagatgactatgaaaccagaatcactgaaagcaaatgtgtaaccatcctccacaaaggcttttcagcaagtgtgcggaccatcctgcagaacgaccactcactactggccagcagctgggcttctgctgaacttcatgccccaccagggtctcctggaacctcaattgtgaatttaacttgcaccacaaacactacagaagacaattattcacgtttaaggtcataccaagtttcccttcactgcacctggcttgttggcacagatgcccctgaggacacgcagtattttctctactataggtatggctcttggactgaagaatgccaagaatacagcaaagacacactggggagaaatatcgcatgctggtttcccaggacttttatcctcagcaaagggcgtgactggcttgcggtgcttgttaacggctccagcaagcactctgctatcaggccctttgatcagctgtttgcccttcacgccattgatcaaataaatcctccactgaatgtcacagcagagattgaaggaactcgtctctctatccaatgggagaaaccagtgtctgcttttccaatccattgctttgattatgaagtaaaaatacacaatacaaggaatggatatttgcagatagaaaaattgatgaccaatgcattcatctcaataattgatgatctttctaagtacgatgttcaagtgagagcagcagtgagctccatgtgcagagaggcagggctctggagtgagtggagccaacctatttatgtgggaaatgatgaacacaagcccttgagagagtggtttgtcattgtgattatggcaaccatctgcttcatcttgttaattctctcgcttatctgtaaaatatgtcatttatggatcaagttgtttccaccaattccagcaccaaaaagtaatatcaaagatctctttgtaaccactaactatgaggtcctctgcattttcatatacatcttagattcagctgacaattttctacaaaaaaagaaagctgggtccagtgagacggaaattgaagtcatctgttatatagagaagcctggagttgagaccctggaggattctgtgttttgactgtcactttggcatcctctgatgaactcacacatgcctcagtgcctcagtgaaaagaacagggatgctggctcttggctaagaggtgttcagaatttaggcaacactcaatttacctgcgaagcaatacacccagacacaccagtcttgtatctcttaaaagtatggatgcttcatccaaatcgcctcacctacagcagggaagttgactcatccaagcattttgccatgttttttctccccatgccgtacagggtagcacctcctcacctgccaatctttgcaatttgcttgactcacctcagacttttcattcacaacagacagcttttaaggctaacgtccagctgtatttacttctggctgtgcccgtttggctgtttaagctgccaattgtagcactcagctaccatctgaggaagaaagcattttgcatcagcctggagtgaaccatgaacttggattcaagactgtcttttctatagcaagtgagagccacaaattcctc

SEQ ID NO: 327986 - DNA, 453 bp, Artificial Sequence
  derived and/or modified sequence
atgaccaatgccttcatcagcatcattgatgacctgagcaaatatgatgtgcaggtgcgggctgctgtgtcctccatgtgccgggaggccggcctgtggagcgagtggagccagcccatctacgtgggcaatgatgagcacaagcccctgcgggagtggtttgtgattgtcatcatggccaccatctgcttcatcctgctgatcctgagcctcatctgcaagatctgccacctgtggatcaagctgttcccccccatcccagcccccaagagcaacatcaaggacctgtttgtgaccaccaactatgaggtgctgtgcatcttcatctacatcctggacagcgctgacaacttcctgcagaagaagaaggccggcagcagcgagacagaaattgaagtcatctgctacatcgagaagccaggagtggagaccctggaggacagcgtcttctag

SEQ ID NO: 327987 - DNA, 453 bp, Artificial Sequence
  derived and/or modified sequence
atgaccaacgccttcatcagcatcatcgacgacctgagcaagtacgacgtccaggttcgtgcggccgtgagctcaatgtgccgtgaggcaggactgtggagcgaatggagtcagccaatctatgtgggaaatgacgaacacaagccccttcgcgagtggtttgttatcgtgattatggccactatttgctttatactgcttatcctcagcttgatctgtaaaatatgtcacctctggataaagcttttccctcccattcccgcacccaaatccaatattaaggacctgttcgtcactactaattatgaagttttatgtatcttcatctatatcttggactctgcagacaatttcttgcagaagaagaaggctgggagctcagagactgagattgaagtcatttgctatattgaaaaaccaggcgttgaaactctggaggactcagtgttttag

SEQ ID NO: 327988 - DNA, 453 bp, Artificial Sequence
  derived and/or modified sequence
atgacaaacgcgtttatctccattatcgatgacctgagcaagtacgatgttcaggtgcgcgctgcggtatcctctatgtgtagagaggcgggtctctggtcagagtggagccagccaatttatgtgggcaatgacgagcacaaaccgcttagggaatggttcgtgatcgtcatcatggcgaccatttgcttcattctgctgattctgtccctcatatgcaaaatttgccacctgtggatcaagctctttcctccgattcccgctcccaagagtaacatcaaggacctgtttgtcacaacaaattacgaggtgctctgtatttttatttacatcttggactcggctgataattttctacagaagaaaaaagctggctcatcagagaccgaaatcgaagtgatctgctacatcgagaagcccggagtggagaccctggaggattctgtattctag

SEQ ID NO: 327989 - DNA, 453 bp, Artificial Sequence
  derived and/or modified sequence
atgaccaacgccttcatcagcatcatcgacgacctgagcaagtacgacgtgcaggtgagagccgccgtgagcagcatgtgcagagaggccggcctgtggagcgagtggagccagcccatctacgtgggcaacgacgagcacaagcccctgagagagtggttcgtgatcgtgatcatggccaccatctgcttcatcctgctgatcctgagcctgatctgcaagatctgccacctgtggatcaagctgttcccccccatccccgcccccaagagcaacatcaaggacctgttcgtgaccaccaactacgaggtgctgtgcatcttcatctacatcctggacagcgccgacaacttcctgcagaagaagaaggccggcagcagcgagaccgagatcgaggtgatctgctacatcgagaagcccggcgtggagaccctggaggacagcgtgttctag

SEQ ID NO: 327990 - DNA, 978 bp, Artificial Sequence
  derived and/or modified sequence
atgatcatcgtagcccacgtgctgctcatcctgctgggcgcgaccgagatcttgcaagccgacctgcttccggatgagaaaatcagtcttctccctcctgtgaattttacaatcaaagtcaccgggcttgctcaggtcttactccagtggaagcccaatcctgatcaggagcagagaaatgtcaatctggagtaccaagtcaagataaacgcaccaaaagaagatgactatgaaactcggatcacagagagcaagtgcgtcactatcttacacaaggggttctccgctagcgttaggaccatccttcaaaacgaccacagtttgttggcctcttcatgggcatcagccgagctccacgccccgcccggcagtcctggaacctccatcgtcaatctcacttgcactaccaatactaccgaggacaattattcccgacttagatcctaccaggtttctttgcattgtacttggctggtgggcacagatgcgcctgaggatacccagtactttctatattatagatatggcagttggacagaggaatgtcaggaatactccaaagacaccttaggtcggaacatcgcctgttggtttccaagaacttttatcctgtctaagggtcgtgattggctcgccgttctagtaaacggatcctccaagcatagtgccatccgtccgttcgaccagctattcgccctacacgccatcggtaatgacgagcacaagccccttagggaatggttcgtaatcgtgatcatggccaccatctgctttatcctcctgattctgtcattgatctgcaagatttgtcacctctggatcaaactcttccctcccattcccgccccaaagtccaacatcaaggacttgttcgtaactaccaattacgagaaagcaggcagctccgagaccgagatagaggtaatctgctacattgagaagccaggggttgagacgctggaagatagcgttttctag

SEQ ID NO: 327991 - DNA, 330 bp, Artificial Sequence
  derived and/or modified sequence
atgatcattgtggcccacgtcctgctcattctgctgggagcgaccgagatcctgcaggctgacctcctgccagatgaaaaaatatctctactgcctcccgtgaatttcactataaaggtgacaggcctggcacaagttctgctccaatggaagccgaacccagatcaagagcagaggaatgtcaatctggagtatcaggtgaagattaatgctcccaaagaggatgactacgaaactcgaataacagagtctaagtgtgtgaccatcttgcataaggggttttccgcctccgtgaggaccatcctgcaaaacgatcattccttactatag

SEQ ID NO: 327992 - DNA, 591 bp, Artificial Sequence
  derived and/or modified sequence
atgataatagttgctcacgtgttattgatattactcggagctacagaaattctgcaagccgatctgctgccagacgaaaaaatcagccttttgcccccagtgaacttcactattaaggtgaccggcctcgctcaggtgttacttcaatggaagccaaatcccgaccaggaacagagaaacgtgaacctcgagtatcaggttaaaataaatgctccgaaagaggatgactacgagactcgcatcacagaaagtaagtgtgtgacaatactgcacaaagggttttcggcatcagtgcgcacaatcctacaaaacgatcattccctgctcgctagttcttgggcctcagccgaattgcatgctccacctggatctcccggcacgtcaatcgtgaacttgacctgcacaaccaatactactgaggataactacagtcgccttagatcgtatcaggtgtctctgcattgtacatggttagtcggcactgatgctccagaggacacacagtacttcctgtactaccgctatggatcatggacggaggagtgtcaggaatactccaaagacacattaggtcgaaacattgcatgttag

SEQ ID NO: 327993 - DNA, 636 bp, Artificial Sequence
  derived and/or modified sequence
atgatcatcgttgcccatgttttgttaatcctgctcggagctacagaaattctgcaggcggacctgctgcccgatgagaagatctccctcctgccgcccgtcaacttcacaattaaagtgaccggtctagcgcaggtgctgttgcaatggaagccgaaccctgatcaggagcagcgtaatgtgaatctggagtatcaagtgaagattaatgctccaaaggaagacgactatgagacaaggatcacagaatccaagtgtgttacaattctgcataaggggttctctgcaagtgtgaggacgatcctgcagaacgatcacagcctgctggccagttcttgggcaagcgccgaactccatgcaccacctggcaacgatgaacacaagccattacgcgaatggtttgtcatcgtgattatggccaccatatgctttattctgctaatcctgtctctcatatgcaaaatatgtcacctgtggattaaacttttcccacctattcccgcccccaagtcaaacatcaaggacctgttcgtcacaaccaactacgagaaagctggaagtagtgagacggaaatcgaggtcatctgctacatcgagaagccaggtgtggaaaccctcgaggactcagttttctag

SEQ ID NO: 327994 - DNA, 978 bp, Artificial Sequence
  derived and/or modified sequence
atgatcatcgtggcgcatgtattactcatccttttgggggccactgagatactgcaagctgacttacttcctgatgaaaagatttcacttctcccacctgtcaatttcaccattaaagttactggtttggctcaagttcttttacaatggaaaccaaatcctgatcaagagcaaaggaatgttaatctagaatatcaagtgaaaataaacgctccaaaagaagatgactatgaaaccagaatcactgaaagcaaatgtgtaaccatcctccacaaaggcttttcagcaagtgtgcggaccatcctgcagaacgaccactcactactggccagcagctgggcttctgctgaacttcatgccccaccagggtctcctggaacctcaattgtgaatttaacttgcaccacaaacactacagaagacaattattcacgtttaaggtcataccaagtttcccttcactgcacctggcttgttggcacagatgcccctgaggacacgcagtattttctctactataggtatggctcttggactgaagaatgccaagaatacagcaaagacacactggggagaaatatcgcatgctggtttcccaggacttttatcctcagcaaagggcgtgactggcttgcggtgcttgttaacggctccagcaagcactctgctatcaggccctttgatcagctgtttgcccttcacgccattggaaatgatgaacacaagcccttgagagagtggtttgtcattgtgattatggcaaccatctgcttcatcttgttaattctctcgcttatctgtaaaatatgtcatttatggatcaagttgtttccaccaattccagcaccaaaaagtaatatcaaagatctctttgtaaccactaactatgagaaagctgggtccagtgagacggaaattgaagtcatctgttatatagagaagcctggagttgagaccctggaggattctgtgttttga

SEQ ID NO: 327995 - DNA, 839 bp, Artificial Sequence
  derived and/or modified sequence
cagaaatgcaacgctttagagtacccacggaaaacttgtttaccttgtcaccatgagtaaaagttaattcccactcctgaagagagcaaaccaactctgaaagagagtgaaaatgcagacaagacagttatcagataatggctatctggacgagagattctttcgtttgacagcagtttggttgttgggagttccagttcagctcctgcacagttgctctgtacaaatcctcctccatatttgcttagagaaaacgtgttgccatcccatcatgaaggaagctgcctgagagtttttaaccattacagccgtgatgatgaaagagtgaagaaccgcctctaagttaaaaagtgcacccagagataagggccaggcacattgagcattggtcctgtgcctgacgctatgctagatgctggggttgcagccacgagcatagacacgacagacacggtcctcgccatcttctgttgagtactggtcggaacaagaggatcgtctgtagacaggatatgatcatcgtggcgcatgtattactcatccttttgggggccactgagatactgcaagctgacttacttcctgatgaaaagatttcacttctcccacctgtcaatttcaccattaaagttactggtttggctcaagttcttttacaatggaaaccaaatcctgatcaagagcaaaggaatgttaatctagaatatcaagtgaaaataaacgctccaaaagaagatgactatgaaaccagaatcactgaaagcaaatgtgtaaccatcctccacaaaggcttttcagcaagtgtgcggaccatcctgcagaacgaccactcactactg

SEQ ID NO: 327996 - DNA, 788 bp, Artificial Sequence
  derived and/or modified sequence
tttgcaaaacgagactgttaataaaacctaccccagggtaggacggactgttcgggccaggcacattgagcattggtcctgtgcctgacgctatgctagatgctggggttgcagccacgagcatagacacgacagacacggtcctcgccatcttctgttgagtactggtcggaacaagaggatcgtctgtagacaggatatgatcatcgtggcgcatgtattactcatccttttgggggccactgagatactgcaagctgacttacttcctgatgaaaagatttcacttctcccacctgtcaatttcaccattaaagttactggtttggctcaagttcttttacaatggaaaccaaatcctgatcaagagcaaaggaatgttaatctagaatatcaagtgaaaataaacgctccaaaagaagatgactatgaaaccagaatcactgaaagcaaatgtgtaaccatcctccacaaaggcttttcagcaagtgtgcggaccatcctgcagaacgaccactcactactggccagcagctgggcttctgctgaacttcatgccccaccagggtctcctggaacctcaattgtgaatttaacttgcaccacaaacactacagaagacaattattcacgtttaaggtcataccaagtttcccttcactgcacctggcttgttggcacagatgcccctgaggacacgcagtattttctctactataggtatggctcttggactgaagaatgccaagaatacagcaaagacacactggggagaaatatcgcatgct

SEQ ID NO: 327997 - DNA, 636 bp, Artificial Sequence
  derived and/or modified sequence
atgatcatcgtggcgcatgtattactcatccttttgggggccactgagatactgcaagctgacttacttcctgatgaaaagatttcacttctcccacctgtcaatttcaccattaaagttactggtttggctcaagttcttttacaatggaaaccaaatcctgatcaagagcaaaggaatgttaatctagaatatcaagtgaaaataaacgctccaaaagaagatgactatgaaaccagaatcactgaaagcaaatgtgtaaccatcctccacaaaggcttttcagcaagtgtgcggaccatcctgcagaacgaccactcactactggccagcagctgggcttctgctgaacttcatgccccaccaggaaatgatgaacacaagcccttgagagagtggtttgtcattgtgattatggcaaccatctgcttcatcttgttaattctctcgcttatctgtaaaatatgtcatttatggatcaagttgtttccaccaattccagcaccaaaaagtaatatcaaagatctctttgtaaccactaactatgagaaagctgggtccagtgagacggaaattgaagtcatctgttatatagagaagcctggagttgagaccctggaggattctgtgttttga

SEQ ID NO: 327998 - DNA, 978 bp, Artificial Sequence
  derived and/or modified sequence
atgatcatcgtggcccacgtgctgctgatcctgctgggcgccacagagatcctgcaggccgacctgctgcctgatgagaagatcagcctgctgccccctgtgaacttcaccatcaaggtgacaggcctggcccaggtgctgctgcagtggaagcccaacccagaccaggagcagagaaatgtgaacctggagtaccaggtgaagatcaatgcccccaaggaggatgattatgagacccgcatcacagagagcaaatgtgtgaccatcctgcacaagggcttcagcgcctctgtgaggaccatcctgcagaatgaccacagcctgctggccagctcctgggccagcgctgagctgcacgcccctcctggcagccctggcaccagcatcgtgaacctgacctgcaccaccaacaccacagaggacaactacagccggctgcggagctaccaggtgtccctgcactgcacctggctggtgggcacagatgcccctgaggacacccagtacttcctgtactaccgctatggctcctggacagaggagtgccaggagtacagcaaggacaccctgggcaggaacatcgcctgctggttccccaggaccttcatcctgagcaagggccgggactggctggccgtgctggtgaatggcagcagcaagcacagcgccatccggccctttgaccagctgtttgccctgcacgccatcggaaatgatgagcacaagcccctgcgggagtggtttgtgattgtcatcatggccaccatctgcttcatcctgctgatcctgagcctcatctgcaagatctgccacctgtggatcaagctgttcccccccatcccagcccccaagagcaacatcaaggacctgtttgtgaccaccaactatgagaaggccggcagcagcgagacagaaattgaggtgatctgctacatcgagaagccaggagtggagaccctggaggacagcgtcttctag

SEQ ID NO: 327999 - DNA, 330 bp, Artificial Sequence
  derived and/or modified sequence
atgatcatcgtggcccacgtgctgctgatcctgctgggcgccacagagatcctgcaggccgacctgctgcctgatgagaagatcagcctgctgccccctgtgaacttcaccatcaaggtgacaggcctggcccaggtgctgctgcagtggaagcccaacccagaccaggagcagagaaatgtgaacctggagtaccaggtgaagatcaatgcccccaaggaggatgattatgagacccgcatcacagagagcaaatgtgtgaccatcctgcacaagggcttcagcgcctctgtgaggaccatcctgcagaatgaccacagcctgctgtag

SEQ ID NO: 328000 - DNA, 591 bp, Artificial Sequence
  derived and/or modified sequence
atgatcatcgtggcccacgtgctgctgatcctgctgggcgccacagagatcctgcaggccgacctgctgcctgatgagaagatcagcctgctgccccctgtgaacttcaccatcaaggtgacaggcctggcccaggtgctgctgcagtggaagcccaacccagaccaggagcagagaaatgtgaacctggagtaccaggtgaagatcaatgcccccaaggaggatgattatgagacccgcatcacagagagcaaatgtgtgaccatcctgcacaagggcttcagcgcctctgtgaggaccatcctgcagaatgaccacagcctgctggccagctcctgggccagcgctgagctgcacgcccctcctggcagccctggcaccagcatcgtgaacctgacctgcaccaccaacaccacagaggacaactacagccggctgcggagctaccaggtgtccctgcactgcacctggctggtgggcacagatgcccctgaggacacccagtacttcctgtactaccgctatggctcctggacagaggagtgccaggagtacagcaaggacaccctgggcaggaacatcgcctgctag

SEQ ID NO: 328001 - DNA, 636 bp, Artificial Sequence
  derived and/or modified sequence
atgatcatcgtggcccacgtgctgctgatcctgctgggcgccacagagatcctgcaggccgacctgctgcctgatgagaagatcagcctgctgccccctgtgaacttcaccatcaaggtgacaggcctggcccaggtgctgctgcagtggaagcccaacccagaccaggagcagagaaatgtgaacctggagtaccaggtgaagatcaatgcccccaaggaggatgattatgagacccgcatcacagagagcaaatgtgtgaccatcctgcacaagggcttcagcgcctctgtgaggaccatcctgcagaatgaccacagcctgctggccagctcctgggccagcgctgagctgcacgcccctcctggaaatgatgagcacaagcccctgcgggagtggtttgtgattgtcatcatggccaccatctgcttcatcctgctgatcctgagcctcatctgcaagatctgccacctgtggatcaagctgttcccccccatcccagcccccaagagcaacatcaaggacctgtttgtgaccaccaactatgagaaggccggcagcagcgagacagaaattgaggtgatctgctacatcgagaagccaggagtggagaccctggaggacagcgtcttctag

SEQ ID NO: 328002 - DNA, 978 bp, Artificial Sequence
  derived and/or modified sequence
atgatcatcgtggcccacgtgctgctgatcctgctgggcgccaccgagatcctccaggcagatctgctgccggatgaaaagattagcctgctgcctcctgtgaattttaccattaaagtgaccggactggctcaagtcctgctgcagtggaaacctaacccagaccaagagcagcggaatgtgaatctggagtatcaggtaaaaatcaacgctcccaaagaggacgactatgagaccaggatcaccgaaagcaagtgtgtcacaattttgcacaaaggattttccgcatccgtgcgcacgattctgcagaacgatcactcactgctggcatcctcttgggcgtccgctgaacttcacgccccacccgggtcccccgggacctcaatcgtcaacctgacctgtacaacgaatactacagaggacaattactcccgcctgcgctcctaccaggtctcactccactgtacctggctggtggggactgacgctcctgaggacacacagtatttcctgtactataggtacggcagttggacggaggagtgccaggagtactctaaggatactctcggacggaatatcgcttgttggtttccacggacattcattctgtctaaggggagggattggctcgccgttcttgtgaatggttctagcaaacactccgccatccggcctttcgaccagctgttcgccctgcacgccattgggaacgatgagcataaacctctccgagaatggtttgtcatcgtgatcatggctacgatttgctttattctgctgatcttatccctaatctgtaagatctgtcatctatggattaaactctttccacccattcccgcccctaagagtaatattaaagacctgttcgttaccaccaactacgaaaaggccggatccagtgagactgagatcgaagtgatctgttacattgagaaacccggagtcgaaacactggaggattccgtgttttag

SEQ ID NO: 328003 - DNA, 330 bp, Artificial Sequence
  derived and/or modified sequence
atgatcatcgtggcccacgtgctgctgatcctgctgggcgccaccgagatcctccaagccgatctgctgcccgacgagaagatcagcctgctgccccctgtgaacttcactatcaaagtgacaggcctggcccaggtactgctccaatggaagcctaacccggaccaagaacagcgcaatgtgaacctcgaatatcaagtcaaaataaatgctcctaaggaagatgactatgaaacacgtatcaccgagtctaagtgtgtgaccattcttcacaaaggcttcagcgcaagcgtaagaacaatcttgcagaacgaccactccctactgtag

SEQ ID NO: 328004 - DNA, 591 bp, Artificial Sequence
  derived and/or modified sequence
atgatcatcgtggcccacgtgctgctgatcctgctgggcgccaccgagattctccaggctgacctcctgccagatgagaagatcagcctactgccgcccgtgaatttcacaattaaagttacaggcctggcccaggtgctattacagtggaaacctaatcctgatcaggagcagaggaacgtgaatttagaatatcaagtgaaaattaatgctcctaaggaggacgactacgagacccgcatcacagagagcaagtgtgtgactattcttcacaagggatttagcgcctctgtgcggactatcctgcagaatgatcactcccttctggcttctagctgggccagtgccgagctgcatgcgcctcctgggtccccagggacaagcatagtcaatctaacgtgtaccaccaacacaacggaggacaactacagtaggctcagaagttatcaagtaagtctgcactgtacctggcttgtaggcactgatgcacctgaagacacgcagtacttcctgtattacagatatgggagctggactgaagagtgccaggagtactccaaggacacactggggcgcaatattgcctgctag

SEQ ID NO: 328005 - DNA, 636 bp, Artificial Sequence
  derived and/or modified sequence
atgatcatcgtggcccacgtgctgctgatcctgctgggcgccaccgagatccttcaggcagatctcctgcctgatgagaagataagcctgctccccccggtcaatttcacgattaaggtgactggactggcccaggtcctgctccagtggaaaccaaatcctgaccaggagcagcgcaacgtgaatttggaataccaggtaaagataaacgcccccaaagaagatgactacgagaccaggatcaccgagtctaaatgcgtcaccatcctgcataaggggttctcggcgtccgtgcgtaccattctgcagaatgatcatagcttactcgcttcatcatgggcctcggcggagctgcacgctcctccggggaatgatgagcacaaacccctcagggagtggtttgttattgtgatcatggcaaccatctgctttatattattgattctgtcactcatttgcaagatttgtcacctgtggattaaactgttcccccctattcccgccccgaagtccaacataaaggacttgttcgtgactaccaactatgagaaggcaggtagctccgagaccgaaattgaggtaatatgctacatcgagaaaccgggggtagaaactcttgaagactccgtgttttag

SEQ ID NO: 328006 - DNA, 978 bp, Artificial Sequence
  derived and/or modified sequence
atgatcattgtggcacatgtccttctcatccttctcggcgcaacagagatcctgcaggcggatctgttgcctgatgagaagatcagccttcttcctcccgtgaacttcaccataaaagttaccggacttgcgcaggtgctgttacagtggaagcctaaccccgatcaggagcaacgcaacgtgaacctggagtaccaggttaagatcaacgcaccaaaggaggatgattacgagacaaggatcaccgaaagcaaatgcgtgacaattctgcacaaagggttcagcgcatctgtgcggactattttgcaaaatgaccacagtttactggccagctcttgggcctcagccgagctgcatgctcctccaggatctccgggtacctctatcgtgaatctgacttgcactacgaatacgacggaggacaactatagcaggctcagatcgtaccaggtgtccttgcactgcacatggctagttggtacggatgcaccagaagatacccagtattttttgtactatcggtatggctcttggacggaagagtgccaggagtactctaaagatacactgggcagaaatatcgcctgctggttccctcggaccttcatcctgagtaaaggccgagattggttggccgtccttgtgaatgggtcttcaaagcactcagccataagaccattcgatcagctcttcgcgctgcacgctatcggaaatgatgaacataagccgttacgagagtggtttgtgattgtgatcatggcaactatctgttttattcttctgattctcagcctgatatgtaagatctgccatctttggattaaattatttccccctattccggctcccaagtcaaatattaaagacctttttgtcacgacaaattacgagaaggcaggctcttccgaaacagaaatcgaggtgatttgctacatcgaaaaaccgggtgtggaaaccctggaggactccgtgttttag

SEQ ID NO: 328007 - DNA, 330 bp, Artificial Sequence
  derived and/or modified sequence
atgattattgtagcacacgtccttttgatcctgctgggcgcaactgaaattttgcaggcagatctactgccggacgaaaaaatctcactcctcccacccgtgaacttcaccataaaggtcactggtttagcccaggtgctgctgcagtggaagcccaatccagatcaagagcaacggaacgtgaatctcgagtaccaggttaagattaacgcccctaaggaggacgattacgagactcgaatcactgagagcaagtgtgtaacaattctgcacaaggggtttagcgcttccgtgcgtacaatcctgcagaatgatcatagtctgttgtag

SEQ ID NO: 328008 - DNA, 591 bp, Artificial Sequence
  derived and/or modified sequence
atgatcatcgtcgcacatgtgctgcttatcctcctcggggctacagagattcttcaggccgacctcctcccagatgagaaaatatccctgcttccgcctgtaaattttacgattaaagtgacgggtctggctcaagtgctgctgcagtggaaaccaaatccagaccaggagcaacgtaacgttaatctggaataccaggtgaaaattaacgcaccaaaagaggacgactacgaaacacgcattacagaatctaagtgcgttactatcttacacaaagggttttcggccagcgtgcgtaccatcttacaaaatgaccattcattgttggccagctcttgggcttcagcagaattgcatgcaccccctgggagtccagggaccagtatcgtgaatctgacctgcaccactaatactacagaagataactattctcggcttagaagttatcaggtgtctttgcattgcacctggctggtgggaaccgacgcaccagaggatacacagtactttctttattatcgctatgggagttggacagaagagtgccaggaatattcgaaagacaccctagggaggaacattgcttgctag

SEQ ID NO: 328009 - DNA, 636 bp, Artificial Sequence
  derived and/or modified sequence
atgatcatcgtggcacatgtgttgctcatcctgctgggcgcaacagagatcttacaggccgacctccttcctgacgaaaaaatcagtcttctgcccccagtgaatttcaccatcaaagtgacgggattggcacaggtcctgttgcagtggaagcctaacccagaccaggaacagcggaatgtaaatctggagtatcaggtgaagatcaacgctcctaaagaggatgattacgaaacaagaatcacagagagcaagtgtgtgacgattctgcataaggggttcagtgccagcgtgaggacaatcctccagaatgaccactccctgcttgcgtctagctgggcgtcagcagagctacacgcaccaccaggcaacgacgaacacaagccactgagagagtggttcgtcattgtcattatggccaccatctgcttcattctactcattctgtccttgatctgcaagatctgccacctgtggataaaattgtttccacccattcctgcgcctaagtcaaatatcaaggatctcttcgtgaccacaaactacgagaaagcgggtagctctgaaactgaaattgaagtgatttgctatatcgagaagccaggagtggaaacgctggaagatagtgttttctag

SEQ ID NO: 328010 - DNA, 978 bp, Artificial Sequence
  derived and/or modified sequence
atgatcatcgtggcccacgtgctgctgatcctgctgggcgccaccgagatcctgcaggccgacctgctgcccgacgagaagatcagcctgctgccccccgtgaacttcaccatcaaggtgaccggcctggcccaggtgctgctgcagtggaagcccaaccccgaccaggagcagagaaacgtgaacctggagtaccaggtgaagatcaacgcccccaaggaggacgactacgagaccagaatcaccgagagcaagtgcgtgaccatcctgcacaagggcttcagcgccagcgtgagaaccatcctgcagaacgaccacagcctgctggccagcagctgggccagcgccgagctgcacgccccccccggcagccccggcaccagcatcgtgaacctgacctgcaccaccaacaccaccgaggacaactacagcagactgagaagctaccaggtgagcctgcactgcacctggctggtgggcaccgacgcccccgaggacacccagtacttcctgtactacagatacggcagctggaccgaggagtgccaggagtacagcaaggacaccctgggcagaaacatcgcctgctggttccccagaaccttcatcctgagcaagggcagagactggctggccgtgctggtgaacggcagcagcaagcacagcgccatcagacccttcgaccagctgttcgccctgcacgccatcggcaacgacgagcacaagcccctgagagagtggttcgtgatcgtgatcatggccaccatctgcttcatcctgctgatcctgagcctgatctgcaagatctgccacctgtggatcaagctgttcccccccatccccgcccccaagagcaacatcaaggacctgttcgtgaccaccaactacgagaaggccggcagcagcgagaccgagatcgaggtgatctgctacatcgagaagcccggcgtggagaccctggaggacagcgtgttctag

SEQ ID NO: 328011 - DNA, 330 bp, Artificial Sequence
  derived and/or modified sequence
atgatcatcgtggcccacgtgctgctgatcctgctgggcgccaccgagatcctgcaggccgacctgctgcccgacgagaagatcagcctgctgccccccgtgaacttcaccatcaaggtgaccggcctggcccaggtgctgctgcagtggaagcccaaccccgaccaggagcagagaaacgtgaacctggagtaccaggtgaagatcaacgcccccaaggaggacgactacgagaccagaatcaccgagagcaagtgcgtgaccatcctgcacaagggcttcagcgccagcgtgagaaccatcctgcagaacgaccacagcctgctgtag

SEQ ID NO: 328012 - DNA, 591 bp, Artificial Sequence
  derived and/or modified sequence
atgatcatcgtggcccacgtgctgctgatcctgctgggcgccaccgagatcctgcaggccgacctgctgcccgacgagaagatcagcctgctgccccccgtgaacttcaccatcaaggtgaccggcctggcccaggtgctgctgcagtggaagcccaaccccgaccaggagcagagaaacgtgaacctggagtaccaggtgaagatcaacgcccccaaggaggacgactacgagaccagaatcaccgagagcaagtgcgtgaccatcctgcacaagggcttcagcgccagcgtgagaaccatcctgcagaacgaccacagcctgctggccagcagctgggccagcgccgagctgcacgccccccccggcagccccggcaccagcatcgtgaacctgacctgcaccaccaacaccaccgaggacaactacagcagactgagaagctaccaggtgagcctgcactgcacctggctggtgggcaccgacgcccccgaggacacccagtacttcctgtactacagatacggcagctggaccgaggagtgccaggagtacagcaaggacaccctgggcagaaacatcgcctgctag

SEQ ID NO: 328013 - DNA, 636 bp, Artificial Sequence
  derived and/or modified sequence
atgatcatcgtggcccacgtgctgctgatcctgctgggcgccaccgagatcctgcaggccgacctgctgcccgacgagaagatcagcctgctgccccccgtgaacttcaccatcaaggtgaccggcctggcccaggtgctgctgcagtggaagcccaaccccgaccaggagcagagaaacgtgaacctggagtaccaggtgaagatcaacgcccccaaggaggacgactacgagaccagaatcaccgagagcaagtgcgtgaccatcctgcacaagggcttcagcgccagcgtgagaaccatcctgcagaacgaccacagcctgctggccagcagctgggccagcgccgagctgcacgccccccccggcaacgacgagcacaagcccctgagagagtggttcgtgatcgtgatcatggccaccatctgcttcatcctgctgatcctgagcctgatctgcaagatctgccacctgtggatcaagctgttcccccccatccccgcccccaagagcaacatcaaggacctgttcgtgaccaccaactacgagaaggccggcagcagcgagaccgagatcgaggtgatctgctacatcgagaagcccggcgtggagaccctggaggacagcgtgttctag

SEQ ID NO: 328014 - protein, 2743 aa, Artificial Sequence
  derived and/or modified sequence
MSDKMSSFLHIGDICSLYAEGSTNGFISTLGLVDDRCVVQPETGDLNNPPKKFRDCLFKLCPMNRYSAQKQFWKAAKPGANSTTDAVLLNKLHHAADLEKKQNETENRKLLGTVIQYGNVIQLLHLKSNKYLTVNKRLPALLEKNAMRVTLDEAGNEGSWFYIQPFYKLRSIGDSVVIGDKVVLNPVNAGQPLHASSHQLVDNPGCNEVNSVNCNTSWKIVLFMKWSDNKDDILKGGDVVRLFHAEQEKFLTCDEHRKKQHVFLRTTGRQSATSATSSKALWEVEVVQHDPCRGGAGYWNSLFRFKHLATGHYLAAEVDPDFEEECLEFQPSVDPDQDASRSRLRNAQEKMVYSLVSVPEGNDISSIFELDPTTLRGGDSLVPRNSYVRLRHLCTNTWVHSTNIPIDKEEEKPVMLKIGTSPVKEDKEAFAIVPVSPAEVRDLDFANDASKVLGSIAGKLEKGTITQNERRSVTKLLEDLVYFVTGGTNSGQDVLEVVFSKPNRERQKLMREQNILKQIFKLLQAPFTDCGDGPMLRLEELGDQRHAPFRHICRLCYRVLRHSQQDYRKNQEYIAKQFGFMQKQIGYDVLAEDTITALLHNNRKLLEKHITAAEIDTFVSLVRKNREPRFLDYLSDLCVSMNKSIPVTQELICKAVLNPTNADILIETKLVLSRFEFEGVSSTGENALEAGEDEEEVWLFWRDSNKEIRSKSVRELAQDAKEGQKEDRDVLSYYRYQLNLFARMCLDRQYLAINEISGQLDVDLILRCMSDENLPYDLRASFCRLMLHMHVDRDPQEQVTPVKYARLWSEIPSEIAIDDYDSSGASKDEIKERFAQTMEFVEEYLRDVVCQRFPFSDKEKNKLTFEVVNLARNLIYFGFYNFSDLLRLTKILLAILDCVHVTTIFPISKMAKGEENKGNNDVEKLKSSNVMRSIHGVGELMTQVVLRGGGFLPMTPMAAAPEGNVKQAEPEKEDIMVMDTKLKIIEILQFILNVRLDYRISCLLCIFKREFDESNSQTSETSSGNSSQEGPSNVPGALDFEHIEEQAEGIFGGSEENTPLDLDDHGGRTFLRVLLHLTMHDYPPLVSGALQLLFRHFSQRQEVLQAFKQVQLLVTSQDVDNYKQIKQDLDQLRSIVEKSELWVYKGQGPDETMDGASGENEHKKTEEGNNKPQKHESTSSYNYRVVKEILIRLSKLCVQESASVRKSRKQQQRLLRNMGAHAVVLELLQIPYEKAEDTKMQEIMRLAHEFLQNFCAGNQQNQALLHKHINLFLNPGILEAVTMQHIFMNNFQLCSEINERVVQHFVHCIETHGRNVQYIKFLQTIVKAEGKFIKKCQDMVMAELVNSGEDVLVFYNDRASFQTLIQMMRSERDRMDENSPLMYHIHLVELLAVCTEGKNVYTEIKCNSLLPLDDIVRVVTHEDCIPEVKIAYINFLNHCYVDTEVEMKEIYTSNHMWKLFENFLVDICRACNNTSDRKHADSILEKYVTEIVMSIVTTFFSSPFSDQSTTLQTRQPVFVQLLQGVFRVYHCNWLMPSQKASVESCIRVLSDVAKSRAIAIPVDLDSQVNNLFLKSHSIVQKTAMNWRLSARNAARRDSVLAASRDYRNIIERLQDIVSALEDRLRPLVQAELSVLVDVLHRPELLFPENTDARRKCESGGFICKLIKHTKQLLEENEEKLCIKVLQTLREMMTKDRGYGEKLISIDELDNAELPPAPDSENATEKGEALRQVLVNRYYGNVRPSGRRESLTSFGNGPLSAGGPGKPGGGGGGSGSSSMSRGEMSLAEVQCHLDKEGASNLVIDLIMNASSDRVFHESILLAIALLEGGNTTIQHSFFCRLTEDKKSEKFFKVFYDRMKVAQQEIKATVTVNTSDLGNKKKDDEVDRDAPSRKKAKEPTTQITEEVRDQLLEASAATRKAFTTFRREADPDDHYQPGEGTQATADKAKDDLEMSAVITIMQPILRFLQLLCENHNRDLQNFLRCQNNKTNYNLVCETLQFLDCICGSTTGGLGLLGLYINEKNVALINQTLESLTEYCQGPCHENQNCIATHESNGIDIITALILNDINPLGKKRMDLVLELKNNASKLLLAIMESRHDSENAERILYNMRPKELVEVIKKAYMQGEVEFEDGENGEDGAASPRNVGHNIYILAHQLARHNKELQSMLKPGGQVDGDEALEFYAKHTAQIEIVRLDRTMEQIVFPVPSICEFLTKESKLRIYYTTERDEQGSKINDFFLRSEDLFNEMNWQKKLRAQPVLYWCARNMSFWSSISFNLAVLMNLLVAFFYPFKGVRGGTLEPHWSGLLWTAMLISLAIVIALPKPHGIRALIASTILRLIFSVGLQPTLFLLGAFNVCNKIIFLMSFVGNCGTFTRGYRAMVLDVEFLYHLLYLVICAMGLFVHEFFYSLLLFDLVYREETLLNVIKSVTRNGRSIILTAVLALILVYLFSIVGYLFFKDDFILEVDRLPNETAVPETGESLASEFLFSDVCRVESGENCSSPAPREELVPAEETEQDKEHTCETLLMCIVTVLSHGLRSGGGVGDVLRKPSKEEPLFAARVIYDLLFFFMVIIIVLNLIFGVIIDTFADLRSEKQKKEEILKTTCFICGLERDKFDNKTVTFEEHIKEEHNMWHYLCFIVLVKVKDSTEYTGPESYVAEMIKERNLDWFPRMRAMSLVSSDSEGEQNELRNLQEKLESTMKLVTNLSGQLSELKDQMTEQRKQKQRIGLLGHPPHMNVNPQQPA

SEQ ID NO: 328015 - protein, 2758 aa, Artificial Sequence
  derived and/or modified sequence
MSDKMSSFLHIGDICSLYAEGSTNGFISTLGLVDDRCVVQPETGDLNNPPKKFRDCLFKLCPMNRYSAQKQFWKAAKPGANSTTDAVLLNKLHHAADLEKKQNETENRKLLGTVIQYGNVIQLLHLKSNKYLTVNKRLPALLEKNAMRVTLDEAGNEGSWFYIQPFYKLRSIGDSVVIGDKVVLNPVNAGQPLHASSHQLVDNPGCNEVNSVNCNTSWKIVLFMKWSDNKDDILKGGDVVRLFHAEQEKFLTCDEHRKKQHVFLRTTGRQSATSATSSKALWEVEVVQHDPCRGGAGYWNSLFRFKHLATGHYLAAEVDPDFEEECLEFQPSVDPDQDASRSRLRNAQEKMVYSLVSVPEGNDISSIFELDPTTLRGGDSLVPRNSYVRLRHLCTNTWVHSTNIPIDKEEEKPVMLKIGTSPVKEDKEAFAIVPVSPAEVRDLDFANDASKVLGSIAGKLEKGTITQNERRSVTKLLEDLVYFVTGGTNSGQDVLEVVFSKPNRERQKLMREQNILKQIFKLLQAPFTDCGDGPMLRLEELGDQRHAPFRHICRLCYRVLRHSQQDYRKNQEYIAKQFGFMQKQIGYDVLAEDTITALLHNNRKLLEKHITAAEIDTFVSLVRKNREPRFLDYLSDLCVSMNKSIPVTQELICKAVLNPTNADILIETKLVLSRFEFEGVSSTGENALEAGEDEEEVWLFWRDSNKEIRSKSVRELAQDAKEGQKEDRDVLSYYRYQLNLFARMCLDRQYLAINEISGQLDVDLILRCMSDENLPYDLRASFCRLMLHMHVDRDPQEQVTPVKYARLWSEIPSEIAIDDYDSSGASKDEIKERFAQTMEFVEEYLRDVVCQRFPFSDKEKNKLTFEVVNLARNLIYFGFYNFSDLLRLTKILLAILDCVHVTTIFPISKMAKGEENKGNNDVEKLKSSNVMRSIHGVGELMTQVVLRGGGFLPMTPMAAAPEGNVKQAEPEKEDIMVMDTKLKIIEILQFILNVRLDYRISCLLCIFKREFDESNSQTSETSSGNSSQEGPSNVPGALDFEHIEEQAEGIFGGSEENTPLDLDDHGGRTFLRVLLHLTMHDYPPLVSGALQLLFRHFSQRQEVLQAFKQVQLLVTSQDVDNYKQIKQDLDQLRSIVEKSELWVYKGQGPDETMDGASGENEHKKTEEGNNKPQKHESTSSYNYRVVKEILIRLSKLCVQESASVRKSRKQQQRLLRNMGAHAVVLELLQIPYEKAEDTKMQEIMRLAHEFLQNFCAGNQQNQALLHKHINLFLNPGILEAVTMQHIFMNNFQLCSEINERVVQHFVHCIETHGRNVQYIKFLQTIVKAEGKFIKKCQDMVMAELVNSGEDVLVFYNDRASFQTLIQMMRSERDRMDENSPLMYHIHLVELLAVCTEGKNVYTEIKCNSLLPLDDIVRVVTHEDCIPEVKIAYINFLNHCYVDTEVEMKEIYTSNHMWKLFENFLVDICRACNNTSDRKHADSILEKYVTEIVMSIVTTFFSSPFSDQSTTLQTRQPVFVQLLQGVFRVYHCNWLMPSQKASVESCIRVLSDVAKSRAIAIPVDLDSQVNNLFLKSHSIVQKTAMNWRLSARNAARRDSVLAASRDYRNIIERLQDIVSALEDRLRPLVQAELSVLVDVLHRPELLFPENTDARRKCESGGFICKLIKHTKQLLEENEEKLCIKVLQTLREMMTKDRGYGEKLISIDELDNAELPPAPDSENATEELEPSPPLRQLEDHKRGEALRQVLVNRYYGNVRPSGRRESLTSFGNGPLSAGGPGKPGGGGGGSGSSSMSRGEMSLAEVQCHLDKEGASNLVIDLIMNASSDRVFHESILLAIALLEGGNTTIQHSFFCRLTEDKKSEKFFKVFYDRMKVAQQEIKATVTVNTSDLGNKKKDDEVDRDAPSRKKAKEPTTQITEEVRDQLLEASAATRKAFTTFRREADPDDHYQPGEGTQATADKAKDDLEMSAVITIMQPILRFLQLLCENHNRDLQNFLRCQNNKTNYNLVCETLQFLDCICGSTTGGLGLLGLYINEKNVALINQTLESLTEYCQGPCHENQNCIATHESNGIDIITALILNDINPLGKKRMDLVLELKNNASKLLLAIMESRHDSENAERILYNMRPKELVEVIKKAYMQGEVEFEDGENGEDGAASPRNVGHNIYILAHQLARHNKELQSMLKPGGQVDGDEALEFYAKHTAQIEIVRLDRTMEQIVFPVPSICEFLTKESKLRIYYTTERDEQGSKINDFFLRSEDLFNEMNWQKKLRAQPVLYWCARNMSFWSSISFNLAVLMNLLVAFFYPFKGVRGGTLEPHWSGLLWTAMLISLAIVIALPKPHGIRALIASTILRLIFSVGLQPTLFLLGAFNVCNKIIFLMSFVGNCGTFTRGYRAMVLDVEFLYHLLYLVICAMGLFVHEFFYSLLLFDLVYREETLLNVIKSVTRNGRSIILTAVLALILVYLFSIVGYLFFKDDFILEVDRLPNETAVPETGESLASEFLFSDVCRVESGENCSSPAPREELVPAEETEQDKEHTCETLLMCIVTVLSHGLRSGGGVGDVLRKPSKEEPLFAARVIYDLLFFFMVIIIVLNLIFGVIIDTFADLRSEKQKKEEILKTTCFICGLERDKFDNKTVTFEEHIKEEHNMWHYLCFIVLVKVKDSTEYTGPESYVAEMIKERNLDWFPRMRAMSLVSSDSEGEQNELRNLQEKLESTMKLVTNLSGQLSELKDQMTEQRKQKQRIGLLGHPPHMNVNPQQPA

SEQ ID NO: 328016 - protein, 1204 aa, Artificial Sequence
  derived and/or modified sequence
QEPGHCHSRGPGQPSQQPLSQVPQHCAEAMNWRLSARNAARRDSVLAASRDYRNIIERLQDIVSALEDRLRPLVQAELSVLVDVLHRPELLFPENTDARRKCESGGFICKLIKHTKQLLEENEEKLCIKVLQTLREMMTKDRGYGEKLISIDELDNAELPPAPDSENATEELEPSPPLRQLEDHKRGEALRQVLVNRYYGNVRPSGRRESLTSFGNGPLSAGGPGKPGGGGGGSGSSSMSRGEMSLAEVQCHLDKEGASNLVIDLIMNASSDRVFHESILLAIALLEGGNTTIQHSFFCRLTEDKKSEKFFKVFYDRMKVAQQEIKATVTVNTSDLGNKKKDDEVDRDAPSRKKAKEPTTQITEEVRDQLLEASAATRKAFTTFRREADPDDHYQPGEGTQATADKAKDDLEMSAVITIMQPILRFLQLLCENHNRDLQNFLRCQNNKTNYNLVCETLQFLDCICGSTTGGLGLLGLYINEKNVALINQTLESLTEYCQGPCHENQNCIATHESNGIDIITALILNDINPLGKKRMDLVLELKNNASKLLLAIMESRHDSENAERILYNMRPKELVEVIKKAYMQGEVEFEDGENGEDGAASPRNVGHNIYILAHQLARHNKELQSMLKPGGQVDGDEALEFYAKHTAQIEIVRLDRTMEQIVFPVPSICEFLTKESKLRIYYTTERDEQGSKINDFFLRSEDLFNEMNWQKKLRAQPVLYWCARNMSFWSSISFNLAVLMNLLVAFFYPFKGVRGGTLEPHWSGLLWTAMLISLAIVIALPKPHGIRALIASTILRLIFSVGLQPTLFLLGAFNVCNKIIFLMSFVGNCGTFTRGYRAMVLDVEFLYHLLYLVICAMGLFVHEFFYSLLLFDLVYREETLLNVIKSVTRNGRSIILTAVLALILVYLFSIVGYLFFKDDFILEVDRLPNETAVPETGESLASEFLFSDVCRVESGENCSSPAPREELVPAEETEQDKEHTCETLLMCIVTVLSHGLRSGGGVGDVLRKPSKEEPLFAARVIYDLLFFFMVIIIVLNLIFGVIIDTFADLRSEKQKKEEILKTTCFICGLERDKFDNKTVTFEEHIKEEHNMWHYLCFIVLVKVKDSTEYTGPESYVAEMIKERNLDWFPRMRAMSLVSSDSEGEQNELRNLQEKLESTMKLVTNLSGQLSELKDQMTEQRKQKQRIGLLGHPPHMNVNPQQPA

SEQ ID NO: 328017 - DNA, 8232 bp, Artificial Sequence
  derived and/or modified sequence
atgtccgacaagatgtcttcctttcttcacatcggcgatatctgttcactatacgccgaagggagcacgaacggttttataagcacacttggacttgttgacgatcgctgcgtggtgcagcccgaaaccggggaccttaataatcccccgaagaagttccgtgactgcctgttcaagctgtgtcctatgaaccggtatagtgcccaaaaacaattttggaaggccgcaaaacctggagctaacagcaccaccgacgccgtgctcctgaataagctacaccatgctgccgacttagaaaagaaacagaacgagaccgagaatcgtaaactactagggaccgtgatacagtatggcaatgtgattcaattgcttcacttgaaatccaacaagtacttgacagtgaacaaaagactcccagcccttctggagaagaatgccatgcgggtgacactggacgaggcagggaacgagggaagttggttctacatccagcctttctacaaattgcggtccataggcgacagtgtcgttatcggcgataaagtggtgctcaacccagtcaacgctggccagcctctgcatgctagtagccaccagctggtcgataatcctggttgcaacgaagtgaatagcgtgaattgcaacacgtcttggaaaatcgtattgttcatgaagtggtcagataataaagacgacattcttaaaggaggagatgtcgtccgcctattccacgccgagcaggagaagttcctgacctgcgacgaacatcgaaagaagcagcatgtcttcttacgtaccaccggcaggcagagtgctactagtgccaccagcagcaaggcactgtgggaagtcgaagtggtgcagcatgacccatgccggggaggagccggttactggaattcactctttcgcttcaaacatctggcaacaggccactacctggccgctgaggtagatcctgacttcgaggaggagtgcctggaattccagccgtcagtggatcccgaccaagatgcttcccgttcgaggctgcgcaacgcgcaggagaaaatggtttactcattggtttccgtccctgagggcaatgatatctccagcatctttgaattggaccccacaaccctccgcggaggggattcgctggtgccgcgaaatagttacgtcagactgcgtcatctctgtaccaacacatgggtgcacagcacaaacattcccatcgataaagaggaagaaaagcccgtaatgctcaagataggaacttcaccagtgaaggaggacaaagaggcttttgccatcgtccctgtgtcaccagcggaagttagggatcttgatttcgccaatgatgcctccaaagtcctgggctctatcgccgggaaactggagaaaggcactattacccagaacgaaaggaggagcgtcaccaaattgctggaagacttggtctacttcgtcacgggaggcaccaatagtggccaggatgtgctggaagttgtcttttcaaaacccaatagagagcggcagaagcttatgcgcgagcagaatattctaaagcagatcttcaaattgctgcaggcaccattcaccgattgtggcgacggcccaatgttaaggctggaggagctaggggaccagagacacgctcccttccgacatatctgtcgtctatgttatagagtcttgcggcatagccagcaggattatcgaaaaaaccaagagtatatcgctaagcagtttggctttatgcaaaaacagatcggttatgatgtgttagcagaggacaccatcacagccttgctgcacaacaaccgcaaactgctcgaaaagcacataacagcggccgaaattgataccttcgtatccctagtgcgaaaaaaccgggagcctagatttttggattatctgtccgatctttgcgtgagcatgaataagtcgatccccgtcacacaggagttgatctgtaaagccgtgttgaaccctacaaacgctgatatcctaattgaaaccaaactggtcctctcgcgattcgagtttgagggtgttagctcgacaggcgagaacgcactcgaagccggtgaggacgaggaggaggtctggctgttctggcgggatagtaataaagaaatccggagcaagtctgttcgcgaacttgctcaggacgcaaaggagggccaaaaggaagacagagatgtcctctcctactatagatatcagctgaatctctttgcccggatgtgcctcgaccgccagtatctggctatcaacgaaatcagtggtcaactggacgtggacctgatacttaggtgcatgtctgacgaaaacttgccatatgacttaagagcgagtttttgcaggctcatgctgcatatgcacgtggatcgcgatcctcaagaacaggtgaccccggtgaagtacgcccgcttatggtctgagattccctctgagatcgccatcgatgattatgatagttccggcgcatcaaaagatgagatcaaggagagatttgcccagaccatggagtttgttgaagagtatttacgtgacgtagtctgtcaaagattcccatttagtgataaagaaaaaaacaagctcacattcgaggtggtgaacctcgcaaggaacctcatttatttcggattttacaacttctcagacctcctgaggctgaccaagattctgctcgccatcctcgactgtgtacatgtgaccactatctttccaatatccaaaatggcaaaaggagaggagaataagggaaataatgacgtggaaaagctgaagagctccaatgtaatgaggagcatccacggggtgggtgaactcatgacgcaagtagtgttgcgtggtggcggattcctcccaatgactccaatggcagccgcacccgagggaaatgtcaaacaggctgagccagagaaggaagatatcatggtcatggatacaaagttgaagattatcgaaatcctgcagtttatcctgaatgtcagactggactaccgaatcagttgtcttctgtgtatttttaagcgagagtttgatgaaagtaatagtcagacatctgagacctcttcagggaattctagtcaagagggtccatccaacgtacctggcgccttagattttgaacacatcgaggagcaggcggagggaattttcggcggcagtgaagagaatactccattagatcttgacgaccacggcggtcgaacctttctgcgggtattgctgcacttaacaatgcatgattacccccctctcgtcagcggagccctgcagctcctattccggcactttagccagcgccaggaagtgctccaggcattcaagcaggtgcagcttctcgttaccagccaggatgtggacaattacaagcagatcaaacaagacctcgatcaattgcgctcgatcgtcgagaagagtgagttatgggtgtataagggacagggccccgacgaaaccatggacggcgctagcggggagaacgagcataagaagactgaagaagggaataataaaccacagaagcatgaatccacgtcttcatacaattacagagtggttaaagagatcttgattcgcctctccaaattatgcgtacaagaatctgctagcgtgagaaagagcagaaagcaacagcagcggttgctgaggaacatgggggcacatgcggtggtgctggagttgctacagatcccatatgagaaggctgaagatactaagatgcaggagattatgcggctcgctcacgagtttcttcagaacttctgtgcaggtaaccagcagaatcaggcactccttcacaaacatattaatctgttccttaacccaggaatactggaagcagtgaccatgcagcacatctttatgaataactttcagctgtgctccgagatcaacgaaagggtagtccagcattttgtacactgtatagaaacacacggtcgcaacgtacagtacatcaagttccttcaaacaatagtcaaagccgagggcaaattcattaaaaagtgtcaggacatggtaatggcggagcttgttaactctggcgaagacgttctggtgttttataacgatcgggctagctttcagacattaattcagatgatgcggagtgaacgcgaccgcatggacgaaaacagcccactgatgtatcacatccatctggttgagcttttggctgtttgtacagaagggaagaacgtctatactgagatcaaatgtaattcactcttacccttagacgatattgttcgggtggttacacatgaggactgcattcccgaagtgaagatcgcttacataaacttcttgaatcactgctacgtggataccgaggtagagatgaaagaaatctatacttcaaaccacatgtggaagctatttgagaacttcctggtggatatctgtcgcgcgtgcaacaacacatcagacaggaagcatgccgacagcatcctggaaaaatacgtgaccgagatagtcatgtctattgtgactacctttttcagctccccatttagcgaccaatcaactaccttgcagaccaggcagcctgtgttcgtgcagctccttcagggcgtctttcgagtgtaccattgtaactggttgatgccctctcagaaggcctccgtggaaagttgcatcagggtcctctccgatgtggcaaagagtagggccatagctattccagtcgatctggacagtcaggtgaacaaccttttcctgaagtcccactcaattgtgcagaagaccgcaatgaattggagactgtctgctcgcaatgcagcgaggcgggactctgtgctagcagccagccgcgactataggaatatcatcgagcgcctgcaagatatcgtgtccgccctggaggatcgactgcgcccgctcgtgcaggccgaacttagcgtcctcgtggacgtcttacacaggcccgagctgttgtttccagaaaataccgacgccaggcgcaaatgcgagtccggggggtttatatgcaaacttataaagcacaccaagcagctattggaggagaatgaggaaaagttgtgtatcaaagtgctccaaaccctgcgcgaaatgatgacaaaggaccggggttatggcgaaaaactcatatccatcgacgagctggataacgctgagctgccccctgccccagacagcgaaaacgccaccgagaagggagaggcactgaggcaagttctggtgaatagatattatggaaacgtgcggccttctgggaggcgggagtcacttactagcttcggaaatgggcccttgtcagccgggggacctggaaagccagggggaggcggcgggggcagcgggtcctcatcaatgagtcgcggcgagatgagtttggcagaggtccaatgccacctggacaaagaaggagcgtcaaatctcgtcattgatttaattatgaatgcctcctctgatagggtgttccatgaatcgattctgttggcaatcgcgctgcttgagggcggtaatacgactatccaacactctttcttttgccgcctcaccgaggataaaaagtccgagaaattcttcaaagtgttttatgaccggatgaaggttgcccagcaggagatcaaagcaaccgtgaccgtgaatacaagcgacctcggcaataaaaagaaggacgatgaggttgaccgtgacgctccgagtagaaagaaagcaaaagagcctactacccagatcacagaggaggtaagggatcagttacttgaggcgagcgctgcaacaaggaaggctttcacaacctttaggagggaagctgatcccgatgaccactatcagcccggcgaaggaacccaggctaccgctgacaaagcaaaagatgacttggagatgagcgcagtgattactattatgcagcctatcctgcggtttctgcaacttctgtgcgagaatcacaatcgcgatctgcagaatttccttcggtgtcaaaataacaagaccaattacaatctggtgtgcgaaaccctccagtttctggattgcatctgtgggtcaaccacaggtggactcggcctgctgggattatacattaatgagaagaatgtcgctttgataaatcagaccctggaatctctcaccgagtattgtcagggaccttgccacgaaaatcagaactgcatcgccactcacgagtccaacggcattgacatcatcactgctctgatactaaatgacatcaatccactggggaaaaagcggatggacctggtcttagagcttaaaaataacgctagcaaattactgctggctataatggaatctcgacacgattcggaaaacgcagaacgcatactgtacaatatgcggccaaaggaactcgtagaagtgattaaaaaggcatatatgcagggcgaggtggagttcgaggacggagagaatggggaggacggcgcggctagtccgcggaatgttggtcacaatatatatatcctcgctcaccagctggcccggcacaacaaggagctgcagagtatgcttaagccaggcggccaggtggacggagatgaggctctggaattctacgcgaagcatacggcccagattgagatcgtgcggttagatcggacaatggaacagattgtgtttccggtcccttctatatgcgagtttctgacgaaggagagtaaattgcggatctactatacaaccgagcgcgacgagcagggttccaaaataaacgatttcttcctccgaagtgaggacttgttcaacgagatgaactggcagaagaagctaagggcacagcctgttctctattggtgtgctcgtaacatgagtttctggtcctccatttcttttaatcttgcagtgctgatgaacctgctcgtggcctttttttatcctttcaagggagtcaggggtggaacactggaaccccactggtccgggcttctgtggacagcgatgctcataagcctggccatcgtgatcgcattaccgaaaccgcacgggatacgcgccttgatagccagtactatactcaggttgatcttttccgttgggctccagccaaccctcttcctgctcggggccttcaatgtctgtaataagatcatttttttaatgtcctttgtcggtaattgcgggacttttactcgggggtacagggcgatggtcttagatgtcgagttcctgtaccatctcctgtatttagtcatatgcgccatgggcctgtttgtgcatgaattcttctacagcctactactcttcgaccttgtgtaccgcgaagaaaccctgctgaacgtgataaaatctgtgactcgcaacgggcggagtataattctcactgcagtcctcgcgctgattcttgtgtaccttttcagtatagtgggttatttgttttttaaagacgactttattctggaagtggatcgactcccgaacgagaccgcagttcccgaaacgggcgagagccttgcaagtgaattcttgttctccgatgtttgtagagtagaatcaggggagaactgttcttcccccgcccccagagaggagctggtccctgctgaagagactgagcaggacaaagaacatacgtgtgagacattgctgatgtgcattgtgacagttctcagtcacggtctgcgttccggcggaggggtcggcgatgtgctgcggaaaccatccaaagaagaacctctgttcgcagcccgtgtgatttacgaccttctattcttcttcatggtgattataattgtcttgaacctcatcttcggggttataattgacacatttgccgatctgcggtcagagaaacagaagaaggaggagattttgaagacaacatgtttcatctgcggactggagagagataaattcgacaataaaactgtgacctttgaggaacatattaaagaggagcacaacatgtggcattatttatgtttcatagttctggtaaaggtcaaggattcaaccgagtacacaggtccggaatcatacgtggcggaaatgatcaaggagaggaacctggactggtttcctcgcatgcgtgcaatgtctttggtgagcagtgattcggagggggaacagaacgaattaaggaatcttcaggaaaaattagagagcactatgaagctggtgacaaatctctccggccagctctctgagcttaaagaccagatgacggagcagagaaagcaaaaacagcgtattggcttactgggacaccctccccatatgaacgtgaatcctcagcaacccgcatag

SEQ ID NO: 328018 - DNA, 8277 bp, Artificial Sequence
  derived and/or modified sequence
atgtcagacaagatgagctcctttctccatattggcgatatctgctccctttatgcggaaggctcaaccaacggcttcatttctacactgggtctcgtcgatgataggtgtgtcgtacaacctgaaacaggcgatctcaacaatcctccaaagaaatttagggactgcctgttcaaactgtgccccatgaacaggtatagcgcgcagaagcagttctggaaggcagccaagccaggagccaatagtaccactgacgctgttcttctcaacaagctacaccacgccgcagacctggagaagaagcagaacgagaccgaaaatcggaaacttttggggactgtaattcagtatgggaacgtcattcagctcctgcatctgaagagcaacaaatatcttacagtgaacaaaagactgcccgcgctcctggagaagaatgccatgcgcgtgacgctggatgaagctggcaatgagggaagttggttctatatccagcctttctataaactgaggagcattggagattctgttgtcatcggagataaggtggtgctgaaccctgtaaacgccggccagccgctgcatgcatctagccatcagctggtggataacccggggtgtaacgaggtgaattctgtgaactgtaatactagctggaagattgttctgttcatgaagtggtctgacaacaaggacgacatcctcaaagggggggatgttgtgcgactgttccatgccgaacaggaaaagttcctgacctgcgatgagcatagaaagaagcagcatgtcttcctcaggaccacgggtagacagtccgcgacatcggccacttctagcaaagccctttgggaggtcgaggtggttcagcatgacccctgcagggggggggctggttactggaactcactgtttcggttcaagcacttagctactgggcactacctagccgctgaagtggatcccgattttgaggaagagtgcctagagtttcaaccaagcgtggacccagaccaggacgcaagtagaagccgattgaggaatgcacaggagaagatggtctattcactcgtcagtgtgcccgagggcaacgacatctcaagtatcttcgaactagaccctaccactctgaggggcggtgacagcctggtcccccgaaattcctacgtgaggctgcgacatctgtgtacaaatacctgggtacatagtacaaacattccgatagacaaggaggaagaaaaacctgtaatgctcaagatcggtacatcacctgtcaaagaggacaaggaggctttcgcaatagtgccagtgtctcccgcagaggtgcgggacctcgatttcgccaacgatgcatccaaggtgctggggagtatcgccgggaagctggagaagggcacaattactcagaatgagcgccgctcagttacgaaactactggaggatctggtgtatttcgtgaccggtgggacaaatagcggacaagatgtacttgaagtggtttttagtaagcccaaccgcgagcgtcaaaaactcatgcgcgaacagaatatcctgaagcagattttcaagctcttacaggctccattcaccgattgcggtgatggccctatgttgcgtcttgaggagcttggggaccagaggcatgcccccttcaggcatatctgtcgcctttgctatcgagtcttgcgccactcccagcaggattaccgtaaaaatcaggagtatatagcaaaacagtttggatttatgcagaagcagattgggtacgatgtgttggccgaggacacaatcacagctctgttacacaataaccgcaagctgctggaaaaacacattacggccgctgaaatcgacactttcgtcagtcttgtgagaaaaaaccgcgaacctcgcttcctcgactacctcagcgacctatgtgtgtcaatgaataaaagtatccctgtgacccaggaactaatctgtaaggccgtgttgaatcctactaacgctgacattctcattgagaccaagctggttctctcccggtttgaatttgagggagtgtctagtactggcgagaacgcattagaggcaggtgaagacgaggaagaagtgtggcttttttggagggactctaataaggagatccgttcaaagtccgtccgcgaactggctcaggacgcaaaggaaggccaaaaggaggaccgggatgtactgtcctattacagataccagctcaatctctttgctcgcatgtgtttggacagacagtaccttgctattaatgaaatctcggggcagctggacgtagatctgattttgagatgcatgtctgacgaaaacctgccatacgatctgagggcatctttctgcaggctgatgctgcatatgcatgttgatcgggatcctcaggagcaggtgactcccgtgaagtacgctcggctgtggtcagaaattccgtcggaaattgcaattgacgattacgactcctctggcgcctcaaaggacgaaatcaaagaaagattcgcccagactatggagttcgtggaagagtacctgcgagacgtagtttgtcagaggtttcctttcagtgataaagagaagaataaacttacattcgaggttgtcaaccttgccaggaatttgatatatttcggcttttacaacttttccgacctgctgaggttgaccaagattttgctggccatccttgactgcgtccatgtgacgacaatattcccaatatcgaagatggccaaaggcgaagaaaacaagggcaataatgacgtggagaagctgaaatcaagtaacgtcatgcggtccatacatggagtcggcgagctgatgacacaagtggtactcagaggtggcgggtttttgccaatgacccccatggccgcagctccagagggcaatgtgaagcaggccgagcctgaaaaggaagatatcatggtgatggatacgaaactgaaaatcatcgagattctgcagttcattctgaacgtaaggttagactatcgcattagctgcctactttgcatcttcaagagggagtttgacgagtcgaattcccaaacctccgaaacttccagcggaaactcttctcaggaagggcctagcaacgtacccggagccctggacttcgaacacattgaggagcaggccgagggcatctttggggggtctgaggagaacacccccttagatctggatgatcacggcggccggacctttctgcgggtgctcctgcaccttacaatgcatgattatccgcccctggtgagcggcgccctccagttgctgtttaggcatttttctcagcgtcaagaggtcctgcaggccttcaagcaggtgcagcttctggttaccagccaagacgtcgataattataaacaaattaagcaggacctggatcagctccgctctattgttgagaagtccgaattgtgggtgtataaggggcaagggccggacgaaaccatggatggagctagtggcgaaaacgaacacaaaaaaacagaggagggcaacaacaagccccaaaagcacgagagcacttcctcatataactaccgagtcgtgaaggagatcctgataagactgagcaaactctgcgttcaagagtccgccagtgtgagaaagagtcgtaaacaacagcaaagattgctccggaacatgggcgcacacgctgttgtcctggagttactacaaatcccctacgagaaagctgaggatacaaagatgcaagagatcatgagattagcgcacgaatttttacagaatttttgtgcaggaaaccagcagaaccaagccctgctgcataagcatataaatcttttcctgaatcctggcatcctggaagcggtgacaatgcaacacatcttcatgaataatttccagctctgctcagagatcaatgaaagagtagttcaacatttcgtgcattgcattgaaactcacgggagaaatgttcaatacatcaaatttttgcagaccatagtgaaggcagaaggaaaattcattaagaagtgtcaggatatggtcatggccgagctggttaatagcggggaggacgtgctcgtattctataacgacagggcctcattccagactttaatccagatgatgcgaagcgaacgggaccggatggatgagaatagcccccttatgtaccacattcacctcgtcgagctgctggctgtgtgcaccgagggcaaaaacgtttataccgagatcaagtgtaacagcctcctccccctcgacgatatcgtgcgcgtcgtcactcatgaagattgtattcccgaggttaagatcgcctatatcaactttttaaatcattgctacgtcgatacagaggtggagatgaaggaaatatacacaagtaaccacatgtggaaattattcgagaacttcctggtcgatatttgccgcgcatgcaacaacacgagtgatcggaagcacgcggatagcatcctggagaaatacgttaccgagatcgtgatgagtatcgtgacaacatttttttcatcccccttcagcgaccaatccacgacattgcagacacgacagccagttttcgtgcagttgttgcagggggttttcagggtttaccactgtaattggctaatgccatcccagaaggcgtctgtcgagtcatgcatcagggttctgagtgatgttgcaaagtcacgtgccatcgcgataccagtcgatctggattctcaggttaacaacctgtttctcaagagccattcgatagtccaaaagaccgctatgaactggagactcagcgctcgtaacgcggctagacgagactcggtcttggccgcctcccgggactatcggaacatcattgagcgactccaagatattgtaagcgcgctggaggaccggctcaggccgctcgtccaggctgaactgagcgtacttgttgacgtgctgcatcgcccagagttgctgtttcccgaaaacactgacgcacggcggaaatgcgagtccggcggatttatatgcaagctaattaaacatacgaagcaactgcttgaagagaacgaggaaaaactttgtatcaaggtgttgcagacccttagggaaatgatgaccaaggatagagggtatggtgagaaattaattagcatcgatgagctcgacaatgccgaactgccacccgctcccgactcagagaacgccaccgaagagttagaaccttcccccccgctccgccagttagaggatcacaaacgcggagaggccctgcggcaggtgcttgtcaatcggtattatggtaacgtgaggccttctggacggagagaatccttgacctcgttcggcaatggcccacttagcgctggcggtccagggaaaccaggagggggggggggcgggtccgggtctagtagcatgtcacggggcgaaatgagcctagccgaagtgcagtgtcatctggacaaagaaggcgcatcaaacctcgtgatcgaccttatcatgaacgcatcctccgatagagtcttccacgagtctattttgttggcaatcgcccttctagagggcggcaacaccactatccaacattcattcttttgtaggctaacagaggataaaaaatctgagaagtttttcaaggttttctacgatagaatgaaggtggctcagcaggagatcaaggccaccgttaccgtgaatactagcgacctgggaaataaaaagaaggacgatgaagtggatagagacgcacctagtcgtaagaaggctaaagaacctaccacgcagattactgaagaggtccgagatcagttgttagaggcatcagctgctacgcggaaggcctttacgaccttccggcgcgaagcagatcctgatgaccactaccagccaggcgaaggcactcaggcgaccgccgacaaagcgaaggatgatcttgaaatgtccgctgtgattaccatcatgcaaccgatcctgcgcttcctccaattactgtgcgaaaatcacaacagagatctgcagaacttccttcgctgtcagaacaacaaaaccaactataatctcgtgtgcgaaacactccagttcctggactgcatttgtgggtcaactaccggtggcctcggattgctggggctgtacatcaacgagaaaaacgtagccttaatcaaccagacgctcgagtcactgactgagtactgccaaggcccttgtcatgaaaatcagaattgtatcgccacccatgagtccaacggtatcgatatcattaccgcactgatcttgaatgacattaatcccctgggcaagaagcgcatggacctcgtcctggagctgaaaaacaatgctagcaaactactactcgctataatggaatctaggcacgacagcgaaaatgctgagaggatcctgtacaatatgcgccctaaagagctggtggaagtgataaagaaggcttacatgcagggagaagtggaattcgaggacggcgagaatggggaagacggcgctgcctctcctcggaatgtgggccataatatttatatcctagctcaccaacttgctagacataataaggaactgcagtccatgctgaaacctgggggtcaggtggatggagacgaggcattggagttctatgctaaacacacagcccagattgaaattgtaaggctcgatagaaccatggaacagatcgtgttcccggttccttcgatctgcgaattccttaccaaggagtccaagttgcgtatctactatacaaccgaacgggacgagcaggggtctaaaatcaacgacttcttcctgcgctccgaagacctgtttaatgagatgaattggcagaaaaagctccgtgctcaaccagtgctctactggtgtgccagaaatatgtcattttggtccagcatctccttcaacctggcggttctgatgaaccttctggtcgcctttttctacccgttcaaaggtgtgcgcggcggaacgttagaaccacactggtcaggactcctctggaccgctatgctgatctcccttgctattgtaattgccttaccaaagccccacggcatcagagccttgatcgcctcaacaatattaaggctcatctttagcgtcgggctgcaacctactttgttccttctcggggcttttaacgtgtgcaacaagattatctttctgatgtcttttgtcggtaactgcggcacattcacacgaggctatagagccatggtgctggatgtggagttcctgtatcacctgctctacctcgtgatttgtgccatgggactttttgtgcacgaattcttttacagcctgctgctcttcgacctcgtgtacagagaagagacgctgctaaatgtgattaaaagcgttacccgcaatggcaggagcatcatcctgactgccgtgctggcgctcatcctagtctacctgttttccatcgtcggatacctgttcttcaaggacgacttcatccttgaggttgatcgcctgccaaatgagacagctgtcccggaaaccggcgagagcctggcctcagagttcctgttttccgacgtctgccgagtggagagcggcgagaactgctcatctcccgccccgagagaggagttggttcccgcggaggaaacagagcaggacaaggaacacacctgcgaaactctgctcatgtgcatagtgaccgtcctgtcacatgggctgcggagtggaggtggagtcggcgatgtgctaagaaaacccagtaaggaagaacctctgttcgccgcccgagtgatatacgacctcctgttcttttttatggtgatcatcatcgtcttgaatctcattttcggggtgattattgatacattcgctgacttgcggtctgagaagcagaagaaggaagagattctgaaaacaacctgttttatctgcggtctggagcgcgacaagtttgataacaaaaccgtaaccttcgaggagcatatcaaggaagaacacaacatgtggcattatctctgtttcattgtgctcgtgaaagtgaaagactctaccgaatatacaggaccggaatcctacgttgccgaaatgatcaaggagagaaatcttgactggtttccaaggatgcgtgctatgagtttggtgtcctcagattctgaaggggaacagaacgagctacgcaatctgcaggagaaactcgaaagcaccatgaagctggtcaccaacctctcaggtcagttgtccgaattaaaggaccagatgacagagcagagaaaacagaagcagcggatcggactcctcggccatccaccacatatgaacgtgaatccccagcaacccgcctag

SEQ ID NO: 328019 - DNA, 3615 bp, Artificial Sequence
  derived and/or modified sequence
caggagccaggtcattgtcacagtcgggggccgggtcagccaagccagcagcctctctcgcaggtcccccaacattgtgcggaggcgatgaactggcgcctctctgcaaggaatgccgcccgcagagactccgtgcttgctgctagccgcgattacagaaatattatcgagcgccttcaggatatagtgagtgccttggaggaccgcctgcgccctctagtgcaggccgagctcagtgttttggttgatgtgctgcaccggcccgagttgttgttcccagagaatactgacgcccgccgcaaatgcgagagcggtggtttcatttgcaaattgatcaagcacaccaagcagttactcgaggagaacgaggaaaaactgtgtattaaagtgctgcagactctgagagaaatgatgactaaggataggggctacggggaaaaactcatctcaattgacgaactggacaatgcagaactgccgcctgcacccgactcggaaaatgcaactgaggaattggagccttccccccctttgcgacagcttgaggatcacaagagaggtgaagccctgcgacaggtcctggttaataggtattatggcaacgtcaggccgtctggcaggagagagtcgctcacctcctttggtaacgggcccttgtcagcgggcgggcccggaaaaccaggaggcggggggggcgggagcgggagcagtagcatgtctaggggggagatgtccctggctgaggtgcagtgtcatctcgacaaggagggcgcgtctaacctggttattgatcttattatgaacgccagctctgatcgcgtttttcacgagagtattttgttggcaatcgccttactggaagggggtaatacaaccatccagcacagttttttctgccgtctgaccgaagataaaaaaagtgaaaagtttttcaaggttttctatgatagaatgaaggttgcacaacaagaaataaaggcgacagtaactgttaacactagcgatctggggaacaaaaagaaggatgacgaggtggaccgggacgcacccagtaggaaaaaagcaaaagagcccaccacccagattactgaggaagttagggatcagctcctcgaagcttcagctgctactagaaaggctttcaccacctttcgacgcgaggctgaccctgacgatcattaccagcctggagaaggaacacaggctaccgctgataaggctaaggatgatttagagatgagcgcggtgataactattatgcagcctatcctgagattcctccagttgctgtgcgaaaaccacaaccgcgatctgcaaaattttctcagatgtcaaaataataaaactaactataatcttgtgtgcgagaccctacaatttctcgattgcatctgcggatcgaccactggcggactcggtctgctgggattgtacattaacgagaaaaacgtcgccctgatcaatcagactctcgaatccttaactgagtactgtcaaggaccttgtcatgagaatcagaattgcatcgctacacacgagagcaacggtatagacatcatcactgcactcatcctcaacgatattaacccccttgggaagaaaaggatggacctcgtcctcgagttaaagaataacgcctctaagttgctcctcgcaataatggagagcagacacgactcggaaaacgcggagagaattttgtacaatatgaggccgaaagagctcgttgaggtgatcaaaaaagcctatatgcagggagaagtggaatttgaagatggggagaacggagaggacggtgcagcaagtcctaggaacgtcggccacaacatttacattctcgcccatcaacttgcaagacataacaaggaactgcagtctatgttgaagccgggcggtcaggtcgacggagatgaggctctcgagttttacgcaaagcatacagcccaaatcgaaatcgttcgactggacaggacaatggagcagattgtgtttccggtgcccagtatatgtgaatttttgactaaagaatccaagttgagaatatattataccactgagcgggacgagcagggtagcaagatcaatgactttttccttcggtccgaggacctcttcaatgagatgaactggcagaaaaagctgagggctcaaccagttctctattggtgcgcacgaaatatgagcttttggagctctatctcattcaatctcgccgtgctcatgaacctgttggtcgcctttttctacccatttaagggagtgagaggcggtactttggaacctcactggtcgggcctcctatggactgccatgctcataagtttagctatcgtaattgccctgcccaaacctcacggcattagggccctgatcgccagcactatactccgactgatcttctcagtggggctgcagcctactctattcctattaggcgcctttaatgtgtgcaacaagattatttttctaatgtcctttgtggggaactgtggtacctttactcggggctacagagcgatggtgctcgatgtggaatttctctatcatctgctttatctcgttatctgcgccatgggactcttcgtgcatgaattcttctattccttattactttttgaccttgtgtacagggaggagaccttgctgaacgttataaaaagtgtgacacggaatgggagatccatcattttgaccgctgtgttggcactgatcctggtgtacctgtttagcatcgtaggctatttgttcttcaaggacgatttcatcctggaggtggaccgccttcccaacgagaccgcagtaccagagaccggagaaagcctagcaagcgagtttctgttttctgatgtgtgcagagtggaatcaggtgagaattgtagctccccagcccctagagaggaactggtgcccgccgaagagactgagcaggacaaagagcatacctgcgagacacttcttatgtgtattgtgacagtgttgagccacggactgcgatccggaggcggagtaggggatgtcctgcgcaagccgtcaaaggaagaaccgctgttcgctgccagggtgatctatgacttgctgttcttctttatggtgattattatcgtgttgaacctgattttcggagtgatcattgatacatttgcagatctacgttctgaaaaacagaaaaaagaggaaatccttaagactacctgcttcatctgcgggctggaacgagacaagttcgacaataagaccgtaaccttcgaggaacatatcaaagaggagcacaatatgtggcactatttatgttttattgtcctcgtgaaagtcaaggacagcacagagtacacaggcccagaatcatatgttgccgagatgataaaagagcgcaatctagactggttcccacggatgagagcgatgtctttagtgagttccgattccgaaggtgagcagaatgagcttcgcaacttgcaagagaaactcgagtccacgatgaaacttgtgacaaatctgtcaggccaactctccgagctgaaggaccagatgaccgaacagagaaaacagaagcaacggatcggtttgcttggccacccgccccacatgaacgtcaatccacagcagcccgcttag

SEQ ID NO: 328020 - DNA, 10197 bp, Artificial Sequence
  derived and/or modified sequence
gcagtaaccatgtggatgtgctgctgaagcgtttcctcaagctcgctggggtgggaggagaggaggaggaggaggtggtggtggaggaggaggcagggggtggagagagagaaagcgcacgccgagaggaggtgtgggtgttccgcttccatcctaacggaacgagctccctcttcgcggacatgggattacccagcggctgctaacccctctcctcgccctgctcccccaaaccggcgtggctccccgggcaccaaggagctgactacagaggagcaggatttgcacccctcgctgggcttgctttggcaacagagtgcctgacccaggtcaggattttcaagaaagacatgtctgacaaaatgtctagcttcctacatattggagacatttgttctctgtacgcggagggatcgacaaatggatttattagcaccttgggcctggttgatgatcgttgtgttgtacagccagaaaccggggaccttaacaatccacctaagaaattcagagactgcctctttaagctatgtcccatgaaccgctactctgcccaaaagcagttctggaaagccgctaagcctggggccaacagcaccacagacgcagtgctactcaacaaactgcaccacgctgcagacttggaaaagaagcagaatgagacagaaaacaggaaattgctggggaccgtaatccagtatggcaatgtgatccagctcctgcatttgaaaagtaataaatacctaacagtgaataagaggcttcctgctctgttggagaagaatgccatgagagtcacattggacgaggctggaaatgaagggtcctggttttatattcagccattctacaagctgcgatccattggagacagcgtggtcataggtgacaaggtggttctgaaccccgtcaatgctggtcagcccctacatgctagcagccatcaactggtagataacccaggctgcaatgaggtcaattccgtcaactgcaatacaagctggaaaatagtccttttcatgaaatggagtgataacaaagacgacatattaaaggggggtgacgtggtgaggctgtttcatgctgagcaggagaagtttctcacctgtgacgaacacaggaagaagcagcacgtcttcctgagaaccacgggccggcagtcggccacatctgccaccagttcaaaagccctgtgggaggtggaggtggtccagcatgacccatgtcggggcggagcagggtattggaacagccttttccgtttcaagcatctggccacggggcattacttggcagcagaggtagaccctgactttgaggaagaatgcctggagtttcagccctcagtggaccctgatcaggacgcctctcgaagtaggttgcggaatgcccaagaaaagatggtatactccctggtctctgtgcctgaaggcaatgacatctcctccattttcgagctagatcccaccactctgcgtggaggtgacagccttgtcccaaggaactcttatgttcggctcagacacctatgtactaatacctgggttcacagcacaaatattcctattgacaaggaagaagaaaagcccgtgatgctgaaaattggcacctctcctgtgaaggaggataaggaagcatttgccatagttccggtttctcctgctgaagttcgggacctggactttgccaatgatgccagcaaggtgctgggctccattgctgggaagctagagaagggcaccatcacccagaatgaaaggaggtctgtaaccaagctgctagaagatttggtttacttcgtcactggtggaactaattctggtcaagatgttctcgaagttgtcttctccaagcccaacagagaacggcagaaactgatgagagaacagaatattctcaagcagatcttcaagttgttacaagccccattcacagactgcggtgatggcccaatgcttcggctggaagagctcggggaccagcggcacgctcctttcagacacatctgccggctctgctacagggtgctgagacactcgcagcaagactacaggaagaaccaggagtatatagccaagcagtttggcttcatgcagaagcagattggctatgatgtgttggctgaagacactatcactgccctgctccacaataatcggaaactcctggaaaaacacattaccgcggcagagattgacacatttgtcagcctggtgcgaaagaacagggagcccagattcttagattacctctccgacctctgtgtctccatgaacaaatcaattccagtgacccaggaactgatatgtaaagctgtgctgaaccccaccaacgctgacatcctgattgagaccaagttggttctttctcgttttgaatttgaaggtgtctcttccactggagagaatgctctggaggcaggagaagacgaggaagaggtgtggctgttttggagggacagcaacaaagagattcgcagcaagagtgtgagggaattggctcaggatgctaaagaagggcagaaggaggaccgagacgttctcagctactacagatatcagctgaacctctttgcgaggatgtgtctggaccgccaatacctggccatcaacgaaatctcaggccagctggatgtcgatctcattctccgctgcatgtctgacgagaacctgccctatgacctcagggcgtccttctgccgcctcatgcttcacatgcatgtggaccgagatccccaggaacaagtcacccccgtgaaatatgcccgcctctggtcggagattccctcggagatcgccattgacgactatgatagtagtggagcttccaaagatgaaattaaggagagatttgctcagaccatggagtttgtggaggagtatttaagagatgtggtttgtcagaggttccctttctctgataaagagaagaataagcttacgtttgaggttgtaaatttagctaggaatctcatatactttggtttctacaacttctctgaccttctacgattaactaagatccttctggccatattggactgtgtacatgtgacaacaatcttccccattagcaagatggcgaaaggagaagagaataaaggtaacaatgatgtggagaagctgaagagcagtaacgtgatgagatctattcatggcgtgggagagctgatgacccaggtggtgctccggggaggaggctttttgcccatgactcccatggctgctgcccctgaaggcaatgtgaagcaggcagagcctgagaaggaggacatcatggtcatggacaccaagctgaagatcattgagatactccagtttattttgaatgtgaggttggattataggatctcctgcctcctgtgtatatttaagcgagagtttgatgaaagcaattcccagacttcagaaacatcctccggaaacagcagccaagaagggccaagtaatgtaccaggtgctcttgactttgaacacattgaagaacaagcagaaggcatctttggaggaagtgaggagaacaccccactggacttggatgaccacggcggcagaacctttctccgtgtcctgctccacttgacgatgcatgactacccacccctggtgtcaggggccctgcagctcctcttccggcacttcagccagaggcaggaggtgctccaggccttcaaacaggttcaactgctggttaccagccaagatgtggacaactacaaacagatcaaacaagacttggatcaactgaggtccatcgtggaaaagtcagagctttgggtgtacaaagggcagggccccgatgagactatggatggtgcatctggagaaaatgaacataagaaaacggaggagggaaataacaagccacaaaagcatgaaagcaccagcagctacaactacagagtggtcaaagagattttgattcggcttagcaaactctgtgttcaagagagtgcctcagtgagaaagagcaggaagcagcaacagcgtctgctccggaacatgggcgcgcacgccgtggtgctggagctgctgcagattccctatgagaaggccgaagataccaagatgcaagagataatgaggttggctcatgaatttttgcagaatttctgcgcaggcaaccagcagaatcaagctttgctacataaacacataaacctgtttctcaacccagggatcctggaggcagtaaccatgcagcacatcttcatgaacaatttccagctttgcagtgagatcaacgagagagttgttcagcacttcgttcactgcatagagactcacggtcggaatgtccagtatataaagttcttacagacaattgtcaaggcagaagggaaatttattaaaaaatgccaagacatggttatggccgagctggtcaattcgggagaggatgtcctcgtgttctacaacgacagagcctctttccagactctgatccagatgatgcggtcagaacgggatcggatggatgagaacagccctctcatgtaccacatccacttggtcgagctcctggctgtgtgcacggagggtaagaatgtctacacagagatcaagtgcaactccctgctcccgctggatgacatcgttcgcgtggtgacccacgaggactgcatccctgaggttaaaattgcatacattaacttcctgaatcactgctatgtggatacagaggtggaaatgaaggagatttataccagcaatcacatgtggaaattgtttgagaatttccttgtagacatctgcagggcctgtaacaacactagtgacaggaaacatgcagactcgattttggagaagtatgtcaccgaaatcgtcatgagtattgttactactttcttcagctctcccttctcagaccagagtacgactttgcagactcgccagcctgtctttgtgcaactgctgcaaggcgtgttcagggtttaccactgcaactggttaatgccaagccaaaaagcctccgtggagagctgtattcgggtgctgtctgatgtagccaagagccgggccattgccattcccgtggacctggacagccaagtcaacaacctctttctcaagtcccacagcattgtgcagaaaacagccatgaactggcggctctcagcccgcaatgccgcacgcagggactctgttctggcagcttccagagactaccggaatatcattgagagattgcaggacatcgtctccgcgctggaggaccgtctcaggcccctggtgcaggcagagttatctgtgctcgtggatgttctccacagacccgagctgcttttcccagagaacacagacgccagaaggaaatgtgaaagtggcggtttcatttgcaagttaataaagcatacaaaacagctgctagaagaaaatgaagagaagctctgcattaaggtcctacagaccctgagggaaatgatgaccaaagatagaggctatggagaaaagctaatttccattgatgaattggataatgctgagcttcctccagctccggattctgagaacgccactgagaagggtgaggcgctcaggcaagttctggtcaaccgttactatggaaacgtcagaccttcgggacgaagagagagccttaccagctttggcaatggcccactgtcagcaggaggacccggcaagcccgggggaggagggggaggttccggatccagctctatgagcaggggtgagatgagtctggccgaggttcagtgtcaccttgacaaggagggggcttccaatctagttatcgacctcatcatgaacgcatccagtgaccgagtgttccatgaaagcattctcctggccattgcccttctggaaggaggcaacaccaccatccagcactcctttttctgtcgcttgacagaagataagaagtcagagaaattctttaaggtgttttatgaccggatgaaggtggcccagcaagaaatcaaagcaacagtgacagtgaacaccagtgacttgggaaataaaaagaaagacgatgaggtagacagggatgccccatcacggaaaaaagctaaagagcccacaacacagataacagaagaggtccgggatcagctcctggaggcctccgctgccaccaggaaagccttcaccactttcaggagggaggctgatcccgacgaccactaccagcctggagagggcacccaggccactgccgacaaggccaaggacgacctggagatgagcgcggtcatcaccatcatgcagcccatcctccgcttccttcagctcctgtgtgaaaaccacaaccgagacctgcagaacttcctccgttgccaaaataacaagaccaactacaatttggtatgtgagaccctgcagtttctggactgtatttgtggaagcacaactggaggccttggtcttctgggcttgtatataaatgaaaagaatgtagcgcttatcaaccaaaccctggaaagtctgaccgaatactgtcaaggaccttgccatgagaaccagaactgcatagccacccatgaatccaatggcattgacatcatcacagccctgatcctcaatgatatcaatcctttgggaaagaagaggatggaccttgtgttagaactgaagaacaatgcctcgaagttgctcctggccatcatggaaagcaggcacgacagtgaaaacgcagagaggatactttataacatgaggcccaaggaactggtggaagtgatcaagaaagcctacatgcaaggtgaagtggaatttgaggatggagaaaacggtgaggatggggcggcgtcccccaggaacgtggggcacaacatctacatattagcccatcagttggctcggcataacaaagaacttcagagcatgctgaaacctggtggccaagtggacggagatgaagccctggagttttatgccaagcacacggcgcagatagagattgtcagattagaccgaacaatggaacagatagtctttcccgtgcccagcatatgtgaattcctaaccaaggagtcaaaactacgaatttactatactacagagagagacgaacaaggcagcaaaatcaatgatttctttctgcggtctgaagacctcttcaatgaaatgaattggcagaagaaactgagagcccagcccgtgttgtactggtgtgcccgcaacatgtctttctggagcagcatttcgtttaacctggccgtcctgatgaacctgctggtggcgtttttctacccgtttaagggagtccgaggaggaaccctggagccccactggtcgggactcctgtggacagccatgctcatctctctggccatcgtcattgccctccccaagccccatggcatccgggccttaattgcctccacaattctacgactgatattttcagtcgggttacaacccacgttgtttcttctgggcgctttcaatgtatgcaataaaatcatctttctaatgagctttgtgggcaactgtgggacattcacaagaggctaccgagccatggttctggatgttgagttcctctatcatttgttgtatctggtgatctgtgccatggggctctttgtccatgaattcttctacagtctgctgctttttgatttagtgtacagagaagagactttgcttaatgtcattaaaagtgtcactcgcaatggacggtccatcatcctgacagcagttctggctctgatcctcgtttacctgttctcaatagtgggctatcttttcttcaaggatgactttatcttggaagtagataggctgcccaatgaaacagctgttccagaaaccggcgagagtttggcaagcgagttcctgttctccgatgtgtgtagggtggagagtggggagaactgctcctctcctgcacccagagaagagctggtccctgcagaagagacggaacaggataaagagcacacatgtgagacgctgctgatgtgcattgtcactgtgctgagtcacgggctgcggagcgggggtggagtaggagatgtactcaggaagccgtccaaagaggaacccctgtttgctgctagagttatttatgacctcttgttcttcttcatggtcatcatcattgttcttaacctgatttttggggttatcattgacacttttgctgacctgaggagtgagaagcagaagaaggaagagatcttgaagaccacgtgctttatctgtggcttggaaagagacaagtttgacaacaagactgtcacctttgaagagcacatcaaggaagaacacaacatgtggcactatctgtgcttcatcgtcctggtgaaagtaaaggactccaccgaatatactgggcctgagagttacgtggcagaaatgatcaaggaaagaaaccttgactggttccccaggatgagagccatgtcattggtcagcagtgattctgaaggagaacagaatgagctgagaaacctgcaggagaagctggagtccaccatgaaacttgtcacgaacctttctggccagctgtcggaattaaaggatcagatgacagaacaaaggaagcagaaacaaagaattggtcttctaggacatcctcctcacatgaatgtcaacccacaacaaccagcataagcaaatgaaagaaaggaattgtatttaccttttataattattattagtgtgggtatggctaatgagttctgattcacccacgaaggttacatttatgctgaatacatttgtaaatactcagttttatactgtatgtatatgattgctactctaaaggtttggatatatgtattgtaattagaattgttggcatgatgacatttcatttgtgccaaaaatattaaaaatgccttttttggaaggactaacagaaagcacctgatttgcacttgaaccagattatagatttaaaagtatatgacatgtattttgtatttaaaactagaatagccagtatttatgttttttataaaactgtgcaatacgaattatgcaatcacaatacatttgtagctcccgagtgtcctaaagggagtgcacttctttgaagctggtgtgttaatactatgtaataaatggttaactttcaaatgatgctgctgccaaaattatattaatagtgagtttcaggcccctgggcattttgtaccatgtaattatcctctggtgatgctgtttctcgttagtggcagtagtgcctccgtctcctagtgataatgctccaagtctatgaactgttaaatcagcattcattttaagaaaagcaactttagtttcaaagatacttttaagcttctaaattgatcatttaaactatttctttaaataagagagccaaattagaggctcatactttagcttgtgaagaagataatgaattttttaaagggaactttctatgcaatgttcaggataaatgcatactgctggccaatcagtgtcatctcctgggtaaattttgatgtcgcattataaagacatgcataattgatggtttctagattatctagtccaaacaatagagtttattttttcttcatctgaaccaacatgctacagtagctaagaagtattaaaactatatacatccatataaagatgaaatatgaactatctcattagaagtcatagttgaccacagacatgttattcttctgaaagagccacattttggttttatttcttgtcacatgatttcttttcttgatggatgaaaaatatgaaaggaaacttttatatctgttgcctagttttgtacatggatctcattttacaagagaatctctctgcaaaaaaaaaaaaaacagtttaaaaatgcattgaaagcagagttctgaaatgagtaaagtttgtaaatgcatatataaaaatatttaataaatgatgcagaatatacagtgactggttggtggctttcatttggcatttgtgacttaactgctattccatttatgtactttctttaggatcagtttgaagtacagtcggtttgattaccaggttaattcagaaaatgtttacctgattatttaaaaaaacacttgctgttgttatgacagctctgaggagaattattagaacaaacattggggagtatttagtacaacattcattcattcttctggattagtgactgccagccaggctgtcgggagcgccctactaaatctcctgtctcttctgcttttactgggggatctttaatttgctgtgtgccatgtggaagtatcgggaa

SEQ ID NO: 328021 - DNA, 10242 bp, Artificial Sequence
  derived and/or modified sequence
gcagtaaccatgtggatgtgctgctgaagcgtttcctcaagctcgctggggtgggaggagaggaggaggaggaggtggtggtggaggaggaggcagggggtggagagagagaaagcgcacgccgagaggaggtgtgggtgttccgcttccatcctaacggaacgagctccctcttcgcggacatgggattacccagcggctgctaacccctctcctcgccctgctcccccaaaccggcgtggctccccgggcaccaaggagctgactacagaggagcaggatttgcacccctcgctgggcttgctttggcaacagagtgcctgacccaggtcaggattttcaagaaagacatgtctgacaaaatgtctagcttcctacatattggagacatttgttctctgtacgcggagggatcgacaaatggatttattagcaccttgggcctggttgatgatcgttgtgttgtacagccagaaaccggggaccttaacaatccacctaagaaattcagagactgcctctttaagctatgtcccatgaaccgctactctgcccaaaagcagttctggaaagccgctaagcctggggccaacagcaccacagacgcagtgctactcaacaaactgcaccacgctgcagacttggaaaagaagcagaatgagacagaaaacaggaaattgctggggaccgtaatccagtatggcaatgtgatccagctcctgcatttgaaaagtaataaatacctaacagtgaataagaggcttcctgctctgttggagaagaatgccatgagagtcacattggacgaggctggaaatgaagggtcctggttttatattcagccattctacaagctgcgatccattggagacagcgtggtcataggtgacaaggtggttctgaaccccgtcaatgctggtcagcccctacatgctagcagccatcaactggtagataacccaggctgcaatgaggtcaattccgtcaactgcaatacaagctggaaaatagtccttttcatgaaatggagtgataacaaagacgacatattaaaggggggtgacgtggtgaggctgtttcatgctgagcaggagaagtttctcacctgtgacgaacacaggaagaagcagcacgtcttcctgagaaccacgggccggcagtcggccacatctgccaccagttcaaaagccctgtgggaggtggaggtggtccagcatgacccatgtcggggcggagcagggtattggaacagccttttccgtttcaagcatctggccacggggcattacttggcagcagaggtagaccctgactttgaggaagaatgcctggagtttcagccctcagtggaccctgatcaggacgcctctcgaagtaggttgcggaatgcccaagaaaagatggtatactccctggtctctgtgcctgaaggcaatgacatctcctccattttcgagctagatcccaccactctgcgtggaggtgacagccttgtcccaaggaactcttatgttcggctcagacacctatgtactaatacctgggttcacagcacaaatattcctattgacaaggaagaagaaaagcccgtgatgctgaaaattggcacctctcctgtgaaggaggataaggaagcatttgccatagttccggtttctcctgctgaagttcgggacctggactttgccaatgatgccagcaaggtgctgggctccattgctgggaagctagagaagggcaccatcacccagaatgaaaggaggtctgtaaccaagctgctagaagatttggtttacttcgtcactggtggaactaattctggtcaagatgttctcgaagttgtcttctccaagcccaacagagaacggcagaaactgatgagagaacagaatattctcaagcagatcttcaagttgttacaagccccattcacagactgcggtgatggcccaatgcttcggctggaagagctcggggaccagcggcacgctcctttcagacacatctgccggctctgctacagggtgctgagacactcgcagcaagactacaggaagaaccaggagtatatagccaagcagtttggcttcatgcagaagcagattggctatgatgtgttggctgaagacactatcactgccctgctccacaataatcggaaactcctggaaaaacacattaccgcggcagagattgacacatttgtcagcctggtgcgaaagaacagggagcccagattcttagattacctctccgacctctgtgtctccatgaacaaatcaattccagtgacccaggaactgatatgtaaagctgtgctgaaccccaccaacgctgacatcctgattgagaccaagttggttctttctcgttttgaatttgaaggtgtctcttccactggagagaatgctctggaggcaggagaagacgaggaagaggtgtggctgttttggagggacagcaacaaagagattcgcagcaagagtgtgagggaattggctcaggatgctaaagaagggcagaaggaggaccgagacgttctcagctactacagatatcagctgaacctctttgcgaggatgtgtctggaccgccaatacctggccatcaacgaaatctcaggccagctggatgtcgatctcattctccgctgcatgtctgacgagaacctgccctatgacctcagggcgtccttctgccgcctcatgcttcacatgcatgtggaccgagatccccaggaacaagtcacccccgtgaaatatgcccgcctctggtcggagattccctcggagatcgccattgacgactatgatagtagtggagcttccaaagatgaaattaaggagagatttgctcagaccatggagtttgtggaggagtatttaagagatgtggtttgtcagaggttccctttctctgataaagagaagaataagcttacgtttgaggttgtaaatttagctaggaatctcatatactttggtttctacaacttctctgaccttctacgattaactaagatccttctggccatattggactgtgtacatgtgacaacaatcttccccattagcaagatggcgaaaggagaagagaataaaggtaacaatgatgtggagaagctgaagagcagtaacgtgatgagatctattcatggcgtgggagagctgatgacccaggtggtgctccggggaggaggctttttgcccatgactcccatggctgctgcccctgaaggcaatgtgaagcaggcagagcctgagaaggaggacatcatggtcatggacaccaagctgaagatcattgagatactccagtttattttgaatgtgaggttggattataggatctcctgcctcctgtgtatatttaagcgagagtttgatgaaagcaattcccagacttcagaaacatcctccggaaacagcagccaagaagggccaagtaatgtaccaggtgctcttgactttgaacacattgaagaacaagcagaaggcatctttggaggaagtgaggagaacaccccactggacttggatgaccacggcggcagaacctttctccgtgtcctgctccacttgacgatgcatgactacccacccctggtgtcaggggccctgcagctcctcttccggcacttcagccagaggcaggaggtgctccaggccttcaaacaggttcaactgctggttaccagccaagatgtggacaactacaaacagatcaaacaagacttggatcaactgaggtccatcgtggaaaagtcagagctttgggtgtacaaagggcagggccccgatgagactatggatggtgcatctggagaaaatgaacataagaaaacggaggagggaaataacaagccacaaaagcatgaaagcaccagcagctacaactacagagtggtcaaagagattttgattcggcttagcaaactctgtgttcaagagagtgcctcagtgagaaagagcaggaagcagcaacagcgtctgctccggaacatgggcgcgcacgccgtggtgctggagctgctgcagattccctatgagaaggccgaagataccaagatgcaagagataatgaggttggctcatgaatttttgcagaatttctgcgcaggcaaccagcagaatcaagctttgctacataaacacataaacctgtttctcaacccagggatcctggaggcagtaaccatgcagcacatcttcatgaacaatttccagctttgcagtgagatcaacgagagagttgttcagcacttcgttcactgcatagagactcacggtcggaatgtccagtatataaagttcttacagacaattgtcaaggcagaagggaaatttattaaaaaatgccaagacatggttatggccgagctggtcaattcgggagaggatgtcctcgtgttctacaacgacagagcctctttccagactctgatccagatgatgcggtcagaacgggatcggatggatgagaacagccctctcatgtaccacatccacttggtcgagctcctggctgtgtgcacggagggtaagaatgtctacacagagatcaagtgcaactccctgctcccgctggatgacatcgttcgcgtggtgacccacgaggactgcatccctgaggttaaaattgcatacattaacttcctgaatcactgctatgtggatacagaggtggaaatgaaggagatttataccagcaatcacatgtggaaattgtttgagaatttccttgtagacatctgcagggcctgtaacaacactagtgacaggaaacatgcagactcgattttggagaagtatgtcaccgaaatcgtcatgagtattgttactactttcttcagctctcccttctcagaccagagtacgactttgcagactcgccagcctgtctttgtgcaactgctgcaaggcgtgttcagggtttaccactgcaactggttaatgccaagccaaaaagcctccgtggagagctgtattcgggtgctgtctgatgtagccaagagccgggccattgccattcccgtggacctggacagccaagtcaacaacctctttctcaagtcccacagcattgtgcagaaaacagccatgaactggcggctctcagcccgcaatgccgcacgcagggactctgttctggcagcttccagagactaccggaatatcattgagagattgcaggacatcgtctccgcgctggaggaccgtctcaggcccctggtgcaggcagagttatctgtgctcgtggatgttctccacagacccgagctgcttttcccagagaacacagacgccagaaggaaatgtgaaagtggcggtttcatttgcaagttaataaagcatacaaaacagctgctagaagaaaatgaagagaagctctgcattaaggtcctacagaccctgagggaaatgatgaccaaagatagaggctatggagaaaagctaatttccattgatgaattggataatgctgagcttcctccagctccggattctgagaacgccactgaggagcttgaaccaagtccacccctgcggcagctggaagaccataaaaggggtgaggcgctcaggcaagttctggtcaaccgttactatggaaacgtcagaccttcgggacgaagagagagccttaccagctttggcaatggcccactgtcagcaggaggacccggcaagcccgggggaggagggggaggttccggatccagctctatgagcaggggtgagatgagtctggccgaggttcagtgtcaccttgacaaggagggggcttccaatctagttatcgacctcatcatgaacgcatccagtgaccgagtgttccatgaaagcattctcctggccattgcccttctggaaggaggcaacaccaccatccagcactcctttttctgtcgcttgacagaagataagaagtcagagaaattctttaaggtgttttatgaccggatgaaggtggcccagcaagaaatcaaagcaacagtgacagtgaacaccagtgacttgggaaataaaaagaaagacgatgaggtagacagggatgccccatcacggaaaaaagctaaagagcccacaacacagataacagaagaggtccgggatcagctcctggaggcctccgctgccaccaggaaagccttcaccactttcaggagggaggctgatcccgacgaccactaccagcctggagagggcacccaggccactgccgacaaggccaaggacgacctggagatgagcgcggtcatcaccatcatgcagcccatcctccgcttccttcagctcctgtgtgaaaaccacaaccgagacctgcagaacttcctccgttgccaaaataacaagaccaactacaatttggtatgtgagaccctgcagtttctggactgtatttgtggaagcacaactggaggccttggtcttctgggcttgtatataaatgaaaagaatgtagcgcttatcaaccaaaccctggaaagtctgaccgaatactgtcaaggaccttgccatgagaaccagaactgcatagccacccatgaatccaatggcattgacatcatcacagccctgatcctcaatgatatcaatcctttgggaaagaagaggatggaccttgtgttagaactgaagaacaatgcctcgaagttgctcctggccatcatggaaagcaggcacgacagtgaaaacgcagagaggatactttataacatgaggcccaaggaactggtggaagtgatcaagaaagcctacatgcaaggtgaagtggaatttgaggatggagaaaacggtgaggatggggcggcgtcccccaggaacgtggggcacaacatctacatattagcccatcagttggctcggcataacaaagaacttcagagcatgctgaaacctggtggccaagtggacggagatgaagccctggagttttatgccaagcacacggcgcagatagagattgtcagattagaccgaacaatggaacagatagtctttcccgtgcccagcatatgtgaattcctaaccaaggagtcaaaactacgaatttactatactacagagagagacgaacaaggcagcaaaatcaatgatttctttctgcggtctgaagacctcttcaatgaaatgaattggcagaagaaactgagagcccagcccgtgttgtactggtgtgcccgcaacatgtctttctggagcagcatttcgtttaacctggccgtcctgatgaacctgctggtggcgtttttctacccgtttaagggagtccgaggaggaaccctggagccccactggtcgggactcctgtggacagccatgctcatctctctggccatcgtcattgccctccccaagccccatggcatccgggccttaattgcctccacaattctacgactgatattttcagtcgggttacaacccacgttgtttcttctgggcgctttcaatgtatgcaataaaatcatctttctaatgagctttgtgggcaactgtgggacattcacaagaggctaccgagccatggttctggatgttgagttcctctatcatttgttgtatctggtgatctgtgccatggggctctttgtccatgaattcttctacagtctgctgctttttgatttagtgtacagagaagagactttgcttaatgtcattaaaagtgtcactcgcaatggacggtccatcatcctgacagcagttctggctctgatcctcgtttacctgttctcaatagtgggctatcttttcttcaaggatgactttatcttggaagtagataggctgcccaatgaaacagctgttccagaaaccggcgagagtttggcaagcgagttcctgttctccgatgtgtgtagggtggagagtggggagaactgctcctctcctgcacccagagaagagctggtccctgcagaagagacggaacaggataaagagcacacatgtgagacgctgctgatgtgcattgtcactgtgctgagtcacgggctgcggagcgggggtggagtaggagatgtactcaggaagccgtccaaagaggaacccctgtttgctgctagagttatttatgacctcttgttcttcttcatggtcatcatcattgttcttaacctgatttttggggttatcattgacacttttgctgacctgaggagtgagaagcagaagaaggaagagatcttgaagaccacgtgctttatctgtggcttggaaagagacaagtttgacaacaagactgtcacctttgaagagcacatcaaggaagaacacaacatgtggcactatctgtgcttcatcgtcctggtgaaagtaaaggactccaccgaatatactgggcctgagagttacgtggcagaaatgatcaaggaaagaaaccttgactggttccccaggatgagagccatgtcattggtcagcagtgattctgaaggagaacagaatgagctgagaaacctgcaggagaagctggagtccaccatgaaacttgtcacgaacctttctggccagctgtcggaattaaaggatcagatgacagaacaaaggaagcagaaacaaagaattggtcttctaggacatcctcctcacatgaatgtcaacccacaacaaccagcataagcaaatgaaagaaaggaattgtatttaccttttataattattattagtgtgggtatggctaatgagttctgattcacccacgaaggttacatttatgctgaatacatttgtaaatactcagttttatactgtatgtatatgattgctactctaaaggtttggatatatgtattgtaattagaattgttggcatgatgacatttcatttgtgccaaaaatattaaaaatgccttttttggaaggactaacagaaagcacctgatttgcacttgaaccagattatagatttaaaagtatatgacatgtattttgtatttaaaactagaatagccagtatttatgttttttataaaactgtgcaatacgaattatgcaatcacaatacatttgtagctcccgagtgtcctaaagggagtgcacttctttgaagctggtgtgttaatactatgtaataaatggttaactttcaaatgatgctgctgccaaaattatattaatagtgagtttcaggcccctgggcattttgtaccatgtaattatcctctggtgatgctgtttctcgttagtggcagtagtgcctccgtctcctagtgataatgctccaagtctatgaactgttaaatcagcattcattttaagaaaagcaactttagtttcaaagatacttttaagcttctaaattgatcatttaaactatttctttaaataagagagccaaattagaggctcatactttagcttgtgaagaagataatgaattttttaaagggaactttctatgcaatgttcaggataaatgcatactgctggccaatcagtgtcatctcctgggtaaattttgatgtcgcattataaagacatgcataattgatggtttctagattatctagtccaaacaatagagtttattttttcttcatctgaaccaacatgctacagtagctaagaagtattaaaactatatacatccatataaagatgaaatatgaactatctcattagaagtcatagttgaccacagacatgttattcttctgaaagagccacattttggttttatttcttgtcacatgatttcttttcttgatggatgaaaaatatgaaaggaaacttttatatctgttgcctagttttgtacatggatctcattttacaagagaatctctctgcaaaaaaaaaaaaaacagtttaaaaatgcattgaaagcagagttctgaaatgagtaaagtttgtaaatgcatatataaaaatatttaataaatgatgcagaatatacagtgactggttggtggctttcatttggcatttgtgacttaactgctattccatttatgtactttctttaggatcagtttgaagtacagtcggtttgattaccaggttaattcagaaaatgtttacctgattatttaaaaaaacacttgctgttgttatgacagctctgaggagaattattagaacaaacattggggagtatttagtacaacattcattcattcttctggattagtgactgccagccaggctgtcgggagcgccctactaaatctcctgtctcttctgcttttactgggggatctttaatttgctgtgtgccatgtggaagtatcgggaa

SEQ ID NO: 328022 - DNA, 8232 bp, Artificial Sequence
  derived and/or modified sequence
atgtctgacaagatgagcagcttcctgcacatcggggacatctgcagcctgtatgcagagggcagcaccaacggcttcatcagcaccctgggcctggtggatgacagatgtgtggtgcagcctgagactggagacctgaacaacccccccaagaagttccgggactgcctcttcaagctgtgccccatgaaccgctacagcgcccagaagcagttctggaaggccgccaagccaggggccaacagcaccacagatgctgtgctgctgaacaagctgcaccacgccgctgacctggagaagaagcagaatgaaacagagaacaggaagctgctgggcaccgtcatccagtatggaaatgtcatccagctgctgcacctgaagagcaacaagtacctgactgtgaacaagaggctgcctgccctgctggagaagaatgccatgagggtgaccctggatgaggccggaaatgaaggctcctggttctacatccagcccttctacaagctgcggagcatcggggacagcgtggtgattggagacaaggtggtgctgaaccctgtgaatgccggccagcccctgcacgccagcagccaccagctggtggacaaccctggctgcaatgaggtgaacagcgtgaactgcaacacctcctggaagatcgtgctcttcatgaagtggagcgacaacaaggatgacatcctgaagggaggagatgtggtgcggctcttccacgccgagcaggagaagttcctgacctgtgatgagcacaggaagaagcagcacgtgttcctgcggaccaccggccggcagagcgccaccagcgccaccagcagcaaggccctgtgggaggtggaggtggtgcagcacgacccctgccggggcggggccggctactggaacagcctcttccgcttcaagcacctggccaccggccactacctggccgctgaggtggaccctgactttgaggaggagtgcctggagttccagcccagcgtggaccctgaccaggatgccagccgcagccggctgagaaatgcccaggagaagatggtgtacagcctggtgtctgtgcctgagggcaatgacatcagcagcatctttgagctggaccccaccaccctgcggggcggggacagcctggtgcccaggaacagctatgtgcggctgcggcacctgtgcaccaacacctgggtgcacagcaccaacatccccatcgacaaggaggaggagaagcctgtgatgctgaagattggcaccagccctgtgaaggaggacaaggaggcctttgccatcgtgcctgtgtccccagctgaggtgcgggacctggactttgccaatgatgccagcaaggtgctgggcagcattgctgggaagctggagaagggcaccatcacccagaatgaaagaagatctgtgaccaagctgctggaggacctggtgtactttgtgactggaggcaccaacagcggccaggatgtgctggaggtggtgttcagcaagcccaaccgggagcggcagaagctgatgagggagcagaacatcctgaagcagatcttcaagctgctgcaggcccccttcacagactgtggagatggccccatgctgcggctggaggagctgggggaccagagacatgcccccttccgccacatctgccgcctgtgctacagagtgctgcggcacagccagcaggactacaggaagaaccaggagtacatcgccaagcagtttggcttcatgcagaagcagatcggctatgatgtgctggccgaggacaccatcacagccctgctgcacaacaacaggaagctgctggagaagcacatcacagctgctgagattgacacctttgtgtccctggtgaggaagaaccgggagccccgcttcctggactacctgagtgacctgtgtgtgtccatgaacaagagcatccctgtgacccaggagctgatctgcaaggctgtgctgaaccccaccaatgctgacatcctgattgagaccaagctggtgctgagcagatttgaatttgaaggagtgagcagcactggagaaaatgccctggaggccggggaggatgaggaggaggtgtggctgttctggagggacagcaacaaggagatccgcagcaagtctgtgcgggagctggcccaggatgccaaggagggccagaaggaggacagagatgtgctgagctactaccgctaccagctgaacctgtttgccaggatgtgcctggaccggcagtacctggccatcaatgagatcagcggccagctggatgtggacctgatcctgcgctgcatgtctgatgagaacctgccctatgacctgcgggccagcttctgccgcctgatgctgcacatgcacgtggaccgggacccccaggagcaggtgacccctgtgaagtatgcccggctgtggagcgagatccccagcgagatcgccattgatgattatgacagcagcggggccagcaaggatgagatcaaggagagatttgcccagaccatggagtttgtggaggagtacctgagagatgtggtgtgccagcgcttccccttcagtgacaaggagaagaacaagctgacctttgaggtggtgaacctggccaggaacctgatctacttcggcttctacaacttcagtgacctgctgcggctgaccaagatcctgctggccatcctggactgtgtgcacgtgaccaccatcttccccatcagcaagatggccaagggggaggagaacaagggcaacaatgatgtggagaagctgaagagcagcaatgtgatgaggagcatccatggagtgggggagctgatgacccaggtggtgctgcggggcggcggcttcctgcccatgacccccatggctgctgcccctgagggcaatgtgaagcaggccgagcctgagaaggaggacatcatggtgatggacaccaagctgaagatcatcgagatcctgcagttcatcctgaatgtgcggctggactaccgcatcagctgcctgctgtgcatcttcaagcgggagtttgatgagagcaacagccagaccagcgagaccagcagcggcaacagcagccaggagggccccagcaatgtgcctggggccctggactttgagcacatcgaggagcaggccgagggcatctttggaggcagcgaggagaacacccccctggacctggatgaccatggaggccgcaccttcctgcgggtgctgctgcacctgaccatgcatgactacccacccctggtgtctggggccctgcagctgctcttccgccacttcagccagaggcaggaggtgctgcaggccttcaagcaggtgcagctgctggtgaccagccaggatgtggacaactacaagcagatcaagcaggacctggaccagctgcggagcatcgtggagaagtctgagctgtgggtgtacaagggccagggcccagatgagaccatggatggagccagcggagaaaatgagcacaagaagacagaggagggcaacaacaagccccagaagcatgagagcaccagcagctacaactacagagtggtgaaggagatcctgatccggctgagcaagctgtgtgtgcaggagagcgcctctgtgaggaagagcaggaagcagcagcagaggctgctgaggaacatgggcgcccatgctgtggtgctggagctgctgcagatcccctatgagaaggccgaggacaccaagatgcaggagatcatgaggctggcccacgagttcctgcagaacttctgtgccggcaaccagcagaaccaggccctgctgcacaagcacatcaacctcttcctgaaccctggcatcctggaggccgtgaccatgcagcacatcttcatgaacaacttccagctgtgcagcgagatcaatgaaagagtggtgcagcactttgtgcactgcatcgagacccacggcagaaatgtgcagtacatcaagttcctgcagaccatcgtgaaggccgagggcaagttcatcaagaagtgccaggacatggtgatggccgagctggtgaacagcggagaagatgtgctggtgttctacaatgaccgggccagcttccagaccctcatccagatgatgaggtctgagcgggacaggatggatgagaacagccccctgatgtaccacatccacctggtggagctgctggccgtgtgcacagagggcaagaatgtgtacacagagatcaagtgcaacagcctgctgcccctggatgacatcgtgcgggtggtgacccatgaggactgcatccctgaggtgaagatcgcctacatcaacttcctgaaccactgctacgtggacacagaggtggagatgaaggagatctacaccagcaaccacatgtggaagctgtttgagaacttcctggtggacatctgccgggcctgcaacaacaccagtgacaggaagcacgccgacagcatcctggagaagtatgtgacagaaattgtgatgagcatcgtgaccaccttcttcagcagccccttcagtgaccagagcaccaccctgcagacccggcagcctgtgtttgtgcagctgctgcagggcgtcttccgggtgtaccactgcaactggctgatgcccagccagaaggcctctgtggagagctgcatccgggtgctgagtgatgtggccaagagccgggccatcgccatccctgtggacctggacagccaggtgaacaacctcttcctgaagagccacagcatcgtgcagaagacagccatgaactggaggctgagcgccagaaatgctgcccggcgggacagcgtgctggccgccagccgggactacagaaacatcatcgagcggctgcaggacatcgtgtctgccctggaggaccggctgcggcccctggtgcaggccgagctgtctgtgctggtggatgtgctgcacaggcctgagctgctcttccctgagaacacagatgcccggaggaaatgtgagagcggcggcttcatctgcaagctgatcaagcacaccaagcagctgctggaggagaatgaggagaagctgtgcatcaaggtgctgcagaccctgcgggagatgatgaccaaggaccggggctacggggagaagctgatcagcattgatgagctggacaatgctgagctgcccccagccccagattctgaaaatgccacagagaagggggaggccctgcggcaggtgctggtgaaccgctactatggaaatgtgcggcccagcggccggcgggagagcctgaccagctttggaaatggccccctgtctgctgggggccctgggaagccaggcggcggcggcggcggcagcggcagcagctccatgagcagaggagagatgagcctggccgaggtgcagtgccacctggacaaggagggcgccagcaacctggtgattgacctgatcatgaatgccagcagtgacagagtcttccacgagagcatcctgctggccatcgccctgctggagggcggcaacaccaccatccagcacagcttcttctgccgcctgacagaggacaagaagtctgagaagttcttcaaggtgttctatgacaggatgaaggtggcccagcaggagatcaaggccaccgtgacagtgaacaccagtgacctgggcaacaagaagaaggatgatgaggtggacagagatgcccccagcaggaagaaggccaaggagcccaccacccagatcacagaggaggtgcgggaccagctgctggaggccagcgctgccaccaggaaggccttcaccaccttccggcgggaggccgaccctgatgaccactaccagcctggagagggcacccaggccacagctgacaaggccaaggatgacctggagatgtctgctgtgatcaccatcatgcagcccatcctgcgcttcctgcagctgctgtgtgagaaccacaacagagacctgcagaacttcctgcgctgccagaacaacaagaccaactacaacctggtgtgtgagaccctgcagttcctggactgcatctgtggcagcaccaccggcggcctgggcctgctgggcctgtacatcaatgagaagaatgtggccctgatcaaccagaccctggagagcctgacagagtactgccagggcccctgccacgagaaccagaactgcatcgccacccatgagagcaatggcatcgacatcatcacagccctgatcctgaatgacatcaaccccctgggcaagaagaggatggacctggtgctggagctgaagaacaatgccagcaagctgctgctggccatcatggagagcagacatgattctgaaaatgctgagcgcatcctgtacaacatgaggcccaaggagctggtggaggtgatcaagaaggcctacatgcagggcgaggtggagtttgaagatggagaaaatggagaagatggagctgccagccccagaaatgtgggccacaacatctacatcctggcccaccagctggcccggcacaacaaggagctgcagagcatgctgaagccaggcggccaggtggatggagatgaggccctggagttctacgccaagcacacagcccagattgaaattgtgcggctggacaggaccatggagcagatcgtgtttcctgtgcccagcatctgtgagttcctgaccaaggagagcaagctgcgcatctactacaccacagaaagagatgagcagggcagcaagatcaatgacttcttcctgcggagtgaagatctcttcaatgagatgaactggcagaagaagctgcgggcccagcctgtgctgtactggtgtgccaggaacatgtccttctggagcagcatctccttcaacctggccgtgctgatgaacctgctggtggccttcttctaccccttcaagggcgtgcggggcggcaccctggagccccactggagcggcctgctgtggacagccatgctgatcagcctggccatcgtcatcgccctgcccaagccccacggcatccgggccctgattgccagcaccatcctgcggctcatcttctctgtgggcctgcagcccaccctcttcctgctgggcgccttcaacgtgtgcaacaagatcatcttcctgatgagctttgtgggcaactgtggcaccttcacccggggctaccgggccatggtgctggatgtggagttcctgtaccacctgctgtacctggtgatctgtgccatgggcctgtttgtgcatgagttcttctacagcctgctgctgtttgacctggtgtaccgggaggagaccctgctgaatgtcatcaagtctgtgaccagaaatggccgcagcatcatcctgacagctgtgctggccctgatcctggtgtacctgttcagcatcgtgggctacctgttcttcaaggatgacttcatcctggaggtggaccggctgcccaatgaaacagctgtgcctgagaccggggagagcctggccagcgagttcctgttcagtgatgtgtgccgggtggagagcggggagaactgcagcagccctgccccccgggaggagctggtgcctgctgaggagacagagcaggacaaggagcacacctgtgagaccctgctgatgtgcatcgtgacagtgctgagccacggcctgcggagcggcggcggcgtgggagatgtgctgaggaagcccagcaaggaggagcccctgtttgctgcccgggtcatctatgacctgctcttcttcttcatggtgatcatcatcgtgctgaacctgatctttggagtcatcatcgacacctttgctgacctgcggtctgagaagcagaagaaggaggagatcctgaagaccacctgcttcatctgtggcctggagcgggacaagtttgacaacaagacagtgacctttgaggagcacatcaaggaggagcacaacatgtggcactacctgtgcttcatcgtgctggtgaaggtgaaggacagcacagagtacacaggccctgagagctatgtggccgagatgatcaaggagaggaacctggactggttccccaggatgagggccatgagcctggtgtccagtgacagcgagggggagcagaatgagctgaggaacctgcaggagaagctggagagcaccatgaagctggtgaccaacctgagcggccagctgtctgagctgaaggaccagatgacagagcagaggaagcagaagcagagaattggcctgctgggccaccccccccacatgaatgtgaacccccagcagcctgcctag

SEQ ID NO: 328023 - DNA, 8277 bp, Artificial Sequence
  derived and/or modified sequence
atgtctgacaagatgagcagcttcctgcacatcggggacatctgcagcctgtatgcagagggcagcaccaacggcttcatcagcaccctgggcctggtggatgacagatgtgtggtgcagcctgagactggagacctgaacaacccccccaagaagttccgggactgcctcttcaagctgtgccccatgaaccgctacagcgcccagaagcagttctggaaggccgccaagccaggggccaacagcaccacagatgctgtgctgctgaacaagctgcaccacgccgctgacctggagaagaagcagaatgaaacagagaacaggaagctgctgggcaccgtcatccagtatggaaatgtcatccagctgctgcacctgaagagcaacaagtacctgactgtgaacaagaggctgcctgccctgctggagaagaatgccatgagggtgaccctggatgaggccggaaatgaaggctcctggttctacatccagcccttctacaagctgcggagcatcggggacagcgtggtgattggagacaaggtggtgctgaaccctgtgaatgccggccagcccctgcacgccagcagccaccagctggtggacaaccctggctgcaatgaggtgaacagcgtgaactgcaacacctcctggaagatcgtgctcttcatgaagtggagcgacaacaaggatgacatcctgaagggaggagatgtggtgcggctcttccacgccgagcaggagaagttcctgacctgtgatgagcacaggaagaagcagcacgtgttcctgcggaccaccggccggcagagcgccaccagcgccaccagcagcaaggccctgtgggaggtggaggtggtgcagcacgacccctgccggggcggggccggctactggaacagcctcttccgcttcaagcacctggccaccggccactacctggccgctgaggtggaccctgactttgaggaggagtgcctggagttccagcccagcgtggaccctgaccaggatgccagccgcagccggctgagaaatgcccaggagaagatggtgtacagcctggtgtctgtgcctgagggcaatgacatcagcagcatctttgagctggaccccaccaccctgcggggcggggacagcctggtgcccaggaacagctatgtgcggctgcggcacctgtgcaccaacacctgggtgcacagcaccaacatccccatcgacaaggaggaggagaagcctgtgatgctgaagattggcaccagccctgtgaaggaggacaaggaggcctttgccatcgtgcctgtgtccccagctgaggtgcgggacctggactttgccaatgatgccagcaaggtgctgggcagcattgctgggaagctggagaagggcaccatcacccagaatgaaagaagatctgtgaccaagctgctggaggacctggtgtactttgtgactggaggcaccaacagcggccaggatgtgctggaggtggtgttcagcaagcccaaccgggagcggcagaagctgatgagggagcagaacatcctgaagcagatcttcaagctgctgcaggcccccttcacagactgtggagatggccccatgctgcggctggaggagctgggggaccagagacatgcccccttccgccacatctgccgcctgtgctacagagtgctgcggcacagccagcaggactacaggaagaaccaggagtacatcgccaagcagtttggcttcatgcagaagcagatcggctatgatgtgctggccgaggacaccatcacagccctgctgcacaacaacaggaagctgctggagaagcacatcacagctgctgagattgacacctttgtgtccctggtgaggaagaaccgggagccccgcttcctggactacctgagtgacctgtgtgtgtccatgaacaagagcatccctgtgacccaggagctgatctgcaaggctgtgctgaaccccaccaatgctgacatcctgattgagaccaagctggtgctgagcagatttgaatttgaaggagtgagcagcactggagaaaatgccctggaggccggggaggatgaggaggaggtgtggctgttctggagggacagcaacaaggagatccgcagcaagtctgtgcgggagctggcccaggatgccaaggagggccagaaggaggacagagatgtgctgagctactaccgctaccagctgaacctgtttgccaggatgtgcctggaccggcagtacctggccatcaatgagatcagcggccagctggatgtggacctgatcctgcgctgcatgtctgatgagaacctgccctatgacctgcgggccagcttctgccgcctgatgctgcacatgcacgtggaccgggacccccaggagcaggtgacccctgtgaagtatgcccggctgtggagcgagatccccagcgagatcgccattgatgattatgacagcagcggggccagcaaggatgagatcaaggagagatttgcccagaccatggagtttgtggaggagtacctgagagatgtggtgtgccagcgcttccccttcagtgacaaggagaagaacaagctgacctttgaggtggtgaacctggccaggaacctgatctacttcggcttctacaacttcagtgacctgctgcggctgaccaagatcctgctggccatcctggactgtgtgcacgtgaccaccatcttccccatcagcaagatggccaagggggaggagaacaagggcaacaatgatgtggagaagctgaagagcagcaatgtgatgaggagcatccatggagtgggggagctgatgacccaggtggtgctgcggggcggcggcttcctgcccatgacccccatggctgctgcccctgagggcaatgtgaagcaggccgagcctgagaaggaggacatcatggtgatggacaccaagctgaagatcatcgagatcctgcagttcatcctgaatgtgcggctggactaccgcatcagctgcctgctgtgcatcttcaagcgggagtttgatgagagcaacagccagaccagcgagaccagcagcggcaacagcagccaggagggccccagcaatgtgcctggggccctggactttgagcacatcgaggagcaggccgagggcatctttggaggcagcgaggagaacacccccctggacctggatgaccatggaggccgcaccttcctgcgggtgctgctgcacctgaccatgcatgactacccacccctggtgtctggggccctgcagctgctcttccgccacttcagccagaggcaggaggtgctgcaggccttcaagcaggtgcagctgctggtgaccagccaggatgtggacaactacaagcagatcaagcaggacctggaccagctgcggagcatcgtggagaagtctgagctgtgggtgtacaagggccagggcccagatgagaccatggatggagccagcggagaaaatgagcacaagaagacagaggagggcaacaacaagccccagaagcatgagagcaccagcagctacaactacagagtggtgaaggagatcctgatccggctgagcaagctgtgtgtgcaggagagcgcctctgtgaggaagagcaggaagcagcagcagaggctgctgaggaacatgggcgcccatgctgtggtgctggagctgctgcagatcccctatgagaaggccgaggacaccaagatgcaggagatcatgaggctggcccacgagttcctgcagaacttctgtgccggcaaccagcagaaccaggccctgctgcacaagcacatcaacctcttcctgaaccctggcatcctggaggccgtgaccatgcagcacatcttcatgaacaacttccagctgtgcagcgagatcaatgaaagagtggtgcagcactttgtgcactgcatcgagacccacggcagaaatgtgcagtacatcaagttcctgcagaccatcgtgaaggccgagggcaagttcatcaagaagtgccaggacatggtgatggccgagctggtgaacagcggagaagatgtgctggtgttctacaatgaccgggccagcttccagaccctcatccagatgatgaggtctgagcgggacaggatggatgagaacagccccctgatgtaccacatccacctggtggagctgctggccgtgtgcacagagggcaagaatgtgtacacagagatcaagtgcaacagcctgctgcccctggatgacatcgtgcgggtggtgacccatgaggactgcatccctgaggtgaagatcgcctacatcaacttcctgaaccactgctacgtggacacagaggtggagatgaaggagatctacaccagcaaccacatgtggaagctgtttgagaacttcctggtggacatctgccgggcctgcaacaacaccagtgacaggaagcacgccgacagcatcctggagaagtatgtgacagaaattgtgatgagcatcgtgaccaccttcttcagcagccccttcagtgaccagagcaccaccctgcagacccggcagcctgtgtttgtgcagctgctgcagggcgtcttccgggtgtaccactgcaactggctgatgcccagccagaaggcctctgtggagagctgcatccgggtgctgagtgatgtggccaagagccgggccatcgccatccctgtggacctggacagccaggtgaacaacctcttcctgaagagccacagcatcgtgcagaagacagccatgaactggaggctgagcgccagaaatgctgcccggcgggacagcgtgctggccgccagccgggactacagaaacatcatcgagcggctgcaggacatcgtgtctgccctggaggaccggctgcggcccctggtgcaggccgagctgtctgtgctggtggatgtgctgcacaggcctgagctgctcttccctgagaacacagatgcccggaggaaatgtgagagcggcggcttcatctgcaagctgatcaagcacaccaagcagctgctggaggagaatgaggagaagctgtgcatcaaggtgctgcagaccctgcgggagatgatgaccaaggaccggggctacggggagaagctgatcagcattgatgagctggacaatgctgagctgcccccagccccagattctgaaaatgccacagaggagctggagcccagcccccccctgcggcagctggaggaccacaagagaggagaggccctgcggcaggtgctggtgaaccgctactatggaaatgtgcggcccagcggcagaagagagagcctgaccagctttggaaatggccccctgtctgctgggggccctgggaagccaggcggcggcggcggcggcagcggcagcagctccatgagcagaggagagatgagcctggccgaggtgcagtgccacctggacaaggagggcgccagcaacctggtgattgacctgatcatgaatgccagcagtgacagagtcttccacgagagcatcctgctggccatcgccctgctggagggcggcaacaccaccatccagcacagcttcttctgccgcctgacagaggacaagaagtctgagaagttcttcaaggtgttctatgacaggatgaaggtggcccagcaggagatcaaggccaccgtgacagtgaacaccagtgacctgggcaacaagaagaaggatgatgaggtggacagagatgcccccagcaggaagaaggccaaggagcccaccacccagatcacagaggaggtgcgggaccagctgctggaggccagcgctgccaccaggaaggccttcaccaccttcagaagagaggccgaccctgatgaccactaccagcccggggagggcacccaggccacagctgacaaggccaaggatgacctggagatgtctgctgtgatcaccatcatgcagcccatcctgcgcttcctgcagctgctgtgtgagaaccacaacagagacctgcagaacttcctgcgctgccagaacaacaagaccaactacaacctggtgtgtgagaccctgcagttcctggactgcatctgtggcagcaccactggaggcctgggcctgctgggcctgtacatcaatgagaagaatgtggccctgatcaaccagaccctggagagcctgacagagtactgccagggcccctgccacgagaaccagaactgcatcgccacccatgagagcaatggaattgacatcatcacagccctgatcctgaatgacatcaaccccctgggcaagaagaggatggacctggtgctggagctgaagaacaatgccagcaagctgctgctggccatcatggagagcagacatgacagtgaaaatgctgagcgcatcctgtacaacatgaggcccaaggagctggtggaggtgatcaagaaggcctacatgcagggcgaggtggagtttgaagatggagaaaatggagaagatggagctgccagccccagaaatgtgggccacaacatctacatcctggcccaccagctggcccggcacaacaaggagctgcagagcatgctgaagccaggcggccaggtggatggagatgaggccctggagttctacgccaagcacacagcccagatcgagatcgtgcggctggacaggaccatggagcagatcgtgtttcctgtgcccagcatctgtgagttcctgaccaaggagagcaagctgcgcatctactacaccacagaaagagatgagcagggcagcaagatcaatgacttcttcctgcggtctgaggacctcttcaatgagatgaactggcagaagaagctgcgggcccagcctgtgctgtactggtgtgccaggaacatgtccttctggagcagcatctccttcaacctggccgtgctgatgaacctgctggtggccttcttctaccccttcaagggcgtgcggggcggcaccctggagccccactggagcggcctgctgtggacagccatgctgatcagcctggccatcgtgattgccctgcccaagccccacggcatccgggccctgattgccagcaccatcctgcggctcatcttctctgtgggcctgcagcccaccctcttcctgctgggcgccttcaacgtgtgcaacaagatcatcttcctgatgagctttgtgggcaactgtggcaccttcacccggggctaccgggccatggtgctggatgtggagttcctgtaccacctgctgtacctggtgatctgtgccatgggcctgtttgtgcatgagttcttctacagcctgctgctgtttgacctggtgtaccgggaggagaccctgctgaatgtcatcaagtctgtgaccagaaatggccgcagcatcatcctgacagctgtgctggccctgatcctggtgtacctgttcagcatcgtgggctacctgttcttcaaggatgacttcatcctggaggtggaccggctgcccaatgaaacagctgtgcctgagactggagagagcctggccagcgagttcctgttcagtgatgtgtgccgggtggagagcggggagaactgcagcagccctgccccccgggaggagctggtgcctgctgaggagacagagcaggacaaggagcacacctgtgagaccctgctgatgtgcatcgtgacagtgctgagccacggcctgcggagcggcggcggcgtgggagatgtgctgaggaagcccagcaaggaggagcccctgtttgctgcccgggtcatctatgacctgctcttcttcttcatggtgatcatcatcgtgctgaacctgatctttggagtcatcatcgacacctttgctgacctgcggtctgagaagcagaagaaggaggagatcctgaagaccacctgcttcatctgtggcctggagcgggacaagtttgacaacaagacagtgacctttgaggagcacatcaaggaggagcacaacatgtggcactacctgtgcttcatcgtgctggtgaaggtgaaggacagcacagagtacacaggccctgagagctatgtggccgagatgatcaaggagaggaacctggactggttccccaggatgagggccatgagcctggtgtccagtgacagcgagggggagcagaatgagctgaggaacctgcaggagaagctggagagcaccatgaagctggtgaccaacctgagcggccagctgtctgagctgaaggaccagatgacagagcagaggaagcagaagcagagaattggcctgctgggccaccccccccacatgaatgtgaacccccagcagcctgcctag

SEQ ID NO: 328024 - DNA, 3615 bp, Artificial Sequence
  derived and/or modified sequence
caggagcccggccactgccacagccggggccctggccagcccagccagcagcccctgagccaggtgccccagcactgtgccgaggccatgaactggaggctgagcgccagaaatgctgcccggcgggacagcgtgctggccgccagccgggactacagaaacatcatcgagcggctgcaggacatcgtgtctgccctggaggaccggctgcggcccctggtgcaggccgagctgtctgtgctggtggatgtgctgcacaggcctgagctgctcttccctgagaacacagatgcccggaggaaatgtgagagcggcggcttcatctgcaagctgatcaagcacaccaagcagctgctggaggagaatgaggagaagctgtgcatcaaggtgctgcagaccctgcgggagatgatgaccaaggaccggggctacggggagaagctgatcagcattgatgagctggacaatgctgagctgcccccagccccagattctgaaaatgccacagaggagctggagcccagcccccccctgcggcagctggaggaccacaagagaggagaggccctgcggcaggtgctggtgaaccgctactatggaaatgtgcggcccagcggcagaagagagagcctgaccagctttggaaatggccccctgtctgctgggggccctgggaagccaggcggcggcggcggcggcagcggcagcagctccatgagcagaggagagatgagcctggccgaggtgcagtgccacctggacaaggagggcgccagcaacctggtgattgacctgatcatgaatgccagcagtgacagagtcttccacgagagcatcctgctggccatcgccctgctggagggcggcaacaccaccatccagcacagcttcttctgccgcctgacagaggacaagaagtctgagaagttcttcaaggtgttctatgacaggatgaaggtggcccagcaggagatcaaggccaccgtgacagtgaacaccagtgacctgggcaacaagaagaaggatgatgaggtggacagagatgcccccagcaggaagaaggccaaggagcccaccacccagatcacagaggaggtgcgggaccagctgctggaggccagcgctgccaccaggaaggccttcaccaccttcagaagagaggccgaccctgatgaccactaccagcccggggagggcacccaggccacagctgacaaggccaaggatgacctggagatgtctgctgtgatcaccatcatgcagcccatcctgcgcttcctgcagctgctgtgtgagaaccacaacagagacctgcagaacttcctgcgctgccagaacaacaagaccaactacaacctggtgtgtgagaccctgcagttcctggactgcatctgtggcagcaccactggaggcctgggcctgctgggcctgtacatcaatgagaagaatgtggccctgatcaaccagaccctggagagcctgacagagtactgccagggcccctgccacgagaaccagaactgcatcgccacccatgagagcaatggaattgacatcatcacagccctgatcctgaatgacatcaaccccctgggcaagaagaggatggacctggtgctggagctgaagaacaatgccagcaagctgctgctggccatcatggagagcagacatgacagtgaaaatgctgagcgcatcctgtacaacatgaggcccaaggagctggtggaggtgatcaagaaggcctacatgcagggcgaggtggagtttgaagatggagaaaatggagaagatggagctgccagccccagaaatgtgggccacaacatctacatcctggcccaccagctggcccggcacaacaaggagctgcagagcatgctgaagccaggcggccaggtggatggagatgaggccctggagttctacgccaagcacacagcccagatcgagatcgtgcggctggacaggaccatggagcagatcgtgtttcctgtgcccagcatctgtgagttcctgaccaaggagagcaagctgcgcatctactacaccacagaaagagatgagcagggcagcaagatcaatgacttcttcctgcggtctgaggacctcttcaatgagatgaactggcagaagaagctgcgggcccagcctgtgctgtactggtgtgccaggaacatgtccttctggagcagcatctccttcaacctggccgtgctgatgaacctgctggtggccttcttctaccccttcaagggcgtgcggggcggcaccctggagccccactggagcggcctgctgtggacagccatgctgatcagcctggccatcgtgattgccctgcccaagccccacggcatccgggccctgattgccagcaccatcctgcggctcatcttctctgtgggcctgcagcccaccctcttcctgctgggcgccttcaacgtgtgcaacaagatcatcttcctgatgagctttgtgggcaactgtggcaccttcacccggggctaccgggccatggtgctggatgtggagttcctgtaccacctgctgtacctggtgatctgtgccatgggcctgtttgtgcatgagttcttctacagcctgctgctgtttgacctggtgtaccgggaggagaccctgctgaatgtcatcaagtctgtgaccagaaatggccgcagcatcatcctgacagctgtgctggccctgatcctggtgtacctgttcagcatcgtgggctacctgttcttcaaggatgacttcatcctggaggtggaccggctgcccaatgaaacagctgtgcctgagactggagagagcctggccagcgagttcctgttcagtgatgtgtgccgggtggagagcggggagaactgcagcagccctgccccccgggaggagctggtgcctgctgaggagacagagcaggacaaggagcacacctgtgagaccctgctgatgtgcatcgtgacagtgctgagccacggcctgcggagcggcggcggcgtgggagatgtgctgaggaagcccagcaaggaggagcccctgtttgctgcccgggtcatctatgacctgctcttcttcttcatggtgatcatcatcgtgctgaacctgatctttggagtcatcatcgacacctttgctgacctgcggtctgagaagcagaagaaggaggagatcctgaagaccacctgcttcatctgtggcctggagcgggacaagtttgacaacaagacagtgacctttgaggagcacatcaaggaggagcacaacatgtggcactacctgtgcttcatcgtgctggtgaaggtgaaggacagcacagagtacacaggccctgagagctatgtggccgagatgatcaaggagaggaacctggactggttccccaggatgagggccatgagcctggtgtccagtgacagcgagggggagcagaatgagctgaggaacctgcaggagaagctggagagcaccatgaagctggtgaccaacctgagcggccagctgtctgagctgaaggaccagatgacagagcagaggaagcagaagcagagaattggcctgctgggccaccccccccacatgaatgtgaacccccagcagcctgcctag

SEQ ID NO: 328025 - DNA, 8232 bp, Artificial Sequence
  derived and/or modified sequence
atgagcgacaagatgagcagcttcctgcacatcggcgacatctgctccctatacgccgaaggttccaccaacggcttcatctccacactgggattagtggacgaccgctgcgtggtgcagcctgagacaggcgatctgaataaccccccaaagaaattcagagactgtctttttaaactgtgcccaatgaatcggtatagcgcgcagaagcagttttggaaggcagccaaaccaggcgcaaatagcacaaccgatgcagtgttactcaataaattgcaccatgccgccgacttagaaaagaaacagaacgagaccgagaaccgcaaactcctcgggacggtcatccaatacggcaatgtgatacaattattacacctcaagagcaacaagtacctgaccgtcaataaaaggcttcccgccctgctagaaaaaaatgcgatgcgagttacattggatgaggctgggaatgaaggcagctggttttacatacagccgttttacaaacttagatccatcggagattctgtggtgatcggcgataaggtcgtgctgaaccccgttaacgccgggcagcctctccatgccagcagtcaccagttagttgataaccccggatgcaatgaggtgaactctgtaaattgtaatacgtcgtggaagatcgttctattcatgaaatggtctgacaataaggacgacattttgaagggcggggacgtcgtgaggctctttcatgccgaacaagagaagttcttaacatgcgatgagcatcggaagaaacagcacgtgtttctgagaacgacaggtaggcaaagcgcgacttccgcaaccagtagcaaggctctgtgggaggtggaagtagtccagcatgacccatgtagaggaggagcgggctactggaactccctgttccggtttaagcacttagccaccgggcactatttggccgcagaggttgatcctgacttcgaggaggagtgtctggaatttcagcctagcgtggatcctgatcaggatgccagcaggagtcggctccgcaatgcccaggagaaaatggtgtattctttggtcagcgtaccagagggaaacgatatatcttctatctttgaactcgaccctaccaccttaagagggggtgattccctcgtacctcgtaatagctatgttcgtctgagacacctgtgtaccaacacttgggtgcattcaactaatattcctattgacaaagaagaagagaagcccgtaatgttgaaaatcggcacctcccctgtgaaggaggacaaggaggcctttgccattgtcccagtgtcaccagccgaagttcgagatctagatttcgcgaatgacgctagtaaggtgctcggatctattgctggcaagctggagaagggaacaatcacgcagaacgagcgccgctccgtgacaaaattactcgaggacttagtgtacttcgtgacaggaggaacgaatagtggtcaagacgtgcttgaggtcgtcttctctaagcctaaccgagagcgacaaaagcttatgagagagcaaaacattcttaaacagatttttaagttattgcaggccccctttacggattgcggagacgggcccatgttaaggcttgaggagctgggggaccagcgccacgctccgttcaggcacatatgcaggctgtgctatagggtgttgaggcactctcagcaggattaccggaagaatcaggaatacattgctaaacagttcgggtttatgcagaagcagattggttacgacgtcttggccgaggatacaataactgccctgctgcacaacaatcgaaagctgctggaaaagcacattaccgccgcagagatcgatacctttgtaagcctggtgagaaagaatagggaacccagattcctggactacttgtcggatctgtgtgtgagtatgaataaatctatccccgtgacccaggagctcatttgtaaagccgtcctaaatcctactaacgctgacatactgattgagaccaaactggttctgtcaagattcgaattcgagggcgtgtcatcgacaggcgagaatgcgcttgaggccggcgaagatgaagaagaagtgtggctgttttggagggacagcaataaagaaatccgttccaaaagtgtccgtgagctggctcaagatgcaaaagaggggcagaaggaggaccgcgatgtgctaagctactaccgctaccagctgaacctgttcgctagaatgtgcttggacaggcaatatctggccataaacgaaatctcagggcagttggatgtggatctcatcctgcgatgcatgtcagacgaaaaccttccctacgaccttagggccagtttctgccggctaatgttgcatatgcatgtggatagggatccccaagaacaggtcaccccagtcaaatatgctagactgtggtccgaaatccccagtgagatcgcgattgacgattacgattcatcaggagcctctaaggatgagattaaagaaagattcgctcagaccatggaatttgtcgaggagtatctgcgtgacgttgtgtgccaaaggtttcctttcagcgacaaagagaaaaataagctgacctttgaagtcgtgaacctggcccgcaacctgatttacttcggattctacaacttctcagaccttttgcggctgactaaaatcctgctggctattctcgattgcgttcacgtgacgactatattccctatctccaaaatggctaagggtgaagagaataaaggcaacaacgatgtggagaagctcaagagttctaacgtgatgaggagtatccacggtgtcggagaactcatgactcaggtggttctcagaggaggagggtttctacctatgacacccatggctgcagcccccgaaggaaacgttaaacaggccgagccggagaaagaggacatcatggtgatggacactaagttgaaaataatagaaatcttgcaattcatactgaatgttagactcgattatcgcataagctgcctgctgtgtatatttaaacgggagttcgacgaatcaaactcccaaacatcagaaacgagttctggcaattccagtcaagaaggaccatcgaacgtgcccggcgcactagacttcgagcacatcgaggagcaggccgaaggaattttcggtggctccgaggaaaacacgcctctcgacctcgatgaccacggagggaggacctttctgcgggtgctcctgcacctcaccatgcacgattacccacccctagtttctggcgctctgcaactcctcttcagacacttttctcaacgtcaagaggtgcttcaggcctttaagcaagtacagctgctggtcacttcgcaagatgtggataactataaacaaatcaaacaggatttagatcaacttcgcagtatagtggaaaaatccgagctctgggtgtacaaaggtcaggggccagatgaaacaatggacggcgccagcggcgagaacgaacataaaaagacagaggaaggtaacaacaaaccccagaagcacgagagcacatcctcctataactaccgtgtagtcaaggaaattctcattcgactttctaaattgtgcgtgcaagagtccgcatctgtgcggaaaagcagaaagcaacagcaacggctcttgcgcaatatgggtgcccatgcggttgtactcgagctgctgcagattccatacgagaaggccgaagacacaaagatgcaagaaattatgcgccttgcccacgaatttctccagaatttctgcgcaggcaatcagcagaaccaggcattgcttcacaaacacataaatctgtttctgaacccgggcattctggaggcagtgacaatgcaacacattttcatgaataattttcagctctgctcagagattaatgagcgggtggtgcaacactttgttcattgcattgaaacccatgggaggaatgttcagtacattaagttcctccaaaccatcgttaaagcagagggcaaatttatcaaaaagtgtcaggatatggtcatggctgagctcgttaactcaggagaggacgtgttagtattctacaacgaccgggcatccttccagacgctaatccagatgatgaggagtgagagggatcgcatggacgagaatagccctctgatgtaccatattcacctagttgagctcctggccgtgtgtacagagggaaagaatgtgtacaccgagataaagtgcaattcactcctgcccctagacgacatcgtgcgggtggtaacccacgaggattgtattccagaggttaaaattgcctacatcaacttcctcaaccactgctacgtggacactgaggtagaaatgaaggagatatacacctcaaaccatatgtggaaactgttcgagaatttcttggtggatatttgtagagcttgcaacaatacttcagatagaaagcacgctgactcaattctcgaaaagtacgtgacagagattgtgatgtccatagttaccacgttcttttcatcaccattctctgatcagtctactactctgcagacgcggcagccagtcttcgtgcagcttttgcagggggtgtttagggtctatcattgcaactggctaatgccatcccagaaggcctccgtggaatcttgtatcagagttctgtccgatgtggctaaatctagggctattgctatcccagtggacctggattcacaggtgaataacctattcctcaagtctcactcaattgtgcagaagaccgctatgaattggcgtttgtctgccaggaacgcggctaggcgcgacagtgttctggctgcctctagagattatcgaaacattatcgagcgattacaagatatcgtgtcagcattggaggatcggctgcgtcctctagtccaggccgaactcagcgtcctcgtcgacgttttgcatcgtcccgagttattgttcccagaaaatactgatgctcggagaaagtgtgagtctggtgggtttatatgtaagcttatcaaacatacaaaacaactgctcgaggagaatgaggaaaagttgtgtattaaagtgctccagacactcagggaaatgatgaccaaggaccggggctatggagagaagctaatttctattgacgaactcgacaacgctgagttaccgccagcccctgacagtgaaaacgctacagagaagggcgaagcattgcgacaggtgctggtaaaccggtactatgggaatgtgcgaccatcaggtaggcgtgagtctctgacaagttttggcaacggaccattgtcagccggaggtccagggaagccaggtggagggggtggaggttctggctcctcttccatgagtaggggtgaaatgtctttagccgaggtgcagtgccacctggacaaggaaggagccagcaacctggtgatagacctcatcatgaatgcaagctctgacagggtgtttcatgagtcaatcctgctcgctatagctctgttagagggggggaacaccactatccaacacagctttttctgtcgtctaacagaggataagaagagtgagaagttttttaaagttttctacgatcggatgaaggttgctcagcaggagattaaggcaactgtgaccgtgaatacatcggacctgggaaacaaaaaaaaagacgatgaggtggatcgggacgctccttctagaaagaaggcgaaggaacccaccacgcagatcacggaggaagttcgtgaccagctgctggaggcctccgccgcaaccaggaaggccttcacgacattccggagagaggctgaccccgacgaccattaccaacctggcgagggcactcaagccacagccgataaggcaaaggatgacttggaaatgagcgccgtcatcacgatcatgcagcccattttgcggttcctgcaacttctgtgcgagaaccataatcgcgatcttcaaaacttccttcggtgccagaacaataagacaaactataacttagtgtgtgaaacattgcagttccttgactgtatttgtggctcaacaaccggagggctgggcctgctcggcctctacattaatgaaaaaaacgtggctctgattaatcagacattggagtcactcacagagtattgccaggggccttgtcacgaaaaccaaaactgcatagcaactcacgagagcaatggcatcgacatcatcaccgctctgatattgaatgatattaaccccctgggcaagaaaaggatggacttggtactcgaactcaagaacaatgcctcgaaactccttctcgcaatcatggagtctcgccacgactcagagaatgcagaaagaattctgtacaatatgcggcctaaagaacttgttgaagttatcaagaaagcctatatgcagggagaggtcgagtttgaagacggggagaacggcgaagatggcgctgccagtccacggaatgtcggacataacatttacatcctcgctcatcaactcgcccgccacaataaggagctgcagtctatgctaaagcccggcggacaggtggacggagatgaagcgctggaattttatgcgaagcatacagctcagatcgagattgttcggttggaccgcacaatggaacagatcgtgttccccgtgccctcaatctgcgaattcttgactaaagagtccaaattgagaatttactatacaactgagcgggacgaacaaggtagtaaaattaacgatttctttttgcgcagcgaggatttatttaatgaaatgaactggcaaaaaaaacttcgtgcccagccagtgttgtattggtgtgccaggaatatgtctttctggtccagcatcagtttcaacctcgcggtgttgatgaatctgctggtggccttcttttatccatttaagggcgtgcgtggcggcaccctggaaccgcattggagcgggcttctgtggacggccatgttaatatctctggcgatcgtgatcgcactgccgaaaccccacggcatccgtgccctgatcgcttccacgatcctgcgcctgattttctccgtgggtcttcagccaaccttattcctgttaggagctttcaacgtgtgcaataaaatcatttttctgatgtctttcgtcggaaattgcggcactttcactcgagggtatagggcaatggtgttagacgtcgaatttctataccatctcctctacctggtcatatgcgccatgggactgttcgtgcacgagtttttctactccctcctcctgttcgacttggtctacagggaggagactctgcttaacgtcatcaaatccgtgacacggaacggccgcagcatcattcttacggccgtgctagcgctgattttagtttatctattttctatcgtgggatatttattcttcaaggatgatttcatcctggaggtcgaccggcttcctaatgaaactgctgtgcctgagacaggcgaaagtcttgcatccgagtttctgttctcagacgtgtgcagagtcgaatcaggcgaaaattgctcaagtccagcacccagagaagagttggttcccgccgaagagaccgagcaggacaaagagcacacatgtgagacactgttgatgtgtattgtgactgttttgagccacggtctgcgaagcggcggcggggtgggcgatgtgctccggaagccgagtaaagaagaacctctgttcgcagcgagagtgatctacgacttgctattttttttcatggtaatcatcattgtgctcaatctgattttcggcgtaattattgataccttcgcagatctccgctccgaaaaacagaaaaaagaggaaattctaaagactacgtgctttatatgcggcctcgagagggacaaattcgataacaaaaccgtcacgtttgaagagcacatcaaagaggagcataatatgtggcactacctctgctttatagtgctggtgaaagtaaaggatagcactgagtatacaggccccgagagctacgtagcagaaatgatcaaggagagaaacttagactggtttcctcgcatgagggctatgtccctcgtgagtagcgattcagagggggagcaaaatgagctgagaaaccttcaggagaagcttgaatccacaatgaagctcgtcaccaatctatccggccagttgtcagaattaaaagaccagatgactgaacagcggaaacagaagcagcggattggcttgctaggccaccctcctcacatgaacgttaatccgcagcagcccgcctag

SEQ ID NO: 328026 - DNA, 8277 bp, Artificial Sequence
  derived and/or modified sequence
atgagcgacaagatgagcagcttcctgcacatcggcgacatctgcagtctctacgcagaagggtccaccaacggatttataagcacgctgggactggtggacgatcgatgcgtagtacaaccggagacaggagacttgaacaatcctccaaagaaatttagagactgtctgttcaaactctgccctatgaacagatactcagcacagaagcagttctggaaggccgcgaagccaggggctaattcgaccaccgacgcagttctcttgaacaaactccaccacgccgcggatcttgagaaaaaacaaaacgagactgaaaatcgaaagctcctcggtacagtgattcagtacgggaatgtaatccagttactacatctgaagagtaataaatatctgaccgtgaacaagaggctgccagcccttctggagaagaacgcgatgcgggtcacgctcgatgaggcaggcaacgaaggatcctggttctatatccagcctttctataaactgcggtccatcggcgactccgttgtgatcggcgacaaggtcgtgttaaatccagtcaacgcaggacagccattgcatgccagtagccaccagctggttgataatcccggctgtaacgaagtgaactccgtgaactgtaacacctcctggaagattgtcctgttcatgaaatggtcagacaacaaggacgacatcttaaaaggcggcgacgttgtgcgtttgttccacgctgagcaggaaaaattcctgacttgtgacgagcacagaaaaaaacaacacgtcttcctgcggacaacaggaaggcagagtgccacctctgctacctcttccaaagccctgtgggaggtggaggtggtgcagcatgatccatgcaggggcggagctggatactggaatagcctctttcggtttaagcaccttgctacaggccactacctcgccgcagaggtggaccccgatttcgaagaggagtgcttggagttccagccttctgtggacccagaccaggatgcctcgcgatccagattacgcaacgcgcaggagaagatggtgtacagcctggtgagtgtaccagagggcaacgatatcagttccattttcgagctcgaccccacaacactgaggggcggggacagccttgttccgcgaaactcgtacgtgcgtctccggcatctgtgcacaaacacttgggtccatagcacaaacattccgatagacaaggaggaagagaagccagtgatgctaaagatcggcacatctccagtcaaggaggacaaggaagcgttcgcaattgtccctgtgagcccagcagaagtgcgcgacctcgactttgcaaatgatgccagcaaagttttgggtagtattgctggaaaactggagaagggtaccatcacacagaacgagaggaggagtgtcacaaagctgcttgaggacctggtctatttcgtgaccggcggtacaaactcaggtcaggacgtgcttgaggtggtcttttccaagccgaaccgagagcggcagaaactcatgcgcgaacaaaacatactgaaacagatttttaagctgcttcaggcacccttcactgactgcggcgatggcccgatgctccggctggaagagctcggggaccagcgacatgcccctttcaggcacatatgccgtctgtgttaccgggtgttacgacactcacagcaagactaccgaaagaaccaggaatacatcgcaaaacagtttgggtttatgcagaaacagattgggtacgacgttctggcggaggacacgataaccgctcttctccacaataaccgcaagcttctagagaaacatattaccgcagcggagattgacacattcgtctcccttgtgaggaagaaccgagagcctagattcttggactatctttctgacttgtgtgtgtcgatgaataaaagcatcccagtgactcaggaactaatctgtaaagcagtgctcaacccgaccaacgcagacatccttatcgagactaagctcgtgctgtctagattcgagttcgagggagtgtcaagtaccggggaaaatgccctcgaagcaggcgaagatgaggaagaggtatggcttttttggcgtgatagcaacaaggaaatcagaagtaagtccgtgagggagctggcccaggacgctaaagagggacagaaggaggaccgagacgtgttgtcatattacagataccagttaaacctatttgctcggatgtgtcttgatagacagtacctagccatcaatgagatatccgggcagttggacgtcgatctcatcttacgttgtatgtcagacgaaaatttgccctatgacttgagggcttcgttttgcaggttgatgctacacatgcacgtggatagggatccccaggagcaagtgacccccgtgaagtacgctcgcctgtggagcgagattccatccgagatcgctatcgatgactacgatagctctggcgcttctaaggacgagattaaggaacgatttgcccagactatggagttcgtagaggagtatttgcgcgatgttgtctgccagaggttccctttctccgataaggagaagaataagctgacctttgaggtggttaacctggcaaggaacttgatctacttcggcttttataacttttcggacctgctgaggctgacaaagatcctgctggccatcctcgactgcgttcatgtgactactattttcccaatcagtaagatggcaaaaggcgaagagaataagggaaataatgacgtagaaaaacttaagtcgagtaacgtcatgcggagtatccatggcgttggtgagctgatgactcaggtcgtgcttcgtggcggaggctttctgcctatgacgcccatggccgcagcccctgagggcaacgttaagcaggccgaaccagagaaggaggacattatggtgatggacactaagttgaaaattatcgaaatcctgcagtttatcctgaatgtgcgcctcgactatagaatatcctgcctgctgtgcatcttcaagagggaatttgacgagtccaatagtcagacctccgagacaagcagcggcaattcttcccaggaaggcccctccaatgtcccgggggctctggatttcgaacacatagaggagcaagctgaggggattttcggagggtctgaagagaatacacccctcgatctcgatgatcacggcgggcgaacattcctgcgggtgctcttacacctgacaatgcacgactacccgcccttggtcagcggcgcactgcagctgctttttcgtcacttctcacagcgccaggaagtgctacaggctttcaagcaggttcagttgcttgtcacaagccaagacgtagacaattacaaacagattaaacaggacctagaccagctgaggtctatcgtggagaaaagtgaactgtgggtctataaggggcaaggacctgacgaaaccatggatggagcctccggagagaacgaacacaagaagaccgaagagggcaacaacaaaccccagaagcacgagtcgacctcctcctataattatagagttgtcaaagagatcttaatccgcctgagcaagctctgtgtgcaagagtcagccagcgttaggaaatcccgaaagcagcagcagaggttgctgcggaatatgggagcgcatgccgtcgtgctggagctactgcaaatcccctacgagaaggctgaagataccaagatgcaggagattatgcggctcgcccatgaattcctacagaatttctgcgccggcaatcagcaaaatcaggcccttctacacaagcacataaacttgttcctgaatcccggcatattagaagcagtgaccatgcaacacatcttcatgaataattttcaactatgttctgagattaacgaacgcgttgtacagcatttcgtgcactgcatcgaaacacatggtcgtaatgttcagtatatcaagttcttgcagaccatagtgaaggccgaggggaaattcatcaaaaagtgtcaggacatggtaatggctgaattggtgaactcaggggaggatgtgcttgtgttctacaatgatagggcttctttccaaacacttatccagatgatgagaagcgaacgcgatagaatggatgagaacagtccccttatgtatcatatccatttggtcgagcttcttgcggtttgcaccgagggaaagaatgtttacacggagatcaaatgtaattccctgctcccactagacgatattgtgcgcgtggtcacccacgaggattgtatcccggaggtgaagatcgcgtatattaacttcctcaatcactgctatgtggacaccgaggtagaaatgaaggagatctatacctcgaatcacatgtggaaactttttgaaaactttcttgtggatatttgccgcgcatgcaataatactagtgaccggaaacatgccgatagtatactggagaaatatgtcactgaaatcgttatgagcatcgtgaccacatttttctcaagccctttttctgaccaaagcacaacactgcaaacgcgccaacctgtgttcgtgcagcttctccaaggcgtctttcgagtgtatcactgcaattggctgatgcctagtcagaaggccagcgtcgagtcctgcattcgcgtcttgtccgatgtggctaagtcacgcgccattgccatcccagtggacctggatagccaggttaacaatttatttctgaaaagtcatagcatcgtgcagaagacagctatgaattggaggctgtccgcgaggaacgccgcacggcgggactcggtattggcagcgagtcgcgactatcgaaacatcatcgagaggctgcaagacattgtttctgccttagaggacaggctgaggcctctcgtccaagcggaactaagcgtcctggtcgatgtgttacatagacccgaattactgtttcctgaaaatactgacgcgcggaggaaatgcgagtccggcggcttcatatgtaaactgatcaagcacaccaagcaattactggaggaaaatgaggagaaactgtgcataaaagtcttgcaaaccttacgagaaatgatgaccaaagaccgaggctacggggagaagctgatctctatcgacgagctggacaatgctgaacttccccctgcacctgattctgagaacgctacagaagagttagaaccatcaccgccactgcgccagttggaagaccacaagaggggggaagccctgcgacaggtcctggtgaatagatattacggaaatgtccggccatctggcagacgggaatccctgacatcattcggtaacggcccactgtccgcaggaggtccaggcaagcccgggggtggggggggaggcagcgggtcctcaagcatgtctcgaggagaaatgagcctggctgaagtgcagtgtcacttggataaagagggtgcctcaaatttggtaatcgacctgatcatgaatgcctctagcgatagggtttttcacgaatccatactcctggctattgccctgttggaagggggtaacaccacaatacagcactcgttcttctgccggttgacagaggataaaaagagcgagaagttctttaaagtattctatgatagaatgaaggtcgcacaacaggagattaaggctaccgtaaccgtgaatacttccgaccttggcaataaaaagaaggacgatgaagtagaccgcgatgctccgtcaagaaagaaagctaaggaaccaaccacccagattacagaggaagttcgcgaccaactccttgaggcatccgccgctaccagaaaggcctttacaactttcaggagggaggctgaccctgatgaccactatcagccaggcgagggcacacaggcaactgctgacaaggcgaaggacgacctggaaatgagcgccgtcattaccattatgcagccaatcctgcgcttcttacagttgctttgtgagaaccataatagagacttacagaatttccttagatgccagaacaataagacgaactacaatctggtctgcgagaccctccaatttctcgactgcatttgcggatccaccacggggggcctcggactcctggggctgtatattaacgaaaaaaatgtggccctgattaatcagacactggaaagcttgaccgagtactgccagggaccatgtcatgagaatcagaattgcatcgccacccacgagtctaacggcattgacattatcacagcactgattctgaatgacatcaaccccctaggaaagaaacgcatggatctcgtgctagaactcaaaaacaatgcctcaaaactattgctggcgataatggagagtcgtcatgactcggagaatgcagagaggatcctgtacaatatgaggcccaaagagctggtcgaagtgatcaagaaggcttatatgcagggtgaagtcgagttcgaggacggggagaacggtgaggacggggcagcttccccacggaacgtcggtcataatatctacattttggcccaccagttagcgaggcataataaggagttgcagtccatgctgaagccagggggacaggtcgatggtgatgaagcccttgaattttacgccaaacacactgcccagatcgagattgtaagactggaccggactatggaacagatcgtgtttccggtgccaagcatttgcgaattccttaccaaggagtcaaagctgcgcatttattacacaacagagcgtgacgagcaagggtccaaaatcaatgattttttcctgagatccgaagacctgttcaatgagatgaactggcaaaagaagctgcgcgcacagccggtcctctactggtgcgctagaaacatgagtttctggagctctatctccttcaatctggccgtgctgatgaacctgttagtagccttcttctacccttttaagggggttagagggggcaccttggagcctcactggagtggacttctctggacggcaatgctgatttcactcgctattgtaatagctctgccaaagccacatggaattcgggccttgatcgcttccacaatcctgagattaattttcagcgtcggccttcagccaacactcttccttctcggtgcatttaacgtgtgtaataaaataatttttttgatgtcatttgtcggcaattgtggcactttcacccgaggctatcgcgccatggtgcttgatgtggagttcttgtaccacctgctttatctggtgatctgcgctatgggcctgtttgtgcacgaatttttttatagcttgctgttgtttgatctggtgtaccgtgaggaaacccttctgaatgtgataaagagcgttaccaggaacggaaggtccattatcctgacagctgtcctcgctctcatcctggtgtacctgttctccatagtcggatacctgttcttcaaggatgacttcatcctcgaggtggatcggctccccaatgagacagctgtcccggaaacaggagaaagtttggcgagcgaatttctgttctctgatgtatgccgagtggagagcggggagaattgttctagccctgctcccagggaggagctcgtgcctgcagaggagacagaacaggataaagaacatacctgcgagaccctgctgatgtgtatagtgactgtgctaagtcatggcctgaggtcaggtggaggcgttggcgatgtcttgcgtaagccatctaaggaagagccactgtttgctgctcgcgtcatttacgacctccttttttttttcatggtgattattattgtgctgaaccttatcttcggggtgatcatagacacatttgctgatctgaggtccgaaaagcagaagaaagaggaaattctcaagacaacatgctttatctgcggactggaaagagacaagtttgacaacaagactgtaacgttcgaagaacacatcaaagaggagcacaatatgtggcactacctttgcttcatagtgcttgtgaaggtgaaggattcgaccgaatataccgggcctgagagttacgtcgcagaaatgatcaaggaacgtaacttggattggtttccacgtatgagagccatgtccttggtatcctctgattctgagggcgaacagaatgaactgcgtaacctgcaggaaaagcttgaatctacgatgaagcttgtgacaaatctttccgggcagctgtccgaattgaaagaccagatgaccgagcagaggaagcagaaacaaagaataggtcttctgggacatccaccccatatgaacgttaacccacaacagccggcatag

SEQ ID NO: 328027 - DNA, 3615 bp, Artificial Sequence
  derived and/or modified sequence
caggagcccggccactgccacagccggggccccggccagcccagccaacagcctctttcccaggttccgcagcattgcgccgaagcaatgaactggcggctctccgcgcgtaacgcggcgaggcgggacagcgtacttgccgctagccgggattaccgtaacattatcgagcggctgcaagatatcgtgagtgctctggaggacaggctgcgccctcttgtgcaggcagagctcagcgtgctggtggacgtcttgcaccgcccagagcttcttttccccgagaacacagatgcccgacgaaagtgcgagagtggcgggttcatatgtaagctcattaaacacaccaaacaactcctggaagaaaacgaggaaaaactgtgtatcaaagttctccagactctgcgcgagatgatgacgaaggacagaggttatggcgaaaagttgatctccatagatgaattggacaacgcagagttaccacctgctcccgactcggaaaatgctaccgaggaactggaaccctctccacctctccgccagcttgaagatcacaaacgcggtgaagccttaagacaggtgctcgtcaatcgttactacggaaatgtcaggccttccggacgcagggaaagtctgacatctttcggcaacggccccttgtcagccggagggccgggaaagccaggtggcgggggcggcgggtctggcagctcctctatgagtcgcggggagatgtcactggctgaagtgcagtgccatctcgacaaagaaggcgccagtaatctggtcatcgatctgatcatgaatgcttcgtcagatagagtcttccacgagagcattctgctggcaatcgcactgctggagggcggaaataccaccatccagcactcgttcttctgtagactaaccgaagacaaaaagagtgagaaattctttaaggtcttctatgataggatgaaggtggcgcagcaggagatcaaagctaccgtgaccgtcaatacttcagacttggggaacaaaaagaaggacgatgaagttgacagagacgccccctcccggaaaaaggctaaggaacctacaacacaaattactgaggaagtccgcgaccagctgctggaggctagcgcagcaacgaggaaagccttcaccactttccgacgcgaggctgacccagatgatcactatcaaccgggcgagggaacacaggctactgccgataaggccaaagacgacctcgaaatgagcgcagttataactatcatgcagcccatattgcgcttcctgcaactgctgtgtgagaatcacaaccgcgatctccagaacttccttcgatgccagaacaataaaactaattacaatctggtctgcgagacactgcagtttctagattgtatctgtggaagcacaactggtggactgggcttactcggcttatatattaacgagaaaaatgtcgccctgataaatcaaacgcttgagagcttgaccgagtactgccagggaccctgccacgagaaccagaactgtatagcaactcacgagtctaatggaattgacatcattacagccctgatcctgaacgatattaatcctctcggcaaaaagagaatggatcttgtcttggagctgaaaaataacgcctccaagctcctgctggccatcatggagtctcgacacgactccgagaacgctgagaggattttatacaatatgagaccaaaagaactggtggaagttatcaagaaagcgtacatgcagggagaggtggagtttgaagacggagaaaatggtgaggatggcgctgcgagtccaaggaacgtgggccacaacatctatatcttggcgcatcagctagcgcgccacaataaggagctgcaatccatgttaaagccaggggggcaggtggacggcgacgaagccctggagttttacgccaagcatactgcccagattgaaattgtccggctcgatcgtaccatggagcagatcgtctttccggtcccgagcatttgtgagtttctgactaaggaaagcaagttacgtatttactataccactgaacgagacgaacagggctcaaagatcaacgactttttccttcgttcagaggacctgttcaacgagatgaattggcagaaaaagctgagggcacagcccgtcttgtactggtgtgcaagaaacatgagtttctggtctagtattagttttaacctcgcagttctcatgaatctccttgttgccttcttctatcctttcaaaggggtaagagggggcactctcgagccccattggagcggcttgctttggaccgctatgctcatcagccttgctatagtcattgctcttccgaaacctcacggcatcagagccctaattgccagcactatcctgcgcctcatcttctctgtggggctgcagcctactctgttcttactgggagcatttaatgtctgcaataagatcatttttttaatgtcattcgtgggtaactgtgggaccttcactcgcggttatcgggcaatggtgttagatgtcgagtttctttatcatctcctgtatttggtgatttgtgctatggggctttttgtccacgaattcttttacagtctcctgctattcgacttggtttacagagaggagactttgcttaacgtcatcaagtcagtcaccaggaatggtagaagcattatcctgactgctgtactcgccctcatacttgtgtacctgttcagtatagtgggctatcttttcttcaaggatgacttcattttagaggttgaccgtttacctaacgagacagccgtgcccgagacgggcgaatctctcgcgtccgaattcttgttctcagatgtgtgtagagtagagagcggggagaactgctcatccccagcccccagggaggagctggttcctgcggaagagacggaacaggacaaggagcacacatgcgagaccctcctgatgtgcatcgtgacagtgctcagccacggtctgaggagtggtgggggcgtgggtgatgttttgagaaagccctccaaggaggagcccctgttcgcagctcgagtcatttacgatttgctgttttttttcatggtcatcattatagtgctcaacctgatctttggcgttattatcgacaccttcgctgacttgaggagcgaaaaacagaagaaggaggaaatcttaaagacaacctgtttcatctgcggccttgagcgtgacaagtttgacaataagacagtgaccttcgaggaacacattaaggaggagcataatatgtggcattacctctgctttattgtgctggtcaaggttaaagattctaccgagtacacaggaccagagtcctacgtggccgagatgattaaagagcgcaacctggactggttcccccgaatgcgcgcaatgagcttagtgtcctctgacagcgaaggagagcagaacgagctgagaaacttacaagagaagcttgagtccaccatgaagctggtcactaatctctcagggcagctgtcggaactcaaggatcagatgactgaacagcggaagcagaaacagagaatcggactgttggggcacccccctcacatgaatgtcaacccacaacagccagcttag

SEQ ID NO: 328028 - DNA, 8231 bp, Artificial Sequence
  derived and/or modified sequence
atgtctgacaagatgtcctctttcctgcatatcggagatatttgttccctgtacgcagagggctcaaccaatggatttataagtacactgggactagtcgacgatagatgcgttgtgcagcctgaaacgggtgacttaaacaaccctccaaagaagttccgcgactgcctctttaagctgtgtccgatgaaccggtatagcgcacagaaacaattctggaaagccgctaagccaggcgcaaattctaccaccgacgctgtcttgttaaataagctgcatcacgccgcagacctggagaagaaacagaatgaaacagagaaccgtaagctcctcgggactgtgatccagtatggcaatgtgatccagttactacatctgaagagcaataaatacctcacagttaataaaagacttcccgcattgcttgagaagaatgccatgcgggtgacgttggacgaagccggaaacgaggggtcctggttctatatacagcccttttacaagttgagatccataggcgactccgtggtgatcggggacaaagttgtactgaacccagtgaacgccggacagccgttgcacgcttcctctcatcagttggtggacaatcctggatgcaacgaagtgaattccgtgaactgtaacacctcctggaagatagtattgttcatgaaatggagcgataataaagacgacatactgaagggcggtgacgttgtgcgcttgttccacgctgagcaggagaagttcctcacctgcgacgaacatagaaagaagcagcacgtctttctgcggacaactggacgccaaagtgcaacctcagcaacaagctctaaggccttgtgggaagtcgaggtcgtccagcacgatccatgcagaggcggtgctggatattggaattcgctctttagattcaaacatctcgcaacaggtcactatttagctgctgaagtagacccagacttcgaggaggagtgcttggaattccaaccgagtgtggacccagatcaggatgcatctcggagccggcttagaaatgctcaggagaaaatggtctacagcttggtttccgtgcccgagggtaacgatatcagttccatctttgagctagatccaaccacacttcgaggaggcgactccctcgtgccacgcaattcttatgtccgacttaggcacctgtgcacaaacacatgggttcatagcactaacatacctattgacaaagaggaagagaaacccgtgatgctgaagattggtaccagccctgttaaggaggataaagaggcgttcgcaatcgttccggtcagtccagccgaggtgagggacttggacttcgccaacgacgcatctaaggtgcttggtagcatagccggtaaactggagaagggaacaataacccagaatgaacggcgatccgtgacgaaactgctcgaggacctggtttactttgtgactggcggtaccaactcaggacaggacgttctcgaggtggtctttagcaagccaaaccgggagcgccagaaacttatgagagagcaaaatattctcaaacaaatttttaagctactgcaggcgccttttactgactgtggcgatggcccaatgctcagacttgaggagcttggagaccagaggcacgcccctttccgtcatatttgtcgcctgtgctatcgtgttttgagacattcacagcaggactaccggaaaaaccaagaatacatcgctaagcaattcgggtttatgcaaaagcagattggttacgatgtcctggctgaggataccattacagctctgctccataataatcgcaagcttttggagaagcacattaccgctgcggagattgatactttcgtgagcctagtaagaaaaaacagagagccacgcttcctcgactatctctccgacctctgcgtgtccatgaataaaagcatcccagtgacccaggaattaatatgcaaggccgtcctgaatccaactaatgctgacatactgattgagacaaagttggtgttgtctcgattcgagtttgagggggtgtcctccactggagagaatgccctggaggccggagaagatgaagaagaagtatggctcttctggagggacagcaacaaagagatcaggagcaagtccgttcgggaactcgcccaagatgccaaagaaggccagaaggaggatcgagacgtgctgtcttattaccgctaccagctgaacctgttcgcgcgaatgtgtctggacaggcagtacttggcgatcaatgaaatatccggccagctagatgtggatctgattctcaggtgtatgtccgacgagaacctgccttacgacttaagagctagtttttgccggttgatgctccacatgcacgttgacagggatccccaggaacaggttacacccgtgaaatacgcgcgtctgtggtccgaaatcccatctgaaattgccattgacgactatgactcttctggagccagcaaggacgaaataaaggagagatttgcccaaactatggaattcgtggaggaatatctgagagatgtggtctgccagcgcttccccttctccgacaaagaaaagaataagcttaccttcgaagtagtgaatctggctcggaatctgatatatttcggcttctacaatttctccgatttgctccggctgactaagatcctactagccattctggactgcgtccacgtgaccaccattttcccaatctctaaaatggccaagggcgaggaaaataaaggaaacaatgacgtggagaagttgaaaagctctaatgttatgcggtccatccatggagttggcgagttgatgacgcaagtggtcctccgcggtgggggttttctcccaatgaccccaatggctgccgcaccagaggggaacgtgaaacaggctgagccagagaaggaagacataatggtgatggatacaaaactgaagattattgagattcttcagtttattttgaacgtgagacttgattatagaatttcctgtctcctgtgtatctttaaacgcgagtttgatgagtccaattcacagacctctgaaactagttccgggaactcaagccaggagggcccaagcaacgtgcctggggctttggacttcgaacacattgaggaacaggctgaaggcatttttggcggaagtgaagagaatacaccactggatctcgacgatcacggcggtagaacatttctgcgtgtactgcttcaccttacgatgcacgattacccacccctggtgtctggagctttgcagctactgttccgccacttcagccagcggcaggaagtactgcaggcctttaaacaggtccaactgctggtgacaagtcaagatgtggataactataagcaaataaaacaggacttagaccagctcaggtcaatcgttgaaaagagtgaactctgggtgtataaaggccagggaccagacgagactatggatggggcaagtggcgaaaatgaacataagaagacagaagagggcaataacaagccgcagaaacatgagtctacaagtagttacaactatcgtgtcgtgaaggaaatcttaatcaggctctcaaaactgtgcgttcaggaatctgcaagcgtgaggaagagcagaaaacagcaacagcggctgctcaggaacatgggggctcacgcggtggtgctggagttgctgcagattccttatgagaaagctgaagacacgaagatgcaagaaatcatgaggctagctcatgaatttttgcagaatttctgtgctggtaatcaacaaaaccaggcccttcttcacaagcatatcaatctcttcctgaatccgggtatccttgaggcagtgactatgcaacatatctttatgaataacttccagctctgttcagagatcaacgagagagtcgtgcagcattttgtccactgtatcgagactcacggaagaaatgtgcagtacatcaagttccttcagacgatcgtgaaagcagaaggcaagtttatcaagaaatgccaagatatggttatggcggagctcgtaaattccggggaagacgtgctcgtattctataacgatagagcttcatttcagacactgattcagatgatgcggtctgaaagagaccgcatggacgaaaactccccacttatgtatcacattcacttagtggaactgctggcggtgtgcactgaggggaaaaacgtatacacggaaattaagtgcaactccctgctccccctcgacgacattgtacgggttgtgactcatgaggactgcattcccgaagtgaagattgcttatatcaacttccttaatcactgttatgttgatactgaggtcgagatgaaagaaatctataccagtaaccacatgtggaagttgtttgagaacttccttgttgacatatgcagggcttgcaataatacttcagatcgaaagcatgccgatagtatcctggagaagtatgtaactgaaatcgtgatgtctattgttactactttttttagctccccattttctgaccaatccaccaccctgcagacgagacagccagtgttcgttcagctcttgcagggagtattccgcgtctatcactgtaactggctcatgcccagtcagaaggccagtgtggaatcgtgcattcgggtattgtcagacgtggctaagagccgggctattgctatcccggtggatctcgattcccaggttaacaacctgtttctgaagtcacactcaatcgtgcagaagaccgccatgaactggcgcctgagtgccagaaatgccgctaggagggactctgtgcttgcagccagcagggactatcggaatattattgagcgcttacaagatatcgtgagtgccctcgaggacagactgcgccctttagtgcaggccgaactgtcagtactggtagacgtcttgcacagaccagaattacttttccctgagaacaccgatgcccgacggaaatgcgagagcggaggatttatatgcaagttgattaagcacaccaagcagctcttggaggaaaacgaagagaagctgtgcattaaggttttgcagacactgagggaaatgatgaccaaggatcgcggatacggcgagaagctgatcagtatagacgagctggacaatgccgaattaccccctgcacccgattccgagaacgcgacagaaaaaggggaagcactcagacaagtgctggtgaaccggtactacggaaacgtgaggccatccgggaggcgggaatcactgacttcgtttggcaacggaccgctatccgccggagggccagggaaaccaggcggaggcggaggagggtctggaagctccagcatgagccggggagagatgtctcttgccgaagtacaatgccatttagacaaggagggggcatctaacctcgttatcgatttgattatgaacgcatcttccgacagagtcttccatgagagcattctccttgctatcgcccttctggagggaggcaacacaacgatacaacactcttttttctgtcgcttgactgaggataagaagtcggagaagtttttcaaagtcttctatgatagaatgaaggtggctcagcaggagataaaagcgaccgtgacagtaaacacttctgatcttgggaataagaaaaaagatgacgaggtggatcgagacgctcccagcaggaaaaaggccaaggagcccacaacacagattacagaagaggtgcgtgaccagctgttagaggcaagcgctgctactagaaaagcattcaccactttccgtcgtgaagcagatcccgacgaccactatcagcctggtgagggtactcaggcaaccgccgacaaagccaaagacgatctcgaaatgagcgcggtcattacaattatgcagccgattctgcggtttcttcagctgctgtgcgagaaccacaatcgcgacctccaaaattttctgcggtgccagaataacaaaaccaactacaaccttgtgtgcgaaacattacagttccttgattgtatctgcggatccacaacaggaggtctaggactcctgggattgtacatcaacgaaaagaatgtggctctaataaatcagactctggaatcgctgacagaatactgtcagggaccctgtcacgaaaaccaaaattgtattgctactcacgaaagcaatgggatcgacattataactgcgttgatcttaaatgacattaatccactcggcaaaaagaggatggatctggtgctggagttaaagaacaacgcaagcaagcttctgctggccatcatggagagtcgccacgattctgaaaacgctgaaaggatcctatataacatgagacccaaggagctggtggaggtgattaaaaaggcatatatgcagggcgaggtggagtttgaggatggggagaacggcgaggatggcgcagcatcgccgaggaacgtgggccataacatctatatcctggcccatcagctcgctaggcacaacaaggagctgcagagcatgctcaagccgggaggacaagtagatggcgacgaagcactggagttctatgccaaacacacagcccagattgaaattgtgagactagaccgcacaatggagcagattgtgtttcctgtgccctccatttgcgaattcctaactaaggagtctaaactgcgaatctattatacaacagaacgagacgaacaggggtctaagataaacgactttttcctcaggtctgaagatctcttcaacgagatgaattggcagaaaaagttaagggcccagcccgtgctctattggtgcgcaaggaatatgtccttttggagcagcatcagctttaacttggcggtcttaatgaatcttctcgtggcgttcttctatcccttcaaaggcgtcagaggtggcacactcgaaccccattggtccggcctactgtggacagctatgctaataagccttgcgatcgtgattgcactgcccaagccccatggcatccgcgctctgatcgcatccacaatactgcggttaatcttttccgtcggcctacagcccactctctttctgttgggtgcatttaatgtttgcaataagattatcttcctgatgtctttcgtgggcaattgcgggacgttcacccgcggttatagggccatggtgctggacgtggagttcctgtatcatctgctgtatctagtaatctgcgccatggggttgttcgtgcacgaattcttttactcgttgcttctattcgatctagtctaccgtgaagaaacactactcaatgtcataaagtcagtcacaagaaacgggaggagcattattctgactgcagtgcttgccctgatcctggtctatctgttttctatcgtagggtacctgtttttcaaagacgactttatcttagaggtggaccggcttccaaatgagacagctgtgccggagacgggtgaatccctggcatcagagttcctctttagcgacgtctgccgggttgaatccggggaaaactgtagcagtccagctccaagggaggagctggtccctgcagaggaaactgagcaggacaaagagcacacttgcgaaacgttactgatgtgcattgttaccgtcctgagtcatgggctgcggtccggagggggagttggggacgtgcttcggaagccaagtaaggaggagccccttttcgccgcaagagtgatttacgacctcctttttttcttcatggtgattattatcgtgctcaatctgattttcggagtaattatcgatacttttgccgaccttcggagtgagaagcagaaaaaggaggagatcctgaaaaccacttgctttatctgcggtctagagcgggacaaatttgataataagacagtgacttttgaagagcacatcaaagaggaacacaatatgtggcactacctttgctttatcgtactggtcaaagttaaagattctactgaatataccggtcctgaatcttacgtggcagaaatgattaaggaaagaaatcttgattggttcccccgaatgagagcaatgagccttgtgagtagcgacagcgagggcgagcaaaacgagttgcggaacctacaagagaagctagaatccacaatgaaactcgtgacaaacctaagtggccaactgtcggaactgaaggatcagatgaccgaacaacggaagcaaaagcagagaataggactgctgggtcatccccctcacatgaatgtaaacccccagcaaccggcata

SEQ ID NO: 328029 - DNA, 8276 bp, Artificial Sequence
  derived and/or modified sequence
atgagtgacaagatgagttccttcctgcatattggtgatatatgtagcctgtatgctgaggggtcaacaaatgggtttatatccacactggggcttgtggatgatcggtgcgtggtccagcctgagaccggagatctgaataacccaccgaagaaattccgggactgcctgtttaaactgtgtccaatgaacagatacagcgcccagaagcagttctggaaggccgctaagcctggcgctaactccacgactgatgcggtgctgctaaataagttacatcatgcagcagaccttgagaagaagcagaatgagaccgaaaaccgtaagttgctgggaacagtgattcagtacggcaacgtgattcaactgctacatctcaagagtaataagtatttaactgtgaataagcgattacccgcactccttgaaaaaaacgccatgagagtcacgctcgatgaggcagggaatgagggctcctggttttatatccagcctttttataagctccgttccatcggggactcagtagtcatcggggacaaggtggtgctgaaccccgtcaacgccggtcagcccctacacgccagttctcatcagctggtggataacccaggctgtaacgaggtgaatagtgtgaattgtaatacgtcctggaaaattgtactgttcatgaaatggtcagataacaaggacgacattcttaaggggggtgacgtggtcagattatttcacgccgaacaggagaaatttctaacttgcgacgagcaccggaagaagcagcatgtgtttctgcgcaccaccggcaggcagagtgccacatctgccacgagcagtaaagcactgtgggaggttgaagtagttcagcacgatccatgccgcggaggtgcgggatattggaattctctgtttcggttcaagcacctggccacgggccactacttggcggcagaggtggaccccgattttgaagaagagtgtcttgagttccagccgagtgtggaccctgaccaagatgctagtaggtcaaggctccgcaacgctcaggagaagatggtttacagcttggtgtccgttcccgagggtaacgacatcagttccatcttcgagctggatccaacaaccctgagaggaggcgattctctggtgcccaggaactcctacgtgcgcctgagacacctctgcacaaacacatgggtccactctactaacatacctatcgataaggaggaggagaagccagttatgttaaagattggcacaagtcctgtcaaggaagacaaggaagcgttcgcgatcgtccctgtgtcccccgctgaggtgagagaccttgatttcgccaacgatgcttctaaagtactggggagtatcgcaggaaagttggaaaagggaacaattacacaaaacgagaggcgctccgtcactaaattgttagaagatctggtgtacttcgttaccgggggtactaattccggacaggacgtgcttgaagtggttttctcaaagcctaacagggagaggcagaagctcatgcgggagcagaatattctcaagcagattttcaagctgttacaagctccttttacggactgcggtgatggacctatgctgcgacttgaggaactgggtgatcagcggcacgcccctttcaggcacatctgtcgtctttgttatcgcgtgctaagacatagccagcaggattatagaaaaaatcaggagtacatagccaagcagtttggatttatgcagaaacagatcggatatgacgtgctggctgaagataccataactgcccttctgcacaataatcgtaaactgttagagaagcacattaccgctgccgagattgacaccttcgtgtctctcgttcgcaaaaacagggaaccccgattcttggattatctgtctgacctctgcgtcagcatgaacaaatctataccagtgacccaagaactgatctgtaaagccgtactcaatcctaccaacgctgacattcttatcgagacaaagctggtcctttctcggttcgaattcgagggagtaagcagtacaggcgaaaacgcactcgaggctggcgaggatgaagaggaggtctggttgttctggagagacagcaataaggagattagaagtaagtccgtccgcgaactggcccaggacgccaaagaggggcagaaggaggacagggacgtcctgtcgtactataggtatcagctcaatcttttcgctagaatgtgcctggatagacaatatctggctatcaatgagatctctggtcaactcgatgtggacttgatactgaggtgcatgtccgatgagaatcttccctatgatctaagggccagtttttgccggcttatgcttcacatgcatgtggaccgtgacccccaggaacaggtaacacccgtgaagtatgccagactgtggagtgaaatacctagcgagattgctattgatgactatgactcttccggcgcttctaaggatgagataaaggaacgcttcgcgcagacgatggaatttgtggaagaatacctgagggatgtagtgtgccaacggttccccttctccgacaaggagaagaataagctgaccttcgaggtcgtcaacctcgcgcgaaatctgatctatttcggtttttataactttagtgacctgttgcgactaactaagattctactggccatcttggactgtgttcatgtcacaaccatttttccaatttctaaaatggcaaagggcgaagagaacaaggggaataacgacgtcgagaagctgaagagttccaatgtcatgcgttctatccatggggtgggagaactaatgactcaagtcgtcctgcgagggggtggtttcctgcctatgacccccatggctgccgctccagagggcaatgtgaaacaagctgaacctgagaaggaggacatcatggtcatggataccaaactgaaaattattgaaattcttcagttcattctgaacgttcgcttggactacagaatttcttgtttgctctgcatattcaagagggaattcgatgagagcaattcacagacaagcgaaacgtcttccggaaacagttcccaggaaggcccttccaacgtcccgggagccttagactttgaacacatcgaagaacaagctgagggaatttttggcggatctgaagagaatacaccattggatttggatgatcacggcggaaggacgttcctgagggttcttctccacctgacaatgcatgattatcccccacttgtgtctggagcactacagttgcttttccgacattttagccagcgccaggaagtgttgcaggcgtttaaacaggttcaactcttagtgaccagtcaggatgtagataactataagcagatcaaacaggaccttgatcagttgagaagcatcgtggagaagtccgagctctgggtctacaaaggacagggacccgacgaaaccatggatggcgcttctggggaaaatgaacacaagaaaactgaggaagggaacaataaaccacaaaagcatgagagtacgagttcctataattacagagtcgttaaggagattttgatcaggctcagcaagctgtgtgttcaagagagcgcctcagtgcgcaagtctagaaaacagcagcaacgcttgctgcgaaacatgggcgcacacgctgttgtgctcgagctgttacagattccctacgagaaggcggaggatactaagatgcaagaaattatgagactggcacacgaatttttacaaaacttttgcgctggcaatcagcaaaaccaggccttactgcacaaacatattaatctgtttttgaacccgggaatcctagaggcggtgaccatgcaacatatcttcatgaataattttcagctgtgttccgagataaacgagcgggtggtccagcatttcgttcactgcatcgaaacacatggtaggaatgtgcagtatattaaatttttgcagacaattgtgaaagccgaggggaagtttatcaaaaaatgccaggatatggtgatggcggaacttgtgaacagcggggaagatgtcctggtgttttacaatgaccgcgcaagctttcagactctcatacaaatgatgagatccgaacgcgatcggatggatgagaattctcccctcatgtatcatatccatctggtggagctgcttgccgtttgtaccgaggggaagaacgtgtacacggagataaagtgcaacagcctcttgcccctagacgacattgtgagagtggtcacccacgaggattgcattcccgaggtcaagatcgcctacatcaactttttgaaccactgttacgtcgacactgaagtggaaatgaaggagatttatacctctaaccatatgtggaagttgttcgaaaactttctggtcgacatctgccgcgcatgcaacaatacctctgaccgaaaacacgcagactcaattctggaaaagtacgtgaccgagatcgtgatgagcatcgtcaccacatttttttcatcccccttctctgatcagagcaccactctccagaccaggcagcccgtgtttgttcagttactccaaggcgtctttcgggtttaccactgcaattggctgatgccctcacagaaggcatcagttgagtcatgcattcgggtactgagcgacgtggcaaaatctcgagccattgctatcccggtcgaccttgattcacaggtaaacaatctctttttgaaatcccatagcatcgtccagaagacagctatgaactggcggctgtccgctagaaacgctgcacgacgcgacagtgtgttggccgcaagcagagattacagaaacattatagaacggcttcaggacattgtgtctgccctggaagataggctgcggcctctggtgcaggcagaactgagtgttctggtggatgtacttcacagacctgagttgctgttcccggaaaacaccgacgcccgacgtaaatgtgagagcggaggttttatttgcaaactaattaagcatactaaacagctcctggaagagaatgaggagaagctgtgtattaaggttctccagacactgcgagagatgatgacgaaggacaggggttacggcgagaagctcatctccattgatgagctagataacgccgagctcccgcctgcacccgattctgagaacgctaccgaagaactggaaccatcacccccacttcgacagctggaggatcacaagcgaggtgaggcattgagacaagtgttggtgaatcgatactatggtaatgtgaggcccagtggaaggcgggaatctttaacaagtttcgggaatgggccactctcagcaggtggccctggtaaacctggtgggggaggcggaggttctggcagtagctcaatgagcaggggagagatgtcacttgccgaggtccagtgccacttagacaaggaaggcgcttcaaatctggtcatagacttaattatgaacgcctcatctgatcgtgttttccacgaatctatcttattggccatagcccttttggagggcggtaacactacaatccagcacagttttttttgccgattaaccgaagacaagaagagcgaaaagttctttaaggtattttacgatcggatgaaggtggcgcaacaggagatcaaagccacagtcaccgtgaatacctcagatctgggcaacaaaaaaaaggatgatgaagtcgaccgagatgcaccttcgcggaaaaaagccaaggagcccaccacccagataaccgaggaggtgcgagatcagctgctggaggcgtcagctgccacaagaaaagctttcactacttttaggcgggaagcggacccagacgatcattatcagccgggagaaggcactcaggctaccgctgataaagcgaaggatgaccttgaaatgtccgccgtgattacgattatgcagcctatcctacgattcctacagctattgtgcgagaatcacaatagagacctgcagaacttcttgcgctgccagaataataagaccaactacaatctggtctgtgaaaccctgcagtttctagactgcatttgcggttcaacgacaggaggcctgggcctgttaggcctttatattaacgagaagaatgtagccctgatcaatcagacattggaatccttgacagagtattgtcagggaccctgtcacgagaatcagaattgcatcgccacccatgaatccaatggtatagatatcatcacagccctgatactcaatgacatcaatcccctgggtaaaaaacgcatggatctggttctcgagcttaagaacaatgccagtaagttactgctggcgatcatggagagtagacacgactccgaaaatgccgagcgcatcctctataacatgcgccctaaagaactcgtagaagtgattaaaaaggcatatatgcagggagaggtcgagttcgaagacggagaaaatggagaagatggcgctgccagcccaaggaacgtcgggcataacatttatattctggctcatcagctcgcaagacataataaagagcttcagtctatgctgaaacctgggggacaggtcgacggtgatgaagccctagaattctacgctaaacatacagctcagatcgagatcgtccgactggacaggaccatggagcagatagtcttccccgtccccagtatttgtgagtttttaactaaggagtctaagctgcggatctattacaccacagaaagagatgaacagggcagcaaaattaatgatttctttttgcgctctgaggatctattcaacgagatgaactggcagaagaagttgagggcccagcccgtcctgtactggtgcgcgaggaacatgagtttctggagctccatctcattcaatctcgccgtgctcatgaacctgctggttgcattcttctatccttttaagggcgtgagaggaggtaccctcgagccccattggtcgggcctgctctggaccgccatgctgatatccctggcgatcgtcattgccctacccaaaccccatggaattcgggctctgatagcttccaccatcctccggttgattttctctgtgggcttgcaacctaccctatttctcttaggagccttcaatgtgtgcaacaagattatttttctcatgagtttcgttggtaactgtggaacctttacacgtggttatcgcgctatggttctggacgtggagtttctctatcatctcttgtacctcgtaatttgcgccatggggttattcgttcacgagttcttttattctctcttgctgttcgatctagtctacagagaggagaccctccttaacgtgataaaatctgttacacgcaatggcaggtcgatcatcctgaccgctgtcctggccttgattctcgtatatctctttagcatcgtgggttatctgttctttaaggacgatttcatcctcgaggtggatagactgcccaacgaaacagccgttcctgagactggtgagagcctcgctagcgaatttttattctcggacgtgtgcagagtcgagagcggcgaaaactgctcaagccccgctcctcgcgaagagcttgttcccgcagaggagactgaacaggataaggaacatacttgtgaaaccctgttaatgtgcatagtcaccgtgctgtcacacggtctgcgctccggcggaggggtgggcgacgtgcttcgaaagcccagtaaggaggaaccgctcttcgccgctcgagtgatctacgatttgctttttttctttatggtgataataatcgtgcttaacctgatcttcggcgttattattgatacatttgctgatctacggtctgagaaacagaaaaaggaggagatcctgaaaacgacctgttttatttgcgggcttgaacgtgataagtttgataataaaactgtgacgttcgaagagcacatcaaagaggagcataatatgtggcactacctttgcttcatagtcctagtgaaggtcaaggactcaacagaatacacagggccagaatcgtatgtcgccgagatgatcaaagaacgtaatctggattggtttcccaggatgcgggcaatgagtctcgtcagttcagactctgagggcgaacagaacgagctcagaaatctgcaggagaagcttgagtccaccatgaagttggtgactaacttgagcgggcagctttcagagctgaaggaccagatgacagagcagagaaagcaaaaacagagaattggattgctcggacaccctccacatatgaatgtgaacccccaacaacccgcata

SEQ ID NO: 328030 - DNA, 3615 bp, Artificial Sequence
  derived and/or modified sequence
caggaaccaggccattgccattccaggggtccaggccagcctagccagcagccactctcacaagttcctcagcactgtgcggaagctatgaactggaggctgtcggctcgcaacgccgcacgcagggactctgtgctagctgcatcaagggactacaggaacatcatcgagcgcctccaggatatcgtgtccgctctcgaagaccggctccgaccgctggtacaggcagagctcagtgttttggtcgacgtgcttcatcggcctgaacttctttttcccgaaaataccgatgctcggaggaagtgcgagtcggggggttttatttgcaaactgatcaagcataccaagcaacttttggaagagaacgaagagaagctctgtattaaggtcctgcagaccttaagggagatgatgactaaagacaggggctatggcgaaaagcttatctcaattgacgagctcgataacgcagaactgccaccagcaccagactctgagaacgccacagaagagcttgagccctccccacccctgcgtcagttggaagatcacaaacgaggcgaggcccttcggcaggtcctggttaacagatattacggaaatgtaaggccgagtggcaggcgagagagcttgacctcatttggcaatggtcccctctcagctggcggtcctggtaaaccagggggaggaggagggggatccggttcatcctccatgagccgtggggagatgtcactggcagaggtgcaatgccacctagataaggagggggcaagcaacctggtgatcgaccttatcatgaatgcatccagtgaccgcgtgtttcacgaaagtatcctcctcgcgatcgctctccttgaaggaggaaacaccactatccagcactcttttttctgccgcctcacagaagacaagaaatcggagaaattttttaaggtgttctatgacagaatgaaagtggctcagcaggagataaaggctaccgtgaccgtaaatactagtgaccttggcaacaagaaaaaagatgacgaagttgatagggatgctcccagccgtaaaaaagcaaaggaacctaccactcagattactgaggaagtaagagaccagctccttgaggccagcgctgcgactaggaaggccttcactacttttcggagggaggctgacccggatgaccattaccagccgggtgagggaacacaggccaccgcggataaagctaaggacgaccttgagatgtccgcagtgatcacaattatgcaacccatcctgaggtttttacagttgttatgcgaaaaccataatcgcgatctccagaattttctgcggtgtcagaacaataaaaccaactacaatttggtgtgcgagactctccagtttcttgactgcatatgcggaagtacaacaggtggactcggcctacttggactttacattaacgagaagaatgtggccttgatcaatcaaaccttggagtcactcacagagtactgccagggaccgtgccatgagaatcaaaattgtatcgccactcatgaaagcaacggaattgatatcatcactgcactcattctgaatgatatcaaccccctcgggaaaaagagaatggacctggtcctggagttgaaaaacaatgcctctaaacttctgcttgcaatcatggaaagcagacatgattccgaaaacgccgagcgtatcctgtacaacatgcgacctaaggagctggtggaggtgattaaaaaggcttacatgcagggcgaggtggaattcgaagacggcgaaaacggggaagatggagcagcttctccacgcaacgtgggacacaacatctacatcctcgcgcatcaattggcacgccacaataaagagctccagtcaatgctcaaacccggaggccaggtcgacggggacgaggctctcgaattttacgcgaagcataccgcccagattgagatcgtacgattggatcgcacaatggagcaaatcgtgttcccagtaccttctatttgcgagttcctgaccaaagagagtaaactgcgcatttactataccacagagcgcgatgagcagggctccaagatcaacgatttcttcctgagatcagaggatttgttcaacgaaatgaattggcagaaaaagctgcgcgcacagcccgtactgtattggtgcgccagaaacatgtccttttggtcttcaatctcttttaatttggccgttctgatgaatctactcgtcgcctttttctaccccttcaaaggagtgagaggtgggacgctcgaaccccattggagcgggctgctgtggacagctatgttgatttccctggccattgtaatcgctctgccaaaaccacacggcattcgggcactgatcgcttcaaccatcttaagattgatcttttcagtcgggttacagcctacactattcctcctcggggctttcaacgtgtgtaataaaattattttcctcatgagctttgtgggtaattgcggtacctttactaggggttacagggccatggtattggatgtggagtttttatatcacctgctgtacctcgttatctgcgcaatggggttatttgtgcacgagttcttctacagtctgctcttgttcgacttggtgtacagggaggagactcttctaaatgtcatcaagtctgttaccaggaacggtcgatctattatccttaccgctgtgctcgcactgattctggtgtatctgttttctatagtgggctatctgtttttcaaggacgacttcatcttggaggtggacaggttacccaatgagaccgcggtgcctgaaacaggcgaaagcctagcttccgagttcctattcagtgacgtctgccgtgtcgagtctggcgagaattgctcatcccctgctcctagggaagagctggtaccagcagaagagaccgagcaggacaaagagcatacatgtgagactctgctaatgtgtatagtgaccgtgctttctcatggccttagaagcggcggtggagtcggcgatgtgttaagaaaaccatccaaggaagagccgctgtttgcagccagagttatctatgacctcctgtttttctttatggtcattatcatcgtgcttaacctaatcttcggcgtgattatcgatacttttgccgacctgcgaagcgagaaacagaagaaggaagagatccttaagactacatgcttcatctgtgggctggagcgcgataagttcgataataagaccgtgacattcgaggaacacataaaagaggaacataatatgtggcactacttgtgcttcatcgtactcgttaaagtgaaggactctactgagtacactggtcctgaaagttacgtcgcggaaatgatcaaagagcggaacctggactggtttccccgtatgagagcaatgagtctggtgtcaagcgactctgaaggcgagcaaaatgagttgcggaatttgcaggagaagctcgagtccaccatgaagctggtaacgaatttaagcggccaactaagtgaactgaaggaccagatgaccgagcagaggaaacaaaaacaaagaatcgggctgctcggccacccaccacacatgaacgttaatcctcagcagccagcttag

SEQ ID NO: 328031 - DNA, 8232 bp, Artificial Sequence
  derived and/or modified sequence
atgagcgacaagatgagcagcttcctgcacatcggcgacatctgcagcctgtacgccgagggcagcaccaacggcttcatcagcaccctgggcctggtggacgacagatgcgtggtgcagcccgagaccggcgacctgaacaacccccccaagaagttcagagactgcctgttcaagctgtgccccatgaacagatacagcgcccagaagcagttctggaaggccgccaagcccggcgccaacagcaccaccgacgccgtgctgctgaacaagctgcaccacgccgccgacctggagaagaagcagaacgagaccgagaacagaaagctgctgggcaccgtgatccagtacggcaacgtgatccagctgctgcacctgaagagcaacaagtacctgaccgtgaacaagagactgcccgccctgctggagaagaacgccatgagagtgaccctggacgaggccggcaacgagggcagctggttctacatccagcccttctacaagctgagaagcatcggcgacagcgtggtgatcggcgacaaggtggtgctgaaccccgtgaacgccggccagcccctgcacgccagcagccaccagctggtggacaaccccggctgcaacgaggtgaacagcgtgaactgcaacaccagctggaagatcgtgctgttcatgaagtggagcgacaacaaggacgacatcctgaagggcggcgacgtggtgagactgttccacgccgagcaggagaagttcctgacctgcgacgagcacagaaagaagcagcacgtgttcctgagaaccaccggcagacagagcgccaccagcgccaccagcagcaaggccctgtgggaggtggaggtggtgcagcacgacccctgcagaggcggcgccggctactggaacagcctgttcagattcaagcacctggccaccggccactacctggccgccgaggtggaccccgacttcgaggaggagtgcctggagttccagcccagcgtggaccccgaccaggacgccagcagaagcagactgagaaacgcccaggagaagatggtgtacagcctggtgagcgtgcccgagggcaacgacatcagcagcatcttcgagctggaccccaccaccctgagaggcggcgacagcctggtgcccagaaacagctacgtgagactgagacacctgtgcaccaacacctgggtgcacagcaccaacatccccatcgacaaggaggaggagaagcccgtgatgctgaagatcggcaccagccccgtgaaggaggacaaggaggccttcgccatcgtgcccgtgagccccgccgaggtgagagacctggacttcgccaacgacgccagcaaggtgctgggcagcatcgccggcaagctggagaagggcaccatcacccagaacgagagaagaagcgtgaccaagctgctggaggacctggtgtacttcgtgaccggcggcaccaacagcggccaggacgtgctggaggtggtgttcagcaagcccaacagagagagacagaagctgatgagagagcagaacatcctgaagcagatcttcaagctgctgcaggcccccttcaccgactgcggcgacggccccatgctgagactggaggagctgggcgaccagagacacgcccccttcagacacatctgcagactgtgctacagagtgctgagacacagccagcaggactacagaaagaaccaggagtacatcgccaagcagttcggcttcatgcagaagcagatcggctacgacgtgctggccgaggacaccatcaccgccctgctgcacaacaacagaaagctgctggagaagcacatcaccgccgccgagatcgacaccttcgtgagcctggtgagaaagaacagagagcccagattcctggactacctgagcgacctgtgcgtgagcatgaacaagagcatccccgtgacccaggagctgatctgcaaggccgtgctgaaccccaccaacgccgacatcctgatcgagaccaagctggtgctgagcagattcgagttcgagggcgtgagcagcaccggcgagaacgccctggaggccggcgaggacgaggaggaggtgtggctgttctggagagacagcaacaaggagatcagaagcaagagcgtgagagagctggcccaggacgccaaggagggccagaaggaggacagagacgtgctgagctactacagataccagctgaacctgttcgccagaatgtgcctggacagacagtacctggccatcaacgagatcagcggccagctggacgtggacctgatcctgagatgcatgagcgacgagaacctgccctacgacctgagagccagcttctgcagactgatgctgcacatgcacgtggacagagacccccaggagcaggtgacccccgtgaagtacgccagactgtggagcgagatccccagcgagatcgccatcgacgactacgacagcagcggcgccagcaaggacgagatcaaggagagattcgcccagaccatggagttcgtggaggagtacctgagagacgtggtgtgccagagattccccttcagcgacaaggagaagaacaagctgaccttcgaggtggtgaacctggccagaaacctgatctacttcggcttctacaacttcagcgacctgctgagactgaccaagatcctgctggccatcctggactgcgtgcacgtgaccaccatcttccccatcagcaagatggccaagggcgaggagaacaagggcaacaacgacgtggagaagctgaagagcagcaacgtgatgagaagcatccacggcgtgggcgagctgatgacccaggtggtgctgagaggcggcggcttcctgcccatgacccccatggccgccgcccccgagggcaacgtgaagcaggccgagcccgagaaggaggacatcatggtgatggacaccaagctgaagatcatcgagatcctgcagttcatcctgaacgtgagactggactacagaatcagctgcctgctgtgcatcttcaagagagagttcgacgagagcaacagccagaccagcgagaccagcagcggcaacagcagccaggagggccccagcaacgtgcccggcgccctggacttcgagcacatcgaggagcaggccgagggcatcttcggcggcagcgaggagaacacccccctggacctggacgaccacggcggcagaaccttcctgagagtgctgctgcacctgaccatgcacgactacccccccctggtgagcggcgccctgcagctgctgttcagacacttcagccagagacaggaggtgctgcaggccttcaagcaggtgcagctgctggtgaccagccaggacgtggacaactacaagcagatcaagcaggacctggaccagctgagaagcatcgtggagaagagcgagctgtgggtgtacaagggccagggccccgacgagaccatggacggcgccagcggcgagaacgagcacaagaagaccgaggagggcaacaacaagccccagaagcacgagagcaccagcagctacaactacagagtggtgaaggagatcctgatcagactgagcaagctgtgcgtgcaggagagcgccagcgtgagaaagagcagaaagcagcagcagagactgctgagaaacatgggcgcccacgccgtggtgctggagctgctgcagatcccctacgagaaggccgaggacaccaagatgcaggagatcatgagactggcccacgagttcctgcagaacttctgcgccggcaaccagcagaaccaggccctgctgcacaagcacatcaacctgttcctgaaccccggcatcctggaggccgtgaccatgcagcacatcttcatgaacaacttccagctgtgcagcgagatcaacgagagagtggtgcagcacttcgtgcactgcatcgagacccacggcagaaacgtgcagtacatcaagttcctgcagaccatcgtgaaggccgagggcaagttcatcaagaagtgccaggacatggtgatggccgagctggtgaacagcggcgaggacgtgctggtgttctacaacgacagagccagcttccagaccctgatccagatgatgagaagcgagagagacagaatggacgagaacagccccctgatgtaccacatccacctggtggagctgctggccgtgtgcaccgagggcaagaacgtgtacaccgagatcaagtgcaacagcctgctgcccctggacgacatcgtgagagtggtgacccacgaggactgcatccccgaggtgaagatcgcctacatcaacttcctgaaccactgctacgtggacaccgaggtggagatgaaggagatctacaccagcaaccacatgtggaagctgttcgagaacttcctggtggacatctgcagagcctgcaacaacaccagcgacagaaagcacgccgacagcatcctggagaagtacgtgaccgagatcgtgatgagcatcgtgaccaccttcttcagcagccccttcagcgaccagagcaccaccctgcagaccagacagcccgtgttcgtgcagctgctgcagggcgtgttcagagtgtaccactgcaactggctgatgcccagccagaaggccagcgtggagagctgcatcagagtgctgagcgacgtggccaagagcagagccatcgccatccccgtggacctggacagccaggtgaacaacctgttcctgaagagccacagcatcgtgcagaagaccgccatgaactggagactgagcgccagaaacgccgccagaagagacagcgtgctggccgccagcagagactacagaaacatcatcgagagactgcaggacatcgtgagcgccctggaggacagactgagacccctggtgcaggccgagctgagcgtgctggtggacgtgctgcacagacccgagctgctgttccccgagaacaccgacgccagaagaaagtgcgagagcggcggcttcatctgcaagctgatcaagcacaccaagcagctgctggaggagaacgaggagaagctgtgcatcaaggtgctgcagaccctgagagagatgatgaccaaggacagaggctacggcgagaagctgatcagcatcgacgagctggacaacgccgagctgccccccgcccccgacagcgagaacgccaccgagaagggcgaggccctgagacaggtgctggtgaacagatactacggcaacgtgagacccagcggcagaagagagagcctgaccagcttcggcaacggccccctgagcgccggcggccccggcaagcccggcggcggcggcggcggcagcggcagcagcagcatgagcagaggcgagatgagcctggccgaggtgcagtgccacctggacaaggagggcgccagcaacctggtgatcgacctgatcatgaacgccagcagcgacagagtgttccacgagagcatcctgctggccatcgccctgctggagggcggcaacaccaccatccagcacagcttcttctgcagactgaccgaggacaagaagagcgagaagttcttcaaggtgttctacgacagaatgaaggtggcccagcaggagatcaaggccaccgtgaccgtgaacaccagcgacctgggcaacaagaagaaggacgacgaggtggacagagacgcccccagcagaaagaaggccaaggagcccaccacccagatcaccgaggaggtgagagaccagctgctggaggccagcgccgccaccagaaaggccttcaccaccttcagaagagaggccgaccccgacgaccactaccagcccggcgagggcacccaggccaccgccgacaaggccaaggacgacctggagatgagcgccgtgatcaccatcatgcagcccatcctgagattcctgcagctgctgtgcgagaaccacaacagagacctgcagaacttcctgagatgccagaacaacaagaccaactacaacctggtgtgcgagaccctgcagttcctggactgcatctgcggcagcaccaccggcggcctgggcctgctgggcctgtacatcaacgagaagaacgtggccctgatcaaccagaccctggagagcctgaccgagtactgccagggcccctgccacgagaaccagaactgcatcgccacccacgagagcaacggcatcgacatcatcaccgccctgatcctgaacgacatcaaccccctgggcaagaagagaatggacctggtgctggagctgaagaacaacgccagcaagctgctgctggccatcatggagagcagacacgacagcgagaacgccgagagaatcctgtacaacatgagacccaaggagctggtggaggtgatcaagaaggcctacatgcagggcgaggtggagttcgaggacggcgagaacggcgaggacggcgccgccagccccagaaacgtgggccacaacatctacatcctggcccaccagctggccagacacaacaaggagctgcagagcatgctgaagcccggcggccaggtggacggcgacgaggccctggagttctacgccaagcacaccgcccagatcgagatcgtgagactggacagaaccatggagcagatcgtgttccccgtgcccagcatctgcgagttcctgaccaaggagagcaagctgagaatctactacaccaccgagagagacgagcagggcagcaagatcaacgacttcttcctgagaagcgaggacctgttcaacgagatgaactggcagaagaagctgagagcccagcccgtgctgtactggtgcgccagaaacatgagcttctggagcagcatcagcttcaacctggccgtgctgatgaacctgctggtggccttcttctaccccttcaagggcgtgagaggcggcaccctggagccccactggagcggcctgctgtggaccgccatgctgatcagcctggccatcgtgatcgccctgcccaagccccacggcatcagagccctgatcgccagcaccatcctgagactgatcttcagcgtgggcctgcagcccaccctgttcctgctgggcgccttcaacgtgtgcaacaagatcatcttcctgatgagcttcgtgggcaactgcggcaccttcaccagaggctacagagccatggtgctggacgtggagttcctgtaccacctgctgtacctggtgatctgcgccatgggcctgttcgtgcacgagttcttctacagcctgctgctgttcgacctggtgtacagagaggagaccctgctgaacgtgatcaagagcgtgaccagaaacggcagaagcatcatcctgaccgccgtgctggccctgatcctggtgtacctgttcagcatcgtgggctacctgttcttcaaggacgacttcatcctggaggtggacagactgcccaacgagaccgccgtgcccgagaccggcgagagcctggccagcgagttcctgttcagcgacgtgtgcagagtggagagcggcgagaactgcagcagccccgcccccagagaggagctggtgcccgccgaggagaccgagcaggacaaggagcacacctgcgagaccctgctgatgtgcatcgtgaccgtgctgagccacggcctgagaagcggcggcggcgtgggcgacgtgctgagaaagcccagcaaggaggagcccctgttcgccgccagagtgatctacgacctgctgttcttcttcatggtgatcatcatcgtgctgaacctgatcttcggcgtgatcatcgacaccttcgccgacctgagaagcgagaagcagaagaaggaggagatcctgaagaccacctgcttcatctgcggcctggagagagacaagttcgacaacaagaccgtgaccttcgaggagcacatcaaggaggagcacaacatgtggcactacctgtgcttcatcgtgctggtgaaggtgaaggacagcaccgagtacaccggccccgagagctacgtggccgagatgatcaaggagagaaacctggactggttccccagaatgagagccatgagcctggtgagcagcgacagcgagggcgagcagaacgagctgagaaacctgcaggagaagctggagagcaccatgaagctggtgaccaacctgagcggccagctgagcgagctgaaggaccagatgaccgagcagagaaagcagaagcagagaatcggcctgctgggccaccccccccacatgaacgtgaacccccagcagcccgcctag

SEQ ID NO: 328032 - DNA, 8277 bp, Artificial Sequence
  derived and/or modified sequence
atgagcgacaagatgagcagcttcctgcacatcggcgacatctgcagcctgtacgccgagggcagcaccaacggcttcatcagcaccctgggcctggtggacgacagatgcgtggtgcagcccgagaccggcgacctgaacaacccccccaagaagttcagagactgcctgttcaagctgtgccccatgaacagatacagcgcccagaagcagttctggaaggccgccaagcccggcgccaacagcaccaccgacgccgtgctgctgaacaagctgcaccacgccgccgacctggagaagaagcagaacgagaccgagaacagaaagctgctgggcaccgtgatccagtacggcaacgtgatccagctgctgcacctgaagagcaacaagtacctgaccgtgaacaagagactgcccgccctgctggagaagaacgccatgagagtgaccctggacgaggccggcaacgagggcagctggttctacatccagcccttctacaagctgagaagcatcggcgacagcgtggtgatcggcgacaaggtggtgctgaaccccgtgaacgccggccagcccctgcacgccagcagccaccagctggtggacaaccccggctgcaacgaggtgaacagcgtgaactgcaacaccagctggaagatcgtgctgttcatgaagtggagcgacaacaaggacgacatcctgaagggcggcgacgtggtgagactgttccacgccgagcaggagaagttcctgacctgcgacgagcacagaaagaagcagcacgtgttcctgagaaccaccggcagacagagcgccaccagcgccaccagcagcaaggccctgtgggaggtggaggtggtgcagcacgacccctgcagaggcggcgccggctactggaacagcctgttcagattcaagcacctggccaccggccactacctggccgccgaggtggaccccgacttcgaggaggagtgcctggagttccagcccagcgtggaccccgaccaggacgccagcagaagcagactgagaaacgcccaggagaagatggtgtacagcctggtgagcgtgcccgagggcaacgacatcagcagcatcttcgagctggaccccaccaccctgagaggcggcgacagcctggtgcccagaaacagctacgtgagactgagacacctgtgcaccaacacctgggtgcacagcaccaacatccccatcgacaaggaggaggagaagcccgtgatgctgaagatcggcaccagccccgtgaaggaggacaaggaggccttcgccatcgtgcccgtgagccccgccgaggtgagagacctggacttcgccaacgacgccagcaaggtgctgggcagcatcgccggcaagctggagaagggcaccatcacccagaacgagagaagaagcgtgaccaagctgctggaggacctggtgtacttcgtgaccggcggcaccaacagcggccaggacgtgctggaggtggtgttcagcaagcccaacagagagagacagaagctgatgagagagcagaacatcctgaagcagatcttcaagctgctgcaggcccccttcaccgactgcggcgacggccccatgctgagactggaggagctgggcgaccagagacacgcccccttcagacacatctgcagactgtgctacagagtgctgagacacagccagcaggactacagaaagaaccaggagtacatcgccaagcagttcggcttcatgcagaagcagatcggctacgacgtgctggccgaggacaccatcaccgccctgctgcacaacaacagaaagctgctggagaagcacatcaccgccgccgagatcgacaccttcgtgagcctggtgagaaagaacagagagcccagattcctggactacctgagcgacctgtgcgtgagcatgaacaagagcatccccgtgacccaggagctgatctgcaaggccgtgctgaaccccaccaacgccgacatcctgatcgagaccaagctggtgctgagcagattcgagttcgagggcgtgagcagcaccggcgagaacgccctggaggccggcgaggacgaggaggaggtgtggctgttctggagagacagcaacaaggagatcagaagcaagagcgtgagagagctggcccaggacgccaaggagggccagaaggaggacagagacgtgctgagctactacagataccagctgaacctgttcgccagaatgtgcctggacagacagtacctggccatcaacgagatcagcggccagctggacgtggacctgatcctgagatgcatgagcgacgagaacctgccctacgacctgagagccagcttctgcagactgatgctgcacatgcacgtggacagagacccccaggagcaggtgacccccgtgaagtacgccagactgtggagcgagatccccagcgagatcgccatcgacgactacgacagcagcggcgccagcaaggacgagatcaaggagagattcgcccagaccatggagttcgtggaggagtacctgagagacgtggtgtgccagagattccccttcagcgacaaggagaagaacaagctgaccttcgaggtggtgaacctggccagaaacctgatctacttcggcttctacaacttcagcgacctgctgagactgaccaagatcctgctggccatcctggactgcgtgcacgtgaccaccatcttccccatcagcaagatggccaagggcgaggagaacaagggcaacaacgacgtggagaagctgaagagcagcaacgtgatgagaagcatccacggcgtgggcgagctgatgacccaggtggtgctgagaggcggcggcttcctgcccatgacccccatggccgccgcccccgagggcaacgtgaagcaggccgagcccgagaaggaggacatcatggtgatggacaccaagctgaagatcatcgagatcctgcagttcatcctgaacgtgagactggactacagaatcagctgcctgctgtgcatcttcaagagagagttcgacgagagcaacagccagaccagcgagaccagcagcggcaacagcagccaggagggccccagcaacgtgcccggcgccctggacttcgagcacatcgaggagcaggccgagggcatcttcggcggcagcgaggagaacacccccctggacctggacgaccacggcggcagaaccttcctgagagtgctgctgcacctgaccatgcacgactacccccccctggtgagcggcgccctgcagctgctgttcagacacttcagccagagacaggaggtgctgcaggccttcaagcaggtgcagctgctggtgaccagccaggacgtggacaactacaagcagatcaagcaggacctggaccagctgagaagcatcgtggagaagagcgagctgtgggtgtacaagggccagggccccgacgagaccatggacggcgccagcggcgagaacgagcacaagaagaccgaggagggcaacaacaagccccagaagcacgagagcaccagcagctacaactacagagtggtgaaggagatcctgatcagactgagcaagctgtgcgtgcaggagagcgccagcgtgagaaagagcagaaagcagcagcagagactgctgagaaacatgggcgcccacgccgtggtgctggagctgctgcagatcccctacgagaaggccgaggacaccaagatgcaggagatcatgagactggcccacgagttcctgcagaacttctgcgccggcaaccagcagaaccaggccctgctgcacaagcacatcaacctgttcctgaaccccggcatcctggaggccgtgaccatgcagcacatcttcatgaacaacttccagctgtgcagcgagatcaacgagagagtggtgcagcacttcgtgcactgcatcgagacccacggcagaaacgtgcagtacatcaagttcctgcagaccatcgtgaaggccgagggcaagttcatcaagaagtgccaggacatggtgatggccgagctggtgaacagcggcgaggacgtgctggtgttctacaacgacagagccagcttccagaccctgatccagatgatgagaagcgagagagacagaatggacgagaacagccccctgatgtaccacatccacctggtggagctgctggccgtgtgcaccgagggcaagaacgtgtacaccgagatcaagtgcaacagcctgctgcccctggacgacatcgtgagagtggtgacccacgaggactgcatccccgaggtgaagatcgcctacatcaacttcctgaaccactgctacgtggacaccgaggtggagatgaaggagatctacaccagcaaccacatgtggaagctgttcgagaacttcctggtggacatctgcagagcctgcaacaacaccagcgacagaaagcacgccgacagcatcctggagaagtacgtgaccgagatcgtgatgagcatcgtgaccaccttcttcagcagccccttcagcgaccagagcaccaccctgcagaccagacagcccgtgttcgtgcagctgctgcagggcgtgttcagagtgtaccactgcaactggctgatgcccagccagaaggccagcgtggagagctgcatcagagtgctgagcgacgtggccaagagcagagccatcgccatccccgtggacctggacagccaggtgaacaacctgttcctgaagagccacagcatcgtgcagaagaccgccatgaactggagactgagcgccagaaacgccgccagaagagacagcgtgctggccgccagcagagactacagaaacatcatcgagagactgcaggacatcgtgagcgccctggaggacagactgagacccctggtgcaggccgagctgagcgtgctggtggacgtgctgcacagacccgagctgctgttccccgagaacaccgacgccagaagaaagtgcgagagcggcggcttcatctgcaagctgatcaagcacaccaagcagctgctggaggagaacgaggagaagctgtgcatcaaggtgctgcagaccctgagagagatgatgaccaaggacagaggctacggcgagaagctgatcagcatcgacgagctggacaacgccgagctgccccccgcccccgacagcgagaacgccaccgaggagctggagcccagcccccccctgagacagctggaggaccacaagagaggcgaggccctgagacaggtgctggtgaacagatactacggcaacgtgagacccagcggcagaagagagagcctgaccagcttcggcaacggccccctgagcgccggcggccccggcaagcccggcggcggcggcggcggcagcggcagcagcagcatgagcagaggcgagatgagcctggccgaggtgcagtgccacctggacaaggagggcgccagcaacctggtgatcgacctgatcatgaacgccagcagcgacagagtgttccacgagagcatcctgctggccatcgccctgctggagggcggcaacaccaccatccagcacagcttcttctgcagactgaccgaggacaagaagagcgagaagttcttcaaggtgttctacgacagaatgaaggtggcccagcaggagatcaaggccaccgtgaccgtgaacaccagcgacctgggcaacaagaagaaggacgacgaggtggacagagacgcccccagcagaaagaaggccaaggagcccaccacccagatcaccgaggaggtgagagaccagctgctggaggccagcgccgccaccagaaaggccttcaccaccttcagaagagaggccgaccccgacgaccactaccagcccggcgagggcacccaggccaccgccgacaaggccaaggacgacctggagatgagcgccgtgatcaccatcatgcagcccatcctgagattcctgcagctgctgtgcgagaaccacaacagagacctgcagaacttcctgagatgccagaacaacaagaccaactacaacctggtgtgcgagaccctgcagttcctggactgcatctgcggcagcaccaccggcggcctgggcctgctgggcctgtacatcaacgagaagaacgtggccctgatcaaccagaccctggagagcctgaccgagtactgccagggcccctgccacgagaaccagaactgcatcgccacccacgagagcaacggcatcgacatcatcaccgccctgatcctgaacgacatcaaccccctgggcaagaagagaatggacctggtgctggagctgaagaacaacgccagcaagctgctgctggccatcatggagagcagacacgacagcgagaacgccgagagaatcctgtacaacatgagacccaaggagctggtggaggtgatcaagaaggcctacatgcagggcgaggtggagttcgaggacggcgagaacggcgaggacggcgccgccagccccagaaacgtgggccacaacatctacatcctggcccaccagctggccagacacaacaaggagctgcagagcatgctgaagcccggcggccaggtggacggcgacgaggccctggagttctacgccaagcacaccgcccagatcgagatcgtgagactggacagaaccatggagcagatcgtgttccccgtgcccagcatctgcgagttcctgaccaaggagagcaagctgagaatctactacaccaccgagagagacgagcagggcagcaagatcaacgacttcttcctgagaagcgaggacctgttcaacgagatgaactggcagaagaagctgagagcccagcccgtgctgtactggtgcgccagaaacatgagcttctggagcagcatcagcttcaacctggccgtgctgatgaacctgctggtggccttcttctaccccttcaagggcgtgagaggcggcaccctggagccccactggagcggcctgctgtggaccgccatgctgatcagcctggccatcgtgatcgccctgcccaagccccacggcatcagagccctgatcgccagcaccatcctgagactgatcttcagcgtgggcctgcagcccaccctgttcctgctgggcgccttcaacgtgtgcaacaagatcatcttcctgatgagcttcgtgggcaactgcggcaccttcaccagaggctacagagccatggtgctggacgtggagttcctgtaccacctgctgtacctggtgatctgcgccatgggcctgttcgtgcacgagttcttctacagcctgctgctgttcgacctggtgtacagagaggagaccctgctgaacgtgatcaagagcgtgaccagaaacggcagaagcatcatcctgaccgccgtgctggccctgatcctggtgtacctgttcagcatcgtgggctacctgttcttcaaggacgacttcatcctggaggtggacagactgcccaacgagaccgccgtgcccgagaccggcgagagcctggccagcgagttcctgttcagcgacgtgtgcagagtggagagcggcgagaactgcagcagccccgcccccagagaggagctggtgcccgccgaggagaccgagcaggacaaggagcacacctgcgagaccctgctgatgtgcatcgtgaccgtgctgagccacggcctgagaagcggcggcggcgtgggcgacgtgctgagaaagcccagcaaggaggagcccctgttcgccgccagagtgatctacgacctgctgttcttcttcatggtgatcatcatcgtgctgaacctgatcttcggcgtgatcatcgacaccttcgccgacctgagaagcgagaagcagaagaaggaggagatcctgaagaccacctgcttcatctgcggcctggagagagacaagttcgacaacaagaccgtgaccttcgaggagcacatcaaggaggagcacaacatgtggcactacctgtgcttcatcgtgctggtgaaggtgaaggacagcaccgagtacaccggccccgagagctacgtggccgagatgatcaaggagagaaacctggactggttccccagaatgagagccatgagcctggtgagcagcgacagcgagggcgagcagaacgagctgagaaacctgcaggagaagctggagagcaccatgaagctggtgaccaacctgagcggccagctgagcgagctgaaggaccagatgaccgagcagagaaagcagaagcagagaatcggcctgctgggccaccccccccacatgaacgtgaacccccagcagcccgcctag

SEQ ID NO: 328033 - DNA, 3615 bp, Artificial Sequence
  derived and/or modified sequence
caggagcccggccactgccacagcagaggccccggccagcccagccagcagcccctgagccaggtgccccagcactgcgccgaggccatgaactggagactgagcgccagaaacgccgccagaagagacagcgtgctggccgccagcagagactacagaaacatcatcgagagactgcaggacatcgtgagcgccctggaggacagactgagacccctggtgcaggccgagctgagcgtgctggtggacgtgctgcacagacccgagctgctgttccccgagaacaccgacgccagaagaaagtgcgagagcggcggcttcatctgcaagctgatcaagcacaccaagcagctgctggaggagaacgaggagaagctgtgcatcaaggtgctgcagaccctgagagagatgatgaccaaggacagaggctacggcgagaagctgatcagcatcgacgagctggacaacgccgagctgccccccgcccccgacagcgagaacgccaccgaggagctggagcccagcccccccctgagacagctggaggaccacaagagaggcgaggccctgagacaggtgctggtgaacagatactacggcaacgtgagacccagcggcagaagagagagcctgaccagcttcggcaacggccccctgagcgccggcggccccggcaagcccggcggcggcggcggcggcagcggcagcagcagcatgagcagaggcgagatgagcctggccgaggtgcagtgccacctggacaaggagggcgccagcaacctggtgatcgacctgatcatgaacgccagcagcgacagagtgttccacgagagcatcctgctggccatcgccctgctggagggcggcaacaccaccatccagcacagcttcttctgcagactgaccgaggacaagaagagcgagaagttcttcaaggtgttctacgacagaatgaaggtggcccagcaggagatcaaggccaccgtgaccgtgaacaccagcgacctgggcaacaagaagaaggacgacgaggtggacagagacgcccccagcagaaagaaggccaaggagcccaccacccagatcaccgaggaggtgagagaccagctgctggaggccagcgccgccaccagaaaggccttcaccaccttcagaagagaggccgaccccgacgaccactaccagcccggcgagggcacccaggccaccgccgacaaggccaaggacgacctggagatgagcgccgtgatcaccatcatgcagcccatcctgagattcctgcagctgctgtgcgagaaccacaacagagacctgcagaacttcctgagatgccagaacaacaagaccaactacaacctggtgtgcgagaccctgcagttcctggactgcatctgcggcagcaccaccggcggcctgggcctgctgggcctgtacatcaacgagaagaacgtggccctgatcaaccagaccctggagagcctgaccgagtactgccagggcccctgccacgagaaccagaactgcatcgccacccacgagagcaacggcatcgacatcatcaccgccctgatcctgaacgacatcaaccccctgggcaagaagagaatggacctggtgctggagctgaagaacaacgccagcaagctgctgctggccatcatggagagcagacacgacagcgagaacgccgagagaatcctgtacaacatgagacccaaggagctggtggaggtgatcaagaaggcctacatgcagggcgaggtggagttcgaggacggcgagaacggcgaggacggcgccgccagccccagaaacgtgggccacaacatctacatcctggcccaccagctggccagacacaacaaggagctgcagagcatgctgaagcccggcggccaggtggacggcgacgaggccctggagttctacgccaagcacaccgcccagatcgagatcgtgagactggacagaaccatggagcagatcgtgttccccgtgcccagcatctgcgagttcctgaccaaggagagcaagctgagaatctactacaccaccgagagagacgagcagggcagcaagatcaacgacttcttcctgagaagcgaggacctgttcaacgagatgaactggcagaagaagctgagagcccagcccgtgctgtactggtgcgccagaaacatgagcttctggagcagcatcagcttcaacctggccgtgctgatgaacctgctggtggccttcttctaccccttcaagggcgtgagaggcggcaccctggagccccactggagcggcctgctgtggaccgccatgctgatcagcctggccatcgtgatcgccctgcccaagccccacggcatcagagccctgatcgccagcaccatcctgagactgatcttcagcgtgggcctgcagcccaccctgttcctgctgggcgccttcaacgtgtgcaacaagatcatcttcctgatgagcttcgtgggcaactgcggcaccttcaccagaggctacagagccatggtgctggacgtggagttcctgtaccacctgctgtacctggtgatctgcgccatgggcctgttcgtgcacgagttcttctacagcctgctgctgttcgacctggtgtacagagaggagaccctgctgaacgtgatcaagagcgtgaccagaaacggcagaagcatcatcctgaccgccgtgctggccctgatcctggtgtacctgttcagcatcgtgggctacctgttcttcaaggacgacttcatcctggaggtggacagactgcccaacgagaccgccgtgcccgagaccggcgagagcctggccagcgagttcctgttcagcgacgtgtgcagagtggagagcggcgagaactgcagcagccccgcccccagagaggagctggtgcccgccgaggagaccgagcaggacaaggagcacacctgcgagaccctgctgatgtgcatcgtgaccgtgctgagccacggcctgagaagcggcggcggcgtgggcgacgtgctgagaaagcccagcaaggaggagcccctgttcgccgccagagtgatctacgacctgctgttcttcttcatggtgatcatcatcgtgctgaacctgatcttcggcgtgatcatcgacaccttcgccgacctgagaagcgagaagcagaagaaggaggagatcctgaagaccacctgcttcatctgcggcctggagagagacaagttcgacaacaagaccgtgaccttcgaggagcacatcaaggaggagcacaacatgtggcactacctgtgcttcatcgtgctggtgaaggtgaaggacagcaccgagtacaccggccccgagagctacgtggccgagatgatcaaggagagaaacctggactggttccccagaatgagagccatgagcctggtgagcagcgacagcgagggcgagcagaacgagctgagaaacctgcaggagaagctggagagcaccatgaagctggtgaccaacctgagcggccagctgagcgagctgaaggaccagatgaccgagcagagaaagcagaagcagagaatcggcctgctgggccaccccccccacatgaacgtgaacccccagcagcccgcctag

SEQ ID NO: 328034 - DNA, 10211 bp, Artificial Sequence
  derived and/or modified sequence
gcagtaaccatgtggatgtgctgctgaagcgtttcctcaagctcgctggggtgggaggagaggaggaggaggaggtggtggtggaggaggaggcagggggtggagagagagaaagcgcacgccgagaggaggtgtgggtgttccgcttccatcctaacggaacgagctccctcttcgcggacatgggattacccagcggctgctaacccctctcctcgccctgctcccccaaaccggcgtggctccccgggcaccaaggagctgactacagaggagcaggatttgcacccctcgctgggcttgctttggcaacagagtgcctgacccaggtcaggattttcaagaaagacatgtctgacaaaatgtctagcttcctacatattggagacatttgttctctgtacgcggagggatcgacaaatggatttattagcaccttgggcctggttgatgatcgttgtgttgtacagccagaaaccggggaccttaacaatccacctaagaaattcagagactgcctctttaagctatgtcccatgaaccgctactctgcccaaaagcagttctggaaagccgctaagcctggggccaacagcaccacagacgcagtgctactcaacaaactgcaccacgctgcagacttggaaaagaagcagaatgagacagaaaacaggaaattgctggggaccgtaatccagtatggcaatgtgatccagctcctgcatttgaaaagtaataaatacctaacagtgaataagaggcttcctgctctgttggagaagaatgccatgagagtcacattggacgaggctggaaatgaagggtcctggttttatattcagccattctacaagctgcgatccattggagacagcgtggtcataggtgacaaggtggttctgaaccccgtcaatgctggtcagcccctacatgctagcagccatcaactggtagataacccaggctgcaatgaggtcaattccgtcaactgcaatacaagctggaaaatagtccttttcatgaaatggagtgataacaaagacgacatattaaaggggggtgacgtggtgaggctgtttcatgctgagcaggagaagtttctcacctgtgacgaacacaggaagaagcagcacgtcttcctgagaaccacgggccggcagtcggccacatctgccaccagttcaaaagccctgtgggaggtggaggtggtccagcatgacccatgtcggggcggagcagggtattggaacagccttttccgtttcaagcatctggccacggggcattacttggcagcagaggtagaccctgactttgaggaagaatgcctggagtttcagccctcagtggaccctgatcaggacgcctctcgaagtaggttgcggaatgcccaagaaaagatggtatactccctggtctctgtgcctgaaggcaatgacatctcctccattttcgagctagatcccaccactctgcgtggaggtgacagccttgtcccaaggaactcttatgttcggctcagacacctatgtactaatacctgggttcacagcacaaatattcctattgacaaggaagaagaaaagcccgtgatgctgaaaattggcacctctcctgtgaaggaggataaggaagcatttgccatagttccggtttctcctgctgaagttcgggacctggactttgccaatgatgccagcaaggtgctgggctccattgctgggaagctagagaagggcaccatcacccagaatgaaaggaggtctgtaaccaagctgctagaagatttggtttacttcgtcactggtggaactaattctggtcaagatgttctcgaagttgtcttctccaagcccaacagagaacggcagaaactgatgagagaacagaatattctcaagcagatcttcaagttgttacaagccccattcacagactgcggtgatggcccaatgcttcggctggaagagctcggggaccagcggcacgctcctttcagacacatctgccggctctgctacagggtgctgagacactcgcagcaagactacaggaagaaccaggagtatatagccaagcagtttggcttcatgcagaagcagattggctatgatgtgttggctgaagacactatcactgccctgctccacaataatcggaaactcctggaaaaacacattaccgcggcagagattgacacatttgtcagcctggtgcgaaagaacagggagcccagattcttagattacctctccgacctctgtgtctccatgaacaaatcaattccagtgacccaggaactgatatgtaaagctgtgctgaaccccaccaacgctgacatcctgattgagaccaagttggttctttctcgttttgaatttgaaggtgtctcttccactggagagaatgctctggaggcaggagaagacgaggaagaggtgtggctgttttggagggacagcaacaaagagattcgcagcaagagtgtgagggaattggctcaggatgctaaagaagggcagaaggaggaccgagacgttctcagctactacagatatcagctgaacctctttgcgaggatgtgtctggaccgccaatacctggccatcaacgaaatctcaggccagctggatgtcgatctcattctccgctgcatgtctgacgagaacctgccctatgacctcagggcgtccttctgccgcctcatgcttcacatgcatgtggaccgagatccccaggaacaagtcacccccgtgaaatatgcccgcctctggtcggagattccctcggagatcgccattgacgactatgatagtagtggagcttccaaagatgaaattaaggagagatttgctcagaccatggagtttgtggaggagtatttaagagatgtggtttgtcagaggttccctttctctgataaagagaagaataagcttacgtttgaggttgtaaatttagctaggaatctcatatactttggtttctacaacttctctgaccttctacgattaactaagatccttctggccatattggactgtgtacatgtgacaacaatcttccccattagcaagatggcgaaaggagaagagaataaaggcagtaacgtgatgagatctattcatggcgtgggagagctgatgacccaggtggtgctccggggaggaggctttttgcccatgactcccatggctgctgcccctgaaggcaatgtgaagcaggcagagcctgagaaggaggacatcatggtcatggacaccaagctgaagatcattgagatactccagtttattttgaatgtgaggttggattataggatctcctgcctcctgtgtatatttaagcgagagtttgatgaaagcaattcccagacttcagaaacatcctccggaaacagcagccaagaagggccaagtaatgtaccaggtgctcttgactttgaacacattgaagaacaagcagaaggcatctttggaggaagtgaggagaacaccccactggacttggatgaccacggcggcagaacctttctccgtgtcctgctccacttgacgatgcatgactacccacccctggtgtcaggggccctgcagctcctcttccggcacttcagccagaggcaggaggtgctccaggccttcaaacaggttcaactgctggttaccagccaagatgtggacaactacaaacagatcaaacaagacttggatcaactgaggtccatcgtggaaaagtcagagctttgggtgtacaaagggcagggccccgatgagactatggatggtgcatctggagaaaatgaacataagaaaacggaggagggaaataacaagccacaaaagcatgaaagcaccagcagctacaactacagagtggtcaaagagattttgattcggcttagcaaactctgtgttcaagagagtgcctcagtgagaaagagcaggaagcagcaacagcgtctgctccggaacatgggcgcgcacgccgtggtgctggagctgctgcagattccctatgagaaggccgaagataccaagatgcaagagataatgaggttggctcatgaatttttgcagaatttctgcgcaggcaaccagcagaatcaagctttgctacataaacacataaacctgtttctcaacccagggatcctggaggcagtaaccatgcagcacatcttcatgaacaatttccagctttgcagtgagatcaacgagagagttgttcagcacttcgttcactgcatagagactcacggtcggaatgtccagtatataaagttcttacagacaattgtcaaggcagaagggaaatttattaaaaaatgccaagacatggttatggccgagctggtcaattcgggagaggatgtcctcgtgttctacaacgacagagcctctttccagactctgatccagatgatgcggtcagaacgggatcggatggatgagaacagccctctcatgtaccacatccacttggtcgagctcctggctgtgtgcacggagggtaagaatgtctacacagagatcaagtgcaactccctgctcccgctggatgacatcgttcgcgtggtgacccacgaggactgcatccctgaggttaaaattgcatacattaacttcctgaatcactgctatgtggatacagaggtggaaatgaaggagatttataccagcaatcacatgtggaaattgtttgagaatttccttgtagacatctgcagggcctgtaacaacactagtgacaggaaacatgcagactcgattttggagaagtatgtcaccgaaatcgtcatgagtattgttactactttcttcagctctcccttctcagaccagagtacgactttgcagactcgccagcctgtctttgtgcaactgctgcaaggcgtgttcagggtttaccactgcaactggttaatgccaagccaaaaagcctccgtggagagctgtattcgggtgctgtctgatgtagccaagagccgggccattgccattcccgtggacctggacagccaagtcaacaacctctttctcaagtcccacagcattgtgcagaagccatgaactggcggctctcagcccgcaatgccgcacgcagggactctgttctggcagcttccagagactaccggaatatcattgagagattgcaggacatcgtctccgcgctggaggaccgtctcaggcccctggtgcaggcagagttatctgtgctcgtggatgttctccacagacccgagctgcttttcccagagaacacagacgccagaaggaaatgtgaaagtggcggtttcatttgcaagttaataaagcatacaaaacagctgctagaagaaaatgaagagaagctctgcattaaggtcctacagaccctgagggaaatgatgaccaaagatagaggctatggagaaaagctaatttccattgatgaattggataatgctgagcttcctccagctccggattctgagaacgccactgaggagcttgaaccaagtccacccctgcggcagctggaagaccataaaaggggtgaggcgctcaggcaagttctggtcaaccgttactatggaaacgtcagaccttcgggacgaagagagagccttaccagctttggcaatggcccactgtcagcaggaggacccggcaagcccgggggaggagggggaggttccggatccagctctatgagcaggggtgagatgagtctggccgaggttcagtgtcaccttgacaaggagggggcttccaatctagttatcgacctcatcatgaacgcatccagtgaccgagtgttccatgaaagcattctcctggccattgcccttctggaaggaggcaacaccaccatccagcactcctttttctgtcgcttgacagaagataagaagtcagagaaattctttaaggtgttttatgaccggatgaaggtggcccagcaagaaatcaaagcaacagtgacagtgaacaccagtgacttgggaaataaaaagaaagacgatgaggtagacagggatgccccatcacggaaaaaagctaaagagcccacaacacagataacagaagaggtccgggatcagctcctggaggcctccgctgccaccaggaaagccttcaccactttcaggagggaggctgatcccgacgaccactaccagcctggagagggcacccaggccactgccgacaaggccaaggacgacctggagatgagcgcggtcatcaccatcatgcagcccatcctccgcttccttcagctcctgtgtgaaaaccacaaccgagacctgcagaacttcctccgttgccaaaataacaagaccaactacaatttggtatgtgagaccctgcagtttctggactgtatttgtggaagcacaactggaggccttggtcttctgggcttgtatataaatgaaaagaatgtagcgcttatcaaccaaaccctggaaagtctgaccgaatactgtcaaggaccttgccatgagaaccagaactgcatagccacccatgaatccaatggcattgacatcatcacagccctgatcctcaatgatatcaatcctttgggaaagaagaggatggaccttgtgttagaactgaagaacaatgcctcgaagttgctcctggccatcatggaaagcaggcacgacagtgaaaacgcagagaggatactttataacatgaggcccaaggaactggtggaagtgatcaagaaagcctacatgcaaggtgaagtggaatttgaggatggagaaaacggtgaggatggggcggcgtcccccaggaacgtggggcacaacatctacatattagcccatcagttggctcggcataacaaagaacttcagagcatgctgaaacctggtggccaagtggacggagatgaagccctggagttttatgccaagcacacggcgcagatagagattgtcagattagaccgaacaatggaacagatagtctttcccgtgcccagcatatgtgaattcctaaccaaggagtcaaaactacgaatttactatactacagagagagacgaacaaggcagcaaaatcaatgatttctttctgcggtctgaagacctcttcaatgaaatgaattggcagaagaaactgagagcccagcccgtgttgtactggtgtgcccgcaacatgtctttctggagcagcatttcgtttaacctggccgtcctgatgaacctgctggtggcgtttttctacccgtttaagggagtccgaggaggaaccctggagccccactggtcgggactcctgtggacagccatgctcatctctctggccatcgtcattgccctccccaagccccatggcatccgggccttaattgcctccacaattctacgactgatattttcagtcgggttacaacccacgttgtttcttctgggcgctttcaatgtatgcaataaaatcatctttctaatgagctttgtgggcaactgtgggacattcacaagaggctaccgagccatggttctggatgttgagttcctctatcatttgttgtatctggtgatctgtgccatggggctctttgtccatgaattcttctacagtctgctgctttttgatttagtgtacagagaagagactttgcttaatgtcattaaaagtgtcactcgcaatggacggtccatcatcctgacagcagttctggctctgatcctcgtttacctgttctcaatagtgggctatcttttcttcaaggatgactttatcttggaagtagataggctgcccaatgaaacagctgttccagaaaccggcgagagtttggcaagcgagttcctgttctccgatgtgtgtagggtggagagtggggagaactgctcctctcctgcacccagagaagagctggtccctgcagaagagacggaacaggataaagagcacacatgtgagacgctgctgatgtgcattgtcactgtgctgagtcacgggctgcggagcgggggtggagtaggagatgtactcaggaagccgtccaaagaggaacccctgtttgctgctagagttatttatgacctcttgttcttcttcatggtcatcatcattgttcttaacctgatttttggggttatcattgacacttttgctgacctgaggagtgagaagcagaagaaggaagagatcttgaagaccacgtgctttatctgtggcttggaaagagacaagtttgacaacaagactgtcacctttgaagagcacatcaaggaagaacacaacatgtggcactatctgtgcttcatcgtcctggtgaaagtaaaggactccaccgaatatactgggcctgagagttacgtggcagaaatgatcaaggaaagaaaccttgactggttccccaggatgagagccatgtcattggtcagcagtgattctgaaggagaacagaatgagctgagaaacctgcaggagaagctggagtccaccatgaaacttgtcacgaacctttctggccagctgtcggaattaaaggatcagatgacagaacaaaggaagcagaaacaaagaattggtcttctaggacatcctcctcacatgaatgtcaacccacaacaaccagcataagcaaatgaaagaaaggaattgtatttaccttttataattattattagtgtgggtatggctaatgagttctgattcacccacgaaggttacatttatgctgaatacatttgtaaatactcagttttatactgtatgtatatgattgctactctaaaggtttggatatatgtattgtaattagaattgttggcatgatgacatttcatttgtgccaaaaatattaaaaatgccttttttggaaggactaacagaaagcacctgatttgcacttgaaccagattatagatttaaaagtatatgacatgtattttgtatttaaaactagaatagccagtatttatgttttttataaaactgtgcaatacgaattatgcaatcacaatacatttgtagctcccgagtgtcctaaagggagtgcacttctttgaagctggtgtgttaatactatgtaataaatggttaactttcaaatgatgctgctgccaaaattatattaatagtgagtttcaggcccctgggcattttgtaccatgtaattatcctctggtgatgctgtttctcgttagtggcagtagtgcctccgtctcctagtgataatgctccaagtctatgaactgttaaatcagcattcattttaagaaaagcaactttagtttcaaagatacttttaagcttctaaattgatcatttaaactatttctttaaataagagagccaaattagaggctcatactttagcttgtgaagaagataatgaattttttaaagggaactttctatgcaatgttcaggataaatgcatactgctggccaatcagtgtcatctcctgggtaaattttgatgtcgcattataaagacatgcataattgatggtttctagattatctagtccaaacaatagagtttattttttcttcatctgaaccaacatgctacagtagctaagaagtattaaaactatatacatccatataaagatgaaatatgaactatctcattagaagtcatagttgaccacagacatgttattcttctgaaagagccacattttggttttatttcttgtcacatgatttcttttcttgatggatgaaaaatatgaaaggaaacttttatatctgttgcctagttttgtacatggatctcattttacaagagaatctctctgcaaaaaaaaaaaaaacagtttaaaaatgcattgaaagcagagttctgaaatgagtaaagtttgtaaatgcatatataaaaatatttaataaatgatgcagaatatacagtgactggttggtggctttcatttggcatttgtgacttaactgctattccatttatgtactttctttaggatcagtttgaagtacagtcggtttgattaccaggttaattcagaaaatgtttacctgattatttaaaaaaacacttgctgttgttatgacagctctgaggagaattattagaacaaacattggggagtatttagtacaacattcattcattcttctggattagtgactgccagccaggctgtcgggagcgccctactaaatctcctgtctcttctgcttttactgggggatctttaatttgctgtgtgccatgtggaagtatcgggaa

SEQ ID NO: 328035 - protein, 721 aa, Artificial Sequence
  derived and/or modified sequence
MSDKMSSFLHIGDICSLYAEGSTNGFISTLGLVDDRCVVQPETGDLNNPPKKFRDCLFKLCPMNRYSAQKQFWKAAKPGANSTTDAVLLNKLHHAADLEKKQNETENRKLLGTVIQYGNVIQLLHLKSNKYLTVNKRLPALLEKNAMRVTLDEAGNEGSWFYIQPFYKLRSIGDSVVIGDKVVLNPVNAGQPLHASSHQLVDNPGCNEVNSVNCNTSWKIVLFMKWSDNKDDILKGGDVVRLFHAEQEKFLTCDEHRKKQHVFLRTTGRQSATSATSSKALWEVEVVQHDPCRGGAGYWNSLFRFKHLATGHYLAAEVDPDFEEECLEFQPSVCNKIIFLMSFVGNCGTFTRGYRAMVLDVEFLYHLLYLVICAMGLFVHEFFYSLLLFDLVYREETLLNVIKSVTRNGRSIILTAVLALILVYLFSIVGYLFFKDDFILEVDRLPNETAVPETGESLASEFLFSDVCRVESGENCSSPAPREELVPAEETEQDKEHTCETLLMCIVTVLSHGLRSGGGVGDVLRKPSKEEPLFAARVIYDLLFFFMVIIIVLNLIFGVIIDTFADLRSEKQKKEEILKTTCFICGLERDKFDNKTVTFEEHIKEEHNMWHYLCFIVLVKVKDSTEYTGPESYVAEMIKERNLDWFPRMRAMSLVSSDSEGEQNELRNLQEKLESTMKLVTNLSGQLSELKDQMTEQRKQKQRIGLLGHPPHMNVNPQQPA

SEQ ID NO: 328036 - protein, 247 aa, Artificial Sequence
  derived and/or modified sequence
MLPSQEASKLYHEHYMRNSRAIGVLWAIFTICFAIINVVVFIQPYWVGDSVSTPKPGYFGLFHYCVGSGLAGRELTCRGSFTDFSTIPSSAFKAAAFFVLLSMVLILGCITCFSLFFFCNTATVYKICAWMQLLAALCLVLGCMIFPDGWDAETIRDMCGAKTGKYSLGDCSVRWAYILAIIGILNALILSFLAFVLGNRQTDLLQEELKPENKDFVGSTVSSVLRPGGDVSGWGVLPCPVAHSQGP

SEQ ID NO: 328037 - DNA, 744 bp, Artificial Sequence
  derived and/or modified sequence
atgctgcccagccaggaggccagcaagctgtaccacgagcactacatgagaaacagcagagccatcggcgtgctgtgggccatcttcaccatctgcttcgccatcatcaacgtggtggtgttcatccagccctactgggtgggcgacagcgtgagcacccccaagcccggctacttcggcctgttccactactgcgtgggcagcggcctggccggcagagagctgacctgcagaggcagcttcaccgacttcagcaccatccccagcagcgccttcaaggccgccgccttcttcgtgctgctgagcatggtgctgatcctgggctgcatcacctgcttcagcctgttcttcttctgcaacaccgccaccgtgtacaagatctgcgcctggatgcagctgctggccgccctgtgcctggtgctgggctgcatgatcttccccgacggctgggacgccgagaccatcagagacatgtgcggcgccaagaccggcaagtacagcctgggcgactgcagcgtgagatgggcctacatcctggccatcatcggcatcctgaacgccctgatcctgagcttcctggccttcgtgctgggcaacagacagaccgacctgctgcaggaggagctgaagcccgagaacaaggacttcgtgggcagcaccgtgagcagcgtgctgagacccggcggcgacgtgagcggctggggcgtgctgccctgccccgtggcccacagccagggcccctag

SEQ ID NO: 328038 - DNA, 744 bp, Artificial Sequence
  derived and/or modified sequence
atgttgccctcccaagaggcctccaaactgtaccacgagcactacatgcgcaatagcagggctatcggtgtgctgtgggctattttcaccatttgctttgcaatcatcaatgtcgtggtcttcatacagccttactgggtgggggacagcgtgagcaccccaaagcccggatatttcgggcttttccactactgcgtcggatcgggcctagcagggcgggagctgacgtgtaggggaagctttacggactttagtaccatcccatcctccgccttcaaagctgctgcattcttcgtcctgctgtccatggtcttaatcctaggttgcatcacatgcttctccctgttcttcttttgcaacaccgccacagtctataagatctgtgcatggatgcagcttcttgcggccctctgtctcgtgctcggatgtatgatattccccgacggctgggatgcggaaactatccgggacatgtgcggagccaaaaccggaaaatactcccttggcgactgttctgtgcgttgggcatacattctcgccataatagggattttaaacgccctcatcctttcttttctcgcatttgtgctgggaaaccgacaaacagacctgctgcaggaggagctcaagcccgaaaacaaagacttcgtgggcagtaccgtgtctagcgtgctgagacctggtggggacgttagcggatggggcgtactaccctgtccagttgcccacagtcagggaccttag

SEQ ID NO: 328039 - DNA, 1444 bp, Artificial Sequence
  derived and/or modified sequence
gcaagatggaggccgcgcagaggccgccgcctgggccgaggcagccgctgctgggagcgccgagccgcggcgcctaggccgtgccagtcccggatccgctgcctccggccgtgcccagcagctcccagacgcccccagctctgccccaggccccgccctcgcgggttccttgactcagggccgcttctcgcgtgcgtccccagctcccgcccggcagcccggcgctccgtcccgggccggcggcccccgccagccgccgccgccgccggccccgcctccgggcaccatgctgccctcgcaggaggcctccaagctctaccacgagcactacatgcggaactcgcgggccatcggcgtgctgtgggccatcttcaccatctgcttcgccatcatcaacgtggtggtcttcatccagccctactgggtgggcgacagcgtgagcacccccaagcctggctacttcggcctcttccactactgcgtgggcagcgggctggcgggccgcgagctcacctgccggggctccttcaccgacttcagcaccatcccgtccagcgccttcaaggcggccgccttcttcgtgctgctctccatggtgctgatcctcggctgcatcacctgcttttcgcttttcttcttctgcaacacggctacggtctacaagatctgcgcctggatgcagctcttggcagctctgtgcctcgtcctgggctgcatgatctttcctgatggctgggatgccgagaccatccgggacatgtgtggggccaagacggggaagtactccctgggggactgttcagtgcgctgggcatacatcctggccatcatcggcatcctcaacgccctcatcctctccttcctcgccttcgtgctgggcaaccggcaaacagacctgctgcaggaggagctcaagccggagaacaaagattttgtgggctctacagtaagctccgtgttgcggcccgggggtgatgtctctggatggggagtccttccctgccccgtggctcactcacagggaccctgaaaggccaggatcacagcccagtaattggcctgacctcagcttgtcctgccttctgccctctcgtcactccattcaagctctgagggaagaccctgatctcagacttacttctcaccgactaccctgcaagctccaggctttgaggagaggaaagcctggatgtggcctgggggagaggagaggccctccaaaccttgggagggtctaattcttgctcctccctcaatttgacctaagggagcctgcatctgcgtaggcccttgggcttctcctctcctctctagactggcctggaggtccctgcagatccccagggagagcggagctgtagttccagctccccaggccccctcagtctggagggctgccgcctggctgtatccgcacctcttctggtccctgcctcttcaagaa

SEQ ID NO: 328040 - DNA, 744 bp, Artificial Sequence
  derived and/or modified sequence
atgctgcccagccaggaggccagcaagctgtaccacgagcactacatgaggaacagccgggccatcggcgtgctgtgggccatcttcaccatctgctttgccatcatcaacgtggtggtgttcatccagccctactgggtgggggacagcgtgtccacccccaagccaggctacttcggcctcttccactactgtgtgggcagcggcctggccggccgggagctgacctgccggggcagcttcacagacttcagcaccatccccagcagcgccttcaaggctgctgccttctttgtgctgctgtccatggtgctgatcctgggctgcatcacctgcttcagcctcttcttcttctgcaacacagccaccgtgtacaagatctgtgcctggatgcagctgctggccgccctgtgcctggtgctgggctgcatgatcttcccagatggctgggatgctgagaccatccgggacatgtgtggggccaagacaggcaagtacagcctgggggactgcagcgtgcgctgggcctacatcctggccatcatcggcatcctgaatgccctgatcctgtccttcctggcctttgtgctgggcaaccggcagacagacctgctgcaggaggagctgaagccagagaacaaggactttgtgggcagcacagtgtcctctgtgctgcggcctggaggagatgtgtctggctggggcgtgctgccctgccctgtggcccacagccagggcccctag

SEQ ID NO: 328041 - DNA, 744 bp, Artificial Sequence
  derived and/or modified sequence
atgctgcccagccaggaggccagcaagctgtaccacgagcactacatgagaaactctagagctatcggcgttctctgggcgatcttcactatctgcttcgcaattatcaacgtggtcgtattcatccaaccctactgggttggtgattcggttagtaccccaaagcccggctactttgggctcttccactactgcgtaggaagcggcctcgctggccgggagttaacctgtcgggggtcttttactgatttcagcacaattccatcaagcgcttttaaggccgctgctttttttgtattgctctcgatggttctcatcctgggctgtataacatgtttctcactattcttcttctgtaacaccgccaccgtatacaagatatgtgcctggatgcagctcctggcagccttgtgtcttgttcttggatgcatgatttttcctgacggatgggatgctgagaccattagggatatgtgcggcgctaagaccggaaagtactctctgggggactgctcagtgcggtgggcctatattctcgccattatcgggattttaaacgcattgattctgtcatttctggccttcgtcctagggaataggcagacagacctcctgcaggaggagcttaagcctgaaaacaaagacttcgtaggaagtacggtgtcaagcgttctccgccctgggggtgatgtttccggttggggggtgctgccgtgtcctgtcgcgcacagtcagggaccatag

SEQ ID NO: 328042 - DNA, 744 bp, Artificial Sequence
  derived and/or modified sequence
atgctcccgtctcaagaagcctctaaactgtatcatgaacactacatgcgcaatagccgcgctatcggggtgttgtgggctatattcaccatctgcttcgccatcatcaacgttgtcgtgtttatccaaccatactgggtgggagactccgtatctacccccaaaccagggtattttggactctttcattactgcgtgggatccggactggcgggacgagagttgacctgccggggttccttcaccgacttttcaacaatccctagttctgccttcaaggccgctgcattctttgtgctactgtccatggtcttgattctgggttgtattacatgcttctccctgttcttcttctgtaacaccgctacagtgtataagatttgtgcctggatgcagttgctggctgccctgtgtcttgtgttaggttgcatgatcttcccggatggatgggacgctgagacaatccgcgacatgtgcggagcaaaaacagggaagtatagcctgggcgactgctctgtgcgatgggcgtacatcctcgccatcatcgggattcttaatgctctcatactttccttcctcgccttcgtactgggcaatagacagacagatctgttgcaggaagagttgaagcccgagaataaagactttgtgggatcgactgtgtcatccgtgctgaggcctggaggcgatgtaagcggatggggcgtacttccatgtcccgtcgcgcattcccaggggccttag

SEQ ID NO: 328043 - protein, 887 aa, Artificial Sequence
  derived and/or modified sequence
METTGDQGIEGMAYMDENRNITFTCPRTPSELINKSSPLEVLESAACEKLPTPTPQVVKEGDSFPDTLAKNGQEIAPAQISKSLMVDNYTKDGVPGQERPKGPSAVVPSTSTGGVALPITTAIETVNIHGDHSLKNKAELADSMKNEAGIDEGHVIGESESVHSGASKHSVEKVTELAKGHLLPGVPVEDQSLPGEARALEGYADRGNFPAHPVNEEKETKEGSVAVQIPDLLEDKAQKLSFCEDQNAQDRNSKGSDSLNKKVDLTLLSPKSENDKLKEISLACKITELESVSLPTPEIQSDFLHSKVEAPPSEVADTLVIMTASKGVRLPEPKDKILETPQKMTEKSESKTPGEGKKEDKSRMAEPMKGYMRPTKSRGLTPLLPKSTIQEQERHKQLKSAGIARPEEGRPVVSGTGNDITTPPNKELPPSPEKKTKPLATTQPAKTSTSKAKTQPTSLPKQPAPTTIGGLNKKPMSLASGLVPAAPPKRPAVASARPSILPSKDVKPKPIADAKAPEKRASPSKPASAPASRSGSKSTQTVAKTTTAAAVASTGPSSRSPSTLLPKKPTAIKTEGKPAEVKKMTAKSVPADLSRPKSTSTSSMKKTTTLSGTAPAAGVVPSRVKATPMPSRPSTTPFIDKKPTSAKPSSTTPRLSRLATNTSAPDLKNVRSKVGSTENIKHQPGGGRAKVEKKTEAAATTRKPESNAVTKTAGPIASAQKQPAGKVQIVSKKVSYSHIQSKCGSKDNIKHVPGGGNVQIQNKKVDISKVSSKCGSKANIKHKPGGGDVKIESQKLNFKEKAQAKVGSLDNVGHLPAGGAVKTEGGGSEAPLCPGPPAGEEPAISEAAPEAGAPTSASGLNGHPTLSGGGDQREAQTLDSQIQETSI

SEQ ID NO: 328044 - protein, 2297 aa, Artificial Sequence
  derived and/or modified sequence
MADLSLADALTEPSPDIEGEIKRDFIATLEAEAFDDVVGETVGKTDYIPLLDVDEKTGNSESKKKPCSETSQIEDLPLPPHPASLSFHLPLDTPSSKPTLLANGGHGVEGSDTTGSPTEFLEEKMAYQEYPNSQNWPEDTNFCFQPEQVVDPIQTDPFKMYHDDDLADLVFPSSATADTSIFAGQNDPLKDSYGMSPCNTAVVPQGWSVEALNSPHSESFVSPEAVAEPPQPTAVPLELAKEIEMASEERPPAQALEIMMGLKTTDMAPSKETEMALAKDMALATKTEVALAKDMESPTKLDVTLAKDMQPSMESDMALVKDMELPTEKEVALVKDVRWPTETDVSSAKNVVLPTETEVAPAKDVTLLKETERASPIKMDLAPSKDMGPPKENKKETERASPIKMDLAPSKDMGPPKENKIVPAKDLVLLSEIEVAQANDIISSTEISSAEKVALSSETEVALARDMTLPPETNVILTKDKALPLEAEVAPVKDMAQLPETEIAPAKDVAPSTVKEVGLLKDMSPLSETEMALGKDVTPPPETEVVLIKNVCLPPEMEVALTEDQVPALKTEAPLAKDGVLTLANNVTPAKDVPPLSETEATPVPIKDMEIAQTQKGISEDSHLESLQDVGQSAAPTFMISPETVTGTGKKCSLPAEEDSVLEKLGERKPCNSQPSELSSETSANFMYCGTPPTQAKQVCRPSDRRSTRPKPARVPPELLGGSPPWKTLDHRLGHCSLSESGWVSGSSSCGGPGNQRKSIHVDSLEPQRDLGREAWDIESTPIMMKKKKKKPKQKRYSQPRAGGPSDDDNADKPKGHPFAADTQKSGVLPSQPTTMGTEYGLVSGENLKRECLVNSSAARLVAENFVSESLRIPLYPSEEAPKTAISSQSKLRVEEESKSNKSVLQNQDKKLLKQHEYKPQPAPHLKTPVDKSQSVGPLNLKGPLAEVSAYNVETPLDIRLKEGCSPFLDQEVMGVVSKPTAAKEIPNLVPTLIASNPLECNLKEGNNESKMTKLQNVKLKEFPEGAEEDKELKKEAFPNERQEISIFTSEQLQGQVLVQVPGVENEPFKRMAGDGKSRKGRGSSGKMRTDSGKVKAKSELPFLLDSQKDGRAVLIPSEPVSKTEGMTTQDKSEELGLNSSKQPGTKADLTEAVVMGEPKEMTQPKVAGTMQALIPLESGSGMTQTSGVSTETGDVVKDMGVNNQSKEGRCPWKDHEAAPWISEKPKKRGNEGKSKKFKNNYSTQPARMERKEEILNPPFEGKDGDTGSIPHKSKEIGFTFPKMHDSSFSHTPDTPTVEAVDRKGGNFQVNFVELGTLGENKISTVKASTVTEPPAKVTDVSCQEQIQGAGFVPSVVSEENKTDAANRYTAVADKPSKRSNDGKSKKVKNSSPEKHILENKIDATKIHVPMETTGDQGIEGMAYMDENRNITFTCPRTPSELINKSSPLEVLESAACEKLPTPTPQVVKEGDSFPDTLAKNGQEIAPAQISKSLMVDNYTKDGVPGQERPKGPSAVVPSTSTGGVALPITTAIETVNIHGDHSLKNKAELADSMKNEAGIDEGHVIGESESVHSGASKHSVEKVTELAKGHLLPGVPVEDQSLPGEARALEGYADRGNFPAHPVNEEKETKEGSVAVQIPDLLEDKAQKLSFCEDQNAQDRNSKGSDSLNKKVDLTLLSPKSENDKLKEISLACKITELESVSLPTPEIQSDFLHSKVEAPPSEVADTLVIMTASKGVRLPEPKDKILETPQKMTEKSESKTPGEGKKEDKSRMAEPMKGYMRPTKSRGLTPLLPKSTIQEQERHKQLKSAGIARPEEGRPVVSGTGNDITTPPNKELPPSPEKKTKPLATTQPAKTSTSKAKTQPTSLPKQPAPTTIGGLNKKPMSLASGLVPAAPPKRPAVASARPSILPSKDVKPKPIADAKAPEKRASPSKPASAPASRSGSKSTQTVAKTTTAAAVASTGPSSRSPSTLLPKKPTAIKTEGKPAEVKKMTAKSVPADLSRPKSTSTSSMKKTTTLSGTAPAAGVVPSRVKATPMPSRPSTTPFIDKKPTSAKPSSTTPRLSRLATNTSAPDLKNVRSKVGSTENIKHQPGGGRAKVEKKTEAAATTRKPESNAVTKTAGPIASAQKQPAGKVQIVSKKVSYSHIQSKCGSKDNIKHVPGGGNVQIQNKKVDISKVSSKCGSKANIKHKPGGGDVKIESQKLNFKEKAQAKVGSLDNVGHLPAGGAVKTEGGGSEAPLCPGPPAGEEPAISEAAPEAGAPTSASGLNGHPTLSGGGDQREAQTLDSQIQETSI

SEQ ID NO: 328045 - DNA, 2664 bp, Artificial Sequence
  derived and/or modified sequence
atggagactactggtgaccaggggatcgaggggatggcatacatggacgaaaaccggaacatcaccttcacttgtcctagaacaccatctgagttgattaataagtcctctcctttagaggtcttggagtctgctgcctgtgagaagttgccaactcccactccacaagtcgttaaggaaggagacagctttcccgatactctggcaaagaatgggcaggaaattgctccagcgcagatatccaaaagtctaatggttgacaactacacgaaggatggggtgcccggtcaggaaaggcctaaaggcccttccgcagtggtgccaagtaccagcacgggaggtgtagcgctgccaattaccaccgcgatcgaaacagtgaacatacacggtgatcactcccttaagaataaggctgagcttgccgacagtatgaaaaatgaggccggcattgatgagggccacgttattggagaaagtgaaagcgtccactcaggcgcaagtaagcactcagtggaaaaagtcaccgaactggccaagggccacttgctgcctggggtccccgtcgaagaccagagtctgccaggggaagcacgggcactagaagggtatgccgacagagggaattttcctgcccatcctgtcaatgaggaaaaagagaccaaggaagggagcgtagccgtgcagatccctgatctgttagaggataaagcacagaaactgtccttctgcgaagatcaaaacgcacaagatcggaatagtaaagggagcgactctctgaataagaaagtggacctcacgctattgtctcctaagagcgagaatgacaagctcaaagagatttcattagcatgcaagattacggagctggagtcagtctcgctcccgacgccagagatacaatctgactttttgcatagtaaggttgaggccccaccaagcgaggtggccgatactctggttattatgacagcctccaaaggcgttcgcctgccagagccgaaagacaagattctcgaaactccccagaagatgaccgaaaagtccgagtctaagactcctggggaagggaagaaggaagataagtcccgaatggcggagccaatgaagggatacatgcggcccacaaagagtagaggcctgacaccattgttacccaagtctaccatccaggagcaggaaaggcacaagcagttgaagtcagccgggattgcacggcccgaagaagggaggcctgtcgtaagcggtacggggaatgacatcactacccctccaaacaaggagcttcccccttcaccggagaagaagaccaaacccttggcgacaactcagccagctaagactagcacatccaaggcaaaaacccagcccactagcctccctaagcagcccgcccccaccacgatcggtgggcttaataagaagcctatgtctctggcgtctggtctggttcccgctgctcctccaaagcggccggccgtggcgtcagctaggccatctatcctgccatcaaaagacgtcaagcctaaacccatcgcagatgccaaagcccccgagaagcgcgcatcaccatcaaaaccagcttctgctcccgccagccgcagcggaagcaaatctactcagaccgtcgcaaaaacaaccacggctgcggccgtcgcttctacggggccatcctcgcggtccccatctaccctgctgcccaaaaagcccacagctatcaaaactgaaggcaagccagccgaggtgaagaaaatgactgctaaatctgtccccgccgatctgtcaaggcctaagagtaccagcacaagtagcatgaagaagacaacgactctgagcggtactgctcccgccgccggcgttgtcccatccagagtaaaggctacccccatgccctccaggcctagtaccactcctttcattgataaaaagcctacaagcgcgaaacccagcagtacaacaccacggctgtctcgcctagcgaccaacaccagcgctccggatctgaagaatgtccgtagtaaagtggggtctacagagaatatcaaacatcagcctggcggaggacgagccaaggtcgaaaagaagacagaggctgctgcaaccactaggaaaccagagagcaacgccgttaccaaaactgcaggcccaatagcctctgcccagaagcagccagcaggcaaagttcagatagtttccaaaaaagtgtcttacagccacattcaatctaaatgcggttctaaggacaatattaaacacgtgcctgggggtggcaatgtgcagatacaaaacaaaaaggtagatatcagtaaagtttcttctaagtgcggcagtaaggccaacattaaacataagccagggggtggcgacgtcaaaatcgaatcccaaaagctaaattttaaagagaaagctcaggccaaggtgggctctttagacaatgtaggccatctcccagccgggggggcggtgaaaactgagggcggaggtagtgaagctccactatgccccggcccacctgcgggggaggagccagccatatctgaggccgcaccagaggcaggcgctccaacgtccgcgagcggcttaaatgggcaccctacactgagcgggggtggcgatcagcgcgaggcccagaccctggacagccagattcaggagacttccatatag

SEQ ID NO: 328046 - DNA, 6894 bp, Artificial Sequence
  derived and/or modified sequence
atggctgaccttagtcttgcggatgcattgaccgagccatcgcccgatattgagggggagataaagagagacttcatcgccaccctggaggccgaggcgttcgacgatgtggttggtgagactgtagggaaaaccgactacatcccactcctggacgttgacgaaaaaactggtaacagcgaatcaaaaaaaaagccatgctccgagaccagccaaatcgaagacctgccgttgcccccacacccagcatccctgtctttccatctgcccttggacacaccctcctctaaacctactcttctggccaatggggggcatggcgtggagggctccgatacaacaggctcccccaccgagtttctcgaggagaagatggcgtatcaggagtaccctaattctcagaattggcccgaggacaccaacttttgtttccaaccagagcaggtggtggatcctatccaaaccgacccattcaaaatgtaccacgacgatgacctcgctgacttggtgttcccgtcttccgctacagctgacacatcgatattcgctggacagaatgaccccttaaaggatagttacggtatgtcaccttgcaacacagccgtggtcccacaggggtggagcgtagaagctctgaactcaccgcactcagagagttttgtttccccagaagctgtcgccgagcccccccaacccactgctgttccactggaactggcaaaagagatcgagatggcctcagaggaaagacccccggcccaagctttggaaatcatgatgggcctgaaaacaacagatatggccccaagtaaagagacagagatggccttggccaaagacatggccctagcgaccaagaccgaagtcgccctggccaaggacatggaatctcccaccaaactggatgtaactctggctaaagatatgcagcctagtatggaaagcgacatggccctggtaaaggacatggagctaccgaccgaaaaagaggttgcgctggtaaaggatgtcagatggccaactgagactgacgtcagtagcgcaaagaacgtggtgctaccaaccgaaaccgaggtggctcccgcaaaagacgtgacattactgaaggagacagagagagcgtctccaataaagatggacctggcgccttctaaggacatgggtccaccaaaagaaaataaaaaggagaccgagagagcttcaccgatcaaaatggacctggcccctagcaaagacatggggccacccaaggagaacaaaatagtgccagccaaagatctggttttgctttccgaaatcgaagtcgcccaggccaacgacatcatctccagtacagagatttcttccgcagaaaaggtggctttgagctccgagaccgaggtggcactggcccgggatatgaccctcccacccgaaaccaacgttatactgacaaaggataaggccctgcccctggaggctgaggtcgcacccgtgaaagacatggcccaactgcctgagaccgaaattgcccccgcgaaggatgtcgcacccagcactgtcaaggaagttgggttgttgaaagacatgagcccactatctgagaccgagatggccttggggaaggatgttactcctccaccggaaacagaagtcgtgctgattaagaacgtgtgccttcctccagagatggaggtggctctcacggaggaccaagtgccagccttgaagaccgaggccccactcgctaaggacggcgtcctgaccctggccaacaatgtgacccccgcgaaagatgtaccacccctgtcagagaccgaagcaactcccgtgcctatcaaggatatggagattgcacagacccagaaaggaatctccgaagactcccacttggagagcctccaggacgtcgggcaatcggcagctccaacttttatgatctctcctgagactgtcacagggacaggcaaaaagtgctcacttccggccgaagaagactcagttttggaaaaactcggggaacgtaaaccatgcaattcccagccatctgaactgagctcggaaacatcagcaaatttcatgtactgcggcacccctcccacacaggctaagcaggtctgtcggccctcggatcgccggtctacccgcccaaagccggcccgcgttcctcccgagctgctagggggctcccccccatggaaaacgctcgaccaccggttgggtcattgctccttgtccgagtcagggtgggtctcgggtagctccagttgtggaggcccaggcaaccagcggaagagcattcatgtggactcactggagccgcaacgcgatctcggacgtgaggcctgggatattgaaagcacccctattatgatgaaaaagaaaaaaaaaaaacccaagcagaagcggtactcacaaccccgggctggcggcccttcagacgacgataacgctgataagcccaagggacacccatttgctgcagatacccagaagagcggtgtcctgccctcccagcccaccacgatgggcacggagtacggtttagttagcggagagaaccttaaaagggaatgtctggttaactcctccgccgcaagacttgtggccgagaactttgtgtccgagagcctgcggattcctctgtaccccagcgaggaggctcctaaaacagccatttctagccagagtaaactgcgtgttgaagaggaaagcaagagtaataaatctgtcctccagaaccaggacaaaaagctgctcaagcagcacgagtacaagccccagccagcgccacatctaaagacaccagttgataagtctcagtcagtgggccccctgaacctgaaaggcccacttgcagaggtgagcgcctacaatgtcgagacacccctagatattaggctgaaagaaggctgctctccttttcttgaccaggaagtgatgggagtggtgagtaaacctacggccgctaaagagattccgaacctcgtgccaaccttgattgcaagcaatccactcgagtgtaacttgaaggaggggaataacgaaagtaaaatgaccaaactgcaaaacgtaaagctaaaggagttcccggagggggctgaggaggataaggagttaaagaaggaggcatttccaaatgaacgccaggagatcagtatattcactagcgagcagttgcaaggtcaggtccttgttcaggtgccaggggtggagaacgaaccattcaaacgcatggccggggatgggaagtcccgaaaaggccgtggtagcagcgggaaaatgcggacagattcgggcaaagtcaaggcaaagtcagagctcccattcctgctggactcacagaaggatggcagagccgttttgatacctagtgagcctgtatccaagacagaggggatgactactcaagataaatctgaagaattgggacttaacagttcaaaacagccaggtacaaaagccgacctcacagaagcagtcgtgatgggagaacctaaggagatgacccagcccaaagtggccggcactatgcaagctctgatccctctggagtccggaagtggaatgacgcagacatctggcgtaagtacggagactggggatgtcgtcaaggatatgggagtgaacaatcaaagcaaagagggccggtgcccttggaaggatcacgaggctgccccctggatctctgaaaagcccaaaaaacggggaaatgagggaaagagtaaaaaatttaagaacaactacagcactcagccagcacgaatggagcgcaaggaggaaatcctgaatcctcccttcgagggcaaggacggagacaccggcagcattccacacaaatcgaaagaaatcgggttcacattcccgaaaatgcacgactctagtttttcgcacaccccagatacacctacagtggaggccgtcgatcggaaagggggcaattttcaggtgaactttgtcgaactgggcaccctaggtgagaacaagatatcaaccgtgaaggcctctactgtgactgagcctcctgctaaggtcaccgacgtaagttgccaggagcagattcagggcgcaggctttgtgccatctgtggtgtcagaagagaataagacagacgcagccaatagatacacggccgtcgcagacaaacctagtaaacgctccaacgacggtaagtccaagaaggtcaagaattcttcacccgaaaagcacattcttgaaaacaaaatcgacgccaccaagatacacgtgcccatggaaaccactggcgaccaggggattgagggtatggcctacatggacgagaaccgaaacatcacattcacatgcccccgaaccccaagcgaactcatcaataaatcatcacccctggaggtgctcgaatctgcggcatgtgagaaactgccaacgcccactccccaagtcgttaaagaaggggattcttttccagacacgctggctaagaacgggcaagagatagctccagcgcagattagcaagtccctcatggtggataattataccaaagacggggtccccggacaggaacgccctaagggcccctcagctgtagtgcccagcaccagtactggtggggtggcattgcctattaccaccgccatcgagactgtcaacattcatggggaccacagtctgaaaaacaaggcagagctagcagactccatgaagaatgaagctgggatcgatgaggggcacgtcattggcgaatccgagtccgtgcactcaggggcttcaaaacacagtgttgagaaagtcaccgaactggcaaaaggccacctgctgcctggggtccccgtagaggaccagagcctccccggcgaagccagggccctcgaggggtatgccgacaggggcaatttccctgcccatccggttaacgaggagaaagaaaccaaagagggcagcgttgccgtccaaatcccggatcttttagaggataaagcccagaaactatccttctgtgaggaccagaacgcacaggaccggaatagtaaaggaagcgacagcttgaataagaaggtggacctcaccctgctgtctcccaagagcgaaaacgacaaactgaaagaaatatctctcgcttgtaagattaccgaacttgaatcagtgtctctccctactccagagattcagtcagatttcttgcatagcaaggttgaggctcccccctcggaggttgccgacacgctggtaataatgaccgctagcaagggcgtacgcctgccagagcccaaggacaaaattttggagacgccccaaaagatgaccgagaagagtgagtctaagacaccgggcgagggtaaaaaggaggataagtcgcgtatggccgaacctatgaaagggtacatgcgtccgacgaaatctagaggactcacccccctcctcccaaagtccacgatccaggagcaggaacgccacaaacagctgaaatcagcgggcatcgctcgcccggaggaaggccgccctgtggtttccggtactgggaatgacattaccacgcctccaaacaaggagcttccaccctctcctgaaaagaaaactaagcctttagcgaccacgcagcccgccaagacctcaaccagtaaggcaaaaacccaacccacttctttacctaagcagcccgcaccgaccacaatcgggggcttaaacaagaaaccaatgtccttggcctctgggctggtcccggccgcgccccctaagaggcccgcggttgcctctgctaggccctctatcttgccaagtaaggatgtgaaaccaaaacctattgctgacgcgaaggccccagagaaacgagcgtccccgtccaagccagcgagtgctccggcatcacgctcagggtctaaatccacccaaacggttgctaagacaaccaccgctgctgctgtggcctcaaccggtccgagttctaggagcccctcaaccttactccctaagaagcccacagcgattaagactgaaggaaaacccgcagaggttaaaaagatgaccgctaagtctgttcctgctgatctgtcccggcccaaaagcaccagcactagctctatgaagaagaccacaacactcagcggaaccgcgcctgccgcaggcgtcgtgcccagcagggtcaaagccactcctatgcccagtcgtccttcaaccacacctttcattgacaagaagcccacttccgcgaagccaagcagcactacacctcgtctctcaagattggccaccaacacctccgctcctgacttaaagaacgtcagatctaaagtaggttctactgaaaacatcaagcatcagcccggtgggggaagagctaaagttgagaaaaagacagaggctgctgctacaactcgaaaaccagagtccaacgcagtaacaaagactgccgggcctatagcatctgcccagaaacagcctgctggaaaggtgcagatcgtgagtaagaaggtcagctatagtcacattcagtctaaatgcggctccaaggataacattaagcatgttcctggggggggtaatgtccagatccagaataaaaaagttgacataagtaaggtgagctcaaagtgtgggagcaaggcaaatatcaagcataaaccaggtggtggcgacgtaaagatcgagagtcaaaaactgaatttcaaagagaaggcacaagccaaagtggggtcgctggataatgttggccatttgcccgccggcggggcggtgaagacagaaggcgggggatcggaggcgcccctctgccctggcccgcctgctggcgaggagccagcaatctcagaagctgctccagaggccggcgccccaacaagcgcttccggtctgaacgggcatccaaccctgagtggaggcggggatcaacgcgaagcacaaaccctcgacagtcagattcaggagacaagcatctag

SEQ ID NO: 328047 - DNA, 2664 bp, Artificial Sequence
  derived and/or modified sequence
atggagaccaccggggaccagggcatcgagggcatggcctacatggatgaaaatagaaacatcaccttcacctgccccaggacccccagcgagctgatcaacaagagcagccccctggaggtgctggagagcgctgcctgtgagaagctgcccacccccaccccccaggtggtgaaggagggggacagcttcccagacaccctggccaagaatggccaggagatcgccccagcccagatcagcaagagcctgatggtggacaactacaccaaggatggagtgcccggccaggagcggcccaagggccccagcgctgtggtgcccagcaccagcactggaggagtggccctgcccatcaccacagccattgaaacagtgaacatccatggagaccacagcctgaagaacaaggccgagctggccgacagcatgaagaatgaggccggcattgatgagggccacgtgattggagagagcgagagcgtgcacagcggggccagcaagcacagcgtggagaaggtgacagagctggccaagggccacctgctgcccggggtgcctgtggaggaccagagcctgcccggggaggcccgggccctggagggctacgccgaccggggcaacttccctgcccaccctgtgaatgaggagaaggagaccaaggagggctctgtggccgtgcagatcccagacctgctggaggacaaggcccagaagctgtccttctgtgaggaccagaatgcccaggacaggaacagcaagggcagtgacagcctgaacaagaaggtggacctgaccctgctgagccccaagtcagaaaatgacaagctgaaggagatcagcctggcctgcaagatcacagagctggagagcgtgtccctgcccaccccagagatccagagcgacttcctgcacagcaaggtggaggcccctccttctgaggtggccgacaccctggtgatcatgacagccagcaagggcgtgcggctgcctgagcccaaggacaagatcctggagaccccccagaagatgacagagaagtctgagagcaagaccccaggagagggcaagaaggaggacaagagcaggatggccgagcccatgaagggctacatgaggcccaccaagagccggggcctgacccccctgctgcccaagagcaccatccaggagcaggagcggcacaagcagctgaagtctgctggcatcgcccggcctgaggagggccggcctgtggtgtctggaactggaaatgacatcaccaccccacccaacaaggagctgccccccagccctgagaagaagaccaagcccctggccaccacccagcctgccaagaccagcaccagcaaggccaagacccagcccaccagcctgcccaagcagcctgcccccaccaccatcggcggcctgaacaagaagcccatgagcctggccagcggcctggtgcctgctgccccacccaagaggcctgctgtggccagcgcccggcccagcatcctgcccagcaaggatgtgaagcccaagcccatcgcagatgccaaggcccctgagaagagggccagccccagcaagccagccagcgccccagccagccgcagcggcagcaagagcacccagacagtggccaagaccaccacagctgctgctgtggccagcacaggccccagcagccgcagccccagcaccctgctgcccaagaagcccacagccatcaagacagagggcaagccagctgaggtgaagaagatgacagccaagtctgtgcctgctgacctgagccggcccaagagcaccagcaccagctccatgaagaagaccaccaccctgtctggaacagccccagctgctggggtggtgcccagccgggtgaaggccacccccatgcccagccggcccagcaccacccccttcatcgacaagaagcccaccagcgccaagcccagcagcaccaccccccggctgagccggctggccaccaacaccagcgccccagacctgaagaatgtgcgcagcaaggtgggcagcacagagaacatcaagcaccagcccggcggcggccgggccaaggtggagaagaagacagaagctgctgccaccaccaggaagccagagagcaatgctgtgaccaagacagctggccccatcgccagcgcccagaagcagcctgctgggaaggtgcagatcgtgtccaagaaggtgtcctacagccacatccagagcaaatgtggcagcaaggacaacatcaagcacgtgcctgggggcggcaatgtgcagatccagaacaagaaggtggacatcagcaaggtgagcagcaaatgtggcagcaaggccaacatcaagcacaagccaggcggcggagatgtgaagattgagagccagaagctgaacttcaaggagaaggcccaggccaaggtgggcagcctggacaacgtgggccacctgcctgctggaggagctgtgaagacagaaggaggcggcagcgaggcccccctgtgccccggccccccagctggggaggagcccgccatcagcgaggccgcccctgaggccggggcccccaccagcgccagcggcctgaatggccaccccaccctgagcggcggcggggaccagcgggaggcccagaccctggacagccagatccaggagaccagcatctag

SEQ ID NO: 328048 - DNA, 6894 bp, Artificial Sequence
  derived and/or modified sequence
atggctgacctgagcctggctgatgccctgacagagcccagcccagacattgaaggagagatcaagagggacttcatcgccaccctggaggccgaggcctttgatgatgtggtgggggagaccgtgggcaagacagactacatccccctgctggatgtggatgagaagacaggcaacagcgagagcaagaagaagccctgcagcgagaccagccagatcgaggacctgcccctgcccccccacccagccagcctgtccttccacctgcccctggacacccccagcagcaagcccaccctgctggccaatggaggccacggcgtggagggcagtgacaccaccggcagccccacagagttcctggaggagaagatggcctaccaggagtaccccaacagccagaactggccagaggacaccaacttctgcttccagcctgagcaggtggtggaccccatccagacagaccccttcaagatgtaccatgatgatgacctggccgacctggtgttccccagcagcgccacagctgacaccagcatctttgctggccagaatgaccccctgaaggacagctatggcatgagcccctgcaacacagctgtggtgccccagggctggagcgtggaggccctgaacagcccccacagcgagagctttgtgtccccagaggccgtggccgagcccccccagcccacagctgtgcccctggagctggccaaggagattgagatggccagcgaggagcggcccccagcccaggccctggagatcatgatgggcctgaagaccacagacatggcccccagcaaggagacagagatggccctggccaaggacatggccctggccaccaagacagaggtggccctggccaaggacatggagagccccaccaagctggatgtgaccctggccaaggacatgcagcccagcatggagagtgacatggccctggtgaaggacatggagctgcccacagagaaggaggtggccctggtgaaggatgtgcgctggcccacagaaacagatgtgtcctctgccaagaatgtggtgctgcccacagaaacagaggtggccccagccaaggatgtgaccctgctgaaggagacagagcgggccagccccatcaagatggacctggcccccagcaaggacatgggcccccccaaggagaacaagaaggagacagagcgggccagccccatcaagatggacctggcccccagcaaggacatgggcccccccaaggagaacaagatcgtgcctgccaaggacctggtgctgctgtctgaaattgaggtggcccaggccaatgacatcatcagcagcacagagatcagcagcgctgagaaggtggccctgagcagcgagacagaggtggccctggcccgggacatgaccctgcccccagagaccaacgtcatcctgaccaaggacaaggccctgcccctggaggccgaggtggcccctgtgaaggacatggcccagctgcctgagacagaaattgccccagccaaggatgtggcccccagcacagtgaaggaggtgggcctgctgaaggacatgagccccctgtctgaaacagagatggccctgggcaaggatgtgaccccacctcctgagacagaggtggtgctgatcaagaatgtgtgcctgcccccagagatggaggtggccctgacagaggaccaggtgcctgccctgaagacagaggcccccctggccaaggatggagtgctgaccctggccaacaacgtgaccccagccaaggatgtgccccccctgtctgaaacagaggccacccctgtgcccatcaaggacatggagatcgcccagacccagaagggcatcagcgaggacagccacctggagagcctgcaggatgtgggccagagcgctgcccccaccttcatgatcagccctgagaccgtgacaggcaccgggaagaagtgcagcctgcctgctgaggaggacagcgtgctggagaagctgggggagaggaagccctgcaacagccagcccagcgagctgagcagcgagaccagcgccaacttcatgtactgcggcaccccacccacccaggccaagcaggtgtgccggcccagcgacagaagaagcacccggcccaagccagcccgggtgcccccagagctgctgggcggcagccccccctggaagaccctggaccaccggctgggccactgcagcctgtctgagagcggctgggtgtctggcagcagcagctgtggcggccctggcaaccagaggaagagcatccacgtggacagcctggagccccagagggacctgggccgggaggcctgggacatcgagagcacccccatcatgatgaagaagaagaagaagaagcccaagcagaagcgctacagccagccccgggccggcggccccagtgatgatgacaatgctgacaagcccaagggccacccctttgctgctgacacccagaagagcggcgtgctgcccagccagcccaccaccatgggcacagaatatggcctggtgtctggagagaacctgaagagagaatgtctggtgaacagcagcgctgcccggctggtggccgagaactttgtgtctgagagcctgcgcatccccctgtaccccagcgaggaggcccccaagacagccatcagcagccagagcaagctgcgggtggaggaggagagcaagagcaacaagtctgtgctgcagaaccaggacaagaagctgctgaagcagcacgagtacaagccccagcctgccccccacctgaagacccctgtggacaagagccagagcgtgggccccctgaacctgaagggccccctggccgaggtgtctgcctacaacgtggagacccccctggacatccggctgaaggagggctgcagccccttcctggaccaggaggtgatgggcgtggtgtccaagcccacagctgccaaggagatccccaacctggtgcccaccctcatcgccagcaaccccctggagtgcaacctgaaggagggcaacaatgaaagcaagatgaccaagctgcagaatgtgaagctgaaggagttccctgagggcgctgaggaggacaaggagctgaagaaggaggccttccccaatgaaaggcaggagatcagcatcttcaccagcgagcagctgcagggccaggtgctggtgcaggtgcctggggtggagaatgagcccttcaagaggatggctggagatggcaagagcaggaagggccggggcagcagcggcaagatgaggacagacagcggcaaggtgaaggccaagtctgagctgcccttcctgctggacagccagaaggatggccgggctgtgctgatccccagcgagcctgtgtccaagacagagggcatgaccacccaggacaagtctgaggagctgggcctgaacagcagcaagcagcccggcaccaaggctgacctgacagaagctgtggtgatgggagagcccaaggagatgacccagcccaaggtggccggcaccatgcaggccctgatccccctggagagcggcagcggcatgacccagaccagcggcgtgtccacagaaacaggagatgtggtgaaggacatgggcgtgaacaaccagagcaaggagggccgctgcccctggaaggaccacgaggccgccccctggatcagcgagaagcccaagaagagaggaaatgaaggcaagagcaagaagttcaagaacaactacagcacccagcctgccaggatggagaggaaggaggagatcctgaaccccccatttgagggcaaggatggagacaccggcagcatcccccacaagagcaaggagatcggcttcaccttccccaagatgcatgacagcagcttcagccacaccccagacacccccaccgtggaggccgtggacaggaagggcggcaacttccaggtgaactttgtggagctgggcaccctgggggagaacaagatcagcacagtgaaggccagcacagtgacagagcccccagccaaggtgacagatgtgtcctgccaggagcagatccagggcgccggctttgtgcccagcgtggtgtctgaggagaacaagacagatgctgccaaccgctacacagctgtggccgacaagcccagcaagaggagcaatgatggcaagagcaagaaggtgaagaacagcagccctgagaagcacatcctggagaacaagattgatgccaccaagatccacgtgcccatggagaccaccggggaccagggcatcgagggcatggcctacatggatgaaaatagaaacatcaccttcacctgccccaggacccccagcgagctgatcaacaagagcagccccctggaggtgctggagagcgctgcctgtgagaagctgcccacccccaccccccaggtggtgaaggagggggacagcttcccagacaccctggccaagaatggccaggagatcgccccagcccagatcagcaagagcctgatggtggacaactacaccaaggatggagtgcccggccaggagcggcccaagggccccagcgctgtggtgcccagcaccagcactggaggagtggccctgcccatcaccacagccattgaaacagtgaacatccatggagaccacagcctgaagaacaaggccgagctggccgacagcatgaagaatgaggccggcattgatgagggccacgtgattggagagagcgagagcgtgcacagcggggccagcaagcacagcgtggagaaggtgacagagctggccaagggccacctgctgcccggggtgcctgtggaggaccagagcctgcccggggaggcccgggccctggagggctacgccgaccggggcaacttccctgcccaccctgtgaatgaggagaaggagaccaaggagggctctgtggccgtgcagatcccagacctgctggaggacaaggcccagaagctgtccttctgtgaggaccagaatgcccaggacaggaacagcaagggcagtgacagcctgaacaagaaggtggacctgaccctgctgagccccaagtcagaaaatgacaagctgaaggagatcagcctggcctgcaagatcacagagctggagagcgtgtccctgcccaccccagagatccagagcgacttcctgcacagcaaggtggaggcccctccttctgaggtggccgacaccctggtgatcatgacagccagcaagggcgtgcggctgcctgagcccaaggacaagatcctggagaccccccagaagatgacagagaagtctgagagcaagaccccaggagagggcaagaaggaggacaagagcaggatggccgagcccatgaagggctacatgaggcccaccaagagccggggcctgacccccctgctgcccaagagcaccatccaggagcaggagcggcacaagcagctgaagtctgctggcatcgcccggcctgaggagggccggcctgtggtgtctggaactggaaatgacatcaccaccccacccaacaaggagctgccccccagccctgagaagaagaccaagcccctggccaccacccagcctgccaagaccagcaccagcaaggccaagacccagcccaccagcctgcccaagcagcctgcccccaccaccatcggcggcctgaacaagaagcccatgagcctggccagcggcctggtgcctgctgccccacccaagaggcctgctgtggccagcgcccggcccagcatcctgcccagcaaggatgtgaagcccaagcccatcgcagatgccaaggcccctgagaagagggccagccccagcaagccagccagcgccccagccagccgcagcggcagcaagagcacccagacagtggccaagaccaccacagctgctgctgtggccagcacaggccccagcagccgcagccccagcaccctgctgcccaagaagcccacagccatcaagacagagggcaagccagctgaggtgaagaagatgacagccaagtctgtgcctgctgacctgagccggcccaagagcaccagcaccagctccatgaagaagaccaccaccctgtctggaacagccccagctgctggggtggtgcccagccgggtgaaggccacccccatgcccagccggcccagcaccacccccttcatcgacaagaagcccaccagcgccaagcccagcagcaccaccccccggctgagccggctggccaccaacaccagcgccccagacctgaagaatgtgcgcagcaaggtgggcagcacagagaacatcaagcaccagcccggcggcggccgggccaaggtggagaagaagacagaagctgctgccaccaccaggaagccagagagcaatgctgtgaccaagacagctggccccatcgccagcgcccagaagcagcctgctgggaaggtgcagatcgtgtccaagaaggtgtcctacagccacatccagagcaaatgtggcagcaaggacaacatcaagcacgtgcctgggggcggcaatgtgcagatccagaacaagaaggtggacatcagcaaggtgagcagcaaatgtggcagcaaggccaacatcaagcacaagccaggcggcggagatgtgaagattgagagccagaagctgaacttcaaggagaaggcccaggccaaggtgggcagcctggacaacgtgggccacctgcctgctggaggagctgtgaagacagaaggaggcggcagcgaggcccccctgtgccccggccccccagctggggaggagcccgccatcagcgaggccgcccctgaggccggggcccccaccagcgccagcggcctgaatggccaccccaccctgagcggcggcggggaccagcgggaggcccagaccctggacagccagatccaggagaccagcatctag

SEQ ID NO: 328049 - DNA, 5004 bp, Artificial Sequence
  derived and/or modified sequence
atggaaaccacaggggaccagggaattgaaggaatggcctatatggacgaaaatagaaatattacatttacctgtcccagaacaccatcagagctgataaataaatcatctcctctagaggttctggaatcagcagcctgtgaaaaactgcccactcctactcctcaagtagtaaaggaaggtgattcctttccagataccttggcaaaaaatgggcaagagatagccccagcccagatttccaaatcattaatggtagataactacaccaaagatggagtcccaggtcaagaaagacccaagggtccctctgctgttgtgccctctacaagcacaggaggagttgctctacctattacaacagccatagaaacagttaacattcatggagatcactctcttaagaataaagctgagcttgctgattccatgaaaaatgaagcagggatcgatgaagggcatgtgataggagaatctgagtcagtgcacagtggtgcgtctaagcattcagtagagaaagtcacagagctagcaaaaggtcacctccttcctggagtgccagtagaagaccagagcctaccaggagaggccagagccctagaaggatatgcagatagaggtaatttcccagcacatccagtgaatgaagagaaagagactaaagaagggtctgttgcagttcagattcctgacttactggaagacaaagcacaaaagctcagtttttgtgaggaccaaaatgctcaagatagaaattccaaaggttcagatagtttgaataagaaggtagatctgactcttttgtctccaaaaagtgaaaatgataaattgaaagaaattagtctggcttgtaaaatcacggaattggaaagcgtttccttgccaacaccagaaatccagtcagatttcttacatagcaaagtcgaagctcctccttcagaggtggcggatacgttagtaataatgactgcttccaagggtgttcgactcccagaacccaaagataagattttggagacacctcagaaaatgacagaaaaatctgaatcaaagacaccaggagaagggaaaaaggaagataaaagcagaatggcagaaccaatgaaaggctacatgagacccaccaagtcccgaggacttactccacttttgccaaagtctacaatccaggaacaagagagacataagcaactgaagtccgctggaatagccaggccagaagaaggaaggcctgtggtgagtgggacaggaaatgacatcaccaccccaccgaacaaggagctcccaccaagcccagagaagaaaacaaagcctttggccaccactcaacctgcaaagacttcaacatcgaaagccaaaacacagcccacttctctccctaagcagccagctcccaccaccattggtgggttgaataaaaaacccatgagccttgcttcaggcttagtgccagctgccccacccaaacgccctgccgtcgcctctgccaggccttccatcttaccttcaaaagacgtgaagccaaagcccattgcagatgcaaaggctcctgagaagcgggcctcaccatccaagccagcttctgccccagcctccagatctgggtccaagagcactcagactgttgcaaaaaccacaacagctgctgctgttgcctcaactggcccaagcagtaggagcccctccacgctcctgcccaagaagcccactgccattaagactgagggaaaacctgcagaagtcaagaagatgactgcaaagtctgtaccagctgacttgagtcgcccaaagagcacctccaccagttccatgaagaaaaccaccactctcagtgggacagcccccgctgcaggggtggttcccagccgagtcaaggccacacccatgccctcccggccctccacaactcctttcatagacaagaagcccacctcggccaaacccagctccaccaccccccggctcagccgcctggccaccaatacttctgctcctgatctgaagaatgtccgctccaaggttggctccacggaaaacatcaagcatcagcctggaggaggccgggccaaagtagagaaaaaaacagaggcagctgctacaacccgaaagcctgaatctaatgcagtcactaaaacagccggcccaattgcaagtgcacagaaacaacctgcggggaaagtccagatagtctccaaaaaagtgagctacagccatattcagtccaagtgtggttccaaggacaatattaagcatgtccctggaggtggtaatgttcagattcagaacaagaaagtggacatctctaaggtctcctccaagtgtgggtctaaggctaacatcaagcacaagcctggtggaggagatgtcaagattgaaagtcagaagttgaacttcaaggagaaggcccaggccaaggtgggatccctcgataatgtgggccacctacctgcaggaggtgctgtgaagactgagggcggtggcagcgaggctcctctgtgtccgggtccccctgctggggaggagccggccatctctgaggcagcgcctgaagctggcgcccccacttcagccagtggcctcaatggccaccccaccctgtcagggggtggtgaccaaagggaggcccagaccttggacagccagatccaggagacaagcatctaatgatgacattctggtctcgtcttccgtctcccccgtgttcccctcttgtctcccctgttcccctctcccttccctcctcccatgtcactgcagattgagacctacaggctgacgttccgggcaaatgccagggcccgcaccgaccacggggccgacattgtctcccgccccccacacttccctggcggccccaactcgggctcccgggtccttggccccctttcccgggctgtccactagaccagtgagcgcttgggcgccgtgctgggcagcccgctaggctcgccttccctcctgctttgcgtgcccggggcagcagcagccctgccccacacctcctctcactccccagcctgggcccatctccctgctttggtcttgccccatcactgcgccactgctccgtggaggaggttgggagggggttggggtggttgaggctaagttgggatctaggagaggagaaccagattctatcctcatctttttttggttctttggtccaaacccaaaagaaactgacatgccctcccttctccctggatctacctggagggaagagtggaggtggattccgagtggtgacaggacgctgaccgtggagcttaagccactgcctctccctctggtcccacaaatgggcgcccccccctccccatgcaggtggtgtcgggcccttcttgctgccctgccccaagttgggggtcagtgctgcctgtccccatgcttaacatacccgcctagctgctgtcacatttttcttgttttgtccttttatttttttctaataacctaaaaactggcaaaatagttctgcaggttgaagccatgtctacatgaaagtcctcagtaagtgttagagggaacagggcggagatatccttatgccacccccgctggaggatgtgggcagcttagggccctggaggcggtgcggcagggaagaggggtgcagaggctgtggctggtgagccggtcaggcacacaaggggcccttggagcgtggactggttggttttgccattttgttgtgtgtatgctgcttttcttttctaaccaagaggctggttttggcatctctgtcccattccctgggatctggtggtcagccctaggataaaaagccagggctggagaacaagaaagggccaggagatggaattccttcaggccggcacccacaccctaggacatgtaagccctcatgtccaagggagcctcatgcagatagtaggaaatcaggtctggaaatttaaaaataaaaggcatgagactaaggctatctgcttcccttatgccctgactggagaggggagggaggagaggcaaggcccacagagggcatcccagctaggccttgggatggctgcagtgaggagaaatcccgggaactgtattgacacaaagattcttattgcacttgtattttttgtattaaagtttgcatggtttctaataaaggattcaaacataagtttgtagtgaaatggcctgggagattccaagggcttctctggagggggattggctgcagtgtagatttgcctctgaggaggctgccccagacttggcctcctcatgccccctcctgacctctgcccttctctggtcctggcatccctggagaaggtaggggtcttgacctaagtttagatttgatctccatgtgcagggaggctgtcctgggcctgacaggtcctccccctttctgaggtagcagtgccttgtggaggtttgacaccatgtccctagctccccaagcacacaccaggaaactgcaggggctcacggaggaagtgctgcctgggccagggggaccagctttcctccgtagagaccatgtgcagaacacttctgctgtgccaagaacatgagggagccagtgttttgtcagcaggaagaaagggcctgctgggatgaaagtgggaaggaaacagggttgcgtagtcaggagacacctcaggggcaacagcacaggcccagagtacctgctgcctccactgcgtctgtcctggggtcatgaggatgctgaggttgacgacaggttccaggtcctttcactcctttggccaaaggttgggggtaggtggcccaagtggcgtgctctctaggtagacaacaggagtggtcagagttccctcaaaggatcctccactccagagcacctgagaaggccgggaccagaggccctgtgtgatgtgtactccgcagctgtttggggtgggacatttctgtacttctcgatttgcttatggctcagccattacctgtgtcagtccatgattctgttgtaacagttttaagagtaaataaataaagctgcctgatgtcccatcacgc

SEQ ID NO: 328050 - DNA, 8920 bp, Artificial Sequence
  derived and/or modified sequence
acctcctcacggctcttcccggcgctctcctggctcccttctgccccagctccgtctcggcggcggcgggcagttgcagtggtgcagaatggctgacctcagtcttgcagatgcattaacagaaccatctccagacattgagggagagataaagcgggacttcattgccacactagaggcagaggcctttgatgatgttgtgggagaaactgttggaaaaacagactatattcctctcctggatgttgatgagaaaaccgggaactcagagtcaaagaagaaaccgtgctcagaaactagccagattgaagacctcccactacccccacaccctgccagcctttcttttcatcttcctcttgatactccatcttctaaaccaacactcctagccaatggtggtcatggagtagaagggagcgatactacagggtctccaactgaattccttgaagagaaaatggcctaccaggaatacccaaatagccagaactggccagaagataccaacttttgtttccaacctgagcaagtggtcgatcctatccagactgatccctttaagatgtaccatgatgatgacctggcagatttggtctttccctccagtgcgacagctgatacttcaatatttgcaggacaaaatgatcccttgaaagacagttacggtatgtctccctgcaacacagctgttgtacctcaggggtggtctgtggaagccttaaactctccacactcagagtcctttgtttccccagaggctgttgcagaacctcctcagccaacggcagttcccttagagctagccaaggagatagaaatggcatcagaagagaggccaccagcacaagcattggaaataatgatgggactgaagactactgacatggcaccatctaaagaaacagagatggccctcgccaaggacatggcactagctacaaaaaccgaggtggcattggctaaagatatggaatcacccaccaaattagatgtgacactggccaaggacatgcagccatccatggaatcagatatggccctagtcaaggacatggaactacccacagaaaaagaagtggccctggttaaggatgtcagatggcccacagaaacagatgtatcttcagccaagaatgtggtactgcccacagaaacagaggtagccccagccaaggatgtgacactgttgaaagaaacagagagggcatctcctataaaaatggacttagccccttccaaggacatgggaccacccaaagaaaacaagaaagaaacagagagggcatctcctataaaaatggacttggctccttccaaggacatgggaccacccaaagaaaacaagatagtcccagccaaggatttggtattactctcagaaatagaggtggcacaggctaatgacattatatcatccacagaaatatcctctgctgagaaggtggctttgtcctcagaaacagaggtagccctggccagggacatgacactgcccccggaaaccaacgtgatcttgaccaaggataaagcactacctttagaagcagaggtggccccagtcaaggacatggctcaactcccagaaacagaaatagccccggccaaggatgtggctccgtccacagtaaaagaagtgggcttgttgaaggacatgtctccactatcagaaacagaaatggctctgggcaaggatgtgactccacctccagaaacagaagtagttctcatcaagaacgtatgtctgcctccagaaatggaggtggccctgactgaggatcaggtcccagccctcaaaacagaagcacccctggctaaggatggggttctgaccctggccaacaatgtgactccagccaaagatgttccaccactctcagaaacagaggcaacaccagttccaattaaagacatggaaattgcacaaacacaaaaaggaataagtgaggattcccatttagaatctctgcaggatgtggggcagtcagctgcacctactttcatgatttcaccagaaaccgtcacaggaacggggaaaaagtgcagcttgccggccgaggaggattctgtgttagaaaaactaggggaaaggaaaccatgcaacagtcaaccttctgagctttcttcagagacctcagccaacttcatgtattgcggtacccctcccacacaagccaaacaagtttgcagacccagtgaccgcaggtcaacccggcccaagcctgccagggtccctcctgagctgctgggaggctctcctccatggaagactcttgatcacaggctgggccactgctctttgtctgagtcaggttgggtctctggttcatcctcctgtggtgggcctgggaaccaaagaaaaagtattcatgttgactcacttgaaccccagagggatcttggcagggaggcctgggatatagaaagcacaccaataatgatgaagaaaaagaagaagaaaccaaagcaaaagagatattctcaaccacgggctggaggaccttcggatgatgacaatgcagataagcctaaaggtcatccatttgcagctgacacacaaaaatcaggtgttctccccagccagcctaccactatgggtacagaatatggacttgtatctggagaaaacttgaaaagggaatgtttagttaactccagtgcagccagactggtagctgagaactttgtctcagagagtctcagaattcctttatatccttctgaagaagcccccaaaactgcaataagttctcagtctaagctgagagtagaggaagagagcaaaagtaacaagtcagtactacaaaaccaagacaagaaattgctgaagcaacatgaatacaaaccacagcctgcaccccacctgaagactcctgtagataaaagccagtcagtaggccctctcaatctgaaaggacccctagcagaagtttctgcatacaatgtagaaacccctttggatatcagacttaaagagggttgctctcctttcttggaccaagaggttatgggtgtagtttcaaaacccacagcagcaaaagaaataccaaatttggtacccactttgatagcaagtaatccattagaatgtaatctaaaagaagggaataatgaaagtaaaatgactaaactgcagaatgtcaaactgaaggagtttcctgaaggagctgaagaggataaagaactaaaaaaggaagcttttcccaacgaaagacaagagatcagcatctttacttctgagcagctgcagggccaagtgttggtacaggtccctggggtagagaatgaaccatttaagagaatggcaggtgatggcaaaagcaggaagggaaggggaagttctgggaaaatgagaacagattctgggaaggtaaaagcaaaatctgagctgccatttcttctggacagccagaaggacggaagggctgttctcataccgagtgagccagtctctaaaactgaaggaatgactactcaggataagagtgaggagctggggctgaattcttcaaagcaaccaggcactaaggctgatctcacggaggcagtggtgatgggggagcctaaagagatgactcagcctaaggtggcaggcaccatgcaggcattgattcctttggaaagtggatcaggcatgactcagacttctggtgttagcacagaaacaggagatgtagtcaaagatatgggtgtcaataaccagagcaaggaaggaaggtgtccatggaaggatcatgaggcagctccctggatttctgaaaagcctaaaaagagaggcaatgaaggcaaaagcaaaaagtttaaaaataattattccacacagcctgctagaatggagaggaaggaagaaatccttaacccaccttttgaagggaaggatggagatactggtagtattccccataaaagcaaggaaataggatttactttccccaaaatgcatgattcttcgttctcacatacaccagatacacccacagtggaagcagttgacaggaagggtggaaattttcaggttaattttgttgagcttgggactcttggggaaaacaagataagcacagtcaaggcttctactgttactgaaccacctgccaaggtgacagatgtgagctgccaagagcaaatccagggggcaggatttgttccttcagtagtatctgaggagaataagacagatgcagccaatagatacactgcagtggctgacaaaccaagtaaaaggagtaatgatggaaaaagtaaaaaggttaaaaatagttctcctgagaagcacattctggagaataagatagatgcaacaaaaatacatgttcccatggaaaccacaggggaccagggaattgaaggaatggcctatatggacgaaaatagaaatattacatttacctgtcccagaacaccatcagagctgataaataaatcatctcctctagaggttctggaatcagcagcctgtgaaaaactgcccactcctactcctcaagtagtaaaggaaggtgattcctttccagataccttggcaaaaaatgggcaagagatagccccagcccagatttccaaatcattaatggtagataactacaccaaagatggagtcccaggtcaagaaagacccaagggtccctctgctgttgtgccctctacaagcacaggaggagttgctctacctattacaacagccatagaaacagttaacattcatggagatcactctcttaagaataaagctgagcttgctgattccatgaaaaatgaagcagggatcgatgaagggcatgtgataggagaatctgagtcagtgcacagtggtgcgtctaagcattcagtagagaaagtcacagagctagcaaaaggtcacctccttcctggagtgccagtagaagaccagagcctaccaggagaggccagagccctagaaggatatgcagatagaggtaatttcccagcacatccagtgaatgaagagaaagagactaaagaagggtctgttgcagttcagattcctgacttactggaagacaaagcacaaaagctcagtttttgtgaggaccaaaatgctcaagatagaaattccaaaggttcagatagtttgaataagaaggtagatctgactcttttgtctccaaaaagtgaaaatgataaattgaaagaaattagtctggcttgtaaaatcacggaattggaaagcgtttccttgccaacaccagaaatccagtcagatttcttacatagcaaagtcgaagctcctccttcagaggtggcggatacgttagtaataatgactgcttccaagggtgttcgactcccagaacccaaagataagattttggagacacctcagaaaatgacagaaaaatctgaatcaaagacaccaggagaagggaaaaaggaagataaaagcagaatggcagaaccaatgaaaggctacatgagacccaccaagtcccgaggacttactccacttttgccaaagtctacaatccaggaacaagagagacataagcaactgaagtccgctggaatagccaggccagaagaaggaaggcctgtggtgagtgggacaggaaatgacatcaccaccccaccgaacaaggagctcccaccaagcccagagaagaaaacaaagcctttggccaccactcaacctgcaaagacttcaacatcgaaagccaaaacacagcccacttctctccctaagcagccagctcccaccaccattggtgggttgaataaaaaacccatgagccttgcttcaggcttagtgccagctgccccacccaaacgccctgccgtcgcctctgccaggccttccatcttaccttcaaaagacgtgaagccaaagcccattgcagatgcaaaggctcctgagaagcgggcctcaccatccaagccagcttctgccccagcctccagatctgggtccaagagcactcagactgttgcaaaaaccacaacagctgctgctgttgcctcaactggcccaagcagtaggagcccctccacgctcctgcccaagaagcccactgccattaagactgagggaaaacctgcagaagtcaagaagatgactgcaaagtctgtaccagctgacttgagtcgcccaaagagcacctccaccagttccatgaagaaaaccaccactctcagtgggacagcccccgctgcaggggtggttcccagccgagtcaaggccacacccatgccctcccggccctccacaactcctttcatagacaagaagcccacctcggccaaacccagctccaccaccccccggctcagccgcctggccaccaatacttctgctcctgatctgaagaatgtccgctccaaggttggctccacggaaaacatcaagcatcagcctggaggaggccgggccaaagtagagaaaaaaacagaggcagctgctacaacccgaaagcctgaatctaatgcagtcactaaaacagccggcccaattgcaagtgcacagaaacaacctgcggggaaagtccagatagtctccaaaaaagtgagctacagccatattcagtccaagtgtggttccaaggacaatattaagcatgtccctggaggtggtaatgttcagattcagaacaagaaagtggacatctctaaggtctcctccaagtgtgggtctaaggctaacatcaagcacaagcctggtggaggagatgtcaagattgaaagtcagaagttgaacttcaaggagaaggcccaggccaaggtgggatccctcgataatgtgggccacctacctgcaggaggtgctgtgaagactgagggcggtggcagcgaggctcctctgtgtccgggtccccctgctggggaggagccggccatctctgaggcagcgcctgaagctggcgcccccacttcagccagtggcctcaatggccaccccaccctgtcagggggtggtgaccaaagggaggcccagaccttggacagccagatccaggagacaagcatctaatgatgacattctggtctcgtcttccgtctcccccgtgttcccctcttgtctcccctgttcccctctcccttccctcctcccatgtcactgcagattgagacctacaggctgacgttccgggcaaatgccagggcccgcaccgaccacggggccgacattgtctcccgccccccacacttccctggcggccccaactcgggctcccgggtccttggccccctttcccgggctgtccactagaccagtgagcgcttgggcgccgtgctgggcagcccgctaggctcgccttccctcctgctttgcgtgcccggggcagcagcagccctgccccacacctcctctcactccccagcctgggcccatctccctgctttggtcttgccccatcactgcgccactgctccgtggaggaggttgggagggggttggggtggttgaggctaagttgggatctaggagaggagaaccagattctatcctcatctttttttggttctttggtccaaacccaaaagaaactgacatgccctcccttctccctggatctacctggagggaagagtggaggtggattccgagtggtgacaggacgctgaccgtggagcttaagccactgcctctccctctggtcccacaaatgggcgcccccccctccccatgcaggtggtgtcgggcccttcttgctgccctgccccaagttgggggtcagtgctgcctgtccccatgcttaacatacccgcctagctgctgtcacatttttcttgttttgtccttttatttttttctaataacctaaaaactggcaaaatagttctgcaggttgaagccatgtctacatgaaagtcctcagtaagtgttagagggaacagggcggagatatccttatgccacccccgctggaggatgtgggcagcttagggccctggaggcggtgcggcagggaagaggggtgcagaggctgtggctggtgagccggtcaggcacacaaggggcccttggagcgtggactggttggttttgccattttgttgtgtgtatgctgcttttcttttctaaccaagaggctggttttggcatctctgtcccattccctgggatctggtggtcagccctaggataaaaagccagggctggagaacaagaaagggccaggagatggaattccttcaggccggcacccacaccctaggacatgtaagccctcatgtccaagggagcctcatgcagatagtaggaaatcaggtctggaaatttaaaaataaaaggcatgagactaaggctatctgcttcccttatgccctgactggagaggggagggaggagaggcaaggcccacagagggcatcccagctaggccttgggatggctgcagtgaggagaaatcccgggaactgtattgacacaaagattcttattgcacttgtattttttgtattaaagtttgcatggtttctaataaaggattcaaacataagtttgtagtgaaatggcctgggagattccaagggcttctctggagggggattggctgcagtgtagatttgcctctgaggaggctgccccagacttggcctcctcatgccccctcctgacctctgcccttctctggtcctggcatccctggagaaggtaggggtcttgacctaagtttagatttgatctccatgtgcagggaggctgtcctgggcctgacaggtcctccccctttctgaggtagcagtgccttgtggaggtttgacaccatgtccctagctccccaagcacacaccaggaaactgcaggggctcacggaggaagtgctgcctgggccagggggaccagctttcctccgtagagaccatgtgcagaacacttctgctgtgccaagaacatgagggagccagtgttttgtcagcaggaagaaagggcctgctgggatgaaagtgggaaggaaacagg

SEQ ID NO: 328051 - DNA, 2664 bp, Artificial Sequence
  derived and/or modified sequence
atggagaccaccggcgaccagggcatcgagggcatggcctacatggatgagaaccgtaacatcacattcacctgtccccgcaccccatctgagcttattaataaaagttcaccccttgaagttttagaatctgctgcttgtgaaaaactgccaacaccgacaccacaggtggtgaaagagggcgattcattcccagacaccctggcgaaaaacgggcaggaaattgcacccgctcaaatttccaaaagtctcatggtcgataactatacgaaagacggggtaccagggcaagagcgtccaaaaggccccagtgcagtggtgcctagcacttcaactggtggagtggccctcccaattacaaccgccattgagactgtcaacattcatggggaccattcactgaaaaataaggctgagcttgcagatagcatgaaaaacgaagccggaatagacgagggccatgtgatcggcgagtctgagagtgtacactccggagccagcaagcacagtgtggagaaggtgacagagttagctaagggacaccttttgcccggtgtgcctgtggaagatcaatccttgcccggcgaagcccgcgcactcgaggggtacgccgacagggggaactttcccgctcaccccgttaacgaagagaaggagaccaaggaaggatctgtggcagtgcaaatacctgatttgttagaggacaaagcccagaaactctcgttttgcgaagatcagaatgcacaagatcgcaacagtaaagggtcagacagtttgaacaaaaaggttgatctcaccttgttgtcaccaaagagtgagaatgataagctgaaagagatctccctggcttgcaaaatcacagaattggagagcgtcagcttgccgacccctgagatacaaagcgatttcctccactctaaggtggaagccccgccgtcagaggttgcagacacccttgtgatcatgacagccagcaagggcgtacgattgcccgaaccaaaggacaaaattcttgagaccccacaaaaaatgacagaaaaatcggaaagcaaaacccccggcgaggggaaaaaagaggacaagtcacgaatggctgaacctatgaagggctacatgcggcctaccaagagcagggggctgaccccgctgctcccaaagagcactatccaggaacaagagcgccataagcaactgaagtctgctggcattgcacgccccgaggagggccgccctgttgtgtctggaacagggaatgacataacaacgcctcctaacaaggaactgccccccagtcctgagaaaaaaactaagcccctggctacaacccagccggctaaaacatccacaagtaaggctaaaactcagcctacatctcttccgaaacagcccgctccaactactataggcggactcaataaaaagccaatgtcactggcctcaggtcttgtacccgcggcccctcccaagcgccctgcggttgccagcgcacgaccatcaattctgccttctaaagacgtcaagcctaagcctattgcagatgccaaagcacccgagaaacgcgccagcccatcaaaacctgcaagtgcacccgccagcaggagcggctcaaagagcacccaaaccgtggcaaaaactactactgcagccgctgtggcaagcacggggccctcatcgcggtccccctctactctgctgcctaagaaaccgaccgctatcaaaaccgaaggcaaaccagccgaggtgaagaagatgactgcaaaaagcgtgcctgctgatctgagtcgacctaaaagtactagtacatcttccatgaagaagaccaccaccctctccggaacagcacccgctgccggtgttgtgccaagccgagtcaaggcgactcccatgccctcacgcccgtcgaccaccccttttatcgataagaagccaacctctgcaaagcccagctccaccactccacgcctctcccgattggcaaccaacaccagtgcaccagaccttaagaacgtgaggagtaaggttgggagcactgagaatatcaagcaccaacccggcggcggaagagctaaggtcgagaaaaagaccgaggccgctgctacgacccgcaaacccgaaagcaacgccgtgaccaagaccgccggacctatcgccagcgctcaaaagcagcccgccggcaaagttcagatagtatccaaaaaagtgagttattcacacatacaatcaaagtgtggaagcaaagataatataaaacacgtgccaggcggtggtaacgtgcagatccagaataaaaaagtagacatctccaaggtcagctcaaagtgcggttctaaagccaacattaagcacaagcctggcggcggggacgtgaaaattgagagccagaaacttaattttaaagagaaggcccaggccaaagtgggatccctggataatgtaggccatttgcctgctggaggcgccgtgaagaccgaaggcggaggatccgaggctccgttgtgcccaggtcccccagccggcgaggagcccgcaatcagcgaagccgctcccgaagcaggggcccccacaagcgccagcggtttgaatggtcacccgaccctaagcggaggcggggaccaacgagaagcccagacattggacagccaaatacaagaaaccagcatttag

SEQ ID NO: 328052 - DNA, 6894 bp, Artificial Sequence
  derived and/or modified sequence
atggccgacctgagcctggccgacgccctgaccgagcccagccccgatattgagggcgagattaagcgagattttatcgccaccttggaggcagaggcctttgacgacgtggtgggggagacagtcgggaagacagattacatccccctgctggatgtggacgagaagacagggaatagcgagtctaagaaaaaaccctgcagcgagacgtcccagattgaggacctcccccttcccccgcatcccgcaagcctttccttccatctgccacttgataccccttcctccaagccaacattgctagctaatggaggccatggggtagagggtagcgatactaccgggtctcctactgaattcctggaagaaaaaatggcgtatcaggaatatcctaacagccagaattggcctgaggacacgaacttctgttttcagcccgagcaagtggtggacccaatccagaccgacccttttaagatgtatcacgacgacgacctcgctgatcttgtcttcccctcctcagcaactgccgacacaagcatcttcgctgggcagaatgaccctcttaaagatagctacggtatgtcaccctgtaacaccgctgtggtaccccagggctggagcgtcgaggcgctaaatagtccacactccgagtcctttgtgtcccctgaagctgtagccgaacctccacagcctacagcagtgccgctggagctggccaaagaaatcgagatggcttctgaggaacgccctcccgctcaggccctggagatcatgatgggcctgaaaaccacagacatggccccttcaaaagagaccgagatggccctcgccaaggatatggcccttgccaccaagacggaagtggccctcgcgaaggacatggaatccccgacgaaactggatgtgacgttagctaaggacatgcaaccctctatggaaagcgatatggcactggtgaaggacatggagctccctaccgaaaaggaggttgccttagtcaaagacgtccgttggcccacagagaccgacgtgtcctctgccaaaaacgtggtcctgccaaccgaaacagaagtcgctccagcgaaagacgtcacacttctcaaagaaacagaacgagcgtcgcctataaaaatggacctggcgccttccaaggatatggggccgcctaaggagaataagaaagagacagaaagggcctcgcctatcaaaatggacttggccccctccaaagacatgggccctcctaaagagaacaaaattgttccagccaaagacctagtcttactgagtgaaattgaggtagcccaagccaacgacatcatatcaagcacagagatttccagcgctgaaaaggtagccctttccagtgagacggaagtcgctctggcacgggacatgacgctcccccctgagacgaatgtcatccttactaaggataaggcattgcctctggaagccgaggtggcaccggttaaggacatggcccagctccctgaaacagaaatcgccccagcgaaggatgtcgcaccaagcactgtcaaggaggtaggtctcttgaaagacatgtccccactctccgagacagaaatggctctgggaaaagatgtcacccctcctcctgagacagaggtcgtgctgatcaagaacgtgtgcctgccgcctgagatggaggtggcactcacagaagaccaggtacccgcgctcaaaactgaagcccccctggccaaggatggcgtccttacccttgccaataatgtgacaccggccaaagacgtaccacccctctccgagacagaagccactccagtgccaatcaaggatatggagattgcccaaacgcagaaaggaatatcagaggacagtcatctcgaatcactgcaagacgttggtcagtcagcagctcctacgttcatgattagccctgaaaccgttaccggcacgggaaagaaatgctcactgcctgccgaggaggactcagtactagagaaactgggtgagagaaagccttgtaatagccaaccgtctgaactttcgagcgagaccagcgctaacttcatgtactgcggcacaccgccaacccaagcaaaacaagtgtgccggccctccgacaggcggagcacccgaccaaaacctgcccgggtgccccccgagctgctcggcggttcccccccgtggaagactttagaccacaggctcgggcattgttctctttccgagtctggctgggtttccggttcatcatcttgtggtggacctggcaaccagcggaagagtattcatgtggactctctcgagccccagagagatctcggtcgggaggcctgggacattgagagcacaccgatcatgatgaagaagaagaagaagaaaccaaagcagaagcgatacagccagccccgcgctggtgggccctcggatgacgacaacgctgataagcccaaggggcacccatttgccgcggatacccagaagtcaggggtcctccctagtcagcctaccacgatggggactgaatacggcctggtatccggcgaaaacctgaagcgcgaatgcctggtgaattcctccgctgcgcgcctggtggccgagaactttgtcagcgagtccctgagaatacccttgtatccaagtgaagaagcccccaagaccgccatttcctcacagtccaagctgagggtggaagaagaatccaaatccaataagagcgtcctacagaaccaggacaaaaaactgctcaaacagcatgagtacaaaccacagcccgctccccatctgaagactcccgtcgataaatctcagtcagtggggcctcttaacctgaagggtccactagcagaggtgtcagcatataacgtggagacacctctggacattcggttaaaggagggctgtagtccttttttggaccaggaggtgatgggagtggtcagcaaaccgaccgctgcaaaagagatccccaatttggtgccaacacttattgcttcaaatcctctggaatgcaacctgaaggaggggaataatgaatcgaagatgacaaagctccagaatgttaaactgaaagaattcccggaaggcgccgaagaggataaagagctcaagaaggaggccttccctaacgaaagacaggagattagtattttcacctcagaacagctgcagggacaggtgctggtgcaggtccctggcgtcgaaaatgaaccatttaaacggatggctggcgacggcaagtctagaaagggtagaggatcctcaggtaagatgaggacagattcaggtaaagtaaaagctaaatcggagctcccctttttattggactcacagaaagatggcagggcagtcctgattcccagcgaacctgtctctaaaaccgagggaatgaccacacaagataaatcagaagagctagggctaaactcaagcaagcaaccagggaccaaggccgacctgactgaggctgtggttatgggggaacctaaggagatgacgcaaccaaaagtggcgggcaccatgcaagctctcattcccctagagagcggttcaggtatgacacagacatcaggcgtcagcaccgagactggcgacgtcgtaaaggatatgggggtcaataatcaaagcaaagagggccgttgcccatggaaagaccatgaagcagccccttggatttcagaaaagccaaagaagcgcggaaacgaaggcaaatccaagaaattcaagaataattacagcacgcagcctgctagaatggagcggaaggaggaaatcctgaatccacctttcgagggtaaggacggagatactggctccatcccacacaaatctaaagagatcggcttcacttttcctaaaatgcatgattcctcattctcacacactcctgataccccgacggtcgaggccgtcgaccgcaaggggggcaacttccaggtgaactttgttgagttaggaacattgggagagaataaaattagtactgtgaaagcatctaccgtcactgagccacccgccaaagtgactgacgtgtcctgccaagagcagatacagggggcgggcttcgtgccatctgtggtgagcgaagaaaacaagacggatgcagctaataggtatacggctgtggcagacaaaccctccaagcgcagcaatgatggcaagtctaagaaagtcaagaattcttctcctgagaagcacatactggagaacaaaattgacgcgactaagatccatgtgcctatggaaacaactggtgatcagggaatcgaaggtatggcttacatggacgaaaatcggaatatcactttcacatgcccaagaactccatctgagctgattaataaatcctcaccgttagaagtgctggagagcgccgcatgcgaaaagctaccgaccccaacaccccaggtggtgaaagagggagattccttcccggacacccttgcgaagaacgggcaggaaatcgccccagctcagatctctaaatctctgatggtggataactatacgaaagacggggtgcccggccaagagcgacccaaagggcccagtgcagtagtgcccagtacgagcaccgggggggttgccctcccaattactacagcaatcgagacagtaaacatccacggagaccactctcttaaaaacaaagctgagcttgccgactccatgaaaaatgaggccgggattgacgagggacatgtgatcggggaaagcgagagcgtccactctggcgcctctaaacattctgtggagaaagtcacagaactggctaaaggtcacctgctcccgggagtgcctgtggaggaccagagtctgccaggcgaggcgcgagcactggagggatacgccgaccgtgggaactttcccgcccaccctgtcaatgaggaaaaggaaactaaggaaggctcagtggccgtgcaaatcccagacctgctggaggacaaagcccagaagttgtccttttgtgaggaccagaacgcccaggacagaaattcgaagggttccgactcactaaacaaaaaggtagatcttaccctgctgagccccaaatccgaaaacgacaagctaaaggaaatcagcctcgcctgcaaaatcactgagctcgagtctgtttcactccccacacctgagattcagagcgacttcctgcattcaaaggttgaagccccccccagtgaggtggcggataccctggtgatcatgacagcttccaagggggtccgccttcccgagcccaaggacaaaattcttgaaactcctcagaagatgaccgaaaaaagcgaatcgaagacccccggtgagggaaaaaaggaagacaagagtcgcatggctgagcccatgaagggttatatgagacctactaaatcaagaggactgacccccctgctgccaaaatcgaccatccaggagcaggaaagacacaaacagctgaaatcagccgggattgcgcgccccgaggaaggtcgccctgtcgtgtctggaaccggtaacgacataaccacacccccaaacaaggagctgccaccctctcccgagaagaaaacgaagccgctagctacgactcagcctgccaagacttccactagcaaggccaagacacagcccaccagtctgcccaaacagcctgctccgactacaatcggtggcctgaacaagaagcctatgagcctggcctcgggccttgtccccgcagcaccccccaaacggcctgcagtggcctcagccagaccatctatcctaccaagcaaagatgtgaaaccaaagccaatagccgacgctaaggcccccgaaaaacgcgcctccccttccaaacccgcttctgcacctgcatctcggtcgggctctaaatctacacaaaccgtcgccaagaccaccaccgcagcggcggtcgcgtcaaccgggccgagctctaggagtccatctacccttcttcctaaaaaacccaccgccatcaagactgaagggaagcccgctgaggtgaagaaaatgaccgctaagtctgtccctgctgacctcagtcggcctaaatctacgagcacgagcagcatgaagaaaacaacaacactgagtggaactgccccagcggccggggtcgttccttcgcgtgtgaaggcaacccctatgccgagtcgcccctctactacgcctttcatcgacaagaagcctacatccgcaaaaccctcaagcactaccccgagactgtcccgcctcgcgacaaacacttccgcccctgacctgaaaaacgttaggtcaaaagtcggctcaacagaaaatatcaaacaccagcctgggggcggccgcgctaaagtcgagaaaaagacagaggccgccgccaccacaaggaagcctgagtccaacgctgtaactaagactgccggaccaatcgccagcgcccagaagcaaccggccggcaaagtgcagattgtgagcaagaaggtgagctactcacatatccagtctaaatgtgggagcaaagacaacatcaaacacgtccctggaggtggtaacgtgcaaattcagaacaagaaggtcgacatctcaaaggtgtcttctaaatgcggaagcaaggcgaacattaaacacaagccgggcggaggtgacgtaaagatcgagagtcagaaactcaacttcaaggagaaggcacaagccaaagtggggagcttagacaacgtcgggcatctgccggctgggggggcagtcaaaaccgagggggggggctccgaggcccctctgtgcccgggccctccggctggagaggaacctgcaatctccgaggcagcaccggaggccggagcccccacctccgctagcgggctcaacggccatccaacgctctccggaggaggcgaccagagagaggctcagaccctggacagccagattcaagagacttctatttag

SEQ ID NO: 328053 - DNA, 2664 bp, Artificial Sequence
  derived and/or modified sequence
atggagacaactggggaccagggcatagaaggaatggcctacatggacgaaaacaggaatattacatttacctgtcctcgtacaccttccgagctcattaacaaaagcagcccactggaggtcttggagtccgccgcttgtgagaagctgcccacgccaaccccacaggtggtcaaggagggagatagcttccccgatacgctcgcaaaaaacggacaggaaatcgctcctgcgcaaatatccaagagcctgatggtggacaactacactaaggatggcgtccccggtcaggaacgacctaaaggtccatcggccgtggtaccatcaacgtctaccggcggagtcgctctgcctatcaccactgccattgagacggtgaacatccacggagaccattctctcaaaaataaagccgagctggctgactctatgaagaatgaggcaggtatcgatgagggccacgtgatcggagaatccgaaagtgtccactctggagcgtctaaacactctgtcgaaaaggtaaccgagttagccaagggacacctgttacctggggtgcccgtggaagaccagagcctcccaggcgaggcgagggctttggagggctatgcagaccgaggaaatttcccggcacaccccgtgaatgaagaaaaagagactaaggaaggcagcgtggcagtgcagatcccagacttattggaagataaggctcagaagctgtccttttgcgaggatcagaacgctcaggatagaaactctaaagggtccgactcgctcaataagaaagtggatctaaccctgctgtctccaaaatcagaaaatgacaagctgaaggaaatttccctcgcttgcaagatcactgagttggagagcgtctcacttcccacaccggagattcagagcgattttctgcactctaaagtcgaagccccaccatcagaggtggccgacaccctggtgattatgacagcaagtaaaggtgtgcgcctgcctgagccaaaagacaagatattagagacccctcaaaagatgactgaaaagagcgagtccaaaacccctggggagggcaaaaaggaagataagtctcgtatggcagagcccatgaaggggtacatgagacctacaaagtctagggggctgactcctttgcttcccaagtcaactatccaggagcaggaaaggcacaagcaactgaagagcgcgggaattgcccgaccagaggaaggccgaccagtggtcagcggaaccgggaatgatatcaccacccctcctaacaaggagctgccccctagccctgagaagaagactaagcctcttgcaaccacccagccagctaaaacgagcacctccaaagcaaagactcaacctacatcgctgcccaagcagcccgctccaaccaccatcggcggtctcaataaaaagcccatgagcctggcatccgggctggttcctgccgctccgccaaagagaccagccgtggcgtctgccaggccttccatcttgccttcaaaggacgtcaagcctaagcccatcgccgacgccaaggctcccgagaagagagccagcccatcaaaacccgcatccgcccctgcatcccgctccggatccaaatccacgcaaactgttgcaaaaacgaccacagccgctgccgtggcttctaccggcccatcctcccgcagccctagcacgcttctgcctaaaaagccaaccgcaataaagacggaagggaagccggctgaggttaaaaagatgacggctaaatcagtaccagctgaccttagcaggcccaaatccacatctacatcgtctatgaaaaagacaaccacactttcgggaacagcaccagcagccggagttgtgcctagccgggttaaggccacccccatgccatcccgaccctctacgactccattcatcgacaagaaacctacctccgcaaagccgagcagcaccactcctcgtctctcccgcctggctacaaacacctccgcaccggatctcaagaacgtgaggtcaaaggtcgggtccacggagaatataaaacaccagcccggaggcggaagagccaaagtggagaagaaaactgaagctgctgcaactactaggaagcccgaaagcaatgctgtaaccaagactgctggtccaattgcatctgcgcagaaacagccagccggtaaggtgcagatcgtatccaaaaaagtttcctactcccatatccagagcaagtgcgggagcaaagataatatcaaacatgtccctggcggaggaaatgtgcagattcagaataagaaggtggatattagcaaggtgagcagtaaatgtggatccaaggcaaatataaagcataagcccggaggaggtgacgtgaaaattgaaagtcagaagcttaattttaaagaaaaggcacaggccaaagtcggtagtttggacaacgtggggcatctcccagccggtggcgcagtgaaaacagagggaggcggtagcgaagcaccgctctgcccagggccaccagccggagaagagcccgctattagcgaggcagctccggaggctggagctcccaccagcgcctcaggcctgaatggacaccccactctgtctggtgggggagaccaaagggaggcgcaaactctggactcccaaatccaagagaccagtatctag

SEQ ID NO: 328054 - DNA, 6893 bp, Artificial Sequence
  derived and/or modified sequence
atggcagacctttcactggcagatgctctgaccgagccatccccagatatcgaaggcgagatcaaacgcgattttattgccacactggaggcggaggccttcgacgacgtggtgggggaaactgtgggtaaaacagactatataccactgctggacgtcgatgaaaaaacaggtaatagcgaaagcaaaaagaagccgtgttccgaaacatctcagattgaagatcttcccttgccccctcatcccgcttcattatctttccacctacccctggataccccttcttctaagccgacacttctggccaacggtgggcacggcgttgagggctctgataccacagggtcgcccaccgaattccttgaagagaagatggcatatcaggagtacccaaatagccagaactggccagaggacacgaacttctgcttccagcctgagcaggtggttgaccctattcagacagatcctttcaagatgtatcatgatgatgatctggccgatttagtgtttccatccagcgccacagccgatacttccattttcgcagggcagaatgacccactgaaggactcatatggcatgagcccctgcaataccgcggtggttcctcaggggtggagcgttgaagccctgaatagccctcatagtgagtcttttgtttctcccgaagcagtggccgaacctcctcagccaacagcggtgcctctggaacttgctaaggagattgagatggcttccgaagagagacccccagcacaggcattagagattatgatgggactgaagaccaccgatatggctccttctaaggaaactgagatggccctggctaaggacatggccctggcaacaaagactgaggttgccctggcaaaggacatggagtccccaaccaaactggacgtcactctggccaaagatatgcagccctccatggaaagtgatatggcactggtgaaggatatggagctcccaacggaaaaggaagtcgcgttagtgaaagatgtaaggtggccaacagagacggatgtatcttccgcgaagaatgtggtgctaccaacagaaaccgaagttgctccagccaaggacgttaccctgctgaaagagacggaacgggcatcccccatcaagatggacctagcaccctcaaaggatatgggacctccaaaggaaaacaaaaaggagaccgaacgggcttctcccatcaagatggatcttgctccgagtaaagatatgggaccacctaaggaaaataaaatcgtcccggctaaagatttagtgctattgtcagagatagaagtagcacaggctaacgacatcattagcagcacagagattagctccgccgagaaggtggccctgtccagcgaaaccgaggttgctttggccagggatatgacccttccaccagagaccaatgttatactgacaaaggataaggctctaccgctggaggcggaggttgcacctgtgaaagacatggcccagctcccagaaactgagattgccccagctaaggatgtagctccctccacggtgaaagaggttggtttactgaaggatatgagcccactgagtgagacagagatggcgcttgggaaagacgttaccccacccccagaaaccgaggtggtgctaataaagaatgtatgcttgcccccagagatggaggtggctctcacagaggaccaggtacctgcccttaaaaccgaggctccacttgcaaaagacggagttctgaccctcgctaataatgtaacccccgctaaagatgtgccccctctatcagaaactgaggcaacacccgtgcctattaaggacatggagattgctcaaacccagaaagggatctctgaagactcccatctcgagtcccttcaggacgtgggccagagcgccgctcctacattcatgatttcacccgaaacagtcactggaaccggaaagaagtgtagcctccccgcagaagaagactcggttctggagaagctgggtgagagaaaaccttgtaactctcagccaagcgagctttcttccgaaactagcgcaaattttatgtattgcgggacaccaccaacacaggcaaagcaagtctgcaggccctcagatcgcaggtcaacgcggccaaagcccgcaagagtgcctccagagctgcttggcggatcccccccttggaagaccctcgaccacaggctggggcactgcagcttaagcgagtcaggatgggtgagcggcagctccagctgcggcggtccagggaaccaaaggaagtccatccacgtggatagcctggaaccccagagggatctcgggcgagaagcgtgggatatagagtcaacacctatcatgatgaagaaaaagaaaaaaaaacctaaacagaagcggtacagccagccaagggcaggaggcccaagcgatgacgataacgctgacaagcctaagggccaccctttcgcagccgacacacagaaatctggtgtgctaccttcccaaccaacaaccatgggcactgagtacggcctggtttccggcgaaaatctgaagcgggaatgtttagtaaatagcagcgccgctagacttgtcgccgaaaattttgtgagtgagtccctgcgaatacccctctacccttccgaggaggctcctaagaccgcgatctcatcacagagtaaactcagggtcgaggaggaaagcaaaagcaacaaatccgttctccagaatcaagacaagaagctgctgaaacagcatgaatacaagccgcaacctgctcctcatctgaagacccctgtagacaagagtcagagcgtaggtcctctgaatctaaagggccctctggcagaagtcagcgcctacaatgtggagaccccactcgatattcggctgaaagaaggctgctcacccttcctggaccaggaagttatgggcgtggtctcaaagcccacagcggctaaagaaattccaaacctggtgcctacgctgatagcctccaatccgctggagtgtaacttgaaggagggcaataacgaaagcaagatgaccaagctccaaaatgtcaaacttaaagagttcccagagggtgcagaggaggacaaagagctgaagaaggaggctttcccaaacgaacggcaggaaataagcatattcacaagcgagcagctccaaggccaagtattagtccaggtgccaggcgtggagaacgagccgtttaagcgcatggccggtgacgggaaatcacgtaagggtcggggtagcagcggaaaaatgagaaccgattccgggaaagttaaggcgaagtccgaattaccgtttttgctggattcacaaaaagatgggagagccgtattgatccccagcgagccagtgtctaaaacggaggggatgaccacacaggacaagagtgaggaacttggactcaactcctctaaacagcccggaacaaaggcagatttgacggaggccgtggttatgggggagccaaaagaaatgacccagccaaaggtggctggcacaatgcaggctctgattcctctggaatccggatcaggtatgacccagactagcggcgtgtccacagagacgggcgacgtggtcaaggatatgggagtgaataaccagagcaaggagggcagatgcccatggaaggatcacgaggctgctccctggatttccgagaaacctaaaaaacgtggtaatgaaggtaaatctaaaaaatttaagaacaattactcaactcaacccgctagaatggagcgtaaggaagagatcttaaacccacctttcgaaggaaaagacggtgacacgggctctattccacataaaagcaaggaaataggttttactttcccaaaaatgcacgattcatctttctcacacacacctgacactcccactgttgaggccgtagaccggaagggagggaactttcaggtcaattttgtcgaactgggaaccttaggcgaaaataaaatctccaccgttaaggcctcaactgtgactgagcccccagctaaggtcaccgacgtttcttgtcaggaacagattcagggggctggatttgtgcccagcgtcgtgtccgaagaaaataaaaccgacgccgctaacagatacacggcagtggcagacaagccttccaagagatccaacgacggtaagtccaaaaaggtgaagaattccagtcctgagaagcacattttagaaaacaaaatagatgctaccaaaattcacgtgccgatggagactacaggcgatcaaggtattgagggcatggcatacatggacgagaaccgcaacatcactttcacatgcccccgaactccttccgagttgataaacaaaagttcccccttggaggttcttgagtcagctgcatgcgagaaactgcccactccaacacctcaagtcgtgaaggaaggggactcctttcccgacactctggcgaagaacggccaggaaatcgcaccggcacaaatctcaaagagcctcatggtcgacaactataccaaagacggagttcccggtcaggagcggccaaagggaccttcagcagttgtaccatcaacctctaccgggggagtggctcttcccattaccacagctattgagacagtcaacatccacggggaccatagccttaagaataaggccgaattagcagactctatgaagaacgaagcgggaatagatgagggccatgtgattggagaatccgaaagcgtgcattctggcgcttccaaacacagcgtcgagaaggtgaccgagctcgccaaaggtcacctcctcccgggagtcccagtggaagaccaatcccttccaggagaagcccgtgcgcttgaaggatacgctgaccgcggaaatttcccggcacaccctgtcaacgaggaaaaggagacaaaagagggatccgttgcggtacaaattccagacttgttggaggacaaggcacagaagctgtcattttgtgaggaccaaaacgcccaagaccgtaattcaaaaggctccgattctctgaacaagaaagtagacttaacacttctgagtcctaaaagcgagaacgacaagctaaaggagataagtctggcatgtaagatcacagaattagagagcgtgtcactccccacacccgagatccagagcgatttcctgcactccaaggtggaggcccctccatccgaagtcgcagacaccttagttattatgaccgcctcgaaaggggtccgtcttcccgagccgaaagataaaattctcgaaacgccccagaaaatgactgaaaaatcagagagcaaaactccaggagagggcaaaaaggaggataagtctagaatggccgagcccatgaaggggtacatgcggccaaccaaatcaagagggctaacccccctgctccctaagagcaccattcaagagcaagagcgacacaagcagctaaagagtgcaggcatcgctcgccctgaagaagggagacctgtggtgtctgggacaggaaacgacataaccactcctccaaataaagaactcccccctagcccagagaagaagaccaagccactggcgactacgcagccagccaaaaccagcacctccaaagccaagacacaacccacaagtctgccgaagcagcccgcacctacaaccattggcggactgaacaaaaagcccatgtctttggcgagcggattggtcccggcagcccctccaaagcgcccagctgtggcatcggcacgaccaagcatcctcccgtctaaagacgtaaagcctaagcccattgcagatgcaaaggcccctgaaaaaagagccagcccctcaaaaccagcctccgcccctgcctccagatctgggtctaagtccactcagacagtcgccaaaactaccaccgctgccgcagtcgcttcgaccgggcctagtagccgctctcctagtaccctgctgccaaagaagcccaccgccattaagacagaaggaaagccggctgaggttaagaaaatgacggctaaatctgtccctgcagacctctcccgtccaaagagcacatccacaagcagcatgaagaaaaccaccacattatctggtacagcacctgccgctggtgtcgtcccctcacgtgtgaaggccacgccaatgccttcacgcccaagcacgactccattcatagataagaagcccaccagtgcaaagccaagttcgaccacccctcggttatccaggctcgcaaccaatacatcagcccctgacttgaagaatgtaagatcgaaagtaggtagtaccgagaatattaagcaccagccaggcggagggcgagcaaaggtcgaaaagaagacggaggctgctgcaactactcgaaagcctgagtctaacgccgtcacaaaaactgccggtcccattgcctccgcccaaaagcaaccggctgggaaagtgcagatcgtgagcaaaaaggtctcatacagccacattcagtctaagtgtggctcgaaggacaacatcaaacacgtgcccggtggagggaatgtgcaaatccagaacaaaaaggttgatatctcaaaagtgtcatcaaagtgtggctctaaggccaatattaagcataaacccggagggggagatgttaagatcgaaagtcagaagctcaacttcaaagagaaagcgcaagcaaaggtcggatcactcgacaacgtcgggcatctgcccgctggtggagccgtgaagaccgagggcggaggatcagaagcaccactctgcccagggcctccagcgggagaggagccagcaatcagcgaggctgcccctgaggcaggagctccaacctcggcgtcaggcctcaatggccaccctacattgtccggaggcggagatcaacgggaggcccaaactttagattcccagattcaagagaccagtattta

SEQ ID NO: 328055 - DNA, 2664 bp, Artificial Sequence
  derived and/or modified sequence
atggagaccaccggcgaccagggcatcgagggcatggcctacatggacgagaacagaaacatcaccttcacctgccccagaacccccagcgagctgatcaacaagagcagccccctggaggtgctggagagcgccgcctgcgagaagctgcccacccccaccccccaggtggtgaaggagggcgacagcttccccgacaccctggccaagaacggccaggagatcgcccccgcccagatcagcaagagcctgatggtggacaactacaccaaggacggcgtgcccggccaggagagacccaagggccccagcgccgtggtgcccagcaccagcaccggcggcgtggccctgcccatcaccaccgccatcgagaccgtgaacatccacggcgaccacagcctgaagaacaaggccgagctggccgacagcatgaagaacgaggccggcatcgacgagggccacgtgatcggcgagagcgagagcgtgcacagcggcgccagcaagcacagcgtggagaaggtgaccgagctggccaagggccacctgctgcccggcgtgcccgtggaggaccagagcctgcccggcgaggccagagccctggagggctacgccgacagaggcaacttccccgcccaccccgtgaacgaggagaaggagaccaaggagggcagcgtggccgtgcagatccccgacctgctggaggacaaggcccagaagctgagcttctgcgaggaccagaacgcccaggacagaaacagcaagggcagcgacagcctgaacaagaaggtggacctgaccctgctgagccccaagagcgagaacgacaagctgaaggagatcagcctggcctgcaagatcaccgagctggagagcgtgagcctgcccacccccgagatccagagcgacttcctgcacagcaaggtggaggccccccccagcgaggtggccgacaccctggtgatcatgaccgccagcaagggcgtgagactgcccgagcccaaggacaagatcctggagaccccccagaagatgaccgagaagagcgagagcaagacccccggcgagggcaagaaggaggacaagagcagaatggccgagcccatgaagggctacatgagacccaccaagagcagaggcctgacccccctgctgcccaagagcaccatccaggagcaggagagacacaagcagctgaagagcgccggcatcgccagacccgaggagggcagacccgtggtgagcggcaccggcaacgacatcaccaccccccccaacaaggagctgccccccagccccgagaagaagaccaagcccctggccaccacccagcccgccaagaccagcaccagcaaggccaagacccagcccaccagcctgcccaagcagcccgcccccaccaccatcggcggcctgaacaagaagcccatgagcctggccagcggcctggtgcccgccgccccccccaagagacccgccgtggccagcgccagacccagcatcctgcccagcaaggacgtgaagcccaagcccatcgccgacgccaaggcccccgagaagagagccagccccagcaagcccgccagcgcccccgccagcagaagcggcagcaagagcacccagaccgtggccaagaccaccaccgccgccgccgtggccagcaccggccccagcagcagaagccccagcaccctgctgcccaagaagcccaccgccatcaagaccgagggcaagcccgccgaggtgaagaagatgaccgccaagagcgtgcccgccgacctgagcagacccaagagcaccagcaccagcagcatgaagaagaccaccaccctgagcggcaccgcccccgccgccggcgtggtgcccagcagagtgaaggccacccccatgcccagcagacccagcaccacccccttcatcgacaagaagcccaccagcgccaagcccagcagcaccacccccagactgagcagactggccaccaacaccagcgcccccgacctgaagaacgtgagaagcaaggtgggcagcaccgagaacatcaagcaccagcccggcggcggcagagccaaggtggagaagaagaccgaggccgccgccaccaccagaaagcccgagagcaacgccgtgaccaagaccgccggccccatcgccagcgcccagaagcagcccgccggcaaggtgcagatcgtgagcaagaaggtgagctacagccacatccagagcaagtgcggcagcaaggacaacatcaagcacgtgcccggcggcggcaacgtgcagatccagaacaagaaggtggacatcagcaaggtgagcagcaagtgcggcagcaaggccaacatcaagcacaagcccggcggcggcgacgtgaagatcgagagccagaagctgaacttcaaggagaaggcccaggccaaggtgggcagcctggacaacgtgggccacctgcccgccggcggcgccgtgaagaccgagggcggcggcagcgaggcccccctgtgccccggcccccccgccggcgaggagcccgccatcagcgaggccgcccccgaggccggcgcccccaccagcgccagcggcctgaacggccaccccaccctgagcggcggcggcgaccagagagaggcccagaccctggacagccagatccaggagaccagcatctag

SEQ ID NO: 328056 - DNA, 6894 bp, Artificial Sequence
  derived and/or modified sequence
atggccgacctgagcctggccgacgccctgaccgagcccagccccgacatcgagggcgagatcaagagagacttcatcgccaccctggaggccgaggccttcgacgacgtggtgggcgagaccgtgggcaagaccgactacatccccctgctggacgtggacgagaagaccggcaacagcgagagcaagaagaagccctgcagcgagaccagccagatcgaggacctgcccctgcccccccaccccgccagcctgagcttccacctgcccctggacacccccagcagcaagcccaccctgctggccaacggcggccacggcgtggagggcagcgacaccaccggcagccccaccgagttcctggaggagaagatggcctaccaggagtaccccaacagccagaactggcccgaggacaccaacttctgcttccagcccgagcaggtggtggaccccatccagaccgaccccttcaagatgtaccacgacgacgacctggccgacctggtgttccccagcagcgccaccgccgacaccagcatcttcgccggccagaacgaccccctgaaggacagctacggcatgagcccctgcaacaccgccgtggtgccccagggctggagcgtggaggccctgaacagcccccacagcgagagcttcgtgagccccgaggccgtggccgagcccccccagcccaccgccgtgcccctggagctggccaaggagatcgagatggccagcgaggagagaccccccgcccaggccctggagatcatgatgggcctgaagaccaccgacatggcccccagcaaggagaccgagatggccctggccaaggacatggccctggccaccaagaccgaggtggccctggccaaggacatggagagccccaccaagctggacgtgaccctggccaaggacatgcagcccagcatggagagcgacatggccctggtgaaggacatggagctgcccaccgagaaggaggtggccctggtgaaggacgtgagatggcccaccgagaccgacgtgagcagcgccaagaacgtggtgctgcccaccgagaccgaggtggcccccgccaaggacgtgaccctgctgaaggagaccgagagagccagccccatcaagatggacctggcccccagcaaggacatgggcccccccaaggagaacaagaaggagaccgagagagccagccccatcaagatggacctggcccccagcaaggacatgggcccccccaaggagaacaagatcgtgcccgccaaggacctggtgctgctgagcgagatcgaggtggcccaggccaacgacatcatcagcagcaccgagatcagcagcgccgagaaggtggccctgagcagcgagaccgaggtggccctggccagagacatgaccctgccccccgagaccaacgtgatcctgaccaaggacaaggccctgcccctggaggccgaggtggcccccgtgaaggacatggcccagctgcccgagaccgagatcgcccccgccaaggacgtggcccccagcaccgtgaaggaggtgggcctgctgaaggacatgagccccctgagcgagaccgagatggccctgggcaaggacgtgacccccccccccgagaccgaggtggtgctgatcaagaacgtgtgcctgccccccgagatggaggtggccctgaccgaggaccaggtgcccgccctgaagaccgaggcccccctggccaaggacggcgtgctgaccctggccaacaacgtgacccccgccaaggacgtgccccccctgagcgagaccgaggccacccccgtgcccatcaaggacatggagatcgcccagacccagaagggcatcagcgaggacagccacctggagagcctgcaggacgtgggccagagcgccgcccccaccttcatgatcagccccgagaccgtgaccggcaccggcaagaagtgcagcctgcccgccgaggaggacagcgtgctggagaagctgggcgagagaaagccctgcaacagccagcccagcgagctgagcagcgagaccagcgccaacttcatgtactgcggcaccccccccacccaggccaagcaggtgtgcagacccagcgacagaagaagcaccagacccaagcccgccagagtgccccccgagctgctgggcggcagccccccctggaagaccctggaccacagactgggccactgcagcctgagcgagagcggctgggtgagcggcagcagcagctgcggcggccccggcaaccagagaaagagcatccacgtggacagcctggagccccagagagacctgggcagagaggcctgggacatcgagagcacccccatcatgatgaagaagaagaagaagaagcccaagcagaagagatacagccagcccagagccggcggccccagcgacgacgacaacgccgacaagcccaagggccaccccttcgccgccgacacccagaagagcggcgtgctgcccagccagcccaccaccatgggcaccgagtacggcctggtgagcggcgagaacctgaagagagagtgcctggtgaacagcagcgccgccagactggtggccgagaacttcgtgagcgagagcctgagaatccccctgtaccccagcgaggaggcccccaagaccgccatcagcagccagagcaagctgagagtggaggaggagagcaagagcaacaagagcgtgctgcagaaccaggacaagaagctgctgaagcagcacgagtacaagccccagcccgccccccacctgaagacccccgtggacaagagccagagcgtgggccccctgaacctgaagggccccctggccgaggtgagcgcctacaacgtggagacccccctggacatcagactgaaggagggctgcagccccttcctggaccaggaggtgatgggcgtggtgagcaagcccaccgccgccaaggagatccccaacctggtgcccaccctgatcgccagcaaccccctggagtgcaacctgaaggagggcaacaacgagagcaagatgaccaagctgcagaacgtgaagctgaaggagttccccgagggcgccgaggaggacaaggagctgaagaaggaggccttccccaacgagagacaggagatcagcatcttcaccagcgagcagctgcagggccaggtgctggtgcaggtgcccggcgtggagaacgagcccttcaagagaatggccggcgacggcaagagcagaaagggcagaggcagcagcggcaagatgagaaccgacagcggcaaggtgaaggccaagagcgagctgcccttcctgctggacagccagaaggacggcagagccgtgctgatccccagcgagcccgtgagcaagaccgagggcatgaccacccaggacaagagcgaggagctgggcctgaacagcagcaagcagcccggcaccaaggccgacctgaccgaggccgtggtgatgggcgagcccaaggagatgacccagcccaaggtggccggcaccatgcaggccctgatccccctggagagcggcagcggcatgacccagaccagcggcgtgagcaccgagaccggcgacgtggtgaaggacatgggcgtgaacaaccagagcaaggagggcagatgcccctggaaggaccacgaggccgccccctggatcagcgagaagcccaagaagagaggcaacgagggcaagagcaagaagttcaagaacaactacagcacccagcccgccagaatggagagaaaggaggagatcctgaacccccccttcgagggcaaggacggcgacaccggcagcatcccccacaagagcaaggagatcggcttcaccttccccaagatgcacgacagcagcttcagccacacccccgacacccccaccgtggaggccgtggacagaaagggcggcaacttccaggtgaacttcgtggagctgggcaccctgggcgagaacaagatcagcaccgtgaaggccagcaccgtgaccgagccccccgccaaggtgaccgacgtgagctgccaggagcagatccagggcgccggcttcgtgcccagcgtggtgagcgaggagaacaagaccgacgccgccaacagatacaccgccgtggccgacaagcccagcaagagaagcaacgacggcaagagcaagaaggtgaagaacagcagccccgagaagcacatcctggagaacaagatcgacgccaccaagatccacgtgcccatggagaccaccggcgaccagggcatcgagggcatggcctacatggacgagaacagaaacatcaccttcacctgccccagaacccccagcgagctgatcaacaagagcagccccctggaggtgctggagagcgccgcctgcgagaagctgcccacccccaccccccaggtggtgaaggagggcgacagcttccccgacaccctggccaagaacggccaggagatcgcccccgcccagatcagcaagagcctgatggtggacaactacaccaaggacggcgtgcccggccaggagagacccaagggccccagcgccgtggtgcccagcaccagcaccggcggcgtggccctgcccatcaccaccgccatcgagaccgtgaacatccacggcgaccacagcctgaagaacaaggccgagctggccgacagcatgaagaacgaggccggcatcgacgagggccacgtgatcggcgagagcgagagcgtgcacagcggcgccagcaagcacagcgtggagaaggtgaccgagctggccaagggccacctgctgcccggcgtgcccgtggaggaccagagcctgcccggcgaggccagagccctggagggctacgccgacagaggcaacttccccgcccaccccgtgaacgaggagaaggagaccaaggagggcagcgtggccgtgcagatccccgacctgctggaggacaaggcccagaagctgagcttctgcgaggaccagaacgcccaggacagaaacagcaagggcagcgacagcctgaacaagaaggtggacctgaccctgctgagccccaagagcgagaacgacaagctgaaggagatcagcctggcctgcaagatcaccgagctggagagcgtgagcctgcccacccccgagatccagagcgacttcctgcacagcaaggtggaggccccccccagcgaggtggccgacaccctggtgatcatgaccgccagcaagggcgtgagactgcccgagcccaaggacaagatcctggagaccccccagaagatgaccgagaagagcgagagcaagacccccggcgagggcaagaaggaggacaagagcagaatggccgagcccatgaagggctacatgagacccaccaagagcagaggcctgacccccctgctgcccaagagcaccatccaggagcaggagagacacaagcagctgaagagcgccggcatcgccagacccgaggagggcagacccgtggtgagcggcaccggcaacgacatcaccaccccccccaacaaggagctgccccccagccccgagaagaagaccaagcccctggccaccacccagcccgccaagaccagcaccagcaaggccaagacccagcccaccagcctgcccaagcagcccgcccccaccaccatcggcggcctgaacaagaagcccatgagcctggccagcggcctggtgcccgccgccccccccaagagacccgccgtggccagcgccagacccagcatcctgcccagcaaggacgtgaagcccaagcccatcgccgacgccaaggcccccgagaagagagccagccccagcaagcccgccagcgcccccgccagcagaagcggcagcaagagcacccagaccgtggccaagaccaccaccgccgccgccgtggccagcaccggccccagcagcagaagccccagcaccctgctgcccaagaagcccaccgccatcaagaccgagggcaagcccgccgaggtgaagaagatgaccgccaagagcgtgcccgccgacctgagcagacccaagagcaccagcaccagcagcatgaagaagaccaccaccctgagcggcaccgcccccgccgccggcgtggtgcccagcagagtgaaggccacccccatgcccagcagacccagcaccacccccttcatcgacaagaagcccaccagcgccaagcccagcagcaccacccccagactgagcagactggccaccaacaccagcgcccccgacctgaagaacgtgagaagcaaggtgggcagcaccgagaacatcaagcaccagcccggcggcggcagagccaaggtggagaagaagaccgaggccgccgccaccaccagaaagcccgagagcaacgccgtgaccaagaccgccggccccatcgccagcgcccagaagcagcccgccggcaaggtgcagatcgtgagcaagaaggtgagctacagccacatccagagcaagtgcggcagcaaggacaacatcaagcacgtgcccggcggcggcaacgtgcagatccagaacaagaaggtggacatcagcaaggtgagcagcaagtgcggcagcaaggccaacatcaagcacaagcccggcggcggcgacgtgaagatcgagagccagaagctgaacttcaaggagaaggcccaggccaaggtgggcagcctggacaacgtgggccacctgcccgccggcggcgccgtgaagaccgagggcggcggcagcgaggcccccctgtgccccggcccccccgccggcgaggagcccgccatcagcgaggccgcccccgaggccggcgcccccaccagcgccagcggcctgaacggccaccccaccctgagcggcggcggcgaccagagagaggcccagaccctggacagccagatccaggagaccagcatctag

SEQ ID NO: 328057 - protein, 712 aa, Artificial Sequence
  derived and/or modified sequence
METTGDQGIEGMAYMDENRNITFTCPRTPSELINKSSPLEVLESAACEKLPTPTPQVVKEGDSFPDTLAKNGQEIAPAQISKSLMVDNYTKDGVPGQERPKGPSAVVPSTSTGGVALPITTAIETVNIHGDHSLKNKAELADSMKNEAGIDEGHVIGESESVHSGASKHSVEKVTELAKGHLLPGVPVEDQSLPGEARALEGYADRGNFPAHPVNEEKETKEGSVAVQIPDLLEDKAQKLSFCEDQNAQDRNSKGSDSLNKKVDLTLLSPKSENDKLKEISLACKITELESVSLPTPEIQSDFLHSKVEAPPSEVADTLVIMTASKGVRLPEPKDKILETPQKMTEKSESKTPGEGKKEDKSRMAEPMKGYMRPTKSRGLTPLLPKSTIQEQERHKQLKSAGIARPEEGRPVVSGTGNDITTPPNKELPPSPEKKTKPLATTQPAKTSTSKAKTQPTSLPKQPAPTTIGGLNKKPMSLASGLVPAAPPKRPAVASARPSILPSKDVKPKPIADAKAPEKRASPSKPASAPASRSGSKSTQTVAKTTTAAAVASTGPSSRSPSTLLPKKPTAIKTEGKPAEVKKMTAKSVPADLSRPKSTSTSSMKKTTTLSGTAPAAGVVPSRVKATPMPSRPSTTPFIDKKPTSAKPSSTTPRLSRLATNTSAPDLKNVRSKAKVEKKTEAAATTRKPESNAVTKTAGPIASAQKQPAGKV

SEQ ID NO: 328058 - DNA, 2139 bp, Artificial Sequence
  derived and/or modified sequence
atggagactaccggagaccaaggaatcgagggaatggcttacatggatgaaaataggaacatcacatttacttgcccccgaaccccatctgaattgatcaataagtcatctcctctggaagtactggagagcgcagcttgtgagaaactgcccaccccaacccctcaggtcgttaaggagggagattctttcccagatacccttgccaagaacggacaagaaattgctcctgcccagatctcaaagtccttgatggttgacaattacaccaaggacggggtgccaggccaggaaagacctaagggcccatcggcagtcgtcccgagtacttcaactggcggggtggcactgcctattacgaccgcaattgagactgttaatatccatggggatcattctttaaaaaacaaggctgagctcgccgattccatgaagaacgaggctggaatcgacgagggtcatgtgattggagaaagcgagtcagtccattcaggggctagtaaacattccgtggagaaagtcaccgagctggccaagggccatctccttccgggcgtgccagtggaggatcagtctctgccaggagaggctagggctttagaaggttacgctgaccgcggaaacttccccgcccacccagtgaacgaagaaaaggagacaaaggagggttccgtcgcagtgcagatccccgatctgctcgaggataaggcacagaagcttagcttctgtgaggaccaaaatgcccaggacagaaactcaaaaggatctgattcgttgaataagaaggtggatttgactctgctctcccctaaatccgagaatgacaagcttaaggagatctcgctggcctgcaagatcaccgaactggaatccgttagtctaccaaccccagagattcaaagcgactttctgcactcaaaagtcgaggcccctccaagtgaagttgcagataccctggtgatcatgaccgctagcaagggggtgagactaccggaaccaaaagacaagattctagagacccctcagaaaatgaccgagaagtccgaatccaaaaccccaggcgaaggaaaaaaagaggataagagtagaatggccgaaccaatgaagggttatatgaggcccaccaaatcacgtggcctgactcctcttctacctaagagcactatccaggagcaagaacgtcacaaacagctaaaaagcgctgggatagcacggcctgaggaaggccgccccgtggtcagcgggacaggaaacgatattaccaccccccccaataaggaattaccccctagtccagagaagaagaccaaacccttggctaccactcaacccgctaagacctccacctctaaggccaagactcagcctaccagccttcccaagcagccagccccaactacaattggtggtctcaataaaaagccaatgtcactggcctcagggcttgttccagcagctccccctaaacggccagcggtagcttccgcccgccctagtatactcccttctaaggacgttaaaccaaaacccattgctgatgcgaaggcacccgagaaaagggcatcgccgagcaaacccgcatcagctcctgccagccgaagtggatccaagtccacccagacagtggcaaagacaactacggccgctgccgtcgcttccacaggcccctcctcaaggtccccatctactctgttgccaaagaagccaaccgctatcaagacagaaggcaagccagcggaagtgaaaaagatgacagctaaaagcgtgccagcagatctgagccgacctaagtccacttctacatctagtatgaaaaagaccacgacattatccggcacagcccctgccgccggtgttgtaccctcccgcgttaaggctacaccgatgccatctcggccttcaaccactccctttattgataaaaaaccaacgtctgccaaacccagcagcacaactccacgtctgtcacgcttggcaaccaatacgagcgcgcccgatcttaagaatgtccgtagtaaggcaaaagtagaaaagaagactgaggccgccgccacaacaaggaagccagagagtaatgcagtgacaaagacagctggccccatcgcatcagcccagaagcaacctgcgggaaaagtctag

SEQ ID NO: 328059 - DNA, 2139 bp, Artificial Sequence
  derived and/or modified sequence
atggagaccaccggggaccagggcatcgagggcatggcctacatggatgaaaatagaaacatcaccttcacctgccccaggacccccagcgagctgatcaacaagagcagccccctggaggtgctggagagcgctgcctgtgagaagctgcccacccccaccccccaggtggtgaaggagggggacagcttcccagacaccctggccaagaatggccaggagatcgccccagcccagatcagcaagagcctgatggtggacaactacaccaaggatggagtgcccggccaggagcggcccaagggccccagcgctgtggtgcccagcaccagcactggaggagtggccctgcccatcaccacagccattgaaacagtgaacatccatggagaccacagcctgaagaacaaggccgagctggccgacagcatgaagaatgaggccggcattgatgagggccacgtgattggagagagcgagagcgtgcacagcggggccagcaagcacagcgtggagaaggtgacagagctggccaagggccacctgctgcccggggtgcctgtggaggaccagagcctgcccggggaggcccgggccctggagggctacgccgaccggggcaacttccctgcccaccctgtgaatgaggagaaggagaccaaggagggctctgtggccgtgcagatcccagacctgctggaggacaaggcccagaagctgtccttctgtgaggaccagaatgcccaggacaggaacagcaagggcagtgacagcctgaacaagaaggtggacctgaccctgctgagccccaagtcagaaaatgacaagctgaaggagatcagcctggcctgcaagatcacagagctggagagcgtgtccctgcccaccccagagatccagagcgacttcctgcacagcaaggtggaggcccctccttctgaggtggccgacaccctggtgatcatgacagccagcaagggcgtgcggctgcctgagcccaaggacaagatcctggagaccccccagaagatgacagagaagtctgagagcaagaccccaggagagggcaagaaggaggacaagagcaggatggccgagcccatgaagggctacatgaggcccaccaagagccggggcctgacccccctgctgcccaagagcaccatccaggagcaggagcggcacaagcagctgaagtctgctggcatcgcccggcctgaggagggccggcctgtggtgtctggaactggaaatgacatcaccaccccacccaacaaggagctgccccccagccctgagaagaagaccaagcccctggccaccacccagcctgccaagaccagcaccagcaaggccaagacccagcccaccagcctgcccaagcagcctgcccccaccaccatcggcggcctgaacaagaagcccatgagcctggccagcggcctggtgcctgctgccccacccaagaggcctgctgtggccagcgcccggcccagcatcctgcccagcaaggatgtgaagcccaagcccatcgcagatgccaaggcccctgagaagagggccagccccagcaagccagccagcgccccagccagccgcagcggcagcaagagcacccagacagtggccaagaccaccacagctgctgctgtggccagcacaggccccagcagccgcagccccagcaccctgctgcccaagaagcccacagccatcaagacagagggcaagccagctgaggtgaagaagatgacagccaagtctgtgcctgctgacctgagccggcccaagagcaccagcaccagctccatgaagaagaccaccaccctgtctggaacagccccagctgctggggtggtgcccagccgggtgaaggccacccccatgcccagccggcccagcaccacccccttcatcgacaagaagcccaccagcgccaagcccagcagcaccaccccccggctgagccggctggccaccaacaccagcgccccagacctgaagaatgtgcgcagcaaggccaaggtggagaagaagacagaggccgccgccaccaccaggaagccagagagcaatgctgtgaccaagacagctggccccatcgccagcgcccagaagcagcctgctgggaaggtgtag

SEQ ID NO: 328060 - DNA, 2282 bp, Artificial Sequence
  derived and/or modified sequence
aagacagatgcagccaatagatacactgcagtggctgacaaaccaagtaaaaggagtaatgatggaaaaagtaaaaaggttaaaaatagttctcctgagaagcacattctggagaataagatagatgcaacaaaaatacatgttcccatggaaaccacaggggaccagggaattgaaggaatggcctatatggacgaaaatagaaatattacatttacctgtcccagaacaccatcagagctgataaataaatcatctcctctagaggttctggaatcagcagcctgtgaaaaactgcccactcctactcctcaagtagtaaaggaaggtgattcctttccagataccttggcaaaaaatgggcaagagatagccccagcccagatttccaaatcattaatggtagataactacaccaaagatggagtcccaggtcaagaaagacccaagggtccctctgctgttgtgccctctacaagcacaggaggagttgctctacctattacaacagccatagaaacagttaacattcatggagatcactctcttaagaataaagctgagcttgctgattccatgaaaaatgaagcagggatcgatgaagggcatgtgataggagaatctgagtcagtgcacagtggtgcgtctaagcattcagtagagaaagtcacagagctagcaaaaggtcacctccttcctggagtgccagtagaagaccagagcctaccaggagaggccagagccctagaaggatatgcagatagaggtaatttcccagcacatccagtgaatgaagagaaagagactaaagaagggtctgttgcagttcagattcctgacttactggaagacaaagcacaaaagctcagtttttgtgaggaccaaaatgctcaagatagaaattccaaaggttcagatagtttgaataagaaggtagatctgactcttttgtctccaaaaagtgaaaatgataaattgaaagaaattagtctggcttgtaaaatcacggaattggaaagcgtttccttgccaacaccagaaatccagtcagatttcttacatagcaaagtcgaagctcctccttcagaggtggcggatacgttagtaataatgactgcttccaagggtgttcgactcccagaacccaaagataagattttggagacacctcagaaaatgacagaaaaatctgaatcaaagacaccaggagaagggaaaaaggaagataaaagcagaatggcagaaccaatgaaaggctacatgagacccaccaagtcccgaggacttactccacttttgccaaagtctacaatccaggaacaagagagacataagcaactgaagtccgctggaatagccaggccagaagaaggaaggcctgtggtgagtgggacaggaaatgacatcaccaccccaccgaacaaggagctcccaccaagcccagagaagaaaacaaagcctttggccaccactcaacctgcaaagacttcaacatcgaaagccaaaacacagcccacttctctccctaagcagccagctcccaccaccattggtgggttgaataaaaaacccatgagccttgcttcaggcttagtgccagctgccccacccaaacgccctgccgtcgcctctgccaggccttccatcttaccttcaaaagacgtgaagccaaagcccattgcagatgcaaaggctcctgagaagcgggcctcaccatccaagccagcttctgccccagcctccagatctgggtccaagagcactcagactgttgcaaaaaccacaacagctgctgctgttgcctcaactggcccaagcagtaggagcccctccacgctcctgcccaagaagcccactgccattaagactgagggaaaacctgcagaagtcaagaagatgactgcaaagtctgtaccagctgacttgagtcgcccaaagagcacctccaccagttccatgaagaaaaccaccactctcagtgggacagcccccgctgcaggggtggttcccagccgagtcaaggccacacccatgccctcccggccctccacaactcctttcatagacaagaagcccacctcggccaaacccagctccaccaccccccggctcagccgcctggccaccaatacttctgctcctgatctgaagaatgtccgctccaaggccaaagtagagaaaaaaacagaggcagctgctacaacccgaaagcctgaatctaatgcagtcactaaaacagccggcccaattgcaagtgcacagaaacaacctgcggggaaagt

SEQ ID NO: 328061 - DNA, 2139 bp, Artificial Sequence
  derived and/or modified sequence
atggagaccaccggcgaccagggcatcgagggcatggcctacatggatgaaaaccggaacatcacgtttacatgtcctagaacccccagcgaacttattaataagtcatcccctctggaggtcctagagagcgcagcctgcgagaagctgcctactcccactccccaggtcgtcaaagaaggagattcctttcctgacacccttgccaaaaatggccaggaaatagctcccgcacagatcagcaaatcccttatggttgataattacacaaaagatggtgtcccaggccaggagagacccaaaggtccttctgcagtggttccatctacctccactggaggggtggccctgcccatcactactgcaatagagacagttaacattcacggcgaccactccctgaaaaataaggcggaacttgcagattcaatgaagaacgaagccggcattgatgaaggccacgtcatcggcgaatcggaaagcgttcattcaggcgccagtaagcactctgtggaaaaggtgaccgaattagcgaaaggtcacctgctcccgggcgttccagtggaggaccaatcacttcctggggaggcccgcgccctggaaggttacgctgacagagggaacttcccagctcaccccgtcaatgaggagaaggaaactaaggagggaagtgtagcggtgcagattcccgatctgctggaggacaaggcgcagaaactctccttctgcgaggatcagaacgcacaagatagaaacagcaagggatcagattccctgaacaaaaaggtggatctgacattactctccccgaaatctgaaaatgacaagctgaaagagatcagtttggcctgtaagatcactgaactggagtccgtctcactgccgaccccagaaattcaatcagatttcttacactccaaagtggaagcccctccttccgaggtcgcagatacccttgtgattatgactgcgagcaagggtgtgaggctgcctgaacccaaagataaaatattggagacgccacagaaaatgaccgaaaagtctgagtcaaaaacgccaggcgaaggaaagaaagaggacaaaagccggatggccgaacccatgaaaggatatatgcggcctaccaagagcagaggcctcacccccctgctgcccaaatcaacaattcaggaacaggagaggcacaaacaactgaaatcggcaggtattgctcggccagaagaaggcaggcctgtggtgagcggtactggcaacgatattaccactccacctaacaaagagcttccgccctctcccgaaaagaaaactaaacctctcgccaccacccagcccgctaagacctctacctccaaagctaaaacacagcccacctctcttcccaagcagcctgccccaacaacgattggcgggcttaataagaagccaatgtctctcgcctctgggctcgtgcctgcagctccccctaaacggccagctgtggcttcagctcgcccatctatattaccttcgaaggacgtcaaacctaagcccattgctgacgcaaaggcgccggaaaaaagggcaagcccttcaaaacctgcttcggcccctgcatcgagatctgggagcaaatcaacccagaccgtggcgaaaacgacaaccgctgccgccgtggcatcgaccggcccctcttcaagatccccttctacactgctcccaaagaagccaaccgccataaaaaccgaaggaaagccagcagaggtgaaaaaaatgaccgcaaagagtgttcctgctgacctcagtcgaccaaaatcaacaagtacaagctccatgaagaagactactaccctgtctgggaccgcccctgctgcaggagtcgtgccctcccgtgtgaaagcaaccccgatgccatctagaccttctactacaccattcattgataagaaaccgaccagcgctaagccgagcagtactacacccaggctctccaggctggctacaaacacctcagcgcctgatcttaaaaacgtgcggtctaaggccaaggtagaaaaaaagaccgaggccgccgctacgactcgcaaaccagagagtaatgctgtgaccaagaccgcaggccccatagcgtccgctcagaaacagccagctgggaaggtatag

SEQ ID NO: 328062 - DNA, 2139 bp, Artificial Sequence
  derived and/or modified sequence
atggagaccactggggatcagggcattgaaggaatggcatacatggatgaaaaccgaaatattacatttacctgccctcgaacgccatccgagttaatcaataaaagctcccctttggaagtattagaatctgccgcttgtgagaaactccccactccgaccccacaggttgtcaaagaaggtgactcctttcccgacacacttgccaagaacggccaagagattgccccagcccagatttccaaaagcctgatggtggacaactatacaaaggacggggtcccaggacaggaaaggcccaaggggccttcagccgtggtgccttccacaagcacaggaggcgtcgccctccccatcaccaccgcgattgagactgttaatattcacggagatcacagccttaagaacaaggcagaactggccgattccatgaaaaatgaggctggtatcgatgaagggcatgtcatcggtgagagcgagtccgtgcactctggggcttcaaagcatagcgtcgaaaaagttaccgagcttgcaaaaggccatctgctacctggggttcctgtcgaagatcaatcgctccccggagaggccagggccctagagggttacgcagatcggggtaacttccctgcccacccagtcaacgaagagaaagagaccaaggagggctccgtggcggtccaaattcccgatctcctcgaagataaagcgcagaaactttcattctgtgaggatcagaatgcccaggatcgcaattctaaaggtagtgacagcttgaataaaaaggtcgatctcacattactgtcccctaaatccgaaaatgacaaattgaaagaaatctctcttgcctgtaagatcaccgaactggagtccgtctctttgcctactcctgagattcaatccgatttcctccacagcaaggtggaggcaccaccttccgaggtggcggacactctcgttatcatgactgccagtaagggggtacgactgcccgagcccaaagacaagatcctggagactccccagaaaatgactgaaaagagcgaatctaagacacctggggaaggcaagaaggaagacaaatcccgtatggcggagccaatgaaagggtatatgcgacccactaaatccaggggcctgacacctctcctgcctaagtccactatacaggaacaggagcggcacaagcagctgaaatcagctggtatcgcccgaccggaggagggcaggcccgtcgtatcaggaacaggcaacgatattaccacgcctccaaacaaggagctccccccttccccagagaagaaaacgaagcctcttgccaccactcaacccgctaaaacgtccacatctaaggccaagacacaaccaacctccctcccgaaacagcctgctccgaccactatcggaggactgaacaagaaaccgatgagcttggcgtccggactagtgcctgccgcaccaccaaagcgtcctgcagtagcctcagcccgacctagtatcctgccaagtaaagatgtgaaaccaaaaccaatcgccgacgccaaggctcctgaaaagagagcctctccttccaagccagcatccgcccctgcgtctaggtctggatcgaagagcacccagactgtggctaagacaacaaccgccgctgctgtcgcaagtacaggcccttcttctaggtcgccgagcaccctcctcccgaaaaagccaacggcaatcaaaaccgaaggtaaaccagccgaagtgaagaagatgacagcgaagtctgttcccgctgacttgtccagacccaaatctacgagtacttcaagcatgaagaagaccaccaccctgagtggcaccgccccagcagcaggcgtggtcccttcgcgggttaaagcaaccccaatgccttcaagaccttccaccacacctttcattgataagaagcctactagcgcgaagccatcttccacaacaccacgactgtcacggctggcaaccaatactagtgccccagacttgaagaacgtgcgaagcaaggcaaaggtggaaaagaagaccgaagccgctgccaccaccagaaagcctgaatcaaatgcggtgacaaagactgcgggacccatcgcttctgctcagaagcagcctgcaggcaaagtgtag

SEQ ID NO: 328063 - DNA, 2139 bp, Artificial Sequence
  derived and/or modified sequence
atggagaccaccggcgaccagggcatcgagggcatggcctacatggacgagaacagaaacatcaccttcacctgccccagaacccccagcgagctgatcaacaagagcagccccctggaggtgctggagagcgccgcctgcgagaagctgcccacccccaccccccaggtggtgaaggagggcgacagcttccccgacaccctggccaagaacggccaggagatcgcccccgcccagatcagcaagagcctgatggtggacaactacaccaaggacggcgtgcccggccaggagagacccaagggccccagcgccgtggtgcccagcaccagcaccggcggcgtggccctgcccatcaccaccgccatcgagaccgtgaacatccacggcgaccacagcctgaagaacaaggccgagctggccgacagcatgaagaacgaggccggcatcgacgagggccacgtgatcggcgagagcgagagcgtgcacagcggcgccagcaagcacagcgtggagaaggtgaccgagctggccaagggccacctgctgcccggcgtgcccgtggaggaccagagcctgcccggcgaggccagagccctggagggctacgccgacagaggcaacttccccgcccaccccgtgaacgaggagaaggagaccaaggagggcagcgtggccgtgcagatccccgacctgctggaggacaaggcccagaagctgagcttctgcgaggaccagaacgcccaggacagaaacagcaagggcagcgacagcctgaacaagaaggtggacctgaccctgctgagccccaagagcgagaacgacaagctgaaggagatcagcctggcctgcaagatcaccgagctggagagcgtgagcctgcccacccccgagatccagagcgacttcctgcacagcaaggtggaggccccccccagcgaggtggccgacaccctggtgatcatgaccgccagcaagggcgtgagactgcccgagcccaaggacaagatcctggagaccccccagaagatgaccgagaagagcgagagcaagacccccggcgagggcaagaaggaggacaagagcagaatggccgagcccatgaagggctacatgagacccaccaagagcagaggcctgacccccctgctgcccaagagcaccatccaggagcaggagagacacaagcagctgaagagcgccggcatcgccagacccgaggagggcagacccgtggtgagcggcaccggcaacgacatcaccaccccccccaacaaggagctgccccccagccccgagaagaagaccaagcccctggccaccacccagcccgccaagaccagcaccagcaaggccaagacccagcccaccagcctgcccaagcagcccgcccccaccaccatcggcggcctgaacaagaagcccatgagcctggccagcggcctggtgcccgccgccccccccaagagacccgccgtggccagcgccagacccagcatcctgcccagcaaggacgtgaagcccaagcccatcgccgacgccaaggcccccgagaagagagccagccccagcaagcccgccagcgcccccgccagcagaagcggcagcaagagcacccagaccgtggccaagaccaccaccgccgccgccgtggccagcaccggccccagcagcagaagccccagcaccctgctgcccaagaagcccaccgccatcaagaccgagggcaagcccgccgaggtgaagaagatgaccgccaagagcgtgcccgccgacctgagcagacccaagagcaccagcaccagcagcatgaagaagaccaccaccctgagcggcaccgcccccgccgccggcgtggtgcccagcagagtgaaggccacccccatgcccagcagacccagcaccacccccttcatcgacaagaagcccaccagcgccaagcccagcagcaccacccccagactgagcagactggccaccaacaccagcgcccccgacctgaagaacgtgagaagcaaggccaaggtggagaagaagaccgaggccgccgccaccaccagaaagcccgagagcaacgccgtgaccaagaccgccggccccatcgccagcgcccagaagcagcccgccggcaaggtgtag

SEQ ID NO: 328064 - protein, 249 aa, Artificial Sequence
  derived and/or modified sequence
MTAKSVPADLSRPKSTSTSSMKKTTTLSGTAPAAGVVPSRVKATPMPSRPSTTPFIDKKPTSAKPSSTTPRLSRLATNTSAPDLKNVRSKVGSTENIKHQPGGGRVQIVSKKVSYSHIQSKCGSKDNIKHVPGGGNVQIQNKKVDISKVSSKCGSKANIKHKPGGGDVKIESQKLNFKEKAQAKVGSLDNVGHLPAGGAVKIETYRLTFRANARARTDHGADIVSRPPHFPGGPNSGSRVLGPLSRAVH

SEQ ID NO: 328065 - protein, 811 aa, Artificial Sequence
  derived and/or modified sequence
MADLSLADALTEPSPDIEGEIKRDFIATLEAEAFDDVVGETVGKTDYIPLLDVDEKTGNSESKKKPCSETSQIEDTPSSKPTLLANGGHGVEGSDTTGSPTEFLEEKMAYQEYPNSQNWPEDTNFCFQPEQVVDPIQTDPFKMYHDDDLADLVFPSSATADTSIFAGQNDPLKDSYGMSPCNTAVVPQGWSVEALNSPHSESFVSPEAVAEPPQPTAVPLELAKEIEMASEERPPAQALEIMMGLKTTDMAPSKETEMALAKDMALATKTEVALAKDMESPTKLDVTLAKDMQPSMESDMALVKDMELPTEKEVALVKDGVRLPEPKDKILETPQKMTEKSESKTPGEGKKEDKSRMAEPMKGYMRPTKSRGLTPLLPKSTIQEQERHKQLKSAGIARPEEGRPVVSGTGNDITTPPNKELPPSPEKKTKPLATTQPAKTSTSKAKTQPTSLPKQPAPTTIGGLNKKPMSLASGLVPAAPPKRPAVASARPSILPSKDVKPKPIADAKAPEKRASPSKPASAPASRSGSKSTQTVAKTTTAAAVASTGPSSRSPSTLLPKKPTAIKTEGKPAEVKKMTAKSVPADLSRPKSTSTSSMKKTTTLSGTAPAAGVVPSRVKATPMPSRPSTTPFIDKKPTSAKPSSTTPRLSRLATNTSAPDLKNVRSKVGSTENIKHQPGGGRVQIQNKKVDISKVSSKCGSKANIKHKPGGGDVKIESQKLNFKEKAQAKVGSLDNVGHLPAGGAVKTEGGGSEAPLCPGPPAGEEPAISEAAPEAGAPTSASGLNGHPTLSGGGDQREAQTLDSQIQETSI

SEQ ID NO: 328066 - DNA, 2436 bp, Artificial Sequence
  derived and/or modified sequence
atggcagacctcagcttggccgatgcattgaccgaaccaagtcctgacatcgagggtgaaatcaaacgcgacttcatcgcaacactggaggccgaagcatttgacgatgtggtgggagaaactgtcgggaagaccgattatatccctctgcttgacgttgatgagaagactggaaactcggagtccaaaaaaaaaccctgttcagagacttcccagattgaggatacaccaagttcaaagcccactttgctggccaacggaggccacggggtggagggctcagatacaaccgggtcacccaccgaattcctggaagagaagatggcatatcaggaataccccaattcccagaactggcccgaagatacgaatttttgttttcagcctgaacaggtggttgatccgatacaaacagacccgtttaaaatgtatcacgacgacgacttggccgatctggtatttccctcctctgccactgctgacacctctatcttcgccggccagaatgatcctctgaaggacagctatggaatgtctccttgtaatactgcagtggttccacagggatggtccgttgaggccttgaattcaccccacagtgagagcttcgtatctcctgaagctgtggctgagcccccacaacccactgccgtgcctctggaattggccaaggaaatagagatggcgagcgaagaacggcctccagcgcaggccctggagattatgatggggctaaaaaccaccgacatggccccttccaaagaaacagagatggccctggccaaagacatggcgttagcaacgaagacagaggtagccctggccaaagatatggagagccccaccaagttggacgtgacccttgccaaggatatgcagccaagcatggaatcagacatggcactggtaaaagacatggagctgcctaccgaaaaagaagttgccctagtgaaagacggggtgcgtttgccagaacctaaggacaagatcctcgagaccccacaaaagatgaccgagaagagtgagtctaaaaccccaggcgaggggaagaaagaagacaaatctcggatggccgagcctatgaaagggtatatgcgtccgacgaagtcccgaggtctgacaccactgctccctaagagtacgatccaggagcaagagcggcacaagcagctcaagagcgctggaatcgctcggcccgaagaaggccggccggttgtgagcggtacagggaatgatattactaccccacccaataaggagctgcctcctagtcccgagaaaaagactaagccacttgcgactactcagccagccaagacgtccacctcgaaagccaagactcagcctacctccttgccaaagcagcccgctcccaccacaatcggaggcctgaataaaaaaccaatgtcccttgcaagcggcctggtccccgccgcgcccccaaagcgacctgccgtcgcttcagcaagaccatccattctcccatccaaggatgtgaagcctaaaccgatcgctgacgctaaggcccccgagaagagggcctcaccaagcaagccggccagtgctcccgcgagtcgcagcggcagcaaatccactcagaccgtagccaagactactaccgctgcagctgtggcttccaccggaccttcgtctcgcagtcctagcactctgctgcccaaaaagccaacagctattaaaactgaagggaaaccagccgaagtgaaaaagatgacagctaaatctgtgccagctgacctgagccgtcctaaaagtactagtacttcctcaatgaaaaaaacaaccacgcttagcggtaccgcccctgcggctggggttgtaccaagtagggtgaaggctacacctatgccatctagaccatcaactactcccttcattgacaagaagccgacatcagctaaaccgtccagcactacccctcgactctcccggctggccacaaacaccagcgcaccagacctgaagaacgtgcggtccaaggtgggctctaccgagaacattaagcaccagcctggaggcggccgggtccagatccaaaataaaaaagtcgacatatcaaaagtctccagtaaatgcggcagtaaggccaacataaagcacaagcctggcggcggagacgtgaagatcgagagtcagaaattaaacttcaaggaaaaagcacaagctaaagtgggctctctcgataacgtgggacacctgcccgctggcggagcagtaaagaccgagggtggagggagcgaggccccactgtgccccggcccacccgccggggaagagcccgcgatcagcgaagccgcacccgaggccggtgctccaactagcgcatcggggctgaacggacaccctacgctgagcggcggtggtgaccaacgggaagcacagaccctggacagtcagatccaggagacgagtatttag

SEQ ID NO: 328067 - DNA, 2436 bp, Artificial Sequence
  derived and/or modified sequence
atggctgacctgagcctggctgatgccctgacagagcccagcccagacattgaaggagagatcaagagggacttcatcgccaccctggaggccgaggcctttgatgatgtggtgggggagaccgtgggcaagacagactacatccccctgctggatgtggatgagaagacaggcaacagcgagagcaagaagaagccctgcagcgagaccagccagatcgaggacacccccagcagcaagcccaccctgctggccaacggcggccatggagtggagggcagtgacaccaccggcagccccacagagttcctggaggagaagatggcctaccaggagtaccccaacagccagaactggccagaggacaccaacttctgcttccagcctgagcaggtggtggaccccatccagacagaccccttcaagatgtaccatgatgatgacctggccgacctggtgttccccagcagcgccacagctgacaccagcatctttgctggccagaatgaccccctgaaggacagctatggcatgagcccctgcaacacagctgtggtgccccagggctggagcgtggaggccctgaacagcccccacagcgagagctttgtgtccccagaggccgtggccgagcccccccagcccacagctgtgcccctggagctggccaaggagattgagatggccagcgaggagcggcccccagcccaggccctggagatcatgatgggcctgaagaccacagacatggcccccagcaaggagacagagatggccctggccaaggacatggccctggccaccaagacagaggtggccctggccaaggacatggagagccccaccaagctggatgtgaccctggccaaggacatgcagcccagcatggagagtgacatggccctggtgaaggacatggagctgcccacagagaaggaggtggccctggtgaaggatggagtgcggctgcctgagcccaaggacaagatcctggagaccccccagaagatgacagagaagtctgagagcaagaccccaggagagggcaagaaggaggacaagagcaggatggccgagcccatgaagggctacatgaggcccaccaagagccggggcctgacccccctgctgcccaagagcaccatccaggagcaggagcggcacaagcagctgaagtctgctggcatcgcccggcctgaggagggccggcctgtggtgtctggaactggaaatgacatcaccaccccacccaacaaggagctgccccccagccctgagaagaagaccaagcccctggccaccacccagcctgccaagaccagcaccagcaaggccaagacccagcccaccagcctgcccaagcagcctgcccccaccaccatcggcggcctgaacaagaagcccatgagcctggccagcggcctggtgcctgctgccccacccaagaggcctgctgtggccagcgcccggcccagcatcctgcccagcaaggatgtgaagcccaagcccatcgcagatgccaaggcccctgagaagagggccagccccagcaagccagccagcgccccagccagccgcagcggcagcaagagcacccagacagtggccaagaccaccacagctgctgctgtggccagcacaggccccagcagccgcagccccagcaccctgctgcccaagaagcccacagccatcaagacagagggcaagccagctgaggtgaagaagatgacagccaagtctgtgcctgctgacctgagccggcccaagagcaccagcaccagctccatgaagaagaccaccaccctgagcggcacagccccagctgctggggtggtgcccagccgggtgaaggccacccccatgcccagccggcccagcaccacccccttcatcgacaagaagcccaccagcgccaagcccagcagcaccaccccccggctgagccggctggccaccaacaccagcgccccagacctgaagaatgtgcgcagcaaggtgggcagcacagagaacatcaagcaccagcccggcggcggccgggtgcagatccagaacaagaaggtggacatcagcaaggtgagcagcaaatgtggcagcaaggccaacatcaagcacaagccaggcggcggagatgtgaagattgagagccagaagctgaacttcaaggagaaggcccaggccaaggtgggcagcctggacaacgtgggccacctgcctgctggaggagctgtgaagacagaaggaggcggcagcgaggcccccctgtgccccggccccccagctggggaggagcccgccatcagcgaggccgcccctgaggccggggcccccaccagcgccagcggcctgaatggccaccccaccctgagcggcggcggggaccagcgggaggcccagaccctggacagccagatccaggagaccagcatctag

SEQ ID NO: 328068 - DNA, 5302 bp, Artificial Sequence
  derived and/or modified sequence
aggccccacccgctggtggcccggtccgcgtgtgcgccgactctcgcactctcctcgctccgggcgcccagactctgagagagagcgacggccatcatagaacagcgaaggcagtcgatcggcctgcggtccgcttcggcattcgcaggccgcaggcgggaggctagagcccccaggcgcacctcgccccaaccgcccgcggctcgggcagctctgcagagacgtcgtggcggcagggccagcacccattggtccgccacagccctccgccctccccctcgccacgcttattggccggagcggcggcgctcgccgggtaggcggtggcggcgtccctcccttgcgccggccctcaagaggcgacgaggaagcggccgcctccctgcgccccgcccctccggctagctcgctggctcccggctcctcccgacgtctcctacctcctcacggctcttcccggcgctctcctggctcccttctgccccagctccgtctcggcggcggcgggcagttgcagtggtgcagaatggctgacctcagtcttgcagatgcattaacagaaccatctccagacattgagggagagataaagcgggacttcattgccacactagaggcagaggcctttgatgatgttgtgggagaaactgttggaaaaacagactatattcctctcctggatgttgatgagaaaaccgggaactcagagtcaaagaagaaaccgtgctcagaaactagccagattgaagatactccatcttctaaaccaacactcctagccaatggtggtcatggagtagaagggagcgatactacagggtctccaactgaattccttgaagagaaaatggcctaccaggaatacccaaatagccagaactggccagaagataccaacttttgtttccaacctgagcaagtggtcgatcctatccagactgatccctttaagatgtaccatgatgatgacctggcagatttggtctttccctccagtgcgacagctgatacttcaatatttgcaggacaaaatgatcccttgaaagacagttacggtatgtctccctgcaacacagctgttgtacctcaggggtggtctgtggaagccttaaactctccacactcagagtcctttgtttccccagaggctgttgcagaacctcctcagccaacggcagttcccttagagctagccaaggagatagaaatggcatcagaagagaggccaccagcacaagcattggaaataatgatgggactgaagactactgacatggcaccatctaaagaaacagagatggccctcgccaaggacatggcactagctacaaaaaccgaggtggcattggctaaagatatggaatcacccaccaaattagatgtgacactggccaaggacatgcagccatccatggaatcagatatggccctagtcaaggacatggaactacccacagaaaaagaagtggccctggttaaggatggtgttcgactcccagaacccaaagataagattttggagacacctcagaaaatgacagaaaaatctgaatcaaagacaccaggagaagggaaaaaggaagataaaagcagaatggcagaaccaatgaaaggctacatgagacccaccaagtcccgaggacttactccacttttgccaaagtctacaatccaggaacaagagagacataagcaactgaagtccgctggaatagccaggccagaagaaggaaggcctgtggtgagtgggacaggaaatgacatcaccaccccaccgaacaaggagctcccaccaagcccagagaagaaaacaaagcctttggccaccactcaacctgcaaagacttcaacatcgaaagccaaaacacagcccacttctctccctaagcagccagctcccaccaccattggtgggttgaataaaaaacccatgagccttgcttcaggcttagtgccagctgccccacccaaacgccctgccgtcgcctctgccaggccttccatcttaccttcaaaagacgtgaagccaaagcccattgcagatgcaaaggctcctgagaagcgggcctcaccatccaagccagcttctgccccagcctccagatctgggtccaagagcactcagactgttgcaaaaaccacaacagctgctgctgttgcctcaactggcccaagcagtaggagcccctccacgctcctgcccaagaagcccactgccattaagactgagggaaaacctgcagaagtcaagaagatgactgcaaagtctgtaccagctgacttgagtcgcccaaagagcacctccaccagttccatgaagaaaaccaccactctcagtgggacagcccccgctgcaggggtggttcccagccgagtcaaggccacacccatgccctcccggccctccacaactcctttcatagacaagaagcccacctcggccaaacccagctccaccaccccccggctcagccgcctggccaccaatacttctgctcctgatctgaagaatgtccgctccaaggttggctccacggaaaacatcaagcatcagcctggaggaggccgggttcagattcagaacaagaaagtggacatctctaaggtctcctccaagtgtgggtctaaggctaacatcaagcacaagcctggtggaggagatgtcaagattgaaagtcagaagttgaacttcaaggagaaggcccaggccaaggtgggatccctcgataatgtgggccacctacctgcaggaggtgctgtgaagactgagggcggtggcagcgaggctcctctgtgtccgggtccccctgctggggaggagccggccatctctgaggcagcgcctgaagctggcgcccccacttcagccagtggcctcaatggccaccccaccctgtcagggggtggtgaccaaagggaggcccagaccttggacagccagatccaggagacaagcatctaatgatgacattctggtctcgtcttccgtctcccccgtgttcccctcttgtctcccctgttcccctctcccttccctcctcccatgtcactgcagattgagacctacaggctgacgttccgggcaaatgccagggcccgcaccgaccacggggccgacattgtctcccgccccccacacttccctggcggccccaactcgggctcccgggtccttggccccctttcccgggctgtccactagaccagtgagcgcttgggcgccgtgctgggcagcccgctaggctcgccttccctcctgctttgcgtgcccggggcagcagcagccctgccccacacctcctctcactccccagcctgggcccatctccctgctttggtcttgccccatcactgcgccactgctccgtggaggaggttgggagggggttggggtggttgaggctaagttgggatctaggagaggagaaccagattctatcctcatctttttttggttctttggtccaaacccaaaagaaactgacatgccctcccttctccctggatctacctggagggaagagtggaggtggattccgagtggtgacaggacgctgaccgtggagcttaagccactgcctctccctctggtcccacaaatgggcgcccccccctccccatgcaggtggtgtcgggcccttcttgctgccctgccccaagttgggggtcagtgctgcctgtccccatgcttaacatacccgcctagctgctgtcacatttttcttgttttgtccttttatttttttctaataacctaaaaactggcaaaatagttctgcaggttgaagccatgtctacatgaaagtcctcagtaagtgttagagggaacagggcggagatatccttatgccacccccgctggaggatgtgggcagcttagggccctggaggcggtgcggcagggaagaggggtgcagaggctgtggctggtgagccggtcaggcacacaaggggcccttggagcgtggactggttggttttgccattttgttgtgtgtatgctgcttttcttttctaaccaagaggctggttttggcatctctgtcccattccctgggatctggtggtcagccctaggataaaaagccagggctggagaacaagaaagggccaggagatggaattccttcaggccggcacccacaccctaggacatgtaagccctcatgtccaagggagcctcatgcagatagtaggaaatcaggtctggaaatttaaaaataaaaggcatgagactaaggctatctgcttcccttatgccctgactggagaggggagggaggagaggcaaggcccacagagggcatcccagctaggccttgggatggctgcagtgaggagaaatcccgggaactgtattgacacaaagattcttattgcacttgtattttttgtattaaagtttgcatggtttctaataaaggattcaaacataagtttgtagtgaaatggcctgggagattccaagggcttctctggagggggattggctgcagtgtagatttgcctctgaggaggctgccccagacttggcctcctcatgccccctcctgacctctgcccttctctggtcctggcatccctggagaaggtaggggtcttgacctaagtttagatttgatctccatgtgcagggaggctgtcctgggcctgacaggtcctccccctttctgaggtagcagtgccttgtggaggtttgacaccatgtccctagctccccaagcacacaccaggaaactgcaggggctcacggaggaagtgctgcctgggccagggggaccagctttcctccgtagagaccatgtgcagaacacttctgctgtgccaagaacatgagggagccagtgttttgtcagcaggaagaaagggcctgctgggatgaaagtgggaaggaaacagggttgcgtagtcaggagacacctcaggggcaacagcacaggcccagagtacctgctgcctccactgcgtctgtcctggggtcatgaggatgctgaggttgacgacaggttccaggtcctttcactcctttggccaaaggttgggggtaggtggcccaagtggcgtgctctctaggtagacaacaggagtggtcagagttccctcaaaggatcctccactccagagcacctgagaaggccgggaccagaggccctgtgtgatgtgtactccgcagctgtttggggtgggacatttctgtacttctcgatttgcttatggctcagccattacctgtgtcagtccatgattctgttgtaacagttttaagagtaaataaataaagctgcctgatgtcccatcacgc

SEQ ID NO: 328069 - DNA, 2436 bp, Artificial Sequence
  derived and/or modified sequence
atggccgacctgagcctggccgacgccctgaccgagcccagccccgatatcgagggtgagattaagcgtgattttatcgccactctggaagccgaggccttcgacgatgtggtcggggaaaccgtggggaaaaccgattacataccccttttggacgtcgacgagaagaccgggaattcagagtcaaagaaaaaaccctgcagcgagacctctcaaattgaggataccccctcgtctaaaccaacactcctcgccaatggcggccatggtgtcgagggctcagataccacagggagccctactgagttcttagaagagaaaatggcttaccaagaatatcccaattctcaaaattggcccgaagatactaacttttgctttcaaccagaacaggtagttgatcccatacagacagatccattcaaaatgtatcacgacgatgacttggcggacctggtgttcccttcgtccgctacagccgacacctccatctttgccggtcagaacgatcctctgaaagatagctacggtatgtcaccatgcaacaccgccgtagtcccacagggctggagcgttgaagcactcaactcgcctcatagtgaatcatttgttagtcctgaagctgtggccgagcccccgcagcccaccgctgtgcctctggagctggccaaggagattgaaatggcctctgaggagcggccacctgctcaggcactggaaattatgatgggcttaaagaccaccgacatggcccctagcaaggagacggagatggctctcgccaaggatatggcattggccaccaagaccgaagtggccttggcgaaggacatggaatctcccacaaagctcgacgtaaccctcgcaaaggatatgcagccttcaatggaaagtgacatggcacttgtgaaggacatggaactgccaactgagaaggaagtggctctggtgaaagatggcgtgcgccttccagagccaaaggacaagattctggagactcctcagaagatgaccgagaagtctgaaagcaagacacctggcgaaggcaaaaaagaggacaagtcccggatggctgagccaatgaaggggtacatgaggcccactaaatccagggggctcacccccttgctgcccaagagcactatccaggagcaggagagacacaagcagctgaagagtgccggaatcgctaggcccgaggagggcaggcctgttgtatctgggacaggcaatgatatcaccacaccccccaataaggagctgcctccaagtccagaaaagaaaacaaaaccactggctacaacccagccggcgaagacgtctacttcaaaggctaaaactcagcctaccagcctgccaaagcagcccgcgcctacaacaataggcgggttgaacaaaaagccgatgagtctagctagcggcttggtgccagcagcaccaccgaagaggcccgccgtggcgtcagccagacctagcatactccctagtaaggacgtaaaacccaagcccatcgctgatgccaaagctcctgagaaacgcgcctctccctctaagccggccagtgcgcccgccagcagatcggggagcaagagcacccagacagtggctaagactactacagccgccgccgtggcttccacaggaccctcatcaagatctccctccacgctgctgccaaaaaagcccaccgccataaagaccgagggaaagcccgcagaggttaaaaaaatgacagccaaatccgtccccgcggacctaagtcgccctaagtctaccagcacaagttccatgaaaaagacaaccacactttccggaacagctcccgccgcaggtgttgtcccgagccgggttaaagcgacgccgatgccatcacggccaagcacgacacccttcattgacaaaaagcccacaagcgccaaaccatcatccaccaccccaaggttgagtagactcgctaccaatacctccgcccccgatcttaagaacgtgcggtcaaaagtaggttcaactgaaaatattaagcaccaaccaggcggcggacgggtgcagatccaaaataaaaaggtcgatatttccaaggtgtcttcaaagtgcggaagtaaggctaacatcaaacacaagcccggaggcggggatgtcaagattgaatcccaaaagctgaattttaaggagaaggcacaggccaaggttggctcactcgacaacgtagggcaccttcccgccggcggggccgtcaagactgaaggcggtggctctgaggcgccgttgtgcccaggtcctccagcaggagaagaacccgccatatctgaggctgcacctgaggcaggcgccccgacctctgctagtggtcttaatggtcatcctaccttgtctggcggcggcgatcaacgggaagcccaaacattggactcacagattcaggagacgtccatttag

SEQ ID NO: 328070 - DNA, 2436 bp, Artificial Sequence
  derived and/or modified sequence
atggccgacctgagtctcgcagacgcccttacagagccaagtcccgacatcgagggcgaaatcaagagggactttatcgctactctcgaggccgaggccttcgatgatgtcgtgggcgaaaccgtgggcaaaactgattacatcccgcttctcgatgttgacgagaaaacaggtaatagtgaatctaagaaaaagccatgtagcgagacctctcaaattgaagacacccctagtagcaagcccaccctgctcgccaatggcggacacggcgtcgagggctccgatacaaccggatcaccaaccgaatttcttgaggagaagatggcctatcaggagtacccgaactctcagaattggccagaggacaccaatttctgcttccaaccggagcaagtcgtagatcccattcagacggacccttttaagatgtatcacgacgatgatcttgcggatttagtctttcctagctctgccaccgctgacacaagtatttttgctggccaaaacgaccctctcaaagacagctacggtatgagtccgtgtaacactgccgttgtcccccaaggatggagcgtggaagccctcaatagtccccacagcgagagcttcgtgagcccagaagctgtcgcagaaccccctcagcccaccgcagttccacttgaactggcgaaggaaatcgaaatggctagcgaggagcgccctcccgcacaagcgttggaaatcatgatggggctgaagacaactgatatggcccctagcaaggagacggaaatggcacttgccaaggacatggccctggcaaccaaaaccgaggtcgctctggcaaaggatatggaaagtcctacaaagctggatgtgaccctggctaaggacatgcagccatcaatggagtctgacatggccctcgtcaaggacatggagctgccaactgaaaaagaagtggcgctggtgaaggatggggtgcggcttcccgagccgaaggacaagatcctggaaacaccgcagaaaatgacggagaaatccgaatccaagactcctggggagggcaaaaaagaagacaaatcccgtatggcagagccaatgaaagggtacatgaggccaacaaagtcccgcggactaactccactactgcctaagtcgaccatacaggaacaggaaagacataaacagcttaaatccgctggaatcgccagacccgaagaaggaaggccagtggtcagcggaacggggaatgacataacaaccccccctaacaaagaactccctccaagtcccgaaaagaagacaaagccactggctaccacccagcctgccaagacctccacgagcaaggctaaaacccagccgactagtctccccaaacagcctgcacccaccactattggtgggctcaataaaaaaccgatgagcctggccagcggattagtcccagccgcaccaccgaagagaccagcagtggccagtgcccgtccaagtattttaccttcaaaagatgtgaaaccgaagcctatcgccgatgctaaagctcccgagaagagagcatcccccagcaagcctgccagtgccccagctagccggtcgggaagcaagtcaacacagactgtggcaaaaactacgaccgctgcggcagtagctagcactggaccatcctcccggtctccctctacattactgccaaagaaacccactgcgataaagacagaagggaagcccgctgaggttaagaagatgaccgctaagtccgttccagctgacttgtctagacccaagtctacaagtactagttcgatgaagaaaactactacattgagcggaaccgctccagccgctggtgtggtgccatccagggtcaaagctactcccatgccgagcagacccagcaccaccccttttatcgataagaagcctacatctgcaaagccaagttcaaccactcccagactgtctaggcttgccacaaatacttctgcccctgacctcaagaatgtgagatctaaggtgggctcaacagagaacatcaagcatcagcctggcggtgggcgagttcaaatccagaacaaaaaagtggatatatcaaaggtgtcttctaagtgcggttctaaagctaatataaagcataagcccggtgggggagatgtgaagatcgaatcacaaaagctaaacttcaaagagaaggcacaggccaaggttggtagtctcgacaacgttgggcacctacccgctgggggagctgtgaagaccgaggggggaggctcggaggctcctctctgtccaggaccgcctgcaggcgaagaacccgctatctccgaagccgcaccggaagccggagctccaacctctgcctccggacttaatgggcacccaaccctctcagggggaggcgaccagagagaggctcagacattggattctcagattcaggaaacgtctatttag

SEQ ID NO: 328071 - DNA, 2436 bp, Artificial Sequence
  derived and/or modified sequence
atggccgacctgagcctggccgacgccctgaccgagcccagccccgacatcgagggcgagatcaagagagacttcatcgccaccctggaggccgaggccttcgacgacgtggtgggcgagaccgtgggcaagaccgactacatccccctgctggacgtggacgagaagaccggcaacagcgagagcaagaagaagccctgcagcgagaccagccagatcgaggacacccccagcagcaagcccaccctgctggccaacggcggccacggcgtggagggcagcgacaccaccggcagccccaccgagttcctggaggagaagatggcctaccaggagtaccccaacagccagaactggcccgaggacaccaacttctgcttccagcccgagcaggtggtggaccccatccagaccgaccccttcaagatgtaccacgacgacgacctggccgacctggtgttccccagcagcgccaccgccgacaccagcatcttcgccggccagaacgaccccctgaaggacagctacggcatgagcccctgcaacaccgccgtggtgccccagggctggagcgtggaggccctgaacagcccccacagcgagagcttcgtgagccccgaggccgtggccgagcccccccagcccaccgccgtgcccctggagctggccaaggagatcgagatggccagcgaggagagaccccccgcccaggccctggagatcatgatgggcctgaagaccaccgacatggcccccagcaaggagaccgagatggccctggccaaggacatggccctggccaccaagaccgaggtggccctggccaaggacatggagagccccaccaagctggacgtgaccctggccaaggacatgcagcccagcatggagagcgacatggccctggtgaaggacatggagctgcccaccgagaaggaggtggccctggtgaaggacggcgtgagactgcccgagcccaaggacaagatcctggagaccccccagaagatgaccgagaagagcgagagcaagacccccggcgagggcaagaaggaggacaagagcagaatggccgagcccatgaagggctacatgagacccaccaagagcagaggcctgacccccctgctgcccaagagcaccatccaggagcaggagagacacaagcagctgaagagcgccggcatcgccagacccgaggagggcagacccgtggtgagcggcaccggcaacgacatcaccaccccccccaacaaggagctgccccccagccccgagaagaagaccaagcccctggccaccacccagcccgccaagaccagcaccagcaaggccaagacccagcccaccagcctgcccaagcagcccgcccccaccaccatcggcggcctgaacaagaagcccatgagcctggccagcggcctggtgcccgccgccccccccaagagacccgccgtggccagcgccagacccagcatcctgcccagcaaggacgtgaagcccaagcccatcgccgacgccaaggcccccgagaagagagccagccccagcaagcccgccagcgcccccgccagcagaagcggcagcaagagcacccagaccgtggccaagaccaccaccgccgccgccgtggccagcaccggccccagcagcagaagccccagcaccctgctgcccaagaagcccaccgccatcaagaccgagggcaagcccgccgaggtgaagaagatgaccgccaagagcgtgcccgccgacctgagcagacccaagagcaccagcaccagcagcatgaagaagaccaccaccctgagcggcaccgcccccgccgccggcgtggtgcccagcagagtgaaggccacccccatgcccagcagacccagcaccacccccttcatcgacaagaagcccaccagcgccaagcccagcagcaccacccccagactgagcagactggccaccaacaccagcgcccccgacctgaagaacgtgagaagcaaggtgggcagcaccgagaacatcaagcaccagcccggcggcggcagagtgcagatccagaacaagaaggtggacatcagcaaggtgagcagcaagtgcggcagcaaggccaacatcaagcacaagcccggcggcggcgacgtgaagatcgagagccagaagctgaacttcaaggagaaggcccaggccaaggtgggcagcctggacaacgtgggccacctgcccgccggcggcgccgtgaagaccgagggcggcggcagcgaggcccccctgtgccccggcccccccgccggcgaggagcccgccatcagcgaggccgcccccgaggccggcgcccccaccagcgccagcggcctgaacggccaccccaccctgagcggcggcggcgaccagagagaggcccagaccctggacagccagatccaggagaccagcatctag

SEQ ID NO: 328072 - protein, 463 aa, Artificial Sequence
  derived and/or modified sequence
ICEEPVAKKREELAHFSNSSSNSGKKELGTAGLYLHSKLEQIPEGSSKEKGQEDFSETRIDSCSQVCQRGEKQPGQTALAGKKEIEVTATQSTPSFLFEKPPRDGIARPEEGRPVVSGTGNDITTPPNKELPPSPEKKTKPIADAKAPEKRASPSKPASAPASRSGSKSTQTVAKTTTAAAVASTGPSSRSPSTLLPKKPTAIKTEGKPAEVKKMTAKSVPADLSRPKSTSTSSMKKTTTLSGTAPAAGVVPSRVKATPMPSRPSTTPFIDKKPTSAKPSSTTPRLSRLATNTSAPDLKNVRSKVGSTENIKHQPGGGRVQIVSKKVSYSHIQSKCGSKDNIKHVPGGGNVQIQNKKVDISKVSSKCGSKANIKHKPGGGDVKIESQKLNFKEKAQAKVGSLDNVGHLPAGGAVKIETYRLTFRANARARTDHGADIVSRPPHFPGGPNSGSRVLGPLSRAVH

SEQ ID NO: 328073 - protein, 828 aa, Artificial Sequence
  derived and/or modified sequence
MSLSDKQTASLTAAYGQLSKGKPAECRMDSPKEISQAGFEWQRTEGKLNEIGLNVSMDGQPKDGLVKNASFLEQNKLCFFEGKLDKELSIEMQDKDCQEASGHLESRYVISETCHPLEGNSVHQKTSEFHLGLIEGPDKNKTIPVQGKVAGKNGLETKSQSDLDFPGAADIPTRYVKEQETSVWNPSFHPVAQGSLGSREATPGEMENSITPGCPVIGVVNDNSEQLKCESPLLVSLAHPAPIIEHSPTTIPPITMVFTQEHLNASCHIRDHDKELEKLSSTEEAVLNQAPQQKKAVRRALSECSHLSVPPAVNLADKYPELPAREEPSSGLLPPPSSPMPSPTPGKLGAPAMKRSMTVGEEQTASYKLSPGKLPILSTKEIPPFICEEPVAKKREELAHFSNSSSNSGKKELGTAGLYLHSKLEQIPEGSSKEKGQEDFSETRIDSCSQVCQRGEKQPGQTALAGKKEIEVTATQSTPSFLFEKPPRDGIARPEEGRPVVSGTGNDITTPPNKELPPSPEKKTKPIADAKAPEKRASPSKPASAPASRSGSKSTQTVAKTTTAAAVASTGPSSRSPSTLLPKKPTADLSRPKSTSTSSMKKTTTLSGTAPAAGVVPSRVKATPMPSRPSTTPFIDKKPTSAKPSSTTPRLSRLATNTSAPDLKNVRSKVGSTENIKHQPGGGRVQIVSKKVSYSHIQSKCGSKDNIKHVPGGGNVQIQNKKVDISKVSSKCGSKANIKHKPGGGDVKIESQKLNFKEKAQAKVGSLDNVGHLPAGGAVKIETYRLTFRANARARTDHGADIVSRPPHFPGGPNSGSRVLGPLSRAVH

SEQ ID NO: 328074 - DNA, 1392 bp, Artificial Sequence
  derived and/or modified sequence
atatgtgaggaaccagtggccaaaaagagggaagagttagcacacttctctaattccagctcgaattccggaaagaaagaactggggacggccggcttatatcttcacagtaagctcgaacaaatcccagaaggttcaagtaaagagaaaggacaagaagatttttcggagaccaggatagatagttgctcacaggtgtgccagcggggggagaagcagcccggccagaccgccctggctggcaaaaaagagattgaagtaactgcaactcagagcacaccgtcttttcttttcgagaaacccccccgagacgggatcgcacgaccagaggaggggaggcctgtggtcagtggcaccggtaatgacattactacgcctcccaacaaagagctgcctcccagccctgaaaagaaaacaaaacccatcgcggatgcgaaggcaccagaaaagcgggcaagcccatccaagccagcctcagctcctgccagcaggagcggctctaaatcaacacagaccgtcgccaaaacgacaacggccgctgcagtcgcgtctaccggaccttcgtcaaggagcccgtctacacttctgcccaagaaacctaccgccatcaaaacggaaggcaagcccgctgaggtcaagaaaatgaccgctaagtccgtcccagccgacctaagccggccgaagagcacctcaacgagttctatgaaaaagacaacaacccttagtggaaccgccccagccgctggagtcgtcccttccagagtcaaagcaactcccatgcctagtcgccctagtaccaccccttttatcgataagaagccgacgtctgccaaaccaagcagtacaacaccgcgattatctcgactggcaaccaacacgtctgctccagacctgaaaaacgtgagaagtaaggtggggtccaccgaaaacatcaaacatcagcctgggggcgggcgggtccaaatcgtctccaagaaggtcagctacagtcatatccagtctaaatgcggcagcaaagataacatcaaacacgtgccgggtggcgggaacgtgcagattcagaacaaaaaggtggatattagtaaagtttctagcaagtgcggaagcaaggctaatattaaacacaaacccggcggaggtgatgtgaagatagaatctcagaagctaaacttcaaagagaaggcccaagccaaagtgggaagtctcgataacgtgggtcacctcccggccggcggagccgttaagatagagacgtaccggctcacatttagggccaatgctcgagctcgcacagatcacggcgcggacattgtctctagacctcctcacttccccgggggaccaaattcagggtcacgagtgttgggaccattgtctcgggccgtacattag

SEQ ID NO: 328075 - DNA, 2487 bp, Artificial Sequence
  derived and/or modified sequence
atgtcactgagcgacaaacagactgcgagcctgacagctgcttatgggcaactatcgaaggggaagcccgctgagtgtcgtatggactccccgaaggagattagtcaggccggcttcgagtggcagcggaccgaaggaaaactgaatgaaatcggtctcaatgttagcatggatggccagccaaaagacggcctggtgaagaacgcctcattcctggagcaaaacaagttatgcttctttgaggggaaattggataaagagctttccattgagatgcaagacaaggactgccaggaggccagcggacacctggagtctaggtacgtgatcagcgagacttgtcaccctcttgagggtaacagcgtccatcagaagacgtctgagttccatctaggccttattgaaggaccagataagaataagaccatcccagtccagggcaaagtggccggtaagaatggcctggagacaaaaagtcagagtgacttggattttccgggagctgcggacatccctaccaggtacgtgaaagagcaagaaacatcggtgtggaaccctagctttcaccccgttgctcaagggagcctcggtagcagggaagcaacacccggtgagatggaaaatagcattacacccggatgcccggtgattggcgtggtgaatgataactcagagcagctcaaatgcgaaagtcccctacttgtgtccttggcccacccagcccctatcattgaacactctcctacaacaatccctcccataactatggtgtttacacaggagcacctgaatgcttcatgtcacatcagggaccatgacaaagagctggaaaagctgagttctacagaggaggccgtacttaaccaggccccccagcaaaagaaggctgtgagacgagctctgagtgaatgcagccacctgagcgtgccacccgcggtaaatttggccgataagtaccctgaactgcctgccagggaagagcctagctctgggctgctgcctccgccaagctcacctatgcccagtcctacccccgggaaactgggagcacccgccatgaaaaggtctatgaccgtgggggaagaacaaactgcctcttataagctgtcacctggaaagctaccaatcctgagcaccaaagagatccctcccttcatctgcgaggaaccagttgctaagaaaagagaggaattagcacatttttcaaattcttcctctaatagcgggaaaaaagagctgggtacagctggcttgtatctgcactcaaagctggagcagatcccggagggatcatctaaagagaagggacaggaggatttttctgaaaccaggattgattcgtgcagccaggtatgtcaacgtggcgaaaaacagccgggccaaacagctttggccggtaagaaggagattgaggtgacggcgacacagtcaacgccatccttcttgtttgaaaaaccgccccgagacggaatcgccagacctgaggagggacgacccgttgtgtcaggaacagggaatgatatcacaaccccacccaataaggagttacccccgagccccgagaagaagaccaagccaatcgccgacgccaaggccccagaaaagagagcctcgcccagcaagcccgccagcgctccggcctcccgttccggaagcaaatctactcagaccgtggctaaaaccacaacagcggcagctgttgcctcaacaggaccatcttctcggtcaccgagtaccttattgccaaagaagccaaccgccgatctctcccggcctaaaagcacaagcacatcctcaatgaaaaaaactacgacactgtcgggaactgcgccagctgccggtgtggtccctagtcgcgtgaaagcgaccccaatgccctctaggccctcaacaaccccattcattgataaaaagccaacaagcgctaaaccatccagcacaacaccacggctctccagactcgctaccaacacatctgctcccgatctgaaaaacgtgcgcagcaaggttgggtccactgagaatattaagcaccagccaggcggcggtagggtgcagattgtgagcaagaaggtgagctattcccacattcaatcaaaatgcggatccaaggacaacatcaaacatgtgcccgggggtgggaatgtacaaatccagaataagaaggttgatatttcaaaggtctcctcaaagtgtggcagtaaggccaatatcaaacacaagccaggtggcggagacgtgaagatcgagagccagaaattgaattttaaagaaaaggcccaagccaaagtaggcagcttggacaacgttggacatctgcccgccggaggcgccgtgaaaatagagacctatcgcttgacattccgagccaacgctagggctagaaccgatcatggggccgacattgtgtcaaggcccccccattttccgggaggacctaactctgggtcacgggtcctcggacctttgtcacgtgctgtgcattag

SEQ ID NO: 328076 - DNA, 750 bp, Artificial Sequence
  derived and/or modified sequence
atgacagcgaaatccgtgcccgctgacttatcccgacctaagtcgaccagcacaagttctatgaaaaaaaccaccaccctatcagggacagcacctgcagcaggagtggtcccctctagggtgaaggcaacacctatgcctagtcgaccttctactactccatttattgataaaaagccaacgagtgcaaagcccagtagcaccacacccaggctctctcggcttgccacgaacacttcggcccccgacctgaagaacgtccgaagcaaagtggggagtactgaaaatatcaaacaccaacccggcggcggacgagtgcaaatcgtgtctaaaaaagtctcctacagccatattcagtcaaagtgtggcagtaaggataacattaagcatgtccccgggggcgggaatgttcaaatccaaaataaaaaagtggatatatctaaggtcagcagcaagtgtggttcaaaagctaacatcaagcacaaacctggtggtggcgatgttaagatcgagagccagaagctcaacttcaaagaaaaggctcaggctaaggtgggctcactggacaacgtgggacatcttcccgccggaggagccgttaaaatcgaaacatatagactgacctttagagcgaacgcccgcgcgaggaccgatcacggcgctgatattgtgagcaggccgccacatttcccaggaggcccgaactctggcagccgtgtgctgggcccgctgtctcgagcagtccactag

SEQ ID NO: 328077 - DNA, 1392 bp, Artificial Sequence
  derived and/or modified sequence
atctgtgaggagcctgtggccaagaagcgggaggagctggcccacttcagcaacagcagcagcaacagcggcaagaaggagctgggcacagctggcctgtacctgcacagcaagctggagcagatccctgagggcagcagcaaggagaagggccaggaggacttcagcgagaccagaattgacagctgcagccaggtgtgccagagaggagagaagcagcccggccagacagccctggccggcaagaaggagattgaggtgacagccacccagagcacccccagcttcctgtttgagaagcccccaagagatggcatcgcccggcctgaggagggccggcctgtggtgtctggaactggaaatgacatcaccaccccacccaacaaggagctgccccccagccctgagaagaagaccaagcccatcgcagatgccaaggcccctgagaagagggccagccccagcaagccagccagcgccccagccagccgcagcggcagcaagagcacccagacagtggccaagaccaccacagctgctgctgtggccagcacaggccccagcagccgcagccccagcaccctgctgcccaagaagcccacagccatcaagacagagggcaagccagctgaggtgaagaagatgacagccaagtctgtgcctgctgacctgagccggcccaagagcaccagcaccagctccatgaagaagaccaccaccctgagcggcacagccccagctgctggggtggtgcccagccgggtgaaggccacccccatgcccagccggcccagcaccacccccttcatcgacaagaagcccaccagcgccaagcccagcagcaccaccccccggctgagccggctggccaccaacaccagcgccccagacctgaagaatgtgcgcagcaaggtgggcagcacagagaacatcaagcaccagcccggcggcggccgggtgcagatcgtgtccaagaaggtgtcctacagccacatccagagcaaatgtggcagcaaggacaacatcaagcacgtgcctgggggcggcaatgtgcagatccagaacaagaaggtggacatcagcaaggtgagcagcaaatgtggcagcaaggccaacatcaagcacaagccaggcggcggagatgtgaagattgagagccagaagctgaacttcaaggagaaggcccaggccaaggtgggcagcctggacaacgtgggccacctgcctgctgggggcgctgtgaagattgagacctaccgcctgaccttccgggccaatgcccgggccaggacagaccatggagctgacatcgtgtccaggcctccccacttccctgggggccccaacagcggcagccgggtgctgggccccctgagcagagctgtgcactag

SEQ ID NO: 328078 - DNA, 2487 bp, Artificial Sequence
  derived and/or modified sequence
atgagcctgagtgacaagcagacagccagcctgacagctgcctacggccagctgagcaagggcaagccagcagaatgtaggatggacagccccaaggagatcagccaggccggctttgagtggcagaggacagagggcaagctgaatgaaattggcctgaatgtgtccatggatggccagcccaaggatggcctggtgaagaatgccagcttcctggagcagaacaagctgtgcttctttgagggcaagctggacaaggagctgagcattgagatgcaggacaaggactgccaggaggccagcggccacctggagagccgctacgtgatcagcgagacctgccaccccctggagggcaacagcgtgcaccagaagaccagcgagttccacctgggcctcatcgagggccctgacaagaacaagaccatccctgtgcagggcaaggtggccggcaagaatggcctggagaccaagagccagagcgacctggacttccctggagctgctgacatccccaccaggtatgtgaaggagcaggagacctctgtgtggaaccccagcttccaccctgtggcccagggcagcctgggcagccgggaggccaccccaggagagatggagaacagcatcaccccaggctgccctgtgattggagtggtgaatgacaacagcgagcagctgaagtgtgagagccccctgctggtgtccctggcccacccagcccccatcatcgagcacagccccaccaccatcccccccatcaccatggtgttcacccaggagcacctgaatgccagctgccacatccgggaccatgacaaggagctggagaagctgagcagcacagaggaggccgtgctgaaccaggccccccagcagaagaaggctgtgcggcgggccctgtctgaatgtagccacctgtctgtgcccccagctgtgaacctggccgacaagtacccagagctgcctgcccgggaggagcccagcagcggcctgctgcccccacccagcagccccatgcccagccccaccccaggcaagctgggcgccccagccatgaagaggtccatgacagtgggggaggagcagacagccagctacaagctgagccctgggaagctgcccatcctgagcaccaaggagatcccccccttcatctgtgaggagcctgtggccaagaagcgggaggagctggcccacttcagcaacagcagcagcaacagcggcaagaaggagctgggcacagctggcctgtacctgcacagcaagctggagcagatccctgagggcagcagcaaggagaagggccaggaggacttcagcgagaccagaattgacagctgcagccaggtgtgccagagaggagagaagcagcccggccagacagccctggccggcaagaaggagattgaggtgacagccacccagagcacccccagcttcctgtttgagaagcccccaagagatggcatcgcccggcctgaggagggccggcctgtggtgtctggaactggaaatgacatcaccaccccacccaacaaggagctgccccccagccctgagaagaagaccaagcccatcgcagatgccaaggcccctgagaagagggccagccccagcaagccagccagcgccccagccagccgcagcggcagcaagagcacccagacagtggccaagaccaccacagctgctgctgtggccagcacaggccccagcagccgcagccccagcaccctgctgcccaagaagcccacagctgacctgagccggcccaagagcaccagcaccagctccatgaagaagaccaccaccctgtctggaacagccccagctgctggggtggtgcccagccgggtgaaggccacccccatgcccagccggcccagcaccacccccttcatcgacaagaagcccaccagcgccaagcccagcagcaccaccccccggctgagccggctggccaccaacaccagcgccccagacctgaagaatgtgcgcagcaaggtgggcagcacagagaacatcaagcaccagcccggcggcggccgggtgcagatcgtgtccaagaaggtgtcctacagccacatccagagcaaatgtggcagcaaggacaacatcaagcacgtgcctgggggcggcaatgtgcagatccagaacaagaaggtggacatcagcaaggtgagcagcaaatgtggcagcaaggccaacatcaagcacaagccaggcggcggagatgtgaagattgagagccagaagctgaacttcaaggagaaggcccaggccaaggtgggcagcctggacaacgtgggccacctgcctgctggaggagctgtgaagattgagacctaccgcctgaccttccgggccaatgcccgggccaggacagaccacggggctgacatcgtgtcccggcccccccacttccctgggggccccaacagcggcagccgggtgctgggccccctgagcagagctgtgcactag

SEQ ID NO: 328079 - DNA, 750 bp, Artificial Sequence
  derived and/or modified sequence
atgacagccaagtctgtgcctgctgacctgagccggcccaagagcaccagcaccagctccatgaagaagaccaccaccctgagcggcacagccccagctgctggggtggtgcccagccgggtgaaggccacccccatgcccagccggcccagcaccacccccttcatcgacaagaagcccaccagcgccaagcccagcagcaccaccccccggctgagccggctggccaccaacaccagcgccccagacctgaagaatgtgcgcagcaaggtgggcagcacagagaacatcaagcaccagcccggcggcggccgggtgcagatcgtgtccaagaaggtgtcctacagccacatccagagcaaatgtggcagcaaggacaacatcaagcacgtgcctgggggcggcaatgtgcagatccagaacaagaaggtggacatcagcaaggtgagcagcaaatgtggcagcaaggccaacatcaagcacaagccaggcggcggagatgtgaagattgagagccagaagctgaacttcaaggagaaggcccaggccaaggtgggcagcctggacaacgtgggccacctgcctgctgggggcgctgtgaagattgagacctaccgcctgaccttccgggccaatgcccgggccaggacagaccatggagctgacatcgtgtccaggcctccccacttccctgggggccccaacagcggcagccgggtgctgggccccctgagcagagctgtgcactag

SEQ ID NO: 328080 - DNA, 1564 bp, Artificial Sequence
  derived and/or modified sequence
atctgtgaggaaccagtggccaagaagagagaagaattggctcacttcagcaacagcagcagcaactctgggaagaaggaactcggcactgctggattatatctccatagtaagctggagcagattcctgaaggaagcagcaaggaaaaagggcaggaagattttagtgaaactagaattgattcatgctcgcaggtttgccagcgaggagagaaacagccaggacagacggctctggcagggaagaaagaaattgaggtcactgcaacccagagcactccatcgttcctgtttgaaaagcccccacgtgatggaatagccaggccagaagaaggaaggcctgtggtgagtgggacaggaaatgacatcaccaccccaccgaacaaggagctcccaccaagcccagagaagaaaacaaagcccattgcagatgcaaaggctcctgagaagcgggcctcaccatccaagccagcttctgccccagcctccagatctgggtccaagagcactcagactgttgcaaaaaccacaacagctgctgctgttgcctcaactggcccaagcagtaggagcccctccacgctcctgcccaagaagcccactgccattaagactgagggaaaacctgcagaagtcaagaagatgactgcaaagtctgtaccagctgacttgagtcgcccaaagagcacctccaccagttccatgaagaaaaccaccactctcagtgggacagcccccgctgcaggggtggttcccagccgagtcaaggccacacccatgccctcccggccctccacaactcctttcatagacaagaagcccacctcggccaaacccagctccaccaccccccggctcagccgcctggccaccaatacttctgctcctgatctgaagaatgtccgctccaaggttggctccacggaaaacatcaagcatcagcctggaggaggccgggtccagatagtctccaaaaaagtgagctacagccatattcagtccaagtgtggttccaaggacaatattaagcatgtccctggaggtggtaatgttcagattcagaacaagaaagtggacatctctaaggtctcctccaagtgtgggtctaaggctaacatcaagcacaagcctggtggaggagatgtcaagattgaaagtcagaagttgaacttcaaggagaaggcccaggccaaggtgggatccctcgataatgtgggccacctacctgcaggaggtgctgtgaagattgagacctacaggctgacgttccgggcaaatgccagggcccgcaccgaccacggggccgacattgtctcccgccccccacacttccctggcggccccaactcgggctcccgggtccttggccccctttcccgggctgtccactagaccagtgagcgcttgggcgccgtgctgggcagcccgctaggctcgccttccctcctgctttgcgtgcccggggcagcagcagccctgccccacacctcctctcactccccagcctgggcccatctccctgctttggtcttgccccatcactgcgccactgctccgtggagga

SEQ ID NO: 328081 - DNA, 3478 bp, Artificial Sequence
  derived and/or modified sequence
cttagtgcttggattggcaccatactgtgttttaaattgcagatctaaacagagtgctagttcacgggaaattacattctcagattaaagtagcattttgttgtgcagaaagcagcaggttccttcctttctttcgctttcattcattcttcctttctttctttctttcacatttgtaagtgcatttaatactcaactgcttgaggagagaggggcattgagggagagatgaattttgtcatgaatactggggaattggtgtgatgtcactgcaagctctgtgtgatcgtaggtggtattagagctccaggagcgaaagcagggagagcagtggaggagagacgatgtcgctctcagacaagcagacagcctctctcactgccgcgtacggtcagctcagtaagggcaagcctgcagagtgccgaatggactccccaaaagaaatcagtcaagccggattcgaatggcagaggacagagggcaaactgaatgaaattgggctgaatgtcagcatggacgggcaaccaaaagatgggcttgtgaagaatgccagcttcctggagcagaacaagctctgcttttttgaggggaagctagacaaagagctgagcattgaaatgcaggacaaggactgtcaagaagcctcaggtcaccttgagagcaggtatgtgatttcagagacctgccatcccttggaggggaactcggtacaccagaagacctccgagttccatctgggactcatagaggggccagacaaaaacaaaaccattccagttcaggggaaggtggcagggaagaatggactagagaccaagagccagtcagatctggatttccctggggctgctgacatccctaccagatatgttaaggagcaggaaaccagtgtttggaaccccagctttcatccagtggctcaaggctctctgggctcaagggaagcaactccgggagagatggagaatagcatcacccctggctgcccagtgattggggtggtaaatgataactctgagcagctgaagtgtgagtccccactcctggtgtctctagcccacccagcccccattattgagcattcacccaccaccattccgccaatcactatggtgttcacccaggaacatttgaatgcaagctgtcacatcagagaccatgataaggagttggagaaattgagttctaccgaggaggctgtgctcaaccaagccccccagcagaaaaaggcagtgcgcagggccctgtctgaatgttctcacctctcagttcccccagctgtcaaccttgcagataagtaccctgaactccctgcccgagaagagccttcttctggcctgctgcctccccctagtagcccaatgcctagtcctacacctgggaaactgggagctcctgctatgaagcgctccatgactgtgggtgaggaacagacagctagctacaaattgagccctgggaaactgcccatcttgtctactaaagagatacctcctttcatctgtgaggaaccagtggccaagaagagagaagaattggctcacttcagcaacagcagcagcaactctgggaagaaggaactcggcactgctggattatatctccatagtaagctggagcagattcctgaaggaagcagcaaggaaaaagggcaggaagattttagtgaaactagaattgattcatgctcgcaggtttgccagcgaggagagaaacagccaggacagacggctctggcagggaagaaagaaattgaggtcactgcaacccagagcactccatcgttcctgtttgaaaagcccccacgtgatggaatagccaggccagaagaaggaaggcctgtggtgagtgggacaggaaatgacatcaccaccccaccgaacaaggagctcccaccaagcccagagaagaaaacaaagcccattgcagatgcaaaggctcctgagaagcgggcctcaccatccaagccagcttctgccccagcctccagatctgggtccaagagcactcagactgttgcaaaaaccacaacagctgctgctgttgcctcaactggcccaagcagtaggagcccctccacgctcctgcccaagaagcccactgctgacttgagtcgcccaaagagcacctccaccagttccatgaagaaaaccaccactctcagtgggacagcccccgctgcaggggtggttcccagccgagtcaaggccacacccatgccctcccggccctccacaactcctttcatagacaagaagcccacctcggccaaacccagctccaccaccccccggctcagccgcctggccaccaatacttctgctcctgatctgaagaatgtccgctccaaggttggctccacggaaaacatcaagcatcagcctggaggaggccgggtccagatagtctccaaaaaagtgagctacagccatattcagtccaagtgtggttccaaggacaatattaagcatgtccctggaggtggtaatgttcagattcagaacaagaaagtggacatctctaaggtctcctccaagtgtgggtctaaggctaacatcaagcacaagcctggtggaggagatgtcaagattgaaagtcagaagttgaacttcaaggagaaggcccaggccaaggtgggatccctcgataatgtgggccacctacctgcaggaggtgctgtgaagattgagacctacaggctgacgttccgggcaaatgccagggcccgcaccgaccacggggccgacattgtctcccgccccccacacttccctggcggccccaactcgggctcccgggtccttggccccctttcccgggctgtccactagaccagtgagcgcttgggcgccgtgctgggcagcccgctaggctcgccttccctcctgctttgcgtgcccggggcagcagcagccctgccccacacctcctctcactccccagcctgggcccatctccctgctttggtcttgccccatcactgcgccactgctccgtggaggaggttgggagggggttggggtggttgaggctaagttgggatctaggagaggagaaccagattctatcctcatctttttttggttctttggtccaaacccaaaagaaactgacatgccctcccttctccctggatctacctggagggaagagtggaggtggattccgagtggtgacaggacgctgaccgtggagcttaagccactgcctctccctctggtcccacaaatgggcgcccccccctccccatgcaggtggtgtcgggcccttcttgctgccctgccccaagttgggggtcagtgctgcctgtccccatgcttaacatacccgcctagctgctgtcacatttttcttgttttgtccttttatttttttctaataacctaaaaactggcaaaatagttctgcaggttgaagccatgtctacatgaaagtcctcagtaagtgttagagggaacagggcggagatatccttatg

SEQ ID NO: 328082 - DNA, 1533 bp, Artificial Sequence
  derived and/or modified sequence
aagaattggctcacttcagcaacagcagcagcaactctgggaagaaggaactcggcactgctggattatatctccatagtaagctggagcagattcctgaaggaagcagcaaggaaaaagggcaggaagattttagtgaaactagaattgattcatgctcgcaggtttgccagcgaggagagaaacagccaggacagacggctctggcagggaagaaagaaattgaggtcactgcaacccagagcactccatcgttcctgtttgaaaagcccccacgtgatggaatagccaggccagaagaaggaaggcctgtggtgagtgggacaggaaatgacatcaccaccccaccgaacaaggagctcccaccaagcccagagaagaaaacaaagcccattgcagatgcaaaggctcctgagaagcgggcctcaccatccaagccagcttctgccccagcctccagatctgggtccaagagcactcagactgttgcaaaaaccacaacagctgctgctgttgcctcaactggcccaagcagtaggagcccctccacgctcctgcccaagaagcccactgccattaagactgagggaaaacctgcagaagtcaagaagatgactgcaaagtctgtaccagctgacttgagtcgcccaaagagcacctccaccagttccatgaagaaaaccaccactctcagtgggacagcccccgctgcaggggtggttcccagccgagtcaaggccacacccatgccctcccggccctccacaactcctttcatagacaagaagcccacctcggccaaacccagctccaccaccccccggctcagccgcctggccaccaatacttctgctcctgatctgaagaatgtccgctccaaggttggctccacggaaaacatcaagcatcagcctggaggaggccgggtccagatagtctccaaaaaagtgagctacagccatattcagtccaagtgtggttccaaggacaatattaagcatgtccctggaggtggtaatgttcagattcagaacaagaaagtggacatctctaaggtctcctccaagtgtgggtctaaggctaacatcaagcacaagcctggtggaggagatgtcaagattgaaagtcagaagttgaacttcaaggagaaggcccaggccaaggtgggatccctcgataatgtgggccacctacctgcaggaggtgctgtgaagattgagacctacaggctgacgttccgggcaaatgccagggcccgcaccgaccacggggccgacattgtctcccgccccccacacttccctggcggccccaactcgggctcccgggtccttggccccctttcccgggctgtccactagaccagtgagcgcttgggcgccgtgctgggcagcccgctaggctcgccttccctcctgctttgcgtgcccggggcagcagcagccctgccccacacctcctctcactccccagcctgggcccatctccctgctttggtcttgccccatcactgcgccactgctccgtggagga

SEQ ID NO: 328083 - DNA, 1392 bp, Artificial Sequence
  derived and/or modified sequence
atctgcgaggagcccgtggccaagaagcgggaggagctggcccacttctctaattccagttctaattcaggaaaaaaagagctgggaactgcaggattatacctccacagcaagctcgagcagatcccggaggggtcctccaaggagaagggccaggaagactttagtgagaccaggattgattcttgtagccaagtatgccagcgcggagaaaaacagcccggtcagaccgctctggctggtaagaaagagatagaggtcaccgcaactcagagcactccctccttcctgttcgagaagccacctagggatggcatcgcgcggcctgaggaaggccggcccgtggtgagcgggacagggaatgatattaccacccctccaaataaagagctgccaccaagcccagagaagaaaaccaagcctattgccgacgccaaggcccctgagaaaagggctagccctagcaaaccagcctccgcaccagcctcgagaagcggatccaagtccacccagactgtcgcgaagactactactgccgcggcagtagctagcacgggacctagttcccgatccccttctaccctgcttccaaaaaagcccacggcaataaagacagagggcaagcctgccgaagtgaaaaaaatgacggcaaaatccgttccagccgatctttccagacctaaatcaacgagcacatctagtatgaagaagactacaacactctctggcacagctcccgcagccggggttgtccccagcagggtcaaggcaacgccgatgccaagccggccatctactacacctttcattgataaaaagccgactagcgccaaaccgtcctcaactaccccaagactgtcacggttagccactaacacttccgcgccggacctcaagaatgtcaggtccaaggtggggagtaccgaaaatataaagcatcagcccggaggtggtcgtgttcagatcgtctcaaaaaaggtgtcatactcacacatccagtcaaaatgtgggtccaaggacaacataaaacatgttccgggaggcggcaacgtacagatccagaacaaaaaagtggacatcagcaaggtgtcttcgaagtgcggcagtaaggcaaacatcaaacacaaacctggggggggtgacgttaagatcgagagccagaagctcaacttcaaggagaaagcccaggctaaagtcggatcccttgacaacgttggccacctgccggcgggtggtgctgtgaaaatagagacatatcgattgacgttccgcgcgaacgcgagagccaggacggaccacggagcggatatcgtaagcaggcctcctcacttcccaggaggcccaaactcaggctctagagtactcggccctttgtcaagggctgttcactag

SEQ ID NO: 328084 - DNA, 2487 bp, Artificial Sequence
  derived and/or modified sequence
atgagcctgagcgacaagcagaccgccagcctgaccgccgcctacggacagctgtccaagggaaaacccgccgagtgtagaatggatagtccaaaggaaattagccaggccgggttcgagtggcagaggacagaaggaaagctcaatgagatcggcctgaatgtgtcgatggatggccaaccaaaggatggattggttaagaacgcctcctttctggagcagaataaactgtgtttctttgaaggcaaactggacaaagagctaagcatcgagatgcaagacaaggattgccaggaagcctcgggacatctggagtcccgctacgtgatctctgagacttgccatccgcttgagggcaattccgtgcaccagaaaacctcagagttccatctgggcctgatagagggccctgacaaaaacaagaccatacctgtgcaagggaaggtggctgggaagaacggtctggagacaaagtctcaatcagacctggattttcctggggctgctgatatccccactaggtacgtgaaagaacaggaaacaagcgtttggaatccttcttttcatcctgtcgcacagggatcactcggttcaagagaagcaacgcccggggaaatggagaactctataaccccaggctgccccgtcataggcgttgtgaacgataactcagaacagctcaagtgcgaatccccactgttagtcagcctggcacatcccgctcctattatagagcattcacctacaactattcctccaataaccatggtgtttacccaagagcacttaaatgcctcatgccatatacgcgaccacgacaaagaactcgaaaagctgagtagcacagaggaagccgtcctgaatcaggctccccagcaaaagaaggccgtgcggagggctctctctgagtgctcacatctctcagtgcccccagcagtcaatctggccgataagtatccggaactcccagcgagggaagaaccgtctagcggcctcttaccccctccgagcagcccgatgccttcacctacgcccggtaaactgggcgcacccgcgatgaaacggagcatgacagtgggtgaagagcagactgccagctacaaactgtctcctgggaaacttcctatactatctaccaaggagatcccgcccttcatttgcgaggagccagttgctaagaagagggaggaacttgctcatttctctaattcctcatccaattctggaaaaaaagaactgggcaccgccggattatacctacattctaaactggagcagatccccgaaggtagctccaaagaaaaaggtcaggaggactttagcgagactcgtatcgacagttgctcccaggtgtgccaacgcggagagaaacagccaggacagacagctctagccggtaagaaagaaatcgaagttactgctacacaatcgactccatcttttctttttgaaaagcctcccagagacggcatcgcccggccagaggagggccgtccagtcgtgtcaggcacgggaaatgatattaccacccctccaaacaaggagctgcccccctcaccagaaaagaagaccaaaccaattgcagatgctaaggcacccgaaaagcgcgccagcccatcaaaaccagccagcgctcctgcctcgagatccggcagtaagagcacgcagactgttgcaaaaaccactacagccgccgctgtggcgtctaccggacctagcagccggtccccctccactctgcttcctaagaaacctacagctgatctgagcagaccaaaatccacatctacatcaagtatgaaaaagactacgaccctgtcaggcaccgccccggccgctggtgtggttccgagcagagttaaggctactccaatgccctctcgcccttctaccactccttttatcgataaaaaacctacttcggccaagcccagcagcaccacaccccgactgagcaggttggccactaatacctcggcacccgacctgaaaaatgttaggtctaaggtgggatcgacagagaacatcaagcaccagcctggtgggggcagggtgcagatagtaagcaagaaggttagttactctcatatacagtctaaatgcggatccaaggacaacatcaaacatgttcccggaggcggaaatgtgcagatccagaataagaaagtggacatttccaaggtcagctccaagtgcgggtcaaaagcaaatattaagcacaagccagggggcggggatgttaagattgagagccagaagttgaatttcaaggaaaaggcccaagctaaggtaggctccctcgacaacgtgggccaccttccagctggtggggccgtgaagattgaaacctatcggctcacgtttagagccaacgcccgcgcacgcacggaccatggtgccgatatcgtgtcgagacccccacattttcccggcggacctaattcaggcagtcgtgtgctggggcccctttcccgtgcagtccattag

SEQ ID NO: 328085 - DNA, 750 bp, Artificial Sequence
  derived and/or modified sequence
atgaccgccaagagcgtgcccgccgacctgagccggcccaagagcacgagcacaagtagtatgaaaaagactacaaccctcagtgggaccgccccggctgcaggggtcgttcctagtagagtgaaggcaactcctatgccctccagaccttccactacgcccttcatcgataagaagcctacatccgcaaagccctcgtccacaaccccccgcttgtccagactcgccacaaacacctctgcgcctgaccttaagaacgtgaggtctaaagtcggctccaccgaaaatattaagcatcaacctggcggtggcagagtacaaatcgtgtctaaaaaggtgtcctattcccacattcagagcaagtgcgggtcaaaagacaacatcaaacacgtgccaggcgggggcaatgtgcagatacaaaataagaaggttgacatttctaaggtctcctccaaatgcggctccaaggctaacattaaacacaaacccggaggaggggacgtaaaaatcgaatcacaaaagctcaactttaaggaaaaagcacaggcaaaagttggctctttggataatgtgggtcaccttcccgcgggaggtgcagtgaagattgaaacgtacaggctgacatttagggccaatgcacgggcacggactgaccacggcgcagatattgtgagccgccctcctcacttccccggcggacccaacagcggttctcgagtgctcggacctctatcccgggccgtgcactag

SEQ ID NO: 328086 - DNA, 1392 bp, Artificial Sequence
  derived and/or modified sequence
atctgtgaggaacccgtcgctaagaaacgagaagaattagcgcatttttctaatagcagctctaactctggcaagaaggaactggggacagcgggactgtaccttcattctaagttggagcagatccctgaaggctcatcaaaggagaagggacaggaggacttttctgagaccaggattgactcctgttcccaggtgtgccagcggggtgaaaaacagcctggacaaactgctctcgcaggcaaaaaagagatcgaagtgaccgccacgcaatccactccatcttttcttttcgaaaagcccccacgcgatggcatagcgcgtcctgaggaagggcgaccagtcgtctccgggacgggtaatgacattacgaccccaccgaataaggaactcccacctagcccagagaaaaaaaccaagcccattgctgacgccaaagcacccgagaagagggcctctccctccaaacctgcatcggcacccgcttcccgatccggctctaaatctacgcagactgtcgccaagacaaccactgccgctgctgtggcatctactggaccatccagccggagcccctctacgctgctccctaagaagcccaccgctatcaagaccgaaggaaaacctgctgaagtgaagaagatgaccgcaaaatcagtcccagccgacctgtcccggccaaagtccacatctacctcttccatgaaaaagacaaccacattgtcaggcaccgcacctgcagctggagtggttccatccagggtgaaggcgactccgatgccgagtaggccctccacaactcccttcattgataagaagcctacgagtgccaaaccctccagcactaccccacgactgtcaagactagctactaacacgagcgcaccagatctcaagaatgtcagatctaaggtgggaagtaccgagaacattaaacatcagccaggcggaggcagagtccaaatcgtctcaaaaaaggtttcttatagtcacatccagagtaaatgtgggagcaaagataatattaaacacgtccccggaggaggcaacgtgcagatccaaaacaagaaggtggacatttctaaagtttctagtaagtgcgggagcaaggccaatataaagcacaaaccagggggtggcgatgtgaaaatcgaaagccagaagctgaactttaaggaaaaagcccaagccaaggtagggagcttagataatgtcggtcacttgcccgcaggaggcgctgttaagattgagacataccggctgacgttcagagcaaacgcgagagcacgtaccgatcacggggctgacatagtgtcacgccctccgcactttccaggcggaccgaactccggtagcagagtgcttggcccacttagccgagccgtgcactag

SEQ ID NO: 328087 - DNA, 2487 bp, Artificial Sequence
  derived and/or modified sequence
atgagtctgtctgataagcagactgctagcctgacagcagcctacggtcagctatcaaaaggaaaaccggctgagtgcagaatggactctccaaaagagatcagtcaggcaggtttcgaatggcagcgcaccgaaggaaagttaaacgaaattggactgaacgtttcaatggatggtcaacccaaggacggtctcgttaagaacgcatcctttctggaacaaaataaactctgcttctttgagggaaagctcgacaaagaactctcaatcgagatgcaagataaggattgccaagaggcgtcggggcacctcgaatcaaggtatgtgatctctgagacctgccatccattggaagggaattcagtgcaccaaaaaacaagcgagttccatctggggctgatagaagggccagacaagaataaaacaattccagtgcaaggtaaagtggccggaaaaaacggtctggaaaccaaatcacaaagcgacctggacttcccgggagctgcggacatacccactagatacgttaaagaacaagaaacgtccgtctggaacccctcgttccatcctgtcgctcagggttcacttgggagccgggaggcaacgccaggcgaaatggagaactcgatcactccaggttgcccggtcatcggagtggtgaatgataattcagaacagctcaagtgcgagtcccctctgttagtgagtctcgcccacccggcaccaataattgaacactccccaacgaccataccccctatcaccatggtgttcactcaagagcaccttaatgccagctgtcatatacgtgatcatgataaagagctcgagaagttgtcctcaactgaggaagccgtgctgaatcaggcaccccagcagaaaaaggctgtgaggcgggcactcagcgaatgttcgcacctcagtgtgccccctgcggtgaatctggcagataagtaccccgagctccctgccagggaagagccctcttccggactgctgccgccacccagctcgcctatgccttcccccacccctggtaaattgggcgcacccgctatgaagaggtccatgacggtgggggaagaacaaactgcttcttataaactgtctccaggaaagttgcctattttaagcacaaaggagatccccccatttatctgtgaagagcctgttgccaagaagcgggaagaactggctcatttttcaaattcctccagcaatagcggtaagaaggagctgggcacggccggactgtatttacactctaagctcgaacagattcccgagggcagttcgaaggaaaagggtcaggaggacttttccgaaacacgaattgacagttgcagccaggtgtgtcagcgcggagaaaagcagccaggccagaccgcattagccggaaagaaggagattgaggtgaccgccacacagagcactccttcattcctgttcgaaaaacctccgagagacggaattgcgcgacccgaggagggacggcctgtcgtcagtggcacgggcaatgacatcaccacaccccctaacaaggagcttcctccgagccctgaaaaaaagaccaagccgattgctgacgccaaggcgccagaaaagagggcctctccgagcaagcccgcatcggccccagcaagtcgctccgggtctaaaagcacccagaccgtagcaaaaactactacggcagctgccgtcgcttccaccgggccttcctcgagatcccccagtactctgttacccaagaagcccaccgccgacctgtcaaggccaaagtctacctccaccagtagtatgaagaaaacgaccaccttgtccgggacagctcccgctgctggggtggtgccgagcagagttaaagctacacctatgccctctaggccctctactaccccttttattgacaagaaacctacttccgctaaacccagctccacgacacccaggttaagcagacttgcaacaaacacaagcgcaccggaccttaaaaacgtccgtagcaaggtgggatctacagagaatattaagcatcagccaggcggaggccgagtgcaaattgtgtcaaaaaaggtgtcttactctcacatccagtcaaaatgtgggtctaaggataacatcaagcatgtccctggtgggggtaacgtgcagatacagaataagaaggttgacatttctaaggtgagctctaagtgcggatcgaaggcaaacatcaagcacaaacccggtggcggagatgtgaaaattgagagtcagaaattaaacttcaaggagaaggctcaggcaaaggtgggaagtttagacaatgtgggccacctcccagctggcggtgccgtgaagattgagacataccgactgacatttcgagccaacgcccgagccagaactgaccatggagcggatatcgttagcaggccaccacactttcccggaggcccaaattctggatccagagtgcttggcccactcagtcgagctgtccattag

SEQ ID NO: 328088 - DNA, 750 bp, Artificial Sequence
  derived and/or modified sequence
atgactgcgaagagtgtgcctgcagacttatctcgtcccaaaagtacatcaacatcttctatgaagaagactacgacgctatctggtactgcccctgcggcaggtgtagtaccgtccagagtgaaggccactccaatgccatcccggcctagcaccactccttttatcgataaaaagcccaccagtgccaagccaagttccaccacacctcgactgtccagactcgccaccaatacgagcgcacctgacctgaagaacgtgcgttcgaaggtcgggagcacagaaaatattaagcaccagcccggagggggaagagtgcagattgttagcaagaaagtcagttattcccacatccagtccaaatgcgggtccaaggataatatcaaacacgtgcccggaggcggtaacgtgcagatccagaataagaaagtcgatatctctaaagtcagttctaaatgcgggtctaaagctaacataaagcacaaacccggaggaggagacgtgaagatagaatcgcagaagttaaactttaaagaaaaagcccaagctaaggtcggcagcttagataatgttgggcacctgccagctggaggagctgtgaagatcgagacctatcgactgacattccgagccaacgcgagagcacgaacagatcacggggctgatatagtgtcccgacctccccactttcctggcggtcctaatagcgggagtagagtgttgggccctctatctcgcgctgtgcattag

SEQ ID NO: 328089 - DNA, 1392 bp, Artificial Sequence
  derived and/or modified sequence
atctgcgaggagcccgtggccaagaagagagaggagctggcccacttcagcaacagcagcagcaacagcggcaagaaggagctgggcaccgccggcctgtacctgcacagcaagctggagcagatccccgagggcagcagcaaggagaagggccaggaggacttcagcgagaccagaatcgacagctgcagccaggtgtgccagagaggcgagaagcagcccggccagaccgccctggccggcaagaaggagatcgaggtgaccgccacccagagcacccccagcttcctgttcgagaagccccccagagacggcatcgccagacccgaggagggcagacccgtggtgagcggcaccggcaacgacatcaccaccccccccaacaaggagctgccccccagccccgagaagaagaccaagcccatcgccgacgccaaggcccccgagaagagagccagccccagcaagcccgccagcgcccccgccagcagaagcggcagcaagagcacccagaccgtggccaagaccaccaccgccgccgccgtggccagcaccggccccagcagcagaagccccagcaccctgctgcccaagaagcccaccgccatcaagaccgagggcaagcccgccgaggtgaagaagatgaccgccaagagcgtgcccgccgacctgagcagacccaagagcaccagcaccagcagcatgaagaagaccaccaccctgagcggcaccgcccccgccgccggcgtggtgcccagcagagtgaaggccacccccatgcccagcagacccagcaccacccccttcatcgacaagaagcccaccagcgccaagcccagcagcaccacccccagactgagcagactggccaccaacaccagcgcccccgacctgaagaacgtgagaagcaaggtgggcagcaccgagaacatcaagcaccagcccggcggcggcagagtgcagatcgtgagcaagaaggtgagctacagccacatccagagcaagtgcggcagcaaggacaacatcaagcacgtgcccggcggcggcaacgtgcagatccagaacaagaaggtggacatcagcaaggtgagcagcaagtgcggcagcaaggccaacatcaagcacaagcccggcggcggcgacgtgaagatcgagagccagaagctgaacttcaaggagaaggcccaggccaaggtgggcagcctggacaacgtgggccacctgcccgccggcggcgccgtgaagatcgagacctacagactgaccttcagagccaacgccagagccagaaccgaccacggcgccgacatcgtgagcagacccccccacttccccggcggccccaacagcggcagcagagtgctgggccccctgagcagagccgtgcactag

SEQ ID NO: 328090 - DNA, 2487 bp, Artificial Sequence
  derived and/or modified sequence
atgagcctgagcgacaagcagaccgccagcctgaccgccgcctacggccagctgagcaagggcaagcccgccgagtgcagaatggacagccccaaggagatcagccaggccggcttcgagtggcagagaaccgagggcaagctgaacgagatcggcctgaacgtgagcatggacggccagcccaaggacggcctggtgaagaacgccagcttcctggagcagaacaagctgtgcttcttcgagggcaagctggacaaggagctgagcatcgagatgcaggacaaggactgccaggaggccagcggccacctggagagcagatacgtgatcagcgagacctgccaccccctggagggcaacagcgtgcaccagaagaccagcgagttccacctgggcctgatcgagggccccgacaagaacaagaccatccccgtgcagggcaaggtggccggcaagaacggcctggagaccaagagccagagcgacctggacttccccggcgccgccgacatccccaccagatacgtgaaggagcaggagaccagcgtgtggaaccccagcttccaccccgtggcccagggcagcctgggcagcagagaggccacccccggcgagatggagaacagcatcacccccggctgccccgtgatcggcgtggtgaacgacaacagcgagcagctgaagtgcgagagccccctgctggtgagcctggcccaccccgcccccatcatcgagcacagccccaccaccatcccccccatcaccatggtgttcacccaggagcacctgaacgccagctgccacatcagagaccacgacaaggagctggagaagctgagcagcaccgaggaggccgtgctgaaccaggccccccagcagaagaaggccgtgagaagagccctgagcgagtgcagccacctgagcgtgccccccgccgtgaacctggccgacaagtaccccgagctgcccgccagagaggagcccagcagcggcctgctgcccccccccagcagccccatgcccagccccacccccggcaagctgggcgcccccgccatgaagagaagcatgaccgtgggcgaggagcagaccgccagctacaagctgagccccggcaagctgcccatcctgagcaccaaggagatcccccccttcatctgcgaggagcccgtggccaagaagagagaggagctggcccacttcagcaacagcagcagcaacagcggcaagaaggagctgggcaccgccggcctgtacctgcacagcaagctggagcagatccccgagggcagcagcaaggagaagggccaggaggacttcagcgagaccagaatcgacagctgcagccaggtgtgccagagaggcgagaagcagcccggccagaccgccctggccggcaagaaggagatcgaggtgaccgccacccagagcacccccagcttcctgttcgagaagccccccagagacggcatcgccagacccgaggagggcagacccgtggtgagcggcaccggcaacgacatcaccaccccccccaacaaggagctgccccccagccccgagaagaagaccaagcccatcgccgacgccaaggcccccgagaagagagccagccccagcaagcccgccagcgcccccgccagcagaagcggcagcaagagcacccagaccgtggccaagaccaccaccgccgccgccgtggccagcaccggccccagcagcagaagccccagcaccctgctgcccaagaagcccaccgccgacctgagcagacccaagagcaccagcaccagcagcatgaagaagaccaccaccctgagcggcaccgcccccgccgccggcgtggtgcccagcagagtgaaggccacccccatgcccagcagacccagcaccacccccttcatcgacaagaagcccaccagcgccaagcccagcagcaccacccccagactgagcagactggccaccaacaccagcgcccccgacctgaagaacgtgagaagcaaggtgggcagcaccgagaacatcaagcaccagcccggcggcggcagagtgcagatcgtgagcaagaaggtgagctacagccacatccagagcaagtgcggcagcaaggacaacatcaagcacgtgcccggcggcggcaacgtgcagatccagaacaagaaggtggacatcagcaaggtgagcagcaagtgcggcagcaaggccaacatcaagcacaagcccggcggcggcgacgtgaagatcgagagccagaagctgaacttcaaggagaaggcccaggccaaggtgggcagcctggacaacgtgggccacctgcccgccggcggcgccgtgaagatcgagacctacagactgaccttcagagccaacgccagagccagaaccgaccacggcgccgacatcgtgagcagacccccccacttccccggcggccccaacagcggcagcagagtgctgggccccctgagcagagccgtgcactag

SEQ ID NO: 328091 - DNA, 750 bp, Artificial Sequence
  derived and/or modified sequence
atgaccgccaagagcgtgcccgccgacctgagcagacccaagagcaccagcaccagcagcatgaagaagaccaccaccctgagcggcaccgcccccgccgccggcgtggtgcccagcagagtgaaggccacccccatgcccagcagacccagcaccacccccttcatcgacaagaagcccaccagcgccaagcccagcagcaccacccccagactgagcagactggccaccaacaccagcgcccccgacctgaagaacgtgagaagcaaggtgggcagcaccgagaacatcaagcaccagcccggcggcggcagagtgcagatcgtgagcaagaaggtgagctacagccacatccagagcaagtgcggcagcaaggacaacatcaagcacgtgcccggcggcggcaacgtgcagatccagaacaagaaggtggacatcagcaaggtgagcagcaagtgcggcagcaaggccaacatcaagcacaagcccggcggcggcgacgtgaagatcgagagccagaagctgaacttcaaggagaaggcccaggccaaggtgggcagcctggacaacgtgggccacctgcccgccggcggcgccgtgaagatcgagacctacagactgaccttcagagccaacgccagagccagaaccgaccacggcgccgacatcgtgagcagacccccccacttccccggcggccccaacagcggcagcagagtgctgggccccctgagcagagccgtgcactag

SEQ ID NO: 328092 - DNA, 351 bp, Artificial Sequence
  derived and/or modified sequence
atgagcgagaagagaggccccaccagcagcaaccccagaaagagacacagagaggacagcgacgtggagatggtggaggacgacagcagaaaggagatgaccgccgcctgcacccccagaagaagaatcatcaacctgaccagcgtgctgagcctgcaggaggagatcaacgagcagggccacgaggtgctgagagagatgctgcacaaccacagcttcgtgggctgcgtgaacccccagtgggccctggcccagcaccagaccaagctgtacctgctgaacaccaccaagctgagagtgaagtgcctggcccccttccagacccccggcagcggcctgtggaacacctag

SEQ ID NO: 328093 - DNA, 351 bp, Artificial Sequence
  derived and/or modified sequence
atgagcgagaagagaggaccaaccagctccaacccacgcaagaggcatagggaagacagtgacgtggagatggtcgaggacgattcaaggaaagagatgactgccgcctgcacccctcgaaggagaatcatcaatctaacatcagtgctttcactgcaagaggaaatcaatgaacaaggacacgaggtactccgggagatgttgcataaccacagctttgttggttgtgttaaccctcagtgggctctggcacagcatcagactaagctgtacctacttaataccaccaaacttagagtgaagtgcttggcgccattccagacaccaggctctgggctctggaatacctag

SEQ ID NO: 328094 - DNA, 351 bp, Artificial Sequence
  derived and/or modified sequence
atgtctgagaagaggggccccaccagcagcaaccccaggaagaggcaccgggaggacagtgatgtggagatggtggaggatgacagcaggaaggagatgacagctgcctgcaccccccggcggcgcatcatcaacctgacctctgtgctgagcctgcaggaggagatcaatgagcagggccacgaggtgctgcgggagatgctgcacaaccacagctttgtgggctgtgtgaacccccagtgggccctggcccagcaccagaccaagctgtacctgctgaacaccaccaagctgcgggtgaagtgcctggcccccttccagaccccaggcagcggcctgtggaacacctag

SEQ ID NO: 328095 - DNA, 351 bp, Artificial Sequence
  derived and/or modified sequence
atgagcgagaagcggggccccaccagcagcaacccccggaagcggcaccgagaggacagcgacgtggagatggttgaggacgattccaggaaggagatgactgcagcctgcaccccgagacgcagaatcataaatctgacaagcgtcctctccctccaggaagagatcaatgaacagggccacgaggttcttcgggagatgcttcacaaccattcattcgtaggctgcgtcaaccctcaatgggctcttgcccagcaccagactaagttgtatctgctgaacactaccaagcttcgggtcaaatgcctggcccctttccagacaccagggtcaggtttgtggaacacgtag

SEQ ID NO: 328096 - DNA, 351 bp, Artificial Sequence
  derived and/or modified sequence
atgagtgagaagagaggaccaaccagtagtaatcctagaaaacgccatagggaagatagtgatgtagagatggtggaggacgattctcgcaaagagatgactgccgcatgcacacctaggcgacgcataatcaacttgacatctgtgctttcactgcaagaggagattaatgagcagggtcatgaagtgctgagggaaatgctgcataatcattccttcgtcggctgcgtgaatccccagtgggccctggcccaacatcagaccaaactctatttgttgaatactacaaagctgcgtgttaagtgcttagcccctttccaaaccccagggagtggactgtggaacacgtag

SEQ ID NO: 328097 - protein, 164 aa, Artificial Sequence
  derived and/or modified sequence
MGWLPLLLLLTQCLGVPGQRSPLNDFQVLRGTELQHLLHAVVPGPWQEDVADAEECAGRCGPLMDCRAFHYNVSSHGCQLLPWTQHSPHTRLRRSGRCDLFQKKGTRPLSGMAWKRTSAVTLMATPEVLGATQQTLLCASRAAASNPAGRPRVSGAMARNTAAR

SEQ ID NO: 328098 - DNA, 795 bp, Artificial Sequence
  derived and/or modified sequence
atgctgagaggcccctgggccttccactacaacgtgagcagccacggctgccagctgctgccctggacccagcacagcccccacaccagactgagaagaagcggcagatgcgacctgttccagaagaaggactacgtgagaacctgcatcatgaacaacggcgtgggctacagaggcaccatggccaccaccgtgggcggcctgccctgccaggcctggagccacaagttccccaacgaccacaagtacacccccaccctgagaaacggcctggaggagaacttctgcagaaaccccgacggcgaccccggcggcccctggtgctacaccaccgaccccgccgtgagattccagagctgcggcatcaagagctgcagagaggccgcctgcgtgtggtgcaacggcgaggagtacagaggcgccgtggacagaaccgagagcggcagagagtgccagagatgggacctgcagcacccccaccagcaccccttcgagcccggcaagttcctggaccagggcctggacgacaactactgcagaaaccccgacggcagcgagagaccctggtgctacaccaccgacccccagatcgagagagagttctgcgacctgcccagatgcggcagcgaggcccagcccagacaggaggccaccaccgtgagctgcttcagaggcaagggcgagggctacagaggcaccgccaacaccaccaccgccggcgtgccctgccagagatgggacgcccagatcccccaccagcacagattcacccccgagaagtacgcctgcaagtag

SEQ ID NO: 328099 - DNA, 495 bp, Artificial Sequence
  derived and/or modified sequence
atgggctggctgcccctgctgctgctgctgacccagtgcctgggcgtgcccggccagagaagccccctgaacgacttccaggtgctgagaggcaccgagctgcagcacctgctgcacgccgtggtgcccggcccctggcaggaggacgtggccgacgccgaggagtgcgccggcagatgcggccccctgatggactgcagagccttccactacaacgtgagcagccacggctgccagctgctgccctggacccagcacagcccccacaccagactgagaagaagcggcagatgcgacctgttccagaagaagggcaccagacccctgagcggcatggcctggaagagaaccagcgccgtgaccctgatggccacccccgaggtgctgggcgccacccagcagaccctgctgtgcgccagcagagccgccgccagcaaccccgccggcagacccagagtgagcggcgccatggccagaaacaccgccgccagatag

SEQ ID NO: 328100 - DNA, 795 bp, Artificial Sequence
  derived and/or modified sequence
atgctgcggggcccctgggctttccattataacgtgagttcccatggctgtcaacttcttccctggacccagcacagcccacacacgaggctgaggcggtcaggcagatgtgatttgttccaaaagaaagactacgtgaggacctgtatcatgaacaacggggtgggttacagaggaacgatggccaccacagttggcggcttgccttgccaggcctggtctcataagttccccaacgaccacaaatacaccccaactctgcgaaacgggctggaggaaaacttttgccgaaatccggacggcgatcccggcggaccctggtgttacactaccgacccagctgtgcgcttccaatcatgcggaatcaagtcatgcagggaagccgcctgtgtgtggtgcaatggggaagagtatcggggcgccgtggacaggaccgagagtgggcgcgagtgccaaaggtgggatttacaacatccacaccagcatccctttgaacccgggaagtttctcgaccagggcttagacgataactattgcaggaaccctgacgggtctgagaggccttggtgctacacaaccgatcctcagatagaaagggaattttgcgacctgcctaggtgcggaagtgaagctcagcctcgccaggaagcaaccaccgtgtcttgttttagaggcaagggagagggataccgaggaacggctaataccaccactgcgggtgtcccttgtcagcggtgggatgcccagatccctcatcagcacagattcacccccgaaaaatacgcttgcaagtag

SEQ ID NO: 328101 - DNA, 495 bp, Artificial Sequence
  derived and/or modified sequence
atgggttggcttccccttctgctgctcctgactcagtgcctgggcgtgcccgggcaaaggtctcctctaaacgatttccaggtgctgcgcgggacagagctgcagcaccttctccacgccgtcgtgcccggaccctggcaagaggacgtggccgacgctgaggagtgtgctggaagatgcgggcctctgatggattgccgcgcctttcattacaacgtgagcagtcatggctgtcagctgttgccttggacccagcacagtcctcatactcgcctgaggcgaagcggcaggtgcgacttgtttcagaaaaagggaacccgtccgctgtccggcatggcatggaaaagaacctcggccgtaaccctaatggcgactcccgaggtcctaggtgcgactcagcagactttattatgcgcttcaagggccgctgcttctaaccctgccgggcgtcctagagtgtccggggcaatggctcgcaacacggcagcccgctag

SEQ ID NO: 328102 - DNA, 795 bp, Artificial Sequence
  derived and/or modified sequence
atgctgcggggcccctgggccttccactacaacgtgagcagccacggctgccagctgctgccctggacccagcacagcccccacacccggctgcggcgcagcggccgctgtgacctcttccagaagaaggactatgtgaggacctgcatcatgaacaatggagtgggctaccggggcaccatggccaccaccgtgggcggcctgccctgccaggcctggagccacaagttccccaatgaccacaagtacacccccaccctgagaaatggcctggaggagaacttctgcagaaatccagatggagaccccggcggcccctggtgctacaccacagatcctgctgtgcgcttccagagctgtggcatcaagagctgccgggaggccgcctgtgtgtggtgcaatggagaggagtacagaggagctgtggacagaacagaaagtggccgggagtgccagcgctgggacctgcagcacccccaccagcacccctttgagcccgggaagttcctggaccagggcctggatgacaactactgcaggaacccagatggcagcgagcggccctggtgctacaccacagacccccagatcgagcgggagttctgtgacctgccccgctgtggcagcgaggcccagccccggcaggaggccaccaccgtgtcctgcttccggggcaagggggagggctaccggggcacagccaacaccaccacagctggggtgccctgccagcgctgggatgcccagatcccccaccagcaccgcttcaccccagagaagtatgcctgcaagtag

SEQ ID NO: 328103 - DNA, 495 bp, Artificial Sequence
  derived and/or modified sequence
atgggctggctgcccctgctgctgctgctgacccagtgcctgggcgtgcccggccagaggagccccctgaatgacttccaggtgctgcggggcacagagctgcagcacctgctgcatgctgtggtgcccggcccctggcaggaggatgtggctgatgctgaagaatgtgccggccgctgtggccccctgatggactgccgggccttccactacaacgtgagcagccacggctgccagctgctgccctggacccagcacagcccccacacccggctgcggcgcagcggccgctgtgacctcttccagaagaagggcacccggcccctgagcggcatggcctggaagaggaccagcgctgtgaccctgatggccaccccagaggtgctgggcgccacccagcagaccctgctgtgtgccagcagagctgctgccagcaacccagctggccggccccgggtgtctggggccatggccaggaacacagctgccaggtag

SEQ ID NO: 328104 - DNA, 795 bp, Artificial Sequence
  derived and/or modified sequence
atgctgcggggcccctgggccttccactacaacgtgagcagccacggctgccagctgttgccctggacacaacacagcccccacacacgcctcagaaggagcggcagatgcgacttgtttcagaagaaagactatgttagaacgtgtattatgaacaacggagtcgggtatagaggcacgatggccacgactgtgggcggcctgccttgtcaggcatggagccataagttccccaatgatcacaaatatactcctaccttaagaaatggccttgaggagaacttctgcagaaatcccgacggggatcccgggggaccatggtgttatactaccgaccctgctgtcagatttcagagttgtggaataaagtcttgccgtgaggcggcgtgcgtctggtgtaatggagaggaataccgcggggcagtcgatcggacagaaagtggcagggagtgtcaaaggtgggatttacagcatccccatcagcacccctttgaacctggtaagttcttagatcaaggacttgatgacaattactgtcgtaaccccgacgggtcggagaggccctggtgttatactaccgacccgcagatcgagagggagttttgtgacttgcctcggtgtggttctgaggcccagccacgtcaagaggctacaacagtgtcctgtttccggggcaaaggtgaaggctaccgggggaccgcaaacacaacaactgccggagtgccctgtcaaagatgggacgcccaaattccccaccagcatagatttacgcccgagaaatacgcttgcaagtag

SEQ ID NO: 328105 - DNA, 495 bp, Artificial Sequence
  derived and/or modified sequence
atgggctggctgcccctgctgctgctgctgacccagtgcctgggcgtacctggccagaggtccccgctcaacgatttccaggtactgcgtggtaccgaactgcagcatctgcttcacgcagttgtgcctggtccctggcaggaagacgttgcagatgctgaagagtgcgcaggacggtgtgggcctctaatggactgccgggctttccattacaacgtgtcatctcacggctgccagctcctgccttggacccagcattcacctcacacacgcttaagaaggagtggaagatgtgacctgttccagaagaagggtacccgccctctgagcggcatggcctggaagcggacatccgccgtcacacttatggccacacccgaggtgctgggagcgacccagcagactttgttgtgtgcctcccgggccgccgcgtccaatcctgctgggcggcctcgagttagtggagccatggctagaaacaccgcggctaggtag

SEQ ID NO: 328106 - DNA, 795 bp, Artificial Sequence
  derived and/or modified sequence
atgcttaggggcccttgggcttttcactacaacgtgagttcccatgggtgtcagctcctgccttggactcagcacagtccccacacgagactgcgacggtcaggccgttgtgatctcttccagaagaaagattatgtgaggacctgcatcatgaataatggagtggggtatcgtgggacaatggccacaacggtaggcggattaccctgccaggcgtggtctcataagttcccgaatgatcataagtatactccgaccctgcgtaatggtctggaagagaacttctgcagaaatcccgacggcgaccctggtggaccctggtgctatacgactgatcccgcagtgcgctttcagtcttgtggaattaaatcctgccgtgaggctgcttgcgtctggtgcaatggggaagaatataggggggcagtagaccgaaccgaatctgggagggaatgccagcgttgggaccttcagcatccccatcaacacccgtttgaaccaggaaaattcttggaccaggggctggacgacaactattgtcgcaaccctgatggctccgagagaccctggtgctataccactgacccccagattgaaagggagttctgtgacttgccgagatgcggcagcgaagcgcagcccaggcaagaggccacaactgtgagctgtttcagagggaaaggtgaaggctaccggggtacggctaatacaacaacggctggagtcccatgtcagcgatgggatgctcagatcccgcaccagcataggttcacccctgagaagtatgcttgtaaatag

SEQ ID NO: 328107 - DNA, 495 bp, Artificial Sequence
  derived and/or modified sequence
atggggtggctccctctgttgctgctcctcacacagtgcctgggtgtccccggacagaggtctcccttgaacgacttccaggtcttacgcggaaccgaactgcagcacttactccatgccgttgtccctgggccatggcaggaagacgttgctgatgcagaggagtgcgctggtaggtgcggaccgctgatggactgccgcgctttccattacaatgtgagctcccacggatgtcaattactcccctggacccagcattcaccacatacccgcctccggagaagtggcaggtgcgacctgttccagaaaaaaggcacccggcctctgagtgggatggcatggaaaagaacctcagctgttactttgatggccactcctgaggtgctgggggcaactcaacagactctgctttgcgcaagtcgtgccgcagcttccaatcccgctggacgcccacgagtgagcggtgctatggcgcgaaataccgcagcacgctag

SEQ ID NO: 328108 - DNA, 887 bp, Artificial Sequence
  derived and/or modified sequence
acagtgcagcctccagccagaaggatggggtggctcccactcctgctgcttctgactcaatgcttaggggtccctgggcagcgctcgccattgaatgacttccaagtgctccggggcacagagctacagcacctgctacatgcggtggtgcccgggccttggcaggaggatgtggcagatgctgaagagtgtgctggtcgctgtgggcccttaatggactgccgggccttccactacaacgtgagcagccatggttgccaactgctgccatggactcaacactcgccccacacgaggctgcggcgttctgggcgctgtgacctcttccagaagaaaggtacacgcccactctccggaatggcctggaagagaacttctgccgtaaccctgatggcgaccccggaggtccttggtgctacacaacagaccctgctgtgcgcttccagagctgcggcatcaaatcctgccgggaggccgcgtgtgtctggtgcaatggcgaggaataccgcggcgcggtagaccgcacggagtcagggcgcgagtgccagcgctgggatcttcagcacccgcaccagcaccccttcgagccgggcaagttcctcgaccaaggtctggacgacaactattgccggaatcctgacggctccgagcggccatggtgctacactacggatccgcagatcgagcgagagttctgtgacctcccccgctgcgggtccgaggcacagccccgccaagaggccacaactgtcagctgcttccgcgggaagggtgagggctaccggggcacagccaataccaccactgcgggcgtaccttgccagcgttgggacgcgcaaatcccgcatcagcaccgatttacgccagaaaaatacgcgtgcaagtga

SEQ ID NO: 328109 - DNA, 534 bp, Artificial Sequence
  derived and/or modified sequence
atgggctgttgcggctgcagcaggggatgtggtagcgggtgtggtggatgtggatcttcatgtggcggttgtgggtctggctgcggggggtgcgggtcaggccgcggcggttgcggttctgggtgcggcggttgtagctcatcgtgtggcgggtgcggctctcgctgctacgtgccagtgtgctgctgtaagccagtctgttcttgggttccagcgtgctcgtgcactagttgtggttcctgtggggggtctaaggggggctgcggctcctgcggcggctcaaagggggggtgcggatcatgcggggggagcaaaggcgggtgcgggtcttgtggatgtagccaaagttcttgttgtaaaccgtgttgctgcagctccggctgcggctcctcctgttgccaatcttcttgctgtaagccttgctgctgccagagtagttgctgcgtacctgtatgctgtcagtccagttgctgcaagccatgttgctgtcaatcaaattgttgcgtgcctgtctgttgtcagtgtaaaatctag

SEQ ID NO: 328110 - DNA, 609 bp, Artificial Sequence
  derived and/or modified sequence
atgggctgctgcggctgcagcggcggctgcggcagcggctgcggcggctgcggtagtggatgtggcggttgtggttctggatgtggcgggtacggctcaggttgtggaggatgcgggtcttcttgctgcgtaccagtgtgctgttgcaagcctgtgtgttgctgcgttccagcctgttcctgtagttcctgcggcagctgcggcgggtcgaaaggagactgcgggagctgcggcggcagcaagggcgggtgcggatcctgcggaggctccaagggaggctgcggctcatgtgggggatcaaagggggggtgtgggtcatgtgggggctccaagggtgggtgcggctcctgtggcggaagcaagggtggatgtggctcctgcggcgggagcaaaggaggatgcggatcctgcggatgctcccagtgtaactgctgtaaaccctgctgttgcagtagcggctgcggctcttgttgccagagttcctgctgcaatccttgctgctgtcagtcgtcatgttgcgtcccggtgtgttgccagagtagctgttgtaagccttgttgttgccagtcgagctgttgtgtgcctgtgtgctgccagtgtaaaatatag

SEQ ID NO: 328111 - protein, 432 aa, Artificial Sequence
  derived and/or modified sequence
MTVVQAYVGDVHYKEIPDPSSINTKTMELLINAIAINSAYTTKILPPEKEGALPRQVGNVYDSISKFLQFQLTVNVVAVIVAFTGACITQDSPLKAVQMLWVNLIMDTFASLALATEPPTETLLLRKPYGRNKPLISRTMMKNILGHAVYQLALIFTLLFVGEKMFQIDSGRNAPLHSPPSEHYTIIFNTFVMMQLFNEINARKIHGERNVFDGIFRNPIFCTIVLGTFAIQIVIVQFGGKPFSCSPLQLDQWMWCIFIGLGELVWGQVIATIPTSRLKFLKEAGRLTQKEEIPEEELNEDVEEIDHAERELRRGQILWFRGLNRIQTQIRVVKAFRSSLYEGLEKPESRTSIHNFMAHPEFRIEDSQPHIPLIDDTDLEEDAALKQNSSPPSSLNKNNSAIDSGINLTTDTSKSATSSSPGSPIHSLETSL

SEQ ID NO: 328112 - protein, 1178 aa, Artificial Sequence
  derived and/or modified sequence
MELRGTEAVVKIKETYGDTEAICRRLKTSPVEGLPGTAPDLEKRKQIFGQNFIPPKKPKTFLQLVWEALQDVTLIILEIAAIISLGLSFYHPPGEGNEGCATAQGGAEDEGEAEAGWIEGAAILLSVICVVLVTAFNDWSKEKQFRGLQSRIEQEQKFTVVRAGQVVQIPVAEIVVGDIAQVKYGDLLPADGLFIQGNDLKIDESSLTGESDQVRKSVDKDPMLLSGTHVMEGSGRMLVTAVGVNSQTGIIFTLLGAGGEEEEKKDKKGKMQDGNVDASQSKAKQQDGAAAMEMQPLKSAEGGDADDRKKASMHKKEKSVLQGKLTKLAVQIGKAGLVMSAITVIILVLYFTVDTFVVNKKPWLPECTPVYVQYFVKFFIIGVTVLVVAVPEGLPLAVTISLAYSVKKMMKDNNLVRHLDACETMGNATAICSDKTGTLTTNRMTVVQAYVGDVHYKEIPDPSSINTKTMELLINAIAINSAYTTKILPPEKEGALPRQVGNKTECGLLGFVLDLKQDYEPVRSQMPEEKLYKVYTFNSVRKSMSTVIKLPDESFRMYSKGASEIVLKKCCKILNGAGEPRVFRPRDRDEMVKKVIEPMACDGLRTICVAYRDFPSSPEPDWDNENDILNELTCICVVGIEDPVRPEVPEAIRKCQRAGITVRMVTGDNINTARAIAIKCGIIHPGEDFLCLEGKEFNRRIRNEKGEIEQERIDKIWPKLRVLARSSPTDKHTLVKGIIDSTHTEQRQVVAVTGDGTNDGPALKKADVGFAMGIAGTDVAKEASDIILTDDNFSSIVKAVMWGRNVYDSISKFLQFQLTVNVVAVIVAFTGACITQDSPLKAVQMLWVNLIMDTFASLALATEPPTETLLLRKPYGRNKPLISRTMMKNILGHAVYQLALIFTLLFVGEKMFQIDSGRNAPLHSPPSEHYTIIFNTFVMMQLFNEINARKIHGERNVFDGIFRNPIFCTIVLGTFAIQIVIVQFGGKPFSCSPLQLDQWMWCIFIGLGELVWGQVIATIPTSRLKFLKEAGRLTQKEEIPEEELNEDVEEIDHAERELRRGQILWFRGLNRIQTQIRVVKAFRSSLYEGLEKPESRTSIHNFMAHPEFRIEDSQPHIPLIDDTDLEEDAALKQNSSPPSSLNKNNSAIDSGINLTTDTSKSATSSSPGSPIHSLETSL

SEQ ID NO: 328113 - DNA, 3537 bp, Artificial Sequence
  derived and/or modified sequence
atggaacttagaggcaccgaggccgtggtcaaaatcaaggaaacttacggggataccgaggctatttgccgcaggctcaagacgagtccggtggagggattgcccgggaccgcccctgacttggagaagagaaaacagatattcgggcagaatttcattccaccgaagaagccaaagaccttcttacaacttgtatgggaggcgctgcaagatgtgactctcattatcctggagatcgcagccatcatcagcctgggtctctctttctatcatccacctggggaagggaacgagggctgcgccactgcccagggcggcgcagaggatgagggcgaggcggaggcaggctggattgagggcgccgcaatacttctgtcagtcatttgcgttgtgctggtaactgcctttaacgattggtcaaaggaaaaacagtttagaggccttcagtctaggatcgagcaggaacagaaattcactgtagtgcgagcagggcaagtggtccaaattcctgtcgcggaaatcgtggtgggagacattgctcaggtcaagtacggagacctgctcccagccgacgggctgttcatacaggggaatgaccttaagattgatgagtcaagtttgacaggcgagtcagaccaggtccgaaagagtgtggacaaagacccaatgctgctgagcggtacacacgtcatggagggctccggccggatgctggtgacagccgtcggggtgaacagtcaaacaggcattatttttacgctgctgggtgctggaggcgaagaggaagaaaaaaaggacaagaaaggcaaaatgcaagatggaaacgttgatgcctcacagagcaaagcgaaacagcaggacggtgcggccgctatggaaatgcagcccttgaagagtgccgaaggaggcgatgctgatgatcgcaaaaaagcctctatgcataagaaagagaagagcgtgctgcaggggaagctgaccaagctggcggtgcaaattgggaaggccggcctggtcatgtccgccattacagtcattattctcgtgttatattttacagttgacaccttcgtggtgaacaaaaagccttggctcccggagtgcaccccagtgtatgtccagtacttcgttaagttcttcatcattggcgtgacagtgcttgtcgtggcggtcccagagggattgcctttagcggtgaccatctccctcgcctattccgtcaagaagatgatgaaagataacaacctggtgcggcatctggacgcttgtgagacaatggggaacgctactgcaatctgctcagacaagaccggaacgcttacaacgaataggatgacagtcgtgcaggcttatgtcggagacgtgcattacaaagagatccccgacccctcctcaatcaatactaagactatggagcttctgattaatgctatcgccattaactcggcctatactaccaaaattcttccacccgaaaaggagggggccctccctagacaggttggcaacaagaccgagtgtggccttttggggttcgtgttagacctgaagcaggactatgaacctgtccggtcacagatgcctgaggaaaagctgtataaggtgtatacgttcaattctgtgagaaagtccatgagtactgtcatcaaactgcccgatgagtccttccgcatgtatagcaagggtgctagcgagatagttctcaagaagtgctgcaagatcttgaatggagccggcgaaccaagagtttttaggccgagagatagagatgaaatggtcaaaaaagtgatagagcccatggcatgtgatggcttgcgaaccatctgcgttgcataccgagacttcccttccagtcctgaaccggattgggataacgagaatgatattctgaatgaactcacgtgcatctgcgtagtcggaatcgaggatcccgtgcgccctgaagtacccgaggccatacgcaaatgccagagggcaggcatcacggttaggatggtcactggtgacaatataaatactgctcgggctatagctatcaagtgcggcatcatccaccccggagaagattttttgtgtctggaaggaaaggagttcaatcgaaggatccgcaacgaaaagggcgagatagagcaggagcgcatagataagatatggcccaagctgcgggtattggctcgatcgtcacccacagataagcataccttagtgaaggggatcattgactcgactcacaccgagcagaggcaagtcgtcgccgtgacaggggatggtactaatgatggacccgccctgaagaaggccgatgtcggctttgccatgggtatcgccggcacggacgtggccaaggaggcttccgacatcattctcactgacgacaactttagtagcatcgtcaaagcggttatgtggggccgaaacgtctacgactccatctcgaaatttctgcaattccagctgactgtgaacgtagtggctgtgattgtggcctttacaggggcctgcattactcaagatagcccgttaaaagcggtccagatgctttgggtgaacctcattatggataccttcgcctccctcgcccttgccactgaaccacctacagagacactgcttctcagaaaaccttacgggcggaacaaacccctgatttcacgcaccatgatgaagaacatcttgggtcacgctgtctaccagctggcactgatctttacattgctctttgtcggggagaagatgtttcagatcgattccggccgaaacgcaccattacactcaccaccttctgaacactatacaattattttcaatacatttgtgatgatgcaactattcaatgaaattaacgctcggaagattcacggagagcggaacgttttcgacgggatcttccgcaaccccatcttctgtaccatagtgctggggacttttgccatccaaatcgtaattgtgcagttcggtggaaagccattcagttgctcacctctacagctggaccaatggatgtggtgcatcttcattggcttgggagaattagtgtggggacaggtgatcgctacgatcccgacttcccggctaaaattcctgaaggaggctggtcgtctcactcaaaaagaggaaattcccgaagaagaactcaacgaggacgtagaggaaatagatcacgccgaaagagaactccgtcgcgggcaaatactgtggttcagaggcctgaacaggatccaaacccagattagggtcgtgaaggcttttagaagctctttatacgagggactcgaaaagccagaatcaaggaccagcatacacaatttcatggcccatcctgaattccggatcgaggactcacagccacatatacctttgatcgacgatacagacctggaagaggatgccgccctgaaacagaactctagccccccatcaagcctgaacaagaataatagcgcaatcgatagcgggatcaacctcactacagatacctcaaagagcgccacatccagtagtcctgggtctcccatccatagcttagagacgagtctttag

SEQ ID NO: 328114 - DNA, 3537 bp, Artificial Sequence
  derived and/or modified sequence
atggagctgcggggcacagaggccgtggtgaagatcaaggagacctacggggacacagaggccatctgccggcggctgaagaccagccctgtggagggcctgcctggaacagccccagacctggagaagaggaagcagatcttcggccagaacttcatcccccccaagaagcccaagaccttcctgcagctggtgtgggaggccctgcaggatgtgaccctcatcatcctggagattgctgccatcatcagcctgggcctgtccttctaccaccccccaggagagggcaatgaaggctgtgccacagcccagggcggcgcagaagatgaaggagaggccgaggccggctggattgagggcgccgccatcctgctgagcgtcatctgtgtggtgctggtgacagccttcaatgactggagcaaggagaagcagttccggggcctgcagagccgcatcgagcaggagcagaagttcaccgtggtgcgggccggccaggtggtgcagatccctgtggccgagatcgtggtgggggacatcgcccaggtgaagtacggggacctgctgcctgcagatggcctcttcatccagggcaatgacctgaagattgatgagagcagcctgaccggggagagtgaccaggtgaggaagtctgtggacaaggaccccatgctgctgagcggcacccacgtgatggagggcagcggccgcatgctggtgacagctgtgggcgtgaacagccagacaggcatcatcttcaccctgctgggcgccggcggggaggaggaggagaagaaggacaagaagggcaagatgcaggatggaaatgtggatgccagccagagcaaggccaagcagcaggatggagctgctgccatggagatgcagcccctgaagtctgctgagggcggagatgctgatgacaggaagaaggcctccatgcacaagaaggagaagtctgtgctgcagggcaagctgaccaagctggccgtgcagatcggcaaggccggcctggtgatgtctgccatcaccgtcatcatcctggtgctgtacttcaccgtggacacctttgtggtgaacaagaagccctggctgcctgagtgcacccctgtgtatgtgcagtactttgtgaagttcttcatcattggagtgacagtgctggtggtggccgtgcctgagggcctgcccctggccgtgaccatcagcctggcctacagcgtgaagaagatgatgaaggacaacaacctggtgcgccacctggatgcctgtgagaccatgggaaatgccacagccatctgcagcgacaagacaggcaccctgaccaccaacaggatgacagtggtgcaggcctacgtgggagatgtgcactacaaggagatcccagaccccagcagcatcaacaccaagaccatggagctgctgatcaatgccatcgccatcaacagcgcctacaccaccaagatcctgcccccagagaaggagggcgccctgccccggcaggtgggcaacaagacagaatgtggcctgctgggctttgtgctggacctgaagcaggactatgagcctgtgcgcagccagatgcctgaggagaagctgtacaaggtgtacaccttcaacagcgtgaggaagtccatgagcaccgtcatcaagctgcctgatgagagcttcaggatgtacagcaagggggccagcgagatcgtgctgaagaagtgctgcaagatcctgaatggagctggggagcccagggtcttccggccccgggacagagatgagatggtgaagaaggtgattgagcccatggcctgtgatggcctgcggaccatctgtgtggcctacagagacttccccagcagccctgagccagactgggacaatgaaaatgacatcctgaatgagctgacctgcatctgtgtggtgggcattgaagatcctgtgcggcctgaggtgcctgaggccatcaggaagtgccagagagctggcatcaccgtgaggatggtgactggagacaacatcaacacagcccgggccatcgccatcaagtgtggcatcatccaccctggagaggacttcctgtgcctggagggcaaggagttcaacagacgcatcagaaatgaaaaaggagaaattgagcaggagagaattgacaagatctggcccaagctgcgggtgctggcccggagcagccccacagacaagcacaccctggtgaagggcatcatcgacagcacccacacagagcagaggcaggtggtggccgtgactggagatggcaccaatgatggccctgccctgaagaaggcagatgtgggctttgccatgggcattgctggaacagatgtggccaaggaggccagtgacatcatcctgacagatgacaacttcagcagcatcgtgaaggctgtgatgtggggcagaaatgtgtatgacagcatcagcaagttcctgcagttccagctgactgtgaatgtggtggccgtcatcgtggccttcaccggggcctgcatcacccaggacagccccctgaaggctgtgcagatgctgtgggtgaacctgatcatggacacctttgccagcctggccctggccacagagcccccaacagagaccctgctgctgaggaagccctatggaagaaacaagcccctcatcagcaggaccatgatgaagaacatcctgggccatgctgtgtaccagctggccctgatcttcaccctgctgtttgtgggggagaagatgttccagattgacagcggcagaaatgcccccctgcacagccccccatctgagcactacaccatcatcttcaacacctttgtgatgatgcagctgttcaatgagatcaatgccaggaagatccacggggagagaaatgtgtttgatggcatcttcaggaaccccatcttctgcaccatcgtgctgggcacctttgccatccagatcgtgattgtgcagtttggaggcaagcccttcagctgcagccccctgcagctggaccagtggatgtggtgcatcttcatcggcctgggggagctggtgtggggccaggtgattgccaccatccccaccagccggctgaagttcctgaaggaggccggccgcctgacccagaaggaggagatccctgaggaggagctgaatgaagatgtggaggagattgaccacgccgagcgggagctgcggcggggccagatcctgtggttccggggcctgaaccgcatccagacccagatccgggtggtgaaggccttccgcagcagcctgtatgagggcctggagaagccagagagcaggaccagcatccacaacttcatggcccaccctgagttcagaattgaggacagccagccccacatccccctgattgatgacacagacctggaggaggatgctgccctgaagcagaacagcagcccccccagcagcctgaacaagaacaacagcgccatcgacagcggcatcaacctgaccacagacaccagcaagagcgccaccagcagcagccctggcagccccatccacagcctggagaccagcctgtag

SEQ ID NO: 328115 - DNA, 3537 bp, Artificial Sequence
  derived and/or modified sequence
atggagctgcggggcaccgaggccgtggtgaagatcaaggagacctacggcgacactgaggccatctgtagacggttaaagacctctcccgtggaagggctcccaggaactgcacctgatctggaaaaacgcaaacagatctttgggcagaatttcattcctcctaaaaaaccaaagactttcctccaactcgtctgggaggctctccaggatgttaccctgatcattctcgagattgctgctataatctcactgggcttgagcttttatcatcccccaggagagggaaacgaagggtgcgccactgcgcaggggggagctgaggacgagggggaggcagaagccggatggattgagggagccgcaatcctgctttcagttatatgtgtggtgttggtgaccgctttcaatgactggagtaaggaaaagcagttcagaggtctccaatcgaggatagagcaagagcagaaatttaccgtcgtacgcgccggtcaggtcgtgcagataccagtggctgagattgtggttggagacatcgctcaagttaagtacggggacctgcttcccgctgatggccttttcatccagggcaatgatctgaaaatcgatgaatcatccctcactggagaatccgatcaggtcagaaaatctgtggataaggaccctatgctcttaagcggaacccatgttatggaaggtagcgggcggatgctggtgacagctgtgggagttaatagccaaaccggtataatttttactctcttgggagccggtggcgaggaagaggaaaagaaagataagaagggcaaaatgcaagacggaaacgtggacgcctctcagtcgaaggctaagcagcaggacggcgcagccgccatggaaatgcagcccctgaagtccgcggaaggcggggatgcagatgatagaaaaaaggcaagcatgcataagaaagagaaatcggttctacagggaaaactgacgaagttggcagtgcaaattggcaaggctggtctcgtgatgagcgcaattacggtcataatcttagtgctgtatttcaccgtcgacacatttgtggtgaataagaagccttggctgccagaatgcacacccgtctatgttcaatactttgttaaattcttcatcattggcgtgaccgttttggttgtcgctgttccagaaggtctgccgttagcagtgactataagccttgcatacagcgttaagaaaatgatgaaggataataacttagtgcgacatctggacgcctgcgagacaatgggaaatgctacagccatttgtagtgacaagacaggtaccctcaccaccaataggatgactgtcgttcaggcctacgtaggcgatgtccattacaaggaaatccccgacccttcatcaatcaatactaaaaccatggagctcttgattaatgccatcgcaataaattcggcttacaccacaaaaatcctccctcccgaaaaggagggcgcacttccccgccaagtgggcaataagaccgagtgtgggcttctcggctttgtcctggatctgaaacaggattacgaacccgtgagatctcagatgcctgaagagaaactgtataaagtgtacacctttaacagcgtccggaaatcaatgtctacagtgataaagctcccagatgagagtttccgaatgtacagcaaaggcgccagcgagatagtgttgaagaaatgctgtaagatactgaatggagctggagagccaagagtgttcaggccccgggacagggatgagatggtgaaaaaggtgatcgaaccaatggcatgtgatgggctgcgcacaatatgcgtggcttatcgtgactttccgtcctcgccggaacccgattgggacaacgaaaatgatattctgaacgaactgacctgcatttgcgttgtggggatcgaggaccccgtccgccctgaagtgcccgaagcaataagaaaatgccagagagcaggaataacggtgcgcatggtgacaggagacaacattaacacagccagagcgatcgccatcaagtgcggcattattcacccaggcgaggacttcttgtgtctcgagggcaaagagttcaataggcgaataaggaacgagaagggagaaattgaacaagagcgaattgataagatttggcctaaactcagggtcttagcccgatcatctcccacagacaagcacaccttagtgaagggcattatcgattccactcacacagaacaacgacaggtggtggccgtgacaggtgacggtaccaatgacgggccagctctcaagaaagccgatgtcgggtttgccatgggaatcgctggtaccgatgtggcgaaggaagcctctgacataatcctgacagacgataatttttcctcgatcgttaaagccgtcatgtgggggcgcaatgtgtatgacagcatatccaagtttctgcagtttcagcttaccgtcaacgtagtggccgtgatcgtcgcctttaccggcgcctgtatcacccaagacagccccctgaaggccgtgcagatgctttgggttaacttgatcatggacacctttgcctctttggcactagctacagagccaccaaccgagaccctgctcctgagaaaaccgtatgggcggaacaagccactgatatccagaactatgatgaaaaacatcctcggacatgctgtgtaccaattagccttaatcttcactctgctttttgtgggcgagaagatgttccagattgactctggaagaaacgccccattgcactcccccccctcagagcactatacaattatctttaatacattcgtaatgatgcagctttttaatgaaatcaacgctcgaaagattcatggcgagagaaacgtttttgatgggattttccgtaatcccatcttctgtacgatagtcctggggacttttgcaatccaaattgtgattgtgcagttcgggggaaaacccttcagttgttcgccgctgcagctggatcagtggatgtggtgtatttttatcggactcggcgaattggtgtgggggcaagtgattgccactattcccacaagcagactgaagttcctaaaagaggccggcaggctgacacagaaggaagagatcccagaggaagaacttaacgaggatgttgaagaaattgatcatgctgagcgagaactgcgtaggggacagatcctttggtttcggggcttgaaccggatccagactcagatccgagtggttaaggcctttcggagttccttatatgaaggcttagaaaagcccgagtctcgcacaagtatccataatttcatggcccatcctgaattccggatagaggattctcaaccacacattccgctgatcgatgataccgacctggaagaggacgccgctctgaaacagaactcctcccctcccagttcgttgaataagaacaatagcgctatcgacagtggcataaatctgaccaccgatacaagtaagtctgccacaagcagctcccccgggagcccgatccatagcttggagacttcactgtag

SEQ ID NO: 328116 - DNA, 3537 bp, Artificial Sequence
  derived and/or modified sequence
atggaattgagaggtacagaggccgttgtcaaaattaaagaaacctacggagacacagaagcaatctgccgccgactgaaaacaagcccggtcgaaggcctgcccggtactgcaccagacctagagaaacgcaagcagatctttggacagaatttcattccacctaaaaaacccaagacattcctccaacttgtttgggaggctcttcaggacgtgactctaattatcctggagatcgctgccatcatatcgctgggcctgtcattctatcatccacccggtgagggtaatgaggggtgtgccaccgctcagggtggggctgaggacgaaggagaggcagaggccggttggatcgagggggcagccatactgctctcagttatatgtgtggtgttggtcacagcctttaatgactggtcgaaagagaaacaatttcgaggactgcagagcaggatagaacaagaacagaagttcacagtggtgcgcgctggccaagttgttcagatccccgtggctgagatcgtagtaggggatatagcccaggtgaagtacggcgacctgctccccgctgacggattattcatccagggcaacgatctcaaaatcgacgaatcgtcactcacaggggaaagtgatcaagtgcgaaaatctgtagacaaggaccctatgctgctctctggtactcatgtcatggagggctccgggagaatgctggtgaccgccgtcggagtgaactcccagacggggattatctttacactgttgggtgctggaggcgaggaagaagagaaaaaagacaaaaagggcaagatgcaggatgggaacgtggatgcgtcacaatcaaaagctaagcagcaggacggtgccgcagctatggagatgcagcctttaaaaagcgctgaagggggtgacgcggacgatcggaaaaaagcttcgatgcacaagaaggagaagtctgtgcttcagggcaaactgaccaagcttgcagtgcagatcggaaaagcagggcttgtgatgtccgctatcaccgtcattatcctggtcttatatttcactgtggacacattcgtagtgaacaaaaagccgtggttgcctgagtgcacgccggtctacgtccaatactttgtcaagttttttatcatcggtgtgactgtcctggttgtcgccgttcctgagggcctccccttggctgtgactattagcttggcttacagcgttaaaaagatgatgaaagataacaacctggtacgacacttagatgcatgtgaaacgatggggaacgccacagccatctgctctgataagacagggaccttgacaacaaatcggatgacggtcgtgcaggcctacgtaggggatgtgcattataaggagattcctgacccctcctcgatcaataccaagaccatggagttactgatcaatgctatcgctataaacagcgcgtataccaccaagattttgcccccagagaaggaaggtgcactcccccgacaagtgggtaataagacagagtgtggactactggggtttgtgttagacctgaaacaagattatgaaccagttagatcacaaatgcccgaggagaaactctataaggtctacacgttcaatagcgtaagaaaaagcatgagcaccgtaatcaagctcccagacgagtcttttcggatgtattcaaagggggctagcgagattgtgctcaaaaagtgctgcaaaattctgaacggcgctggcgagccccgagtgttccggccaagagatcgggatgagatggtgaagaaggtcatagaaccgatggcctgtgacggattacgtaccatttgcgtcgcttatcgggacttcccaagcagcccggaaccagactgggataacgaaaatgacatcctaaatgagctcacgtgtatctgtgtggtgggaatcgaagaccccgtgcgccctgaggtcccagaggctatcaggaaatgccagcgcgctgggatcaccgtgaggatggtgaccggcgataacatcaacaccgcgagggcaattgctattaagtgcggaataatacaccccggagaagattttctctgtctggaaggtaaagagtttaacaggcgcatccgtaatgagaagggggagattgagcaggagaggatcgataaaatttggccaaaattaagggtgctggccaggtctagccccacggataaacataccctcgttaagggtatcatcgactctacccatacagagcagcgacaggtggtggccgtgactggggacggcaccaacgatggcccagcgctgaagaaggccgatgtggggtttgccatgggaattgctggaacagatgtggcaaaagaagcgtctgatatcattttgaccgatgataacttctcttcaatcgtaaaggcagtgatgtggggaagaaatgtttatgactcgatctcaaagtttctccagttccagttgaccgtcaatgttgtcgcggtcatcgtcgctttcactggggcatgcatcacccaggacagtcccctaaaagcggtccagatgctctgggttaacctgatcatggatacgttcgctagcctcgcactagcaaccgagccacctactgagacattgttgctgcgtaaaccttacggacgaaataagcccctgataagtaggacaatgatgaaaaacatccttggccatgccgtatatcagctggccttaattttcaccttactgttcgttggagagaaaatgtttcagatcgattctggacgtaacgcaccccttcactctcctccaagcgagcactacacaatcattttcaataccttcgtgatgatgcaactgttcaatgaaatcaatgctaggaaaatccatggtgaacgcaatgtattcgacggtatctttcggaatccaatcttttgcaccatcgtgcttggcactttcgctatccaaattgtcattgtgcagttcgggggaaagcctttttcttgcagtccactacagctggaccagtggatgtggtgcatctttattggtctgggtgaattggtatggggccaggttattgccaccatacccactagtagattaaagttccttaaagaggccggacgccttacccagaaagaggagatcccagaggaggaactgaacgaggacgtggaagagattgaccacgcagaaagagaactgcgccgtggccagatcctttggttccggggattgaacagaatccagactcagattagggtggtgaaagccttcagaagctctctgtatgagggcctcgagaagcctgagtccaggactagtatccataatttcatggcacatccggaattcagaattgaggactcgcaaccccacattcctctcatagacgatacagatcttgaggaggacgcagcgctgaaacaaaactcatccccgccatccagtctcaataagaataactccgctatcgactccggtatcaatcttaccaccgacacctctaagtctgcgacctcaagttctcctggctcacctattcactccctagagacctccctttag

SEQ ID NO: 328117 - DNA, 8869 bp, Artificial Sequence
  derived and/or modified sequence
agtctgcagaggggcccgggcacgctggctgggctcagccgcggcaccagctgccgcaccgcgattacggggctgcccgccgggaaaccgtgcaggattggtggtgattttcatagccaagagccaccacccctgaccatgtagatgccagttccagggagcagcatgggccccactgaatggagactcctgggtctacagccctgagcccctccggcccctggacctcgtcccacaccggaggacacctcttggagctcaccaccactgtcaccagcccgcctcggccacccccaccccccgggacccggagtcggccgcctggtgccacagctgaccagtgagggtgtgctgaggacagccacaagcagccatcacccggcagcctcttgtccagcgctgacccttgggcccagcccgagcaaggaccgcagcaaacatgggtgacatgaccaacagcgacttttactccaaaaaccaaagaaatgagtcgagccatgggggcgagttcgggtgcacaatggaggagctccgctccctcatggagctgcggggcactgaggctgtggtcaagatcaaggagacttatggggacaccgaagccatctgccggcgcctcaaaacctcacctgttgaaggtttgccgggcaccgctccagacctggaaaagagaaagcaaatttttgggcaaaactttatacctccaaagaagccaaaaaccttcctgcagctcgtgtgggaggcgctgcaggacgtgacgctcatcatcctggagattgccgccatcatctccctggggctgtccttctaccacccgcccggcgagggcaacgaaggatgtgcgacggcccagggtggggcagaggatgaaggagaggcagaggcaggttggatcgagggggccgccattctcctctcagttatctgtgtggtcctggtcacggccttcaatgactggagcaaagagaaacagttccggggcctgcagagccgcatcgagcaggaacagaaatttaccgtggtccgggctggccaggtggtccagatccctgtggctgagatcgtggttggggacatagcccaggtcaaatatggtgacctcctccctgccgacggcctcttcatccagggcaatgacctcaagattgatgaaagctccctaactggagagtctgaccaggtgcgcaagtccgtggacaaggaccccatgctgctgtcaggaacccacgtgatggagggctcaggacggatgttggtgactgctgtgggtgtgaactctcagactggcatcatctttaccctcctgggggctggtggtgaagaggaagagaagaaagacaaaaaaggtaaaatgcaggatggcaatgtggacgccagccagagcaaagccaaacaacaggacggggcagccgccatggagatgcagcccctcaagagtgccgagggcggcgacgctgacgacaggaagaaggccagcatgcacaagaaggagaagtccgtgctgcagggcaagctcaccaagctggctgtgcagatcgggaaggcgggcttggtgatgtcagccatcacggtgatcatcctggtgctctacttcactgtggacaccttcgtggtcaacaagaagccgtggctgcctgagtgcacgcccgtctacgtgcagtactttgtcaagttcttcatcattggcgtgacggtgctggtggtcgccgtgcccgaggggctccctctggccgtcaccatctcgttggcctattcggtgaagaaaatgatgaaggacaacaacctggtacgccacctggatgcctgtgagaccatgggcaatgccacagccatctgctcagacaagacaggcacgctgaccaccaatcgcatgacagtggtacaggcctatgtcggcgacgtccactataaagagatccccgaccccagctccatcaacaccaagaccatggagctgctgatcaatgccatcgccatcaacagcgcctacaccaccaagattctgcccccagagaaggagggcgccctgcctcggcaggtgggcaacaagacggagtgcggcctgctgggcttcgtgctggacctgaagcaggactacgagcccgtgcgcagccagatgccagaggagaagttgtacaaagtgtacaccttcaactccgtgcgcaagtccatgagcactgtcatcaagctgcccgacgagagcttccgcatgtacagcaagggggcttctgagatcgtgctcaagaagtgctgcaaaatcctcaatggggcgggagagcctcgtgtcttccggccccgcgaccgggacgagatggtaaagaaggtgattgagcccatggcttgcgatgggctccgcactatctgcgtggcctaccgcgacttccccagcagcccggagccggactgggacaatgagaatgacatcctcaacgaactcacctgcatctgcgtggtgggcatcgaggacccggtgcggccagaggtcccagaagccatccgcaagtgccagcgggcaggcatcacggtccgcatggtcactggcgacaatatcaacacggctcgggccatcgccatcaagtgtggcatcatccatcctggggaggactttctgtgcctcgagggcaaggagttcaacaggaggatccgcaacgagaagggggagattgagcaggagcgaattgacaagatctggccaaagctgcgggtgctggctcgctcctccccaacggacaagcataccctggttaaaggcatcatcgacagcacacacactgagcagcggcaggtggtggccgtgacgggggacgggaccaacgacgggcctgcactcaagaaggccgacgtgggcttcgccatgggcatcgcaggcactgacgtggccaaggaggcctcagacatcatcctgacagacgacaatttcagcagcatcgtcaaggcagtgatgtggggccgcaacgtctatgacagcatctccaaattcttgcagttccagctcaccgtcaacgtggtggccgtgattgtggccttcacaggcgcctgcatcacgcaggactcccctctgaaggccgtgcagatgctctgggtgaacctcatcatggacacgtttgcctcgctggcactggccactgagccgcccacggagaccctgctgctgaggaagccgtacggccgcaacaagccgctcatctccaggaccatgatgaagaacatcctgggccatgctgtctaccagcttgccctcatcttcaccctgctctttgttggcgagaagatgttccagatcgacagcgggaggaacgcgcccctgcattcgccaccctcagaacattacaccatcatcttcaacaccttcgtcatgatgcagctcttcaacgagatcaacgcccgcaagatccacggcgagcgcaatgtctttgacggcatcttccggaaccccatcttctgcaccatcgtgctgggcacctttgccatccagatagtgatcgtgcagtttggagggaagccattcagctgctctccactgcagctggaccagtggatgtggtgcatattcattgggttaggagagctcgtttggggccaggtcatcgccaccatcccgaccagcagactcaagttcctcaaggaggcaggcaggctcacacagaaggaggagatcccggaggaggagctcaacgaggacgtggaggagatcgaccacgcggagcgggagctgcggcggggccagatcctgtggttccgaggcctgaatcggatccagacacagatccgcgtcgtgaaggcgttccgtagctctctctatgaaggtttagaaaagcctgaatctcgaacctccatccataacttcatggctcatcctgaattccggatcgaagattcccagccccacatccccctcattgatgacaccgacctggaagaagatgccgcgctcaagcagaactcgagcccgccgtcatccctcaacaagaacaacagcgccatcgacagtgggatcaacctgacgaccgacacaagcaaatcagctacctcttcaagtccagggagccccatccacagcctggagacgtcgctttagctgaggaccctctcgcctgcccgcccgccctcatggaccccgctgccacccgctttccgggcacccatccatccaggcacccaactcacccaagcagcaacgagcaacaatcggaaaccaaatactggagagaaaaccaacgtttccacccacagaccctttctctggctgcgatgctgtttgaactctttttcacttcaaggcaaggggcgggatctccactgggggcttacgggagtgagcggttttcccaaaacaagcccttcctggctcccacccagacatggaccagccatgcacccgcccagccaccacgtcccccgcatgaatgtactgtacactttcaatcctccccttgtttggtttttgggggttggggaggggtttttgtttgtttgtttgttttcttaggcgggaactgcaaacagactcttttctgagactatttatccaatccactggtctgtgagtttttgaaatgcttgcacagcatggtctcagttgtatagattaatttaataactttttgaaattgcagagcttaactcgcctagtagatttgcaccaatggaaccgaagaacttcatagacactcacaaggttatatccatttctttgtatctatatcaacgtatacttttccgagactgtatacgtccatatagataggtagatatatatatatatatataaatatatatacatggatatataaagtttctttgccggcatgttgccttgtttccgcttaaattgctctattttaacttatttatgtcctaaaagaagaatgtaatttgtttacaaacctgtagataacgtctttggctatttgtatggtttaagaacactggtggctgagatgctataaaaacagctcggcccaacagacacttcccctgggttgcatcctggatgttttatgatagccatgctctgatttttgcctgctatttccgttcaataatgtcactaccgtgagaggctcaggcagaagccaaatgctaccgagttgccatcctgaggggtttaacaacatgctccgtagacgaagggagaggaggagagaaggcttcctgggtttgcaacactaacggccatccggcccaaggatgccaggatctgcaaagcactgctcgaagacttttctctcaatgaaactcgcttgagtttactaagagcatttcaaaaataggttctctttggcactgtctgtacagagattgaggtagtgttgaaatattataaatggtattgtgttgatttttttttttatttagtaacttacaggtttgtttccttattaatggcagcatctgagctgttggcatattggatgaggatcagtatggcttgctgcttttatttttatttttgaagaagaatagcctttttctctgcactatttagatccgaatgaaccttatgatgtgtatattgagatgtactcagtgtgattttaaaccaaattgtcttcctgtagtcacaatatatactgtagccttttaacagcaagtcttgctttcccaaacagaaagccattctgaaaccctacagtatcacaggtgagaaaaggtggttattttttccccaagacaacagcactagtaatcccacttaataagagcttatttaattggatgtcagcctcttaactgctaagcactttgtgggtctcagcgtttttcataaaagaacttttgtatttaatacaaagtttgctttgagacttttcagcatatgatcttttttccataaacttgtacagtgcaaaagacattttgaataccatgatcgatgatgtcccatgcttcgaggaaaaccaaacactttccgcctctcttgcaaaatccattcctcatgctgaccctcctcacgatggctgtgtcagcccagccccttcccttctccaggcccagagaactcttccacaaacaagatgagagccactcgggaaaagagccatagtcaactgggagggcctacatctggatggcggtggaaaaacttgagggtttggggttcaaagtcagcccatcccacctggcaaaatcctcctggaaggaggaccttcaagagcgcatcacctgaatgtcgtgaagaagtatctctgaatgtatccaggagaggaactgcataaccaaaggggtgaccagccctcagatgtgcttattggattccagtacaaacgccaccaaagccagcccactgctctcctacaaggaaggaaagatctgcacgtgtaaaacatggggcagccttggaacatggtgttttttggagtttcctttctcacagttttccatctccccacttctttgatcagtcatgtgtccgtgacctcgttccatgacatcaggatagctgtgtttgcacaccatgctccatgttcattcggagccaggaggggttctcagtggagcctggcttagggaacagggagcgatggaagaatgccaacattagcgttggtcttctcttgtcaggaatgaaggatgcttgcacacatgcaccccctcactctcacacttgcacacatacacacacacacacacgaaatggttggtttgtcaaaactcactgtagtacataaagcttgcactctgcgtcctatatctagcagcatggggtacgtttggcagttcactccattagggggtaaataatttatgaccattcatctgtttttatgaatttttttatctagacaataatgtaaataaagaactcaccatctctgttcatttaatactatgcaatggttatgctttcaatcgctggctcttctgactcgtgcagtgtggttctgaaatgtttgtggtttaaaaaaaaaagcaaaaaacaacatcaaacagaacatagtaaatatatctgtaatgtatacttttttctactttgggactgcatcatccacatagcttcttttctgtcctctagacaagggctccaggagtaagtggcagatttggttctgagagctaagctcaccaacttgtctccccctcaacagatgagggaagggcagggagcccgttcagtgactcctggcgctgcagaatcactcatctttggaggtgagcagagagagctctgaggagtttccttcttgcaactcaggcggagctttctttaactcaggagcagcctccattgctcccgccaacccctcaccatggccccttgtccccttgtcccaaccatagcatagagatgacaagagagaggcagtcctatttctgagactggaccaattaaaatgactgcactggctcaaaggactctgaacctgtcttgtcctgggtcctccagttgttggaagccactcttttccccaaccatgctgaaatgccacctttaccacacactgatgtcttacatagacttagatctatttctggaacttctcttctcttcgcttacttgggtgtctcatctggcaccagccatacaattttaactattgtcaatttctaatgtcttattatgtggtgggatgagtcccttcactcttcttttacaaaatttcctagttattctctcacatctattcttccacataaactttaaattgtgcccagtcctccaccccctgtcccattcccacccccaaattctgggctctgtcattccctgtgccatcatcttccccccattgtaattactgtccactcagggctgtgaaatagactatgttctgtaaagagggacaaaaagggcatcctgatcttgagagaagcctgctgttcctcccatcatttcacctgccccctaagcccaggagttgtcatgagaggtcaccaggcccccactcaatctcagcttgggaaccaaagtcacccaccttggttgtgttggggtggacccgccatctgtccctggtccagacgagaaagaggagtctctcctaggcctggagctgggaaagaatgtgtggcccagttgtctgcacttctaattctcatcatggagaaacctttattcctatctccctttcctgaactggttttttgttgtttttgtttcattttgttttggggggatagtttcttgctctttaatttggagtctccagtacctttgggatgcaggcagttcttgcctgggccttctcggaaccctcactcccctagcccactcttgcgctacctgcaggaggctgccaacctggtgcattctgacaagcctcccacccaaatctctctcctgccattgtgtccaaaatcccaccattagaggctcttgtagggaagagcgtttcttgaaggcttttaggccttccagagccaggagggaagtcagacaatagcaggaagtccccaggccttttcaaagttccaaaccaagctctcctgattttaatgtagagatcataccaacccaggtgggggaggagggtccccagccccaggcagcagccatcaccccctccactgaaaacaatattggaggctgctttgggactgcccttctcagccccctaagtctgttttgtaatgcctgtggtgctctccctcctggacctttcctctcgggggtcaccacactttgctaactcttgtgtgcacatattttataatagagtagcgagggaatggtgccgcctccagcttccgtaagctgcccgggctctggggggctctgggacaatcggggctgggaagtgactgtgctcttattgtacactctttatttctctgtatctttggcttgtgctctttgtaattaatgggatttgtctgccttttcaacactatactgagcaataacaataaatgcacacgtggaaatgca

SEQ ID NO: 328118 - DNA, 3537 bp, Artificial Sequence
  derived and/or modified sequence
atggagctgagaggcaccgaggccgtggtgaagatcaaggagacctacggcgacaccgaggccatctgcagaagactgaagaccagccccgtggagggcctgcccggcaccgcccccgacctggagaagagaaagcagatcttcggccagaacttcatcccccccaagaagcccaagaccttcctgcagctggtgtgggaggccctgcaggacgtgaccctgatcatcctggagatcgccgccatcatcagcctgggcctgagcttctaccacccccccggcgagggcaacgagggctgcgccaccgcccagggcggcgccgaggacgagggcgaggccgaggccggctggatcgagggcgccgccatcctgctgagcgtgatctgcgtggtgctggtgaccgccttcaacgactggagcaaggagaagcagttcagaggcctgcagagcagaatcgagcaggagcagaagttcaccgtggtgagagccggccaggtggtgcagatccccgtggccgagatcgtggtgggcgacatcgcccaggtgaagtacggcgacctgctgcccgccgacggcctgttcatccagggcaacgacctgaagatcgacgagagcagcctgaccggcgagagcgaccaggtgagaaagagcgtggacaaggaccccatgctgctgagcggcacccacgtgatggagggcagcggcagaatgctggtgaccgccgtgggcgtgaacagccagaccggcatcatcttcaccctgctgggcgccggcggcgaggaggaggagaagaaggacaagaagggcaagatgcaggacggcaacgtggacgccagccagagcaaggccaagcagcaggacggcgccgccgccatggagatgcagcccctgaagagcgccgagggcggcgacgccgacgacagaaagaaggccagcatgcacaagaaggagaagagcgtgctgcagggcaagctgaccaagctggccgtgcagatcggcaaggccggcctggtgatgagcgccatcaccgtgatcatcctggtgctgtacttcaccgtggacaccttcgtggtgaacaagaagccctggctgcccgagtgcacccccgtgtacgtgcagtacttcgtgaagttcttcatcatcggcgtgaccgtgctggtggtggccgtgcccgagggcctgcccctggccgtgaccatcagcctggcctacagcgtgaagaagatgatgaaggacaacaacctggtgagacacctggacgcctgcgagaccatgggcaacgccaccgccatctgcagcgacaagaccggcaccctgaccaccaacagaatgaccgtggtgcaggcctacgtgggcgacgtgcactacaaggagatccccgaccccagcagcatcaacaccaagaccatggagctgctgatcaacgccatcgccatcaacagcgcctacaccaccaagatcctgccccccgagaaggagggcgccctgcccagacaggtgggcaacaagaccgagtgcggcctgctgggcttcgtgctggacctgaagcaggactacgagcccgtgagaagccagatgcccgaggagaagctgtacaaggtgtacaccttcaacagcgtgagaaagagcatgagcaccgtgatcaagctgcccgacgagagcttcagaatgtacagcaagggcgccagcgagatcgtgctgaagaagtgctgcaagatcctgaacggcgccggcgagcccagagtgttcagacccagagacagagacgagatggtgaagaaggtgatcgagcccatggcctgcgacggcctgagaaccatctgcgtggcctacagagacttccccagcagccccgagcccgactgggacaacgagaacgacatcctgaacgagctgacctgcatctgcgtggtgggcatcgaggaccccgtgagacccgaggtgcccgaggccatcagaaagtgccagagagccggcatcaccgtgagaatggtgaccggcgacaacatcaacaccgccagagccatcgccatcaagtgcggcatcatccaccccggcgaggacttcctgtgcctggagggcaaggagttcaacagaagaatcagaaacgagaagggcgagatcgagcaggagagaatcgacaagatctggcccaagctgagagtgctggccagaagcagccccaccgacaagcacaccctggtgaagggcatcatcgacagcacccacaccgagcagagacaggtggtggccgtgaccggcgacggcaccaacgacggccccgccctgaagaaggccgacgtgggcttcgccatgggcatcgccggcaccgacgtggccaaggaggccagcgacatcatcctgaccgacgacaacttcagcagcatcgtgaaggccgtgatgtggggcagaaacgtgtacgacagcatcagcaagttcctgcagttccagctgaccgtgaacgtggtggccgtgatcgtggccttcaccggcgcctgcatcacccaggacagccccctgaaggccgtgcagatgctgtgggtgaacctgatcatggacaccttcgccagcctggccctggccaccgagccccccaccgagaccctgctgctgagaaagccctacggcagaaacaagcccctgatcagcagaaccatgatgaagaacatcctgggccacgccgtgtaccagctggccctgatcttcaccctgctgttcgtgggcgagaagatgttccagatcgacagcggcagaaacgcccccctgcacagcccccccagcgagcactacaccatcatcttcaacaccttcgtgatgatgcagctgttcaacgagatcaacgccagaaagatccacggcgagagaaacgtgttcgacggcatcttcagaaaccccatcttctgcaccatcgtgctgggcaccttcgccatccagatcgtgatcgtgcagttcggcggcaagcccttcagctgcagccccctgcagctggaccagtggatgtggtgcatcttcatcggcctgggcgagctggtgtggggccaggtgatcgccaccatccccaccagcagactgaagttcctgaaggaggccggcagactgacccagaaggaggagatccccgaggaggagctgaacgaggacgtggaggagatcgaccacgccgagagagagctgagaagaggccagatcctgtggttcagaggcctgaacagaatccagacccagatcagagtggtgaaggccttcagaagcagcctgtacgagggcctggagaagcccgagagcagaaccagcatccacaacttcatggcccaccccgagttcagaatcgaggacagccagccccacatccccctgatcgacgacaccgacctggaggaggacgccgccctgaagcagaacagcagcccccccagcagcctgaacaagaacaacagcgccatcgacagcggcatcaacctgaccaccgacaccagcaagagcgccaccagcagcagccccggcagccccatccacagcctggagaccagcctgtag

SEQ ID NO: 328119 - protein, 1199 aa, Artificial Sequence
  derived and/or modified sequence
MGDMTNSDFYSKNQRNESSHGGEFGCTMEELRSLMELRGTEAVVKIKETYGDTEAICRRLKTSPVEGLPGTAPDLEKRKQIFGQNFIPPKKPKTFLQLVWEALQDVTLIILEIAAIISLGLSFYHPPGEGNEGCATAQGGAEDEGEAEAGWIEGAAILLSVICVVLVTAFNDWSKEKQFRGLQSRIEQEQKFTVVRAGQVVQIPVAEIVVGDIAQVKYGDLLPADGLFIQGNDLKIDESSLTGESDQVRKSVDKDPMLLSGTHVMEGSGRMLVTAVGVNSQTGIIFTLLGAGGEEEEKKDKKGVKKGDGLQLPAADGAAASNAADSANASLVNGKMQDGNVDASQSKAKQQDGAAAMEMQPLKSAEGGDADDRKKASMHKKEKSVLQGKLTKLAVQIGKAGLVMSAITVIILVLYFTVDTFVVNKKPWLPECTPVYVQYFVKFFIIGVTVLVVAVPEGLPLAVTISLAYSVKKMMKDNNLVRHLDACETMGNATAICSDKTGTLTTNRMTVVQAYVGDVHYKEIPDPSSINTKTMELLINAIAINSAYTTKILPPEKEGALPRQVGNKTECGLLGFVLDLKQDYEPVRSQMPEEKLYKVYTFNSVRKSMSTVIKLPDESFRMYSKGASEIVLKKCCKILNGAGEPRVFRPRDRDEMVKKVIEPMACDGLRTICVAYRDFPSSPEPDWDNENDILNELTCICVVGIEDPVRPEVPEAIRKCQRAGITVRMVTGDNINTARAIAIKCGIIHPGEDFLCLEGKEFNRRIRNEKGEIEQERIDKIWPKLRVLARSSPTDKHTLVKGIIDSTHTEQRQVVAVTGDGTNDGPALKKADVGFAMGIAGTDVAKEASDIILTDDNFSSIVKAVMWGRNVYDSISKFLQFQLTVNVVAVIVAFTGACITQDSPLKAVQMLWVNLIMDTFASLALATEPPTETLLLRKPYGRNKPLISRTMMKNILGHAVYQLALIFTLLFVGEKMFQIDSGRNAPLHSPPSEHYTIIFNTFVMMQLFNEINARKIHGERNVFDGIFRNPIFCTIVLGTFAIQIVIVQFGGKPFSCSPLQLDQWMWCIFIGLGELVWGQVIATIPTSRLKFLKEAGRLTQKEEIPEEELNEDVEEIDHAERELRRGQILWFRGLNRIQTQIEVVNTFKSGASFQGALRRQSSVTSQSQDVANLSSPSRVSLSNALSSPTSLPPAAAGRE

SEQ ID NO: 328120 - DNA, 3600 bp, Artificial Sequence
  derived and/or modified sequence
atgggcgatatgaccaattcggatttttattccaagaaccagcgcaacgagagctcccatggaggcgaatttggatgtacaatggaggagctgaggagtctcatggaactgaggggcaccgaagccgtcgtgaaaattaaagagacgtacggagatacagaggccatttgccggcggttgaagacaagtccagtggaaggtcttccaggcacagcgcccgacctcgaaaaaagaaaacagattttcggacagaattttattccacccaagaaacctaagacatttctgcagctagtttgggaagcactccaggatgtgacccttatcattttggagattgcggccatcataagtttgggactcagtttctaccatcctcctggcgaggggaatgaaggctgtgcaacagctcaggggggcgcggaagatgaaggcgaagcagaagccgggtggattgaaggcgctgctattttactgagcgttatctgcgtggtgctggtgactgcctttaatgactggtctaaagagaaacagtttagaggcctgcagtcacggatagaacaagagcaaaaattcaccgtggtgcgtgcgggccaggtggtccagattccagtcgccgagatcgtggtgggcgatatcgcccaagtcaagtacggagatctgttgccagcagatgggctattcattcaggggaacgacctaaagatagatgaaagtagccttacaggggaatccgatcaggttaggaagagtgtggataaagacccaatgctactttccggaactcatgttatggaagggtcaggtcgtatgttggtgacagcagtgggcgtcaatagccagacagggattattttcacattgctgggggcaggcggggaagaggaggagaagaaagataagaagggtgtgaaaaagggggatggcctgcaactgcccgcagccgacggcgcagccgcttcgaatgctgcagactcggctaacgcctcgctcgtcaatgggaaaatgcaggatggaaatgtggacgcatctcagtctaaggcgaagcagcaggatggcgcggccgcgatggagatgcagccgttgaagtctgccgaagggggagatgctgatgacagaaagaaggcttctatgcacaagaaggaaaaatccgtgctacagggcaagctaacaaaactcgcagtgcagattgggaaagccggcctggtgatgtccgctatcactgtaattattctagttttgtattttactgtcgacactttcgtggtgaacaaaaaaccatggctgccggagtgtacgcccgtgtacgtccagtacttcgtaaaatttttcatcatcggcgtgaccgtcttagtggttgccgtgcctgaaggtctacccctcgctgtgactataagtctggcatactccgtgaaaaagatgatgaaggataacaatctcgtacggcacctcgacgcctgcgaaactatggggaatgccaccgcaatctgctcggacaaaaccgggacattaacaacgaaccgcatgaccgttgtgcaggcctatgtcggcgacgtgcactataaagaaatacctgacccttctagtattaacactaaaactatggaactgcttataaatgcgatagccatcaactccgcatacactaccaagattctgcctcccgaaaaagaaggcgccctcccacgccaggtgggtaataagactgagtgcgggcttctgggcttcgtgctcgatctgaaacaggactatgaacccgtacggtcccagatgccagaggagaagctgtataaggtgtacacctttaatagtgtgagaaagtcaatgagcaccgttatcaaactccccgatgaatccttcaggatgtactccaaaggcgcgtctgagatcgttctcaaaaagtgttgtaaaatcctgaatggcgccggcgagccccgagtgttcaggccacgggaccgggacgagatggttaagaaagtaattgagcccatggcctgcgacggcctacgcaccatctgtgtagcatacagggattttccttcctctcctgaacccgattgggataacgaaaatgacattttgaatgagttgacatgtatttgtgtggtgggcattgaggatccagtgcgcccagaagtgcccgaagcaattaggaaatgccagagagctgggataacagttagaatggtgactggcgacaacataaacacagcgagggcgattgcaatcaagtgcgggatcatccaccccggagaagactttctgtgtcttgaggggaaagagttcaatcgtaggatcaggaatgaaaagggtgaaatagagcaggaacgaatcgataaaatttggccaaaactacgcgtgctagcacgctcaagccctactgacaagcataccctcgtgaagggtatcatagatagtacccatacagagcagagacaggttgttgctgtcacaggcgacggcaccaatgacggccctgctctgaaaaaggccgatgttggctttgcaatgggaattgccggcaccgatgtggccaaggaggcctctgacatcatattgactgacgacaacttcagttcaatcgtgaaggcagtaatgtggggccggaacgtgtacgactctatcagcaagtttctgcagttccaactcactgtaaatgttgtggcagtgatcgttgccttcacgggagcttgcattacacaggatagccctctaaaagcagtacagatgctctgggtaaacttgatcatggataccttcgccagtctcgcgttggcgaccgaacccccaactgagactctgctgctgaggaagccgtacggtagaaataaacctctcatttctagaaccatgatgaagaacattctgggacacgccgtatatcagttggccttgatttttacactattatttgtcggggaaaagatgttccagatcgattctggcaggaatgccccactgcatagccctccttccgagcattatactataatttttaacacatttgtcatgatgcagctttttaatgaaattaacgcccggaagattcacggagagagaaacgtattcgatgggatcttcaggaatccgatcttctgcacaatcgtgctgggcacctttgccatacaaatcgtcattgtgcagtttggcgggaagccatttagctgctcgcctttgcaactggaccagtggatgtggtgtatattcattgggttaggcgagctggtctgggggcaagtgattgctacaattccaacctccaggttaaagttcctcaaagaggcagggcgactgacacagaaggaggagatccctgaggaggaactgaatgaggacgtggaggaaattgaccacgccgaacgcgaactgcgtagagggcagatcttgtggtttcggggcctcaataggatccagacccagatcgaggtggtgaacacctttaaaagcggcgctagcttccagggtgccctgcgtcggcaaagcagcgtgactagtcagagccaggacgtcgccaacttaagtagcccgagtcgcgttagcttgtcaaatgcacttagcagtcccacctccctacccccagccgcagccggcagggaatag

SEQ ID NO: 328121 - DNA, 3600 bp, Artificial Sequence
  derived and/or modified sequence
atgggagacatgaccaacagcgacttctacagcaagaaccagagaaatgaaagcagccacggcggggagtttggctgcaccatggaggagctgcggagcctgatggagctgcggggcacagaggccgtggtgaagatcaaggagacctacggggacacagaggccatctgccggcggctgaagaccagccctgtggagggcctgcctggaacagccccagacctggagaagaggaagcagatcttcggccagaacttcatcccccccaagaagcccaagaccttcctgcagctggtgtgggaggccctgcaggatgtgaccctcatcatcctggagattgctgccatcatcagcctgggcctgtccttctaccaccccccaggagagggcaatgaaggctgtgccacagcccagggcggcgcagaagatgaaggagaggccgaggccggctggattgagggcgccgccatcctgctgagcgtcatctgtgtggtgctggtgacagccttcaatgactggagcaaggagaagcagttccggggcctgcagagccgcatcgagcaggagcagaagttcaccgtggtgcgggccggccaggtggtgcagatccctgtggccgagatcgtggtgggggacatcgcccaggtgaagtacggggacctgctgcctgcagatggcctcttcatccagggcaatgacctgaagattgatgagagcagcctgaccggggagagtgaccaggtgaggaagtctgtggacaaggaccccatgctgctgagcggcacccacgtgatggagggcagcggccgcatgctggtgacagctgtgggcgtgaacagccagacaggcatcatcttcaccctgctgggcgccggcggggaggaggaggagaagaaggacaagaagggcgtgaagaagggagatggcctgcagctgcctgctgctgatggagctgctgccagcaatgctgctgacagcgccaatgccagcctggtgaatggcaagatgcaggatggaaatgtggatgccagccagagcaaggccaagcagcaggatggagctgctgccatggagatgcagcccctgaagtctgctgagggcggagatgctgatgacaggaagaaggcctccatgcacaagaaggagaagtctgtgctgcagggcaagctgaccaagctggccgtgcagatcggcaaggccggcctggtgatgtctgccatcaccgtcatcatcctggtgctgtacttcaccgtggacacctttgtggtgaacaagaagccctggctgcctgaatgtacccctgtgtatgtgcagtactttgtgaagttcttcatcatcggcgtgacagtgctggtggtggccgtgcctgagggcctgcccctggccgtgaccatcagcctggcctacagcgtgaagaagatgatgaaggacaacaacctggtgcgccacctggatgcctgtgagaccatgggaaatgccacagccatctgcagcgacaagacaggcaccctgaccaccaacaggatgacagtggtgcaggcctacgtgggagatgtgcactacaaggagatcccagaccccagcagcatcaacaccaagaccatggagctgctgatcaatgccatcgccatcaacagcgcctacaccaccaagatcctgcccccagagaaggagggcgccctgccccggcaggtgggcaacaagacagaatgtggcctgctgggctttgtgctggacctgaagcaggactatgagcctgtgcgcagccagatgcctgaggagaagctgtacaaggtgtacaccttcaacagcgtgaggaagtccatgagcaccgtcatcaagctgcctgatgagagcttcaggatgtacagcaaaggagccagcgagatcgtgctgaagaagtgctgcaagatcctgaatggagctggggagcccagggtcttccggccccgggacagagatgagatggtgaagaaggtgattgagcccatggcctgtgatggcctgcggaccatctgtgtggcctacagagacttccccagcagccctgagccagactgggacaatgaaaatgacatcctgaatgagctgacctgcatctgtgtggtgggcatcgaggaccctgtgcggcctgaggtgcctgaggccatcaggaagtgccagagagctggcatcaccgtgaggatggtgactggagacaacatcaacacagcccgggccatcgccatcaagtgtggcatcatccaccctggagaggacttcctgtgcctggagggcaaggagttcaacagacgcatcagaaatgagaagggggagattgagcaggagagaattgacaagatctggcccaagctgcgggtgctggcccggagcagccccacagacaagcacaccctggtgaagggcatcatcgacagcacccacacagagcagaggcaggtggtggccgtgactggagatggcaccaatgatggccctgccctgaagaaggcagatgtgggctttgccatgggcattgctggaacagatgtggccaaggaggccagtgacatcatcctgacagatgacaacttcagcagcatcgtgaaggctgtgatgtggggcagaaatgtgtatgacagcatcagcaagttcctgcagttccagctgactgtgaatgtggtggccgtgattgtggccttcaccggggcctgcatcacccaggacagccccctgaaggctgtgcagatgctgtgggtgaacctgatcatggacacctttgccagcctggccctggccacagagcccccaacagagaccctgctgctgaggaagccctacggcaggaacaagcccctcatcagcaggaccatgatgaagaacatcctgggccatgctgtgtaccagctggccctgatcttcaccctgctgtttgtgggggagaagatgttccagattgattctggaagaaatgcccccctgcacagcccccccagcgagcactacaccatcatcttcaacacctttgtgatgatgcagctgttcaatgagatcaatgccaggaagatccatggagagagaaatgtgtttgatggcatcttcaggaaccccatcttctgcaccatcgtgctgggcacctttgccatccagatcgtcatcgtgcagtttggaggcaagcccttcagctgcagccccctgcagctggaccagtggatgtggtgcatcttcatcggcctgggggagctggtgtggggccaggtgattgccaccatccccaccagccggctgaagttcctgaaggaggccggccgcctgacccagaaggaggagatccctgaggaggagctgaatgaagatgtggaggagattgaccatgctgagcgggagctgcggcggggccagatcctgtggttccggggcctgaaccgcatccagacccagatcgaggtggtgaacaccttcaagagcggggccagcttccagggcgccctgcggcggcagagctctgtgaccagccagagccaggatgtggccaacctgagcagccccagccgggtgtccctgagcaatgccctgagcagccccaccagcctgcccccagctgctgctggccgggagtag

SEQ ID NO: 328122 - DNA, 3600 bp, Artificial Sequence
  derived and/or modified sequence
atgggcgacatgaccaacagcgacttctacagcaagaaccagcggaatgaatcatcgcacggcggggagttcgggtgcactatggaagagctcagaagcctgatggaattgcgaggtacagaagccgtcgtgaagatcaaagagacctatggggatactgaagctatttgccggcgtctcaaaacgtcacccgttgaggggctccccggaactgctccagatctggagaaaagaaagcaaatttttggccagaacttcattccccccaagaagcccaagaccttccttcagttggtgtgggaagccttgcaggacgtgactctcatcatactggaaattgctgcgatcatttctcttggtctgtctttctatcatcccccaggcgaaggtaacgagggttgcgcaaccgctcagggaggagccgaggacgaaggcgaggctgaggcaggttggatcgagggcgcggccattctgctctctgtgatatgtgtggtgttagtaacagccttcaatgactggagcaaggagaaacagttcagaggcctacagtctaggatagagcaggagcaaaaattcaccgttgttagggccggccaggtcgtgcagatcccagttgccgagattgtggtgggggatatcgctcaggtgaaatatggtgacctgttacctgccgatgggttgttcattcaaggaaatgatttaaagatcgacgaatcctccctgacaggggaaagcgaccaagtgaggaaaagtgtcgacaaagaccctatgctgctctctggcacacacgtgatggagggctctggacggatgctggtcaccgctgtgggggtcaattctcagaccggaatcatatttacgctcttgggcgccggtggagaggaggaggagaagaaggataagaagggggttaagaaaggagacggactgcagttacccgcggccgacggtgccgccgcgagcaatgctgccgactccgccaatgcgtctctggtgaacggcaagatgcaggacgggaatgttgatgccagccagagcaaggccaaacaacaagatggcgccgccgctatggagatgcagccattgaaaagcgcagaggggggcgatgctgacgatcggaaaaaagccagcatgcacaagaaagagaagagtgttttgcaagggaagctaacaaagcttgctgttcagattggcaaagcggggttggttatgtctgctatcactgtcattatactcgtcctttattttaccgttgacaccttcgtcgtcaacaagaagccctggctgcctgagtgcacacccgtctacgttcagtatttcgtgaaatttttcattatcggagtgaccgtgctcgttgtggctgtgcctgaggggctgcccttggccgtgaccatttccctcgcatacagcgtgaaaaagatgatgaaagacaataacctggtaagacacctcgacgcctgcgagacaatggggaatgcgaccgctatttgctctgacaagacaggcactctgactacgaaccgcatgaccgtggtgcaagcttacgtgggtgatgtccactataaagagattccagacccctctagcatcaataccaagacaatggaactactcattaatgctattgccatcaattccgcttacaccacaaagatcttacctccggaaaaagagggcgcgctccctaggcaagtgggcaacaaaaccgaatgcggtttgttggggtttgtgttggatcttaagcaagattatgaacctgtcagatcccagatgcctgaggagaagctatacaaggtctacacctttaacagtgtcaggaaatcaatgagcactgtcatcaaactgcccgatgagtccttcagaatgtatagtaaaggagcctccgagatagtgctaaagaagtgctgcaaaatcctcaatggtgctggcgagcctcgtgtcttcagaccaagagacagggacgagatggtcaaaaaggtcatagaaccaatggcctgtgatggtttgcgcacgatttgtgtggcctatagagatttccccagcagccctgaacccgactgggacaacgagaacgacatcctgaatgaactgacttgcatctgcgtggtgggaattgaagatcccgtacgtccggaagtgcccgaggcaatccggaaatgtcagagggctggcataactgtccgtatggtaaccggcgacaacattaacacagctagggcgatagccatcaagtgtggtatcattcatccaggggaagatttcctgtgtctggaagggaaggaatttaaccgtaggataaggaacgagaaaggcgaaattgaacaggaacgcattgacaaaatttggccgaagctgagagttctggctcgctccagtcccacagacaagcacacgcttgtcaaaggaatcattgactctacccacactgaacagcggcaggtggtggccgtaacgggcgacggcactaatgacggccctgctctaaagaaggccgacgtagggtttgccatgggcattgctggaactgacgttgctaaggaggcatccgacataattctcaccgacgataattttagttcaattgtgaaggctgtgatgtggggccggaacgtgtatgatagcatatcaaaattccttcagtttcagctgaccgtgaacgtcgtggccgttatcgtggcattcaccggcgcctgcataacacaggattccccattaaaagctgttcagatgctttgggtcaatttgattatggatacatttgcctccctggctctggccacagaaccgcccaccgagaccctgttactgagaaagccctacggacggaataaacccctgattagtaggacaatgatgaagaatatcttgggccacgccgtgtaccagttggcactgattttcacacttctgttcgtgggagaaaagatgtttcagatcgactcaggaaggaacgcaccactacacagtccacctagcgaacactacaccattatctttaacaccttcgtgatgatgcagctgtttaacgaaatcaatgccagaaagatccacggggagcgcaatgtcttcgacgggatttttcgaaatcccatcttttgtacaattgtcctggggacatttgctatccaaatagtcattgtgcagttcgggggaaagcccttttcttgtagcccattgcagctggatcagtggatgtggtgtatctttatagggctcggagagttggtctggggtcaggtaatcgcaacaatcccgactagccggttaaagtttctgaaagaggccgggcgactgacacaaaaagaggagatccctgaggaggaactcaacgaggacgtcgaagagatcgaccatgccgagcgcgaactgaggcggggccagatcctgtggtttcgcgggctgaatcggatccagacccagatagaagtggttaatacttttaaatctggagcctctttccagggagccctacgacggcaatccagcgtgacgtcccagtcacaggacgtggcgaacctcagcagccccagccgagtctctttaagtaacgctctcagctccccgacctccttacccccggctgctgcaggccgcgagtag

SEQ ID NO: 328123 - DNA, 3600 bp, Artificial Sequence
  derived and/or modified sequence
atgggggacatgaccaactccgacttctacagtaaaaatcagcggaacgagagctcccacgggggtgagttcggatgcacaatggaggagctgagatcactaatggaactgaggggcactgaagccgtggtcaagatcaaggaaacctacggtgacaccgaggccatctgcagacgcctgaaaacaagccccgtcgaggggctgccaggcaccgcccctgacctggagaagcggaaacagattttcgggcaaaattttattccccctaaaaagccaaagactttcctgcagctggtctgggaagccctccaggacgtgacgctcataatacttgagattgccgctattatctccctaggtctttccttctaccaccctccaggagaggggaatgagggctgcgcaacggcccagggtggcgcagaagacgagggcgaagctgaagccggatggatcgaaggcgctgcaatactgctctccgtcatttgtgttgtgctcgtgaccgccttcaacgattggtctaaagagaagcagttccgcggtctgcagagtcgcatcgaacaggagcagaaatttaccgtagtgagagctggtcaggtggtgcagatccctgtcgcggagatagtcgttggggatatcgcccaggtaaaatatggcgatctgctacctgcggacggcctctttattcaggggaatgatttaaagattgacgaatcttctctgacaggtgagtctgaccaggtacggaaatctgtggataaagaccccatgctcctcagcggcactcacgttatggagggatccggcagaatgttggtgactgccgtgggcgtgaattctcagaccggcatcatctttacactgctaggagccggaggcgaagaggaggagaaaaaggacaaaaagggagttaagaagggcgatggacttcagcttccagccgcagatggagccgctgcctctaacgccgcagacagcgctaacgcgtcattggtaaatggcaaaatgcaggatggcaacgttgatgcatcccagtccaaggctaaacagcaggacggtgccgctgccatggagatgcagcctctgaagtcagctgaaggcggtgatgctgacgatcggaaaaaagcttctatgcacaagaaggagaaaagcgttctgcaggggaagttaacaaaactggccgtccagatcgggaaggccggtctggtcatgtccgccatcactgtgatcatcttggttctgtatttcacggtggacacattcgtggtgaacaagaaaccctggctgcctgaatgcaccccggtatacgtgcaatactttgtcaagtttttcataatcggggtgaccgtgcttgttgtggcggtgcctgaaggactgcctctcgctgtcactatttcacttgcctactccgtgaaaaagatgatgaaggacaacaacctggtgagacatctcgacgcctgtgaaaccatgggtaacgccactgccatttgtagtgataagacgggtacgttgacaaccaatcggatgacagtggttcaggcgtacgtaggcgatgtgcattataaagaaatccccgacccctcctccattaatactaagacgatggaactcctaataaacgcgattgctattaattccgcttacacgaccaagatccttcctcctgagaaagagggtgctcttccacggcaggtcggtaacaagacagagtgtggcctgctgggcttcgtcttggatctcaaacaggactacgagcctgtaaggagccagatgcccgaggaaaaattgtacaaagtgtacaccttcaattcagttcgtaaaagcatgagtacggtgatcaagcttcccgacgagtcttttagaatgtactcaaagggggcatccgaaattgtgttgaagaaatgttgcaagatattgaatggggcaggcgaacctagagtatttcgcccacgggatagagacgaaatggttaagaaggtgattgagcccatggcttgcgacggattgcggacaatttgtgttgcctatcgggattttcctagctccccagagcctgactgggacaatgaaaatgacattctgaatgagctcacgtgcatttgcgtcgtggggattgaggaccccgtgcgccctgaagtacctgaggccatccgaaaatgtcagcgtgctgggatcaccgtaaggatggtgaccggcgacaatatcaacacagcccgagcgattgctatcaagtgcggaattattcacccaggcgaagatttcctttgcttggaaggtaaggagtttaaccgacgcatccgaaacgagaagggggaaattgagcaggaacgaatcgacaaaatctggccaaagctgagagtgctggcacgatcaagtcctaccgacaaacatacattggtgaaaggaatcatcgatagcactcatacagagcagcgccaggtggtcgccgtgacgggcgatgggactaatgacggaccagcgctcaagaaagctgacgtgggcttcgccatgggtattgctggcacagatgtagccaaagaagctagcgacataatcttgactgacgacaatttttcatccatcgtaaaggcggtcatgtgggggaggaacgtttacgatagtatctccaaatttcttcaattccaactgacagtgaatgtcgtcgccgtgatagtagcattcaccggtgcttgcatcacgcaagattccccactgaaagcagttcagatgctatgggtaaacctcatcatggatacatttgccagccttgctcttgccactgaacctccaacagaaaccctcctgctccgtaaaccctacggtcgcaacaagcctctcatctcaaggaccatgatgaaaaacattctgggacacgctgtgtaccagctggcactcatcttcactctcctgttcgttggagaaaagatgttccaaattgacagcggtaggaacgcgcctctgcactctcctccgtcagagcactacacaatcattttcaataccttcgttatgatgcagttattcaacgagattaacgccaggaagatccatggagagagaaatgtatttgatggcattttccgaaatcccatcttttgcacgatcgtactgggtacatttgcaatacagatcgtgattgttcagttcggcggaaagcctttcagttgtagccccctgcagctagaccagtggatgtggtgtatctttattgggttgggtgaactggtctggggccaggttatagctaccatcccgacatctcgtcttaaatttctaaaggaggccggtagactgactcagaaagaagagatccctgaggaagagctgaacgaagacgtcgaagagatcgaccatgccgagcgggagctgcgccgaggccaaattctgtggtttcgaggcttaaataggattcagactcagatcgaagtagtaaacacttttaagagcggggcttcctttcagggtgctttgcggagacagtcttctgtcacctcccaaagccaagacgtggcgaatctgtcctcacctagccgtgtaagtttgagtaacgccttaagctcacctacatccctgccacccgctgccgctggacgtgagtag

SEQ ID NO: 328124 - DNA, 4036 bp, Artificial Sequence
  derived and/or modified sequence
agtctgcagaggggcccgggcacgctggctgggctcagccgcggcaccagctgccgcaccgcgattacggggctgcccgccgggaaaccgtgcaggattggtggtgattttcatagccaagagccaccacccctgaccatgtagatgccagttccagggagcagcatgggccccactgaatggagactcctgggtctacagccctgagcccctccggcccctggacctcgtcccacaccggaggacacctcttggagctcaccaccactgtcaccagcccgcctcggccacccccaccccccgggacccggagtcggccgcctggtgccacagctgaccagtgagggtgtgctgaggacagccacaagcagccatcacccggcagcctcttgtccagcgctgacccttgggcccagcccgagcaaggaccgcagcaaacatgggtgacatgaccaacagcgacttttactccaaaaaccaaagaaatgagtcgagccatgggggcgagttcgggtgcacaatggaggagctccgctccctcatggagctgcggggcactgaggctgtggtcaagatcaaggagacttatggggacaccgaagccatctgccggcgcctcaaaacctcacctgttgaaggtttgccgggcaccgctccagacctggaaaagagaaagcaaatttttgggcaaaactttatacctccaaagaagccaaaaaccttcctgcagctcgtgtgggaggcgctgcaggacgtgacgctcatcatcctggagattgccgccatcatctccctggggctgtccttctaccacccgcccggcgagggcaacgaaggatgtgcgacggcccagggtggggcagaggatgaaggagaggcagaggcaggttggatcgagggggccgccattctcctctcagttatctgtgtggtcctggtcacggccttcaatgactggagcaaagagaaacagttccggggcctgcagagccgcatcgagcaggaacagaaatttaccgtggtccgggctggccaggtggtccagatccctgtggctgagatcgtggttggggacatagcccaggtcaaatatggtgacctcctccctgccgacggcctcttcatccagggcaatgacctcaagattgatgaaagctccctaactggagagtctgaccaggtgcgcaagtccgtggacaaggaccccatgctgctgtcaggaacccacgtgatggagggctcaggacggatgttggtgactgctgtgggtgtgaactctcagactggcatcatctttaccctcctgggggctggtggtgaagaggaagagaagaaagacaaaaaaggtgtgaagaagggggatggccttcagctaccagcagcagacggtgcggcagcttcaaatgctgcagatagtgcgaatgccagcctagtcaatggtaaaatgcaggatggcaatgtggacgccagccagagcaaagccaaacaacaggacggggcagccgccatggagatgcagcccctcaagagtgccgagggcggcgacgctgacgacaggaagaaggccagcatgcacaagaaggagaagtccgtgctgcagggcaagctcaccaagctggctgtgcagatcgggaaggcgggcttggtgatgtcagccatcacggtgatcatcctggtgctctacttcactgtggacaccttcgtggtcaacaagaagccgtggctgcctgagtgcacgcccgtctacgtgcagtactttgtcaagttcttcatcattggcgtgacggtgctggtggtcgccgtgcccgaggggctccctctggccgtcaccatctcgttggcctattcggtgaagaaaatgatgaaggacaacaacctggtacgccacctggatgcctgtgagaccatgggcaatgccacagccatctgctcagacaagacaggcacgctgaccaccaatcgcatgacagtggtacaggcctatgtcggcgacgtccactataaagagatccccgaccccagctccatcaacaccaagaccatggagctgctgatcaatgccatcgccatcaacagcgcctacaccaccaagattctgcccccagagaaggagggcgccctgcctcggcaggtgggcaacaagacggagtgcggcctgctgggcttcgtgctggacctgaagcaggactacgagcccgtgcgcagccagatgccagaggagaagttgtacaaagtgtacaccttcaactccgtgcgcaagtccatgagcactgtcatcaagctgcccgacgagagcttccgcatgtacagcaagggggcttctgagatcgtgctcaagaagtgctgcaaaatcctcaatggggcgggagagcctcgtgtcttccggccccgcgaccgggacgagatggtaaagaaggtgattgagcccatggcttgcgatgggctccgcactatctgcgtggcctaccgcgacttccccagcagcccggagccggactgggacaatgagaatgacatcctcaacgaactcacctgcatctgcgtggtgggcatcgaggacccggtgcggccagaggtcccagaagccatccgcaagtgccagcgggcaggcatcacggtccgcatggtcactggcgacaatatcaacacggctcgggccatcgccatcaagtgtggcatcatccatcctggggaggactttctgtgcctcgagggcaaggagttcaacaggaggatccgcaacgagaagggggagattgagcaggagcgaattgacaagatctggccaaagctgcgggtgctggctcgctcctccccaacggacaagcataccctggttaaaggcatcatcgacagcacacacactgagcagcggcaggtggtggccgtgacgggggacgggaccaacgacgggcctgcactcaagaaggccgacgtgggcttcgccatgggcatcgcaggcactgacgtggccaaggaggcctcagacatcatcctgacagacgacaatttcagcagcatcgtcaaggcagtgatgtggggccgcaacgtctatgacagcatctccaaattcttgcagttccagctcaccgtcaacgtggtggccgtgattgtggccttcacaggcgcctgcatcacgcaggactcccctctgaaggccgtgcagatgctctgggtgaacctcatcatggacacgtttgcctcgctggcactggccactgagccgcccacggagaccctgctgctgaggaagccgtacggccgcaacaagccgctcatctccaggaccatgatgaagaacatcctgggccatgctgtctaccagcttgccctcatcttcaccctgctctttgttggcgagaagatgttccagatcgacagcgggaggaacgcgcccctgcattcgccaccctcagaacattacaccatcatcttcaacaccttcgtcatgatgcagctcttcaacgagatcaacgcccgcaagatccacggcgagcgcaatgtctttgacggcatcttccggaaccccatcttctgcaccatcgtgctgggcacctttgccatccagatagtgatcgtgcagtttggagggaagccattcagctgctctccactgcagctggaccagtggatgtggtgcatattcattgggttaggagagctcgtttggggccaggtcatcgccaccatcccgaccagcagactcaagttcctcaaggaggcaggcaggctcacacagaaggaggagatcccggaggaggagctcaacgaggacgtggaggagatcgaccacgcggagcgggagctgcggcggggccagatcctgtggttccgaggcctgaatcggatccagacacagattgaagtagtcaatactttcaagagcggggcctcctttcagggggccctgcggagacagtcctcggtcaccagccagagccaggatgtagccaatctctctagccctagtcgcgtgtcgttgtccaatgctctttcctctccgaccagccttcctcctgctgcagccgggcgtgag

SEQ ID NO: 328125 - DNA, 8053 bp, Artificial Sequence
  derived and/or modified sequence
agtctgcagaggggcccgggcacgctggctgggctcagccgcggcaccagctgccgcaccgcgattacggggctgcccgccgggaaaccgtgcaggattggtggtgattttcatagccaagagccaccacccctgaccatgtagatgccagttccagggagcagcatgggccccactgaatggagactcctgggtctacagccctgagcccctccggcccctggacctcgtcccacaccggaggacacctcttggagctcaccaccactgtcaccagcccgcctcggccacccccaccccccgggacccggagtcggccgcctggtgccacagctgaccagtgagggtgtgctgaggacagccacaagcagccatcacccggcagcctcttgtccagcgctgacccttgggcccagcccgagcaaggaccgcagcaaacatgggtgacatgaccaacagcgacttttactccaaaaaccaaagaaatgagtcgagccatgggggcgagttcgggtgcacaatggaggagctccgctccctcatggagctgcggggcactgaggctgtggtcaagatcaaggagacttatggggacaccgaagccatctgccggcgcctcaaaacctcacctgttgaaggtttgccgggcaccgctccagacctggaaaagagaaagcaaatttttgggcaaaactttatacctccaaagaagccaaaaaccttcctgcagctcgtgtgggaggcgctgcaggacgtgacgctcatcatcctggagattgccgccatcatctccctggggctgtccttctaccacccgcccggcgagggcaacgaaggatgtgcgacggcccagggtggggcagaggatgaaggagaggcagaggcaggttggatcgagggggccgccattctcctctcagttatctgtgtggtcctggtcacggccttcaatgactggagcaaagagaaacagttccggggcctgcagagccgcatcgagcaggaacagaaatttaccgtggtccgggctggccaggtggtccagatccctgtggctgagatcgtggttggggacatagcccaggtcaaatatggtgacctcctccctgccgacggcctcttcatccagggcaatgacctcaagattgatgaaagctccctaactggagagtctgaccaggtgcgcaagtccgtggacaaggaccccatgctgctgtcaggaacccacgtgatggagggctcaggacggatgttggtgactgctgtgggtgtgaactctcagactggcatcatctttaccctcctgggggctggtggtgaagaggaagagaagaaagacaaaaaaggtgtgaagaagggggatggccttcagctaccagcagcagacggtgcggcagcttcaaatgctgcagatagtgcgaatgccagcctagtcaatggtaaaatgcaggatggcaatgtggacgccagccagagcaaagccaaacaacaggacggggcagccgccatggagatgcagcccctcaagagtgccgagggcggcgacgctgacgacaggaagaaggccagcatgcacaagaaggagaagtccgtgctgcagggcaagctcaccaagctggctgtgcagatcgggaaggcgggcttggtgatgtcagccatcacggtgatcatcctggtgctctacttcactgtggacaccttcgtggtcaacaagaagccgtggctgcctgagtgcacgcccgtctacgtgcagtactttgtcaagttcttcatcattggcgtgacggtgctggtggtcgccgtgcccgaggggctccctctggccgtcaccatctcgttggcctattcggtgaagaaaatgatgaaggacaacaacctggtacgccacctggatgcctgtgagaccatgggcaatgccacagccatctgctcagacaagacaggcacgctgaccaccaatcgcatgacagtggtacaggcctatgtcggcgacgtccactataaagagatccccgaccccagctccatcaacaccaagaccatggagctgctgatcaatgccatcgccatcaacagcgcctacaccaccaagattctgcccccagagaaggagggcgccctgcctcggcaggtgggcaacgtctatgacagcatctccaaattcttgcagttccagctcaccgtcaacgtggtggccgtgattgtggccttcacaggcgcctgcatcacgcaggactcccctctgaaggccgtgcagatgctctgggtgaacctcatcatggacacgtttgcctcgctggcactggccactgagccgcccacggagaccctgctgctgaggaagccgtacggccgcaacaagccgctcatctccaggaccatgatgaagaacatcctgggccatgctgtctaccagcttgccctcatcttcaccctgctctttgttggcgagaagatgttccagatcgacagcgggaggaacgcgcccctgcattcgccaccctcagaacattacaccatcatcttcaacaccttcgtcatgatgcagctcttcaacgagatcaacgcccgcaagatccacggcgagcgcaatgtctttgacggcatcttccggaaccccatcttctgcaccatcgtgctgggcacctttgccatccagatagtgatcgtgcagtttggagggaagccattcagctgctctccactgcagctggaccagtggatgtggtgcatattcattgggttaggagagctcgtttggggccaggtcatcgccaccatcccgaccagcagactcaagttcctcaaggaggcaggcaggctcacacagaaggaggagatcccggaggaggagctcaacgaggacgtggaggagatcgaccacgcggagcgggagctgcggcggggccagatcctgtggttccgaggcctgaatcggatccagacacagatccgcgtcgtgaaggcgttccgtagctctctctatgaaggtttagaaaagcctgaatctcgaacctccatccataacttcatggctcatcctgaattccggatcgaagattcccagccccacatccccctcattgatgacaccgacctggaagaagatgccgcgctcaagcagaactcgagcccgccgtcatccctcaacaagaacaacagcgccatcgacagtgggatcaacctgacgaccgacacaagcaaatcagctacctcttcaagtccagggagccccatccacagcctggagacgtcgctttagctgaggaccctctcgcctgcccgcccgccctcatggaccccgctgccacccgctttccgggcacccatccatccaggcacccaactcacccaagcagcaacgagcaacaatcggaaaccaaatactggagagaaaaccaacgtttccacccacagaccctttctctggctgcgatgctgtttgaactctttttcacttcaaggcaaggggcgggatctccactgggggcttacgggagtgagcggttttcccaaaacaagcccttcctggctcccacccagacatggaccagccatgcacccgcccagccaccacgtcccccgcatgaatgtactgtacactttcaatcctccccttgtttggtttttgggggttggggaggggtttttgtttgtttgtttgttttcttaggcgggaactgcaaacagactcttttctgagactatttatccaatccactggtctgtgagtttttgaaatgcttgcacagcatggtctcagttgtatagattaatttaataactttttgaaattgcagagcttaactcgcctagtagatttgcaccaatggaaccgaagaacttcatagacactcacaaggttatatccatttctttgtatctatatcaacgtatacttttccgagactgtatacgtccatatagataggtagatatatatatatatatataaatatatatacatggatatataaagtttctttgccggcatgttgccttgtttccgcttaaattgctctattttaacttatttatgtcctaaaagaagaatgtaatttgtttacaaacctgtagataacgtctttggctatttgtatggtttaagaacactggtggctgagatgctataaaaacagctcggcccaacagacacttcccctgggttgcatcctggatgttttatgatagccatgctctgatttttgcctgctatttccgttcaataatgtcactaccgtgagaggctcaggcagaagccaaatgctaccgagttgccatcctgaggggtttaacaacatgctccgtagacgaagggagaggaggagagaaggcttcctgggtttgcaacactaacggccatccggcccaaggatgccaggatctgcaaagcactgctcgaagacttttctctcaatgaaactcgcttgagtttactaagagcatttcaaaaataggttctctttggcactgtctgtacagagattgaggtagtgttgaaatattataaatggtattgtgttgatttttttttttatttagtaacttacaggtttgtttccttattaatggcagcatctgagctgttggcatattggatgaggatcagtatggcttgctgcttttatttttatttttgaagaagaatagcctttttctctgcactatttagatccgaatgaaccttatgatgtgtatattgagatgtactcagtgtgattttaaaccaaattgtcttcctgtagtcacaatatatactgtagccttttaacagcaagtcttgctttcccaaacagaaagccattctgaaaccctacagtatcacaggtgagaaaaggtggttattttttccccaagacaacagcactagtaatcccacttaataagagcttatttaattggatgtcagcctcttaactgctaagcactttgtgggtctcagcgtttttcataaaagaacttttgtatttaatacaaagtttgctttgagacttttcagcatatgatcttttttccataaacttgtacagtgcaaaagacattttgaataccatgatcgatgatgtcccatgcttcgaggaaaaccaaacactttccgcctctcttgcaaaatccattcctcatgctgaccctcctcacgatggctgtgtcagcccagccccttcccttctccaggcccagagaactcttccacaaacaagatgagagccactcgggaaaagagccatagtcaactgggagggcctacatctggatggcggtggaaaaacttgagggtttggggttcaaagtcagcccatcccacctggcaaaatcctcctggaaggaggaccttcaagagcgcatcacctgaatgtcgtgaagaagtatctctgaatgtatccaggagaggaactgcataaccaaaggggtgaccagccctcagatgtgcttattggattccagtacaaacgccaccaaagccagcccactgctctcctacaaggaaggaaagatctgcacgtgtaaaacatggggcagccttggaacatggtgttttttggagtttcctttctcacagttttccatctccccacttctttgatcagtcatgtgtccgtgacctcgttccatgacatcaggatagctgtgtttgcacaccatgctccatgttcattcggagccaggaggggttctcagtggagcctggcttagggaacagggagcgatggaagaatgccaacattagcgttggtcttctcttgtcaggaatgaaggatgcttgcacacatgcaccccctcactctcacacttgcacacatacacacacacacacacgaaatggttggtttgtcaaaactcactgtagtacataaagcttgcactctgcgtcctatatctagcagcatggggtacgtttggcagttcactccattagggggtaaataatttatgaccattcatctgtttttatgaatttttttatctagacaataatgtaaataaagaactcaccatctctgttcatttaatactatgcaatggttatgctttcaatcgctggctcttctgactcgtgcagtgtggttctgaaatgtttgtggtttaaaaaaaaaagcaaaaaacaacatcaaacagaacatagtaaatatatctgtaatgtatacttttttctactttgggactgcatcatccacatagcttcttttctgtcctctagacaagggctccaggagtaagtggcagatttggttctgagagctaagctcaccaacttgtctccccctcaacagatgagggaagggcagggagcccgttcagtgactcctggcgctgcagaatcactcatctttggaggtgagcagagagagctctgaggagtttccttcttgcaactcaggcggagctttctttaactcaggagcagcctccattgctcccgccaacccctcaccatggccccttgtccccttgtcccaaccatagcatagagatgacaagagagaggcagtcctatttctgagactggaccaattaaaatgactgcactggctcaaaggactctgaacctgtcttgtcctgggtcctccagttgttggaagccactcttttccccaaccatgctgaaatgccacctttaccacacactgatgtcttacatagacttagatctatttctggaacttctcttctcttcgcttacttgggtgtctcatctggcaccagccatacaattttaactattgtcaatttctaatgtcttattatgtggtgggatgagtcccttcactcttcttttacaaaatttcctagttattctctcacatctattcttccacataaactttaaattgtgcccagtcctccaccccctgtcccattcccacccccaaattctgggctctgtcattccctgtgccatcatcttccccccattgtaattactgtccactcagggctgtgaaatagactatgttctgtaaagagggacaaaaagggcatcctgatcttgagagaagcctgctgttcctcccatcatttcacctgccccctaagcccaggagttgtcatgagaggtcaccaggcccccactcaatctcagcttgggaaccaaagtcacccaccttggttgtgttggggtggacccgccatctgtccctggtccagacgagaaagaggagtctctcctaggcctggagctgggaaagaatgtgtggcccagttgtctgcacttctaattctcatcatggagaaacctttattcctatctccctttcctgaactggttttttgttgtttttgtttcattttgttttggggggatagtttcttgctctttaatttggagtctccagtacctttgggatgcaggcagttcttgcctgggccttctcggaaccctcactcccctagcccactcttgcgctacctgcaggaggctgccaacctggtgcattctgacaagcctcccacccaaatctctctcctgccattgtgtccaaaatcccaccattagaggctcttgtagggaagagcgtttcttgaaggcttttaggccttccagagccaggagggaagtcagacaatagcaggaagtccccaggccttttcaaagttccaaaccaagctctcctgattttaatgtagagatcataccaacccaggtgggggaggagggtccccagccccaggcagcagccatcaccccctccactgaaaacaatattggaggctgctttgggactgcccttctcagccccctaagtctgttttgtaatgcctgtggtgctctccctcctggacctttcctctcgggggtcaccacactttgctaactcttgtgtgcacatattttataatagagtagcgagggaatggtgccgcctccagcttccgtaagctgcccgggctctggggggctctgggacaatcggggctgggaagtgactgtgctcttattgtacactctttatttctctgtatctttggcttgtgctctttgtaattaatgggatttgtctgccttttcaacactatactgagcaataacaataaatgcacacgtggaaatgca

SEQ ID NO: 328126 - DNA, 3600 bp, Artificial Sequence
  derived and/or modified sequence
atgggcgacatgaccaacagcgacttctacagcaagaaccagagaaacgagagcagccacggcggcgagttcggctgcaccatggaggagctgagaagcctgatggagctgagaggcaccgaggccgtggtgaagatcaaggagacctacggcgacaccgaggccatctgcagaagactgaagaccagccccgtggagggcctgcccggcaccgcccccgacctggagaagagaaagcagatcttcggccagaacttcatcccccccaagaagcccaagaccttcctgcagctggtgtgggaggccctgcaggacgtgaccctgatcatcctggagatcgccgccatcatcagcctgggcctgagcttctaccacccccccggcgagggcaacgagggctgcgccaccgcccagggcggcgccgaggacgagggcgaggccgaggccggctggatcgagggcgccgccatcctgctgagcgtgatctgcgtggtgctggtgaccgccttcaacgactggagcaaggagaagcagttcagaggcctgcagagcagaatcgagcaggagcagaagttcaccgtggtgagagccggccaggtggtgcagatccccgtggccgagatcgtggtgggcgacatcgcccaggtgaagtacggcgacctgctgcccgccgacggcctgttcatccagggcaacgacctgaagatcgacgagagcagcctgaccggcgagagcgaccaggtgagaaagagcgtggacaaggaccccatgctgctgagcggcacccacgtgatggagggcagcggcagaatgctggtgaccgccgtgggcgtgaacagccagaccggcatcatcttcaccctgctgggcgccggcggcgaggaggaggagaagaaggacaagaagggcgtgaagaagggcgacggcctgcagctgcccgccgccgacggcgccgccgccagcaacgccgccgacagcgccaacgccagcctggtgaacggcaagatgcaggacggcaacgtggacgccagccagagcaaggccaagcagcaggacggcgccgccgccatggagatgcagcccctgaagagcgccgagggcggcgacgccgacgacagaaagaaggccagcatgcacaagaaggagaagagcgtgctgcagggcaagctgaccaagctggccgtgcagatcggcaaggccggcctggtgatgagcgccatcaccgtgatcatcctggtgctgtacttcaccgtggacaccttcgtggtgaacaagaagccctggctgcccgagtgcacccccgtgtacgtgcagtacttcgtgaagttcttcatcatcggcgtgaccgtgctggtggtggccgtgcccgagggcctgcccctggccgtgaccatcagcctggcctacagcgtgaagaagatgatgaaggacaacaacctggtgagacacctggacgcctgcgagaccatgggcaacgccaccgccatctgcagcgacaagaccggcaccctgaccaccaacagaatgaccgtggtgcaggcctacgtgggcgacgtgcactacaaggagatccccgaccccagcagcatcaacaccaagaccatggagctgctgatcaacgccatcgccatcaacagcgcctacaccaccaagatcctgccccccgagaaggagggcgccctgcccagacaggtgggcaacaagaccgagtgcggcctgctgggcttcgtgctggacctgaagcaggactacgagcccgtgagaagccagatgcccgaggagaagctgtacaaggtgtacaccttcaacagcgtgagaaagagcatgagcaccgtgatcaagctgcccgacgagagcttcagaatgtacagcaagggcgccagcgagatcgtgctgaagaagtgctgcaagatcctgaacggcgccggcgagcccagagtgttcagacccagagacagagacgagatggtgaagaaggtgatcgagcccatggcctgcgacggcctgagaaccatctgcgtggcctacagagacttccccagcagccccgagcccgactgggacaacgagaacgacatcctgaacgagctgacctgcatctgcgtggtgggcatcgaggaccccgtgagacccgaggtgcccgaggccatcagaaagtgccagagagccggcatcaccgtgagaatggtgaccggcgacaacatcaacaccgccagagccatcgccatcaagtgcggcatcatccaccccggcgaggacttcctgtgcctggagggcaaggagttcaacagaagaatcagaaacgagaagggcgagatcgagcaggagagaatcgacaagatctggcccaagctgagagtgctggccagaagcagccccaccgacaagcacaccctggtgaagggcatcatcgacagcacccacaccgagcagagacaggtggtggccgtgaccggcgacggcaccaacgacggccccgccctgaagaaggccgacgtgggcttcgccatgggcatcgccggcaccgacgtggccaaggaggccagcgacatcatcctgaccgacgacaacttcagcagcatcgtgaaggccgtgatgtggggcagaaacgtgtacgacagcatcagcaagttcctgcagttccagctgaccgtgaacgtggtggccgtgatcgtggccttcaccggcgcctgcatcacccaggacagccccctgaaggccgtgcagatgctgtgggtgaacctgatcatggacaccttcgccagcctggccctggccaccgagccccccaccgagaccctgctgctgagaaagccctacggcagaaacaagcccctgatcagcagaaccatgatgaagaacatcctgggccacgccgtgtaccagctggccctgatcttcaccctgctgttcgtgggcgagaagatgttccagatcgacagcggcagaaacgcccccctgcacagcccccccagcgagcactacaccatcatcttcaacaccttcgtgatgatgcagctgttcaacgagatcaacgccagaaagatccacggcgagagaaacgtgttcgacggcatcttcagaaaccccatcttctgcaccatcgtgctgggcaccttcgccatccagatcgtgatcgtgcagttcggcggcaagcccttcagctgcagccccctgcagctggaccagtggatgtggtgcatcttcatcggcctgggcgagctggtgtggggccaggtgatcgccaccatccccaccagcagactgaagttcctgaaggaggccggcagactgacccagaaggaggagatccccgaggaggagctgaacgaggacgtggaggagatcgaccacgccgagagagagctgagaagaggccagatcctgtggttcagaggcctgaacagaatccagacccagatcgaggtggtgaacaccttcaagagcggcgccagcttccagggcgccctgagaagacagagcagcgtgaccagccagagccaggacgtggccaacctgagcagccccagcagagtgagcctgagcaacgccctgagcagccccaccagcctgccccccgccgccgccggcagagagtag

SEQ ID NO: 328127 - DNA, 1299 bp, Artificial Sequence
  derived and/or modified sequence
atgactgttgtacaggcctatgtgggagacgtccactacaaggaaatccctgatccttcgtccattaacaccaaaaccatggagttactgatcaacgccatcgccattaactccgcctacacgactaaaatccttcctcccgagaaagaaggtgccctgccacggcaagtgggtaatgtctatgacagtattagtaagttcctccagtttcaactgaccgtcaacgtggtggccgtgatcgtggcattcactggtgcttgtattacccaggattcaccactgaaggccgtgcaaatgctgtgggtgaatttaatcatggacaccttcgccagcttggccctggccactgaacccccaaccgagacccttctgctgaggaaaccctatgggcgaaataaaccactgatctctaggaccatgatgaagaacatcctgggccacgcggtctaccagcttgctctcatctttacattactgttcgtgggcgaaaaaatgtttcagatagattctgggaggaacgcaccccttcacagcccacccagcgagcattataccattatttttaatacttttgtcatgatgcagctctttaatgaaataaacgctcggaagattcatggagagcggaatgtgttcgatggtatcttcaggaacccgatcttttgtacaattgtgctcggcacatttgccattcagattgtgattgttcaatttggtggcaagccattttcctgtagccccctgcagctggaccagtggatgtggtgcatatttattggtttaggagagttagtgtggggacaggtgattgcgaccatccctacctcccggttgaagtttcttaaagaggcggggagattgacgcagaaagaggaaatccccgaggaggagctgaacgaggacgtcgaagagatagaccatgccgaacgggaattgaggcgcggacaaattctgtggttccgcggcttgaacagaatccagacccagatccgagtggtaaaggcattcagatccagtctatacgagggtctcgaaaagcctgagagccgcaccagtattcacaatttcatggcccaccctgaattccgtatcgaagactcacagccccacatccccctgatcgatgatactgacttagaagaagatgcggcgctcaagcagaattctagtcctcccagtagccttaataagaacaattccgcaattgacagcggtattaatctgaccacagacacatctaaaagcgcgacatcttcttctcccggcagtccaatccattcactggaaacatccctgtag

SEQ ID NO: 328128 - DNA, 1299 bp, Artificial Sequence
  derived and/or modified sequence
atgacagtggtgcaggcctacgtgggagatgtgcactacaaggagatcccagaccccagcagcatcaacaccaagaccatggagctgctgatcaatgccatcgccatcaacagcgcctacaccaccaagatcctgcccccagagaaggagggcgccctgccccggcaggtgggcaatgtgtatgacagcatcagcaagttcctgcagttccagctgactgtgaatgtggtggccgtcatcgtggccttcaccggggcctgcatcacccaggacagccccctgaaggctgtgcagatgctgtgggtgaacctgatcatggacacctttgccagcctggccctggccacagagcccccaacagagaccctgctgctgaggaagccctatggaagaaacaagcccctcatcagcaggaccatgatgaagaacatcctgggccatgctgtgtaccagctggccctgatcttcaccctgctgtttgtgggggagaagatgttccagattgacagcggcagaaatgcccccctgcacagccccccatctgagcactacaccatcatcttcaacacctttgtgatgatgcagctgttcaatgagatcaatgccaggaagatccacggggagagaaatgtgtttgatggcatcttcaggaaccccatcttctgcaccatcgtgctgggcacctttgccatccagatcgtgattgtgcagtttggaggcaagcccttcagctgcagccccctgcagctggaccagtggatgtggtgcatcttcatcggcctgggggagctggtgtggggccaggtgattgccaccatccccaccagccggctgaagttcctgaaggaggccggccgcctgacccagaaggaggagatccctgaggaggagctgaatgaagatgtggaggagattgaccacgccgagcgggagctgcggcggggccagatcctgtggttccggggcctgaaccgcatccagacccagatccgggtggtgaaggccttccgcagcagcctgtatgagggcctggagaagccagagagcaggaccagcatccacaacttcatggcccaccctgagttcagaattgaggacagccagccccacatccccctgattgatgacacagacctggaggaggatgctgccctgaagcagaacagcagcccccccagcagcctgaacaagaacaacagcgccatcgacagcggcatcaacctgaccacagacaccagcaagagcgccaccagcagcagccctggcagccccatccacagcctggagaccagcctgtag

SEQ ID NO: 328129 - DNA, 1299 bp, Artificial Sequence
  derived and/or modified sequence
atgaccgtggtgcaggcctacgtgggcgacgtgcactacaaggagatacctgatccctcatcaatcaacaccaagaccatggagctcctgatcaacgccatcgcgattaactcagcctacacaacaaaaatcttaccaccggaaaaggagggggccctcccaagacaagtaggtaacgtctacgatagcatttcaaaattcttgcagttccagttaaccgtcaacgtcgtcgccgtcattgtggccttcacaggcgcttgtattacccaggacagcccgctcaaagccgtccagatgctatgggttaacttaatcatggacacatttgcttcactcgccctcgccaccgaaccccctactgaaaccctgttactgagaaagccgtacggcagaaacaaacctctcatctctaggacaatgatgaagaacatcctgggccatgctgtctatcagcttgcgctaattttcacgctcttgtttgttggcgaaaagatgtttcagattgactctggacgcaatgcacctctccactcccccccgtcagaacattacactatcatctttaatacatttgtgatgatgcagttgtttaacgaaattaacgctcgcaagattcacggtgagcgaaatgtgttcgacggcatctttcgaaatccaatcttttgcactattgtactgggcacttttgccatccagatcgtgatcgttcagttcgggggcaagccttttagctgcagtcccctgcagctggaccaatggatgtggtgcatattcatcggtcttggtgaactggtttggggacaggttatcgccacaatccctacctcacggctgaaatttctgaaggaagcggggcggctcacccaaaaggaagagatccctgaggaggagctgaacgaagacgttgaggagatagatcacgccgagcgagagctacgcagagggcaaatcttatggtttcggggactgaatcggatacagacgcaaatccgtgtagtcaaagcctttcgttcgtcactgtacgaaggtctggagaaacctgagtccagaaccagcattcacaatttcatggcccatcccgagttcagaatcgaagattctcagccgcacattcccttgattgatgatacggacctcgaagaggacgcagccttgaagcaaaacagttcacctcctagctctctgaacaaaaacaactcagctatcgatagcggaattaatctcactaccgacacatccaagtcagccacctctagctctccgggctcacctatccacagtctcgagacaagcctctag

SEQ ID NO: 328130 - DNA, 1299 bp, Artificial Sequence
  derived and/or modified sequence
atgaccgtggtgcaagcctatgttggggacgttcactacaaagaaattccagacccctctagtattaataccaaaacaatggagttgctgattaatgcaatcgcaattaacagcgcttataccacaaagatcctccctccagaaaaagagggtgccctaccccgtcaagtgggaaacgtgtatgacagtattagcaaattcctgcagttccagctcactgtcaatgtggtggcagtgattgtggcctttacgggagcatgtataacccaagatagccctttgaaagccgtccagatgttgtgggtgaacttgatcatggataccttcgcgagtctagctctggctaccgaaccgccaactgaaaccctgctcctacggaaaccttacggacgcaacaagccccttatatctaggaccatgatgaagaacattctgggccacgctgtgtaccaactcgctctgatattcacgctattgtttgtgggagagaagatgtttcagattgatagcgggcgtaacgcgcctctgcatagccccccaagcgaacattacaccattatcttcaataccttcgtcatgatgcagctatttaatgaaatcaacgctcgcaagatccacggcgagcgtaatgtcttcgacggcatttttcgcaatccaattttttgcaccatagtgcttgggacatttgcaattcagattgtgattgtccaatttggcggtaagccattttcctgctcaccactgcaactggatcaatggatgtggtgtattttcatcggactgggggagctcgtgtgggggcaagtcatcgctaccattccgacctcaaggcttaagtttctcaaagaagcaggtcgtctcactcagaaggaggagatccccgaggaggagctcaatgaagatgtagaagagatagaccacgccgagagagaactgcggagaggtcaaatcctttggtttcggggactcaacaggattcagacccagatcagggttgtgaaggcctttcggtctagcctgtacgagggacttgagaaacccgaaagcagaactagcattcacaattttatggcacatcccgaatttcgaattgaagactctcagccccatataccacttatagatgacaccgatctggaggaagatgcagcacttaagcagaattctagtccaccgtcatctttgaacaaaaataacagcgcgatcgattctgggatcaatcttactaccgacacatccaagagtgccacaagctcctccccaggatctcccattcacagcctggagacatcgctgtag

SEQ ID NO: 328131 - DNA, 1299 bp, Artificial Sequence
  derived and/or modified sequence
atgaccgtggtgcaggcctacgtgggcgacgtgcactacaaggagatccccgaccccagcagcatcaacaccaagaccatggagctgctgatcaacgccatcgccatcaacagcgcctacaccaccaagatcctgccccccgagaaggagggcgccctgcccagacaggtgggcaacgtgtacgacagcatcagcaagttcctgcagttccagctgaccgtgaacgtggtggccgtgatcgtggccttcaccggcgcctgcatcacccaggacagccccctgaaggccgtgcagatgctgtgggtgaacctgatcatggacaccttcgccagcctggccctggccaccgagccccccaccgagaccctgctgctgagaaagccctacggcagaaacaagcccctgatcagcagaaccatgatgaagaacatcctgggccacgccgtgtaccagctggccctgatcttcaccctgctgttcgtgggcgagaagatgttccagatcgacagcggcagaaacgcccccctgcacagcccccccagcgagcactacaccatcatcttcaacaccttcgtgatgatgcagctgttcaacgagatcaacgccagaaagatccacggcgagagaaacgtgttcgacggcatcttcagaaaccccatcttctgcaccatcgtgctgggcaccttcgccatccagatcgtgatcgtgcagttcggcggcaagcccttcagctgcagccccctgcagctggaccagtggatgtggtgcatcttcatcggcctgggcgagctggtgtggggccaggtgatcgccaccatccccaccagcagactgaagttcctgaaggaggccggcagactgacccagaaggaggagatccccgaggaggagctgaacgaggacgtggaggagatcgaccacgccgagagagagctgagaagaggccagatcctgtggttcagaggcctgaacagaatccagacccagatcagagtggtgaaggccttcagaagcagcctgtacgagggcctggagaagcccgagagcagaaccagcatccacaacttcatggcccaccccgagttcagaatcgaggacagccagccccacatccccctgatcgacgacaccgacctggaggaggacgccgccctgaagcagaacagcagcccccccagcagcctgaacaagaacaacagcgccatcgacagcggcatcaacctgaccaccgacaccagcaagagcgccaccagcagcagccccggcagccccatccacagcctggagaccagcctgtag

SEQ ID NO: 328132 - DNA, 1799 bp, Artificial Sequence
  derived and/or modified sequence
aattggatatgggtattgtagctgaaacgtcttgcgagctgagtcagggtcggggaagctgtgatggcaatgagaagtcaacacactgaggatggagagaaagaagatgagtctgggagagaaagagaatgattcttctggccgagggaaagcaagaatatctgttcctgcaactgcactgattctagaaacactctctattcgaactctcatgaggtgctgacctgcttggtgaatgctgggatctctggaagagggaggcagacatcacacaccagctggcaagtgggagctggcatgcaacatgccccaataccactcccctcctgccatccctatctcctaatggtgcctccttttggccaaacccacctttggctggagggcaacagagcccattgacgtggtccccttgcatctgctacctggggagaaaagcaggatggacactgaatctagagaaatgaagaaacccatccagaagaatactgcttctttatgtttttgtaggtgtacaaatcaggcctccccatgatattctaaactccttgaggaaagaagtggagtcctgggcttctgatgtagcctccacagtgctcaggggatagcgacactggcaccctatagatatttaattacatgtggactggaagagaccaaacagcttcctggtatttcaatcaaacccggtgctctagacctgtggctcactctgagcaaactataatgagttgaacttgaatctgattcctgctaagaaaggtttcattttaataggcagtaaggctatgagctaacaccagaattcattcgagttactagactcactgaaactcctcacaggatccatctttcatgttttctagattttggtattcttatctaaactgcagacccagaaaccctatggaccctacctttccaattatatttctgggaagagtcattctctgcagagctgaagcatgtaacagaaagttctcaacctgaaaaatataccttctgcgcccaagccccactttctgccactatttggtaatctcaagtgggtgaggtggtctctgaacttcagcgctctcatggtcagagccacaaggggttactgggaggctaaagggaagtggcaaacgtggctgagattcagaaagaaaagcagcaagtgtagagaggcaaggacttttccatcttttaaattccttaaaggaagccaaagttcattttccagtctccttcagatgcctctccaatccttcacagcagcgcacacataccgcagaaggaactcaccatcacaaaaagatgacagagcactgggggctggggtgccacttgtgttggctgagagcctggatgcatgtgaggtcaagcctgaccttgggaaagctgctctctggacattacttgctgtgccacatacacagcttgggtttctgaggaaacaacacaggctctaaggaggaactggaacggggcccagggtatatcttttacagcccgtacttttgaggaaaatagaagacaaaaggtttttaaaaaacacaaagtgtatacacgtatacacaaagtttacaagtttgtgtgttttaacatctactctccttaagaacaagtagacaggaaagatattacctgatatgggttaaattgtgtccccaaaaacatgttttgaagtgctaacctttggtacctgtggatatgaccttacttggaaataggtttttgcagacgtaaccaagttaagatgaggtcatatttgattaggctgaaccctgaatccagtatgactggggtccttatat

SEQ ID NO: 328133 - protein, 39 aa, Artificial Sequence
  derived and/or modified sequence
MTGFFKGAEDRYSSHLWRPQGGPRSKGPGPRSWNTESLR

SEQ ID NO: 328134 - DNA, 120 bp, Artificial Sequence
  derived and/or modified sequence
atgaccggcttcttcaagggcgccgaggacagatacagcagccacctgtggagaccccagggcggccccagaagcaagggccccggccccagaagctggaacaccgagagcctgagatag

SEQ ID NO: 328135 - DNA, 120 bp, Artificial Sequence
  derived and/or modified sequence
atgactggcttcttcaagggcgcggaagacagatactcttctcatttatggcgaccacaaggagggccacgctccaaaggcccggggcctcggtcgtggaacaccgaaagcctacggtag

SEQ ID NO: 328136 - DNA, 120 bp, Artificial Sequence
  derived and/or modified sequence
atgaccggcttcttcaagggcgccgaggaccggtacagcagccacttgtggcgacctcaagggggacctaggagcaaaggaccggggccaaggtcatggaacacagagtccctccgatag

SEQ ID NO: 328137 - DNA, 120 bp, Artificial Sequence
  derived and/or modified sequence
atgacaggcttttttaaaggcgcagaagaccggtactcgtcccatttatggcggccacagggtggtcccagaagcaagggtcccggaccgaggtcctggaacaccgagagcttaaggtag

SEQ ID NO: 328138 - DNA, 342 bp, Artificial Sequence
  derived and/or modified sequence
gaggagcgggcagagtacacagctgacatcatcagcaccaccgtggccgagccctaccgcacctgcttcaccgctgggggcagcaagaccagccctgtggagcagcagcctgagcagcagcagccccaggacatcgtgtccctgcccctgccccccctgccccacgccaccccagaccccttcaccctgtacagccacaggacagagagcgctgggggccacctgttcctgccccaggacctgcgctggaagagccctggcctgggcgtgtttgctgtgcagagcgtgtatgagctggcccggcggcacaacgtgagccccttctacagcggccccccatag

SEQ ID NO: 328139 - DNA, 411 bp, Artificial Sequence
  derived and/or modified sequence
cgcagcaggacaggccctgtgtccctgcagggcgaccccaagcaggccccctggagcagcagccagagcaacagcagcaggaagaccctcttcctgagcctgtgcccccccttccccacccagccccagatccacctgcacttcacagagcaccgggccagcagccaccagggcggccccttcaagctgcagatctgcctgagcagcctgtacagcaacctgctgctgcactgccactaccgggaggtgcaccacatgagcggccacaggacagaatctgctgggggccacctgttcctgccccaggacctgcgctggaagagccctggcctgggcgtgtttgctgtgcagagcgtgtatgagctggcccggcggcacaacgtgagccccttctacagcggccccccatag

SEQ ID NO: 328140 - DNA, 2655 bp, Artificial Sequence
  derived and/or modified sequence
aggcgctgtagcttcggggatcccccgaggctgctcggcccggccccacctccgccgtgggtcccggccctacccaccctagctcaggccggcagagccagcgctcgcggatgcggctggtgcgcagtagcgggcctggccagcggctcggggcttgcagggagggcggatctcgggtcggacccgcagccccagacgccgggcttgggggttccccccgccccggcctcctgccagtcactaccacccctagcctctccaactgagctcggcgccgggagaggattaagtttgatcactatgatcatctcacccacagacagaggatgcagggcttcatttttgttcccaaaaacaggggcaccgtagatacgtaaacacccaggaaggcagggggctccctttatccaaggaggtggctgtgcaggtggccaccacaggtggcaggaaccacaggctggggcactccggagtcaggagtgagtgggcaggttgactggcatcaggcagcctctcagccagggccctctccgcatcagcatgaactccaggaccgcatctgctaggggctggttcagcagccgcccacccacctctgagtctgacctggaacctgccacagatgggccagcctccgagaccactaccctcagcccagaggccaccacctttaatgacaccagaatccctgatgcagctggtggcacggccggcgtgggtaccatgcttctgtcctttgggatcatcacggtgataggcctggctgtggccttggttttgtacatcaggaagaagaagaggctggagaagctacgccaccagctcatgcccatgtacaacttcgaccccacggaggaacaagatgagttggagcaggagctgctggagcatgggcgggacgccgcctctgtacaggctgctacttctgtgcaggccatgcagggcaagactactctgccctcccagggcccactgcagagacccagccggctggtgtttaccgatgtggccaatgccatccatgcgtgagtggcctgggacaagcctggacttctgatagagacccatcacggtgcctacagagctccccactccctgattgtcaagacctactctgaagatcttccctgccaagacacaagagggctgagccaggtcctagctgttctccagacccacctgctgactttagactctaagagagggccctagccaggctggacttctgaccactgacttctcctgacctgagggccctggcacagagggcatccctcatgctgagaaggtcaagagcctctgctggcttcctcatcccctgtccagatccctcacatcagggtctgccccgctaatgtggaggaaatgagggagatacggagtgggagggattgggggaggaaaggggaggtttccctctgttagggagagacctgttttttggaatctggagcctcctctggggtggggagaggaaaccacccaagttatagggacagggtagggcagcatctgttatgggccctgagaagcccagagatggagctgaaactgtccagtatgcaaggatgccaggagaagggcaattcacacccagggtccatccatactacggagggtccaggaggtctcccagccacccatccttggcaaccagatgttactggggccaagctaggatgggagctgagggggaaggaagtaggggaatggaagtggaaggatgcagcccccccagacctgccgagaggcctcatgcatgtgcatgagtgtgcccatgggcagacatgtgcctgtcccagcacagcgggcagaatgagattgtccacactggccccaccctccaagtcgacctctaccccatggtatgtagtggagcatcagggtaggctatcttctctgccttcaatcttcagggactgcagggaagagggaagcacgcacagcacggttcctctctccactgcattgtttcactgggctcacctgcttctgaaaacggctccctgtcttgggctctaatgaggatctggggttgggagaggctgttggtctgagggcagtaatcacaggctgcaggctagagggggcagttatgactgcctgaaagtgggtgagggattgcacttcagaaaaacatctaaaaaacttagtctatgtttgaattccccacctccatcccatctatgggaagagccgttcagtgtttagagagtggggagatgggtccctgcacttggcctctccataagccttggagggtcagggctgataccaggggtcctggcaagccattgggcagagacagaccacaagagcagggcatttttttacgctgggcatacatatgcacacaagcatgcacagaggcatgtcccgtgcccagcctctccaccgtcactgtccgctgctggctggaggggatgcaggggtagtgtatgcagaccttccactgggcaaatgccatgtgtcaggagggaaaggcctaggaagcccccatggggaaggttctggatttattccctcctctaaatgctataaatacgttagcacttgagtcgactggaggctgccaggaattcaggatgcatacagctgtaatttaacccagagcagctccacgtgagagcattaaagatgtaatgaagatgttta

SEQ ID NO: 328141 - DNA, 2480 bp, Artificial Sequence
  derived and/or modified sequence
ggccggcagagccagcgctcgcggatgcggctggtgcgcagtagcgggcctggccagcggctcggggcttgcagggagggcggatctcgggtcggacccgcagccccagacgccgggcttgggggttccccccgccccggcctcctgccagtcactaccacccctagcctctccaactgagctcggcgccgggagaggattaacacccaggaaggcagggggctccctttatccaaggaggtggctgtgcaggtggccaccacaggtggcaggaaccacaggctggggcactccggagtcaggagtgagtgggcaggttgactggcatcaggcagcctctcagccagggccctctccgcatcagcatgaactccaggaccgcatctgctaggggctggttcagcagccgcccacccacctctgagtctgacctggaacctgccacagatgggccagcctccgagaccactaccctcagcccagaggccaccacctttaatgacaccagaatccctgatgcagctggtggcacggccggcgtgggtaccatgcttctgtcctttgggatcatcacggtgataggcctggctgtggccttggttttgtacatcaggaagaagaagaggctggagaagctacgccaccagctcatgcccatgtacaacttcgaccccacggaggaacaagatgagttggagcaggagctgctggagcatgggcgggacgccgcctctgtacaggctgctacttctgtgcaggccatgcagggcaagactactctgccctcccagggcccactgcagagacccagccggctggtgtttaccgatgtggccaatgccatccatgcgtgagtggcctgggacaagcctggacttctgatagagacccatcacggtgcctacagagctccccactccctgattgtcaagacctactctgaagatcttccctgccaagacacaagagggctgagccaggtcctagctgttctccagacccacctgctgactttagactctaagagagggccctagccaggctggacttctgaccactgacttctcctgacctgagggccctggcacagagggcatccctcatgctgagaaggtcaagagcctctgctggcttcctcatcccctgtccagatccctcacatcagggtctgccccgctaatgtggaggaaatgagggagatacggagtgggagggattgggggaggaaaggggaggtttccctctgttagggagagacctgttttttggaatctggagcctcctctggggtggggagaggaaaccacccaagttatagggacagggtagggcagcatctgttatgggccctgagaagcccagagatggagctgaaactgtccagtatgcaaggatgccaggagaagggcaattcacacccagggtccatccatactacggagggtccaggaggtctcccagccacccatccttggcaaccagatgttactggggccaagctaggatgggagctgagggggaaggaagtaggggaatggaagtggaaggatgcagcccccccagacctgccgagaggcctcatgcatgtgcatgagtgtgcccatgggcagacatgtgcctgtcccagcacagcgggcagaatgagattgtccacactggccccaccctccaagtcgacctctaccccatggtatgtagtggagcatcagggtaggctatcttctctgccttcaatcttcagggactgcagggaagagggaagcacgcacagcacggttcctctctccactgcattgtttcactgggctcacctgcttctgaaaacggctccctgtcttgggctctaatgaggatctggggttgggagaggctgttggtctgagggcagtaatcacaggctgcaggctagagggggcagttatgactgcctgaaagtgggtgagggattgcacttcagaaaaacatctaaaaaacttagtctatgtttgaattccccacctccatcccatctatgggaagagccgttcagtgtttagagagtggggagatgggtccctgcacttggcctctccataagccttggagggtcagggctgataccaggggtcctggcaagccattgggcagagacagaccacaagagcagggcatttttttacgctgggcatacatatgcacacaagcatgcacagaggcatgtcccgtgcccagcctctccaccgtcactgtccgctgctggctggaggggatgcaggggtagtgtatgcagaccttccactgggcaaatgccatgtgtcaggagggaaaggcctaggaagcccccatggggaaggttctggatttattccctcctctaaatgctataaatacgttagcacttgagtcgactggaggctgccaggaattcaggatgcatacagctgtaatttaacccagagcagctccacgtgagagcattaaagatgtaatgaagatgttta

SEQ ID NO: 328142 - DNA, 1490 bp, Artificial Sequence
  derived and/or modified sequence
accctagctcaggccggcagagccagcgctcgcggatgcggctggtgcgcagtagcgggcctggccagcggctcggggcttgcagggagggcggatctcgggtcggacccgcagccccagacgccgggcttgggggttccccccgccccggcctcctgccagtcactaccacccctagcctctccaactgagctcggcgccgggagaggattaacatgaactccaggaccgcatctgctaggggctggttcagcagccgcccacccacctctgagtctgacctggaacctgccacagatgggccagcctccgagaccactaccctcagcccagaggccaccacctttaatgacaccagaatccctgatgcagctggtggcacggccggcgttttgtacatcaggaagaagaagaggctggagaagctacgccaccagctcatgcccatgtacaacttcgaccccacggaggaacaagatgagttggagcaggagctgctggagcatgggcgggacgccgcctctgtacaggctgctacttctgtgcaggccatgcagggcaagactactctgccctcccagggcccactgcagagacccagccggctggtgtttaccgatgtggccaatgccatccatgcgtgagtggcctgggacaagcctggacttctgatagagacccatcacggtgcctacagagctccccactccctgattgtcaagacctactctgaagatcttccctgccaagacacaagagggctgagccaggtcctagctgttctccagacccacctgctgactttagactctaagagagggccctagccaggctggacttctgaccactgacttctcctgacctgagggccctggcacagagggcatccctcatgctgagaaggtcaagagcctctgctggcttcctcatcccctgtccagatccctcacatcagggtctgccccgctaatgtggaggaaatgagggagatacggagtgggagggattgggggaggaaaggggaggtttccctctgttagggagagacctgttttttggaatctggagcctcctctggggtggggagaggaaaccacccaagttatagggacagggtagggcagcatctgttatgggccctgagaagcccagagatggagctgaaactgtccagtatgcaaggatgccaggagaagggcaattcacacccagggtccatccatactacggagggtccaggaggtctcccagccacccatccttggcaaccagatgttactggggccaagctaggatgggagctgagggggaaggaagtaggggaatggaagtggaaggatgcagcccccccagacctgccgagaggcctcatgcatgtgcatgagtgtgcccatgggcagacatgtgcctgtcccagcacagcgggcagaatgagattgtccacactggccccaccctccaagtcgacctctaccccatggtatgtagtg

SEQ ID NO: 328143 - DNA, 2365 bp, Artificial Sequence
  derived and/or modified sequence
gaggtcacaagctctggtgccccaaaatggctctggtcctcagatatagttggttgccaccctgggagtgagaggaaccaggaaagcagcacccaggaaggcagggggctccctttatccaaggaggtggctgtgcaggtggccaccacaggtggcaggaaccacaggctggggcactccggagtcaggagtgagtgggcaggttgactggcatcaggcagcctctcagccagggccctctccgcatcagcatgaactccaggaccgcatctgctaggggctggttcagcagccgcccacccacctctgagtctgacctggaacctgccacagatgggccagcctccgagaccactaccctcagcccagaggccaccacctttaatgacaccagaatccctgatgcagctggtggcacggccggcgtgggtaccatgcttctgtcctttgggatcatcacggtgataggcctggctgtggccttggttttgtacatcaggaagaagaagaggctggagaagctacgccaccagctcatgcccatgtacaacttcgaccccacggaggaacaagatgagttggagcaggagctgctggagcatgggcgggacgccgcctctgtacaggctgctacttctgtgcaggccatgcagggcaagactactctgccctcccagggcccactgcagagacccagccggctggtgtttaccgatgtggccaatgccatccatgcgtgagtggcctgggacaagcctggacttctgatagagacccatcacggtgcctacagagctccccactccctgattgtcaagacctactctgaagatcttccctgccaagacacaagagggctgagccaggtcctagctgttctccagacccacctgctgactttagactctaagagagggccctagccaggctggacttctgaccactgacttctcctgacctgagggccctggcacagagggcatccctcatgctgagaaggtcaagagcctctgctggcttcctcatcccctgtccagatccctcacatcagggtctgccccgctaatgtggaggaaatgagggagatacggagtgggagggattgggggaggaaaggggaggtttccctctgttagggagagacctgttttttggaatctggagcctcctctggggtggggagaggaaaccacccaagttatagggacagggtagggcagcatctgttatgggccctgagaagcccagagatggagctgaaactgtccagtatgcaaggatgccaggagaagggcaattcacacccagggtccatccatactacggagggtccaggaggtctcccagccacccatccttggcaaccagatgttactggggccaagctaggatgggagctgagggggaaggaagtaggggaatggaagtggaaggatgcagcccccccagacctgccgagaggcctcatgcatgtgcatgagtgtgcccatgggcagacatgtgcctgtcccagcacagcgggcagaatgagattgtccacactggccccaccctccaagtcgacctctaccccatggtatgtagtggagcatcagggtaggctatcttctctgccttcaatcttcagggactgcagggaagagggaagcacgcacagcacggttcctctctccactgcattgtttcactgggctcacctgcttctgaaaacggctccctgtcttgggctctaatgaggatctggggttgggagaggctgttggtctgagggcagtaatcacaggctgcaggctagagggggcagttatgactgcctgaaagtgggtgagggattgcacttcagaaaaacatctaaaaaacttagtctatgtttgaattccccacctccatcccatctatgggaagagccgttcagtgtttagagagtggggagatgggtccctgcacttggcctctccataagccttggagggtcagggctgataccaggggtcctggcaagccattgggcagagacagaccacaagagcagggcatttttttacgctgggcatacatatgcacacaagcatgcacagaggcatgtcccgtgcccagcctctccaccgtcactgtccgctgctggctggaggggatgcaggggtagtgtatgcagaccttccactgggcaaatgccatgtgtcaggagggaaaggcctaggaagcccccatggggaaggttctggatttattccctcctctaaatgctataaatacgttagcacttgagtcgactggaggctgccaggaattcaggatgcatacagctgtaatttaacccagagcagctccacgtgagagcattaaagatgtaatgaagatgttt

SEQ ID NO: 328144 - protein, 142 aa, Artificial Sequence
  derived and/or modified sequence
MNSRTASARGWFSSRPPTSESDLEPATDGPASETTTLSPEATTFNDTRIPDAAGGTAGVLYIRKKKRLEKLRHQLMPMYNFDPTEEQDELEQELLEHGRDAASVQAATSVQAMQGKTTLPSQGPLQRPSRLVFTDVANAIHA

SEQ ID NO: 328145 - DNA, 429 bp, Artificial Sequence
  derived and/or modified sequence
atgaacagcagaaccgccagcgccagaggctggttcagcagcagaccccccaccagcgagagcgacctggagcccgccaccgacggccccgccagcgagaccaccaccctgagccccgaggccaccaccttcaacgacaccagaatccccgacgccgccggcggcaccgccggcgtgctgtacatcagaaagaagaagagactggagaagctgagacaccagctgatgcccatgtacaacttcgaccccaccgaggagcaggacgagctggagcaggagctgctggagcacggcagagacgccgccagcgtgcaggccgccaccagcgtgcaggccatgcagggcaagaccaccctgcccagccagggccccctgcagagacccagcagactggtgttcaccgacgtggccaacgccatccacgcctag

SEQ ID NO: 328146 - DNA, 429 bp, Artificial Sequence
  derived and/or modified sequence
atgaactccaggactgctagtgctcgcggctggtttagctcacggccacccactagcgagagtgacctggagcccgctactgatggacccgccagcgaaacgacgacactcagcccagaggctactacctttaatgacactcgaatcccagatgctgctggcggaactgccggggtgctgtacatccggaagaaaaaacgattagagaaattacggcaccaactgatgcctatgtataactttgatcccacagaagaacaagatgagctggagcaggagctccttgagcacgggagagatgctgcgtcagtccaagctgctacatcagtccaagctatgcagggaaaaacaacactgccgagccaggggcccctccagcgcccatcacgcctggttttcacagatgtggctaacgcgatccatgcatag

SEQ ID NO: 328147 - DNA, 429 bp, Artificial Sequence
  derived and/or modified sequence
atgaacagcaggacagccagcgcccggggctggttcagcagccggccccccaccagcgagagtgacctggagcccgccacagatggccctgccagcgagaccaccaccctgagccctgaggccaccaccttcaatgacacccgcatcccagatgctgctgggggcacagctggggtgctgtacatcaggaagaagaagaggctggagaagctgcggcaccagctgatgcccatgtacaactttgaccccacagaggagcaggatgagctggagcaggagctgctggagcacggcagagatgctgcctctgtgcaggccgccacctctgtgcaggccatgcagggcaagaccaccctgcccagccagggccccctgcagaggcccagccggctggtgttcacagatgtggccaatgccatccacgcctag

SEQ ID NO: 328148 - DNA, 429 bp, Artificial Sequence
  derived and/or modified sequence
atgaacagccggaccgccagcgcccggggctggttcagcagccggccacccacctcggaatctgatctggagccagccaccgatggccctgcctccgaaactaccacgctgtccccggaagctacaacctttaacgatacacgaattccagatgctgctggcggtaccgccggcgttttatatatcaggaagaagaaaaggttagagaagttgcggcaccagctcatgccaatgtataattttgaccctaccgaggaacaggacgagcttgagcaggagctattagagcacggaagagacgccgcatccgttcaggccgcgacttccgtgcaggccatgcagggtaaaacaactctgccctcccagggtcctctccagaggccatcaagattagtcttcactgatgttgcaaacgccattcacgcttag

SEQ ID NO: 328149 - DNA, 429 bp, Artificial Sequence
  derived and/or modified sequence
atgaattctcgcacagctagtgcacgaggctggttttctagtaggcccccaactagtgaatccgatctcgagcccgctaccgacggccctgcctccgagaccaccaccctttcacccgaagctaccacgtttaatgatacccgcattcccgacgccgcaggcggtaccgccggagtcctgtacatccggaagaaaaagcggctggagaaattacgacaccagctcatgccgatgtataatttcgaccccactgaggagcaggatgagttagagcaagagttgttggaacacggaagagacgcagcctcagtgcaagccgctacaagcgtacaggctatgcagggaaagactacactcccttctcagggacctctgcaacgtccatcccggctcgtcttcacagatgtcgctaatgctattcacgcgtag

SEQ ID NO: 328150 - protein, 25 aa, Artificial Sequence
  derived and/or modified sequence
MSDLLLLGLIGGLTLLLLLTLLAFA

SEQ ID NO: 328151 - protein, 140 aa, Artificial Sequence
  derived and/or modified sequence
MSDLLLLGLIGGLTLLLLLTLLAFAGYSGLLAGVEVSAGSPPIRNVTVAYKFHMGLYGETGRLFTESCSISPKLRSIAVYYDNPHMVPPDKCRCAVGSILSEGEESPSPELIDLYQKFGFKVFSFPAPSHVVTATFPYTT

SEQ ID NO: 328152 - DNA, 1555 bp, Artificial Sequence
  derived and/or modified sequence
cgggcggctgctgaggtgagggccgggccagaggagaggcatacccactggggcgtaggtctgggactccccctgtccgccctggcgcgacctcaggactctccgtgtcccctccgtgacccccgcggcccgggccgctctttgcatcttgtcttgcccacagctggcctcggccaggtccgagggcctggatgcgaccttggggcagcccctactcttccgggcagcccacttccgcggccaccggtgcagggcatgccccggggccgtggagctgccttgaggtgcagtgttggggatccagagccatgtcggacctgctactactgggcctgattgggggcctgactctcttactgctgctgacgctgctggcctttgccgggtactcagggctactggctggggtggaagtgagtgctgggtcaccccccatccgcaacgtcactgtggcctacaagttccacatggggctctatggtgagactgggcggcttttcactgagagctgcagcatctctcccaagctccgctccatcgctgtctactatgacaacccccacatggtgccccctgataagtgccgatgtgccgtgggcagcatcctgagtgaaggtgaggaatcgccctcccctgagctcatcgacctctaccagaaatttggcttcaaggtgttctccttcccggcacccagccatgtggtgacagccaccttcccctacaccaccattctgtccatctggctggctacccgccgtgtccatcctgccttggacacctacatcaaggagcggaagctgtgtgcctatcctcggctggagatctaccaggaagaccagatccatttcatgtgcccactggcacggcagggagacttctatgtgcctgagatgaaggagacagagtggaaatggcgggggcttgtggaggccattgacacccaggtggatggcacaggagctgacacaatgagtgacacgagttctgtaagcttggaagtgagccctggcagccgggagacttcagctgccacactgtcacctggggcgagcagccgtggctgggatgacggtgacacccgcagcgagcacagctacagcgagtcaggtgccagcggctcctcttttgaggagctggacttggagggcgaggggcccttaggggagtcacggctggaccctgggactgagcccctggggactaccaagtggctctgggagcccactgcccctgagaagggcaaggagtaacccatggcctgcaccctcctgcagtgcagttgctgaggaactgagcagactctccagcagactctccagccctcttcctccttcctctgggggaggaggggttcctgagggacctgacttcccctgctccaggcctcttgctaagccttctcctcactgccctttaggctcccagggccagaggagccagggactattttctgcaccagcccccagggctgccacccctgttgtgtctttttttcagactcacagtggagcttccaggacccagaataaagccaatgatttacttgtttcacctg

SEQ ID NO: 328153 - DNA, 596 bp, Artificial Sequence
  derived and/or modified sequence
gaaccctgagccgcctgcgcggatcggcgtccgcagcgggcggctgctgaggggtgactgttctttcagctcccagcactggagcgctcggcccctgccgcactggatgccagcagttactaaaagtgagcctggcatttcagctgccttgaggtgcagtgttggggatccagagccatgtcggacctgctactactgggcctgattgggggcctgactctcttactgctgctgacgctgctggcctttgccgggtactcagggctactggctggggtggaagtgagtgctgggtcaccccccatccgcaacgtcactgtggcctacaagttccacatggggctctatggtgagactgggcggcttttcactgagagctgcagcatctctcccaagctccgctccatcgctgtctactatgacaacccccacatggtgccccctgataagtgccgatgtgccgtgggcagcatcctgagtgaaggtgaggaatcgccctcccctgagctcatcgacctctaccagaaatttggcttcaaggtgttctccttcccggcacccagccatgtggtgacagccaccttcccctacaccac

SEQ ID NO: 328154 - DNA, 2290 bp, Artificial Sequence
  derived and/or modified sequence
cgcggatcggcgtccgcagcgggcggctgctgaggtgagggccgggccagaggagaggcatacccactggggcgtaggtctgggactccccctgtccgccctggcgcgacctcaggactctccgtgtcccctccgtgacccccgcggcccgggccgctctttgcatcttgtcttgcccacagctggcctcggccaggtccgagggcctggatgcgaccttggggcagcccctactcttccgggcagcccacttccgcggccaccggtgcagggcatgccccggggccgtggaggtgagggaaagaggcgcgagtcgcgttttaactccgcccccgtcccccaaggccgcgcctcgcagcctgggctgcaaactttagcgtcctttaagttacagacgtgcgtggggctccgtgaggaggtgggcgaagagaaaggctctgagtaaataggcaaggcccggggtgagcaggggctggaatccgaaagtgggaggcggcggccccccaccctccatagtccttccgccctctgctagcaccgaagtttagcccaggacgggggccgtttaagggcccggccctccgccgccgcgcacgtgagcggcaccaggaagctggctgggcgcagccttccctgaggctcgctggcaccggccgcacgcgtccatcccgggcctctgagcggagggggagccgaggctagagggagggcgcagtctgcccaaggtcagcggcagcggcagtttctgggcgccaagtgtgattggagtactccaggaagaggggcgtgaccagagctctagcgaagagacctgacattgtaaagctaggtttggcttctgatttccacagggggtttgagaatgggacgagggtgctttagagggaccggtaggctttccctgaggacggtaatcagggcatgatggttggctcagtggttatttcctgggcaggggtgactgttctttcagctcccagcactggagcgctcggcccctgccgcactggatgccagcagttactaaaagtgagcctggcatttcagctgccttgaggtgcagtgttggggatccagagccatgtcggacctgctactactgggcctgattgggggcctgactctcttactgctgctgacgctgctggcctttgccgggtactcagggctactggctggggtggaagtgagtgctgggtcaccccccatccgcaacgtcactgtggcctacaagttccacatggggctctatggtgagactgggcggcttttcactgagagctgcagcatctctcccaagctccgctccatcgctgtctactatgacaacccccacatggtgccccctgataagtgccgatgtgccgtgggcagcatcctgagtgaaggtgaggaatcgccctcccctgagctcatcgacctctaccagaaatttggcttcaaggtgttctccttcccggcacccagccatgtggtgacagccaccttcccctacaccaccattctgtccatctggctggctacccgccgtgtccatcctgccttggacacctacatcaaggagcggaagctgtgtgcctatcctcggctggagatctaccaggaagaccagatccatttcatgtgcccactggcacggcagggagacttctatgtgcctgagatgaaggagacagagtggaaatggcgggggcttgtggaggccattgacacccaggtggatggcacaggagctgacacaatgagtgacacgagttctgtaagcttggaagtgagccctggcagccgggagacttcagctgccacactgtcacctggggcgagcagccgtggctgggatgacggtgacacccgcagcgagcacagctacagcgagtcaggtgccagcggctcctcttttgaggagctggacttggagggcgaggggcccttaggggagtcacggctggaccctgggactgagcccctggggactaccaagtggctctgggagcccactgcccctgagaagggcaaggagtaacccatggcctgcaccctcctgcagtgcagttgctgaggaactgagcagactctccagcagactctccagccctcttcctccttcctctgggggaggaggggttcctgagggacctgacttcccctgctccaggcctcttgctaagccttctcctcactgccctttaggctcccagggccagaggagccagggactattttctgcaccagcccccagggctgccacccctgttgtgtctttttttcagactcacagtggagcttccag

SEQ ID NO: 328155 - DNA, 1313 bp, Artificial Sequence
  derived and/or modified sequence
ccgggccagaggagaggcatacccactggggcgtagctgccttgaggtgcagtgttggggatccagagccatgtcggacctgctactactgggcctgattgggggcctgactctcttactgctgctgacgctgctggcctttgccgggtactcagggctactggctggggtggaagtgagtgctgggtcaccccccatccgcaacgtcactgtggcctacaagttccacatggggctctatggtgagactgggcggcttttcactgagagctgcagcatctctcccaagctccgctccatcgctgtctactatgacaacccccacatggtgccccctgataagtgccgatgtgccgtgggcagcatcctgagtgaaggtgaggaatcgccctcccctgagctcatcgacctctaccagaaatttggcttcaaggtgttctccttcccggcacccagccatgtggtgacagccaccttcccctacaccaccattctgtccatctggctggctacccgccgtgtccatcctgccttggacacctacatcaaggagcggaagctgtgtgcctatcctcggctggagatctaccaggaagaccagatccatttcatgtgcccactggcacggcagggagacttctatgtgcctgagatgaaggagacagagtggaaatggcgggggcttgtggaggccattgacacccaggtggatggcacaggagctgacacaatgagtgacacgagttctgtaagcttggaagtgagccctggcagccgggagacttcagctgccacactgtcacctggggcgagcagccgtggctgggatgacggtgacacccgcagcgagcacagctacagcgagtcaggtgccagcggctcctcttttgaggagctggacttggagggcgaggggcccttaggggagtcacggctggaccctgggactgagcccctggggactaccaagtggctctgggagcccactgcccctgagaagggcaaggagtaacccatggcctgcaccctcctgcagtgcagttgctgaggaactgagcagactctccagcagactctccagccctcttcctccttcctctgggggaggaggggttcctgagggacctgacttcccctgctccaggcctcttgctaagccttctcctcactgccctttaggctcccagggccagaggagccagggactattttctgcaccagcccccagggctgccacccctgttgtgtctttttttcagactcacagtggagcttccaggacccagaataaagccaatgatttacttgtttca

SEQ ID NO: 328156 - DNA, 531 bp, Artificial Sequence
  derived and/or modified sequence
tagggggtcattgcctcaatagttccctcttggtgactggccagccctgtggtgacaggcacccagtgctggacttaaggggccacaagcgaaagttggccacaccacctgctgcccaggagtcatcccgccggcggtccaggaagggtcatctgccagcccccgtgcagccgtatgaacacggctgccttgaggtgcagtgttggggatccagagccatgtcggacctgctactactgggcctgattgggggcctgactctcttactgctgctgacgctgctggcctttgccgggtactcagggctactggctggggtggaagtgagtgctgggtcaccccccatccgcaacgtcactgtggcctacaagttccacatggggctctatggtgagactgggcggcttttcactgagagctgcagcatctctcccaagctccgctccatcgctgtctactatgacaacccccacatggtgccccctgataagtgccgatgtgccgtgggcagcatcctgagtgaaggtgagg

SEQ ID NO: 328157 - DNA, 583 bp, Artificial Sequence
  derived and/or modified sequence
gagccgcctgcgcggatcggcgtccgcagcgggcggctgctgaggggaaattcacgttacctctccacgtgccgaccaaggctctgagacccccagctgccttgaggtgcagtgttggggatccagagccatgtcggacctgctactactgggcctgattgggggcctgactctcttactgctgctgacgctgctggcctttgccgggtactcagggctactggctggggtggaagtgagtgctgggtcaccccccatccgcaacgtcactgtggcctacaagttccacatggggctctatggtgagactgggcggcttttcactgagagctgcagcatctctcccaagctccgctccatcgctgtctactatgacaacccccacatggtgccccctgataagtgccgatgtgccgtgggcagcatcctgagtgaaggtgaggaatcgccctcccctgagctcatcgacctctaccagaaatttggcttcaaggtgttctccttcccggcacccagccatgtggtgacagccaccttcccctacaccaccattctgtccatctggctggctacccgccgtgtc

SEQ ID NO: 328158 - DNA, 873 bp, Artificial Sequence
  derived and/or modified sequence
tcgctggcaccggccgcacgcgtccatcccgggcctctgagcggagggggagccgaggctagagggagggcgcagtctgcccaaggtcagcggcagcggcagtttctgggcgccaagtgtgattggagtactccaggaagaggggcgtgaccagagctctagcgaagagacctgacattgtaaagctagctgccttgaggtgcagtgttggggatccagagccatgtcggacctgctactactgggcctgattgggggcctgactctcttactgctgctgacgctgctggcctttgccgggtactcagggctactggctggggtggaagtgagtgctgggtcaccccccatccgcaacgtcactgtggcctacaagttccacatggggctctatggtgagactgggcggcttttcactgagagctgcagcatctctcccaagctccgctccatcgctgtctactatgacaacccccacatggtgccccctgataagtgccgatgtgccgtgggcagcatcctgagtgaaggtgaggaatcgccctcccctgagctcatcgacctctaccagaaatttggcttcaaggtgttctccttcccggcacccagccatgtggtgacagccaccttcccctacaccaccattctgtccatctggctggctacccgccgtgtccatcctgccttggacacctacatcaaggagcggaagctgtgtgcctatcctcggctggagatctaccaggaagaccagatccatttcatgtgcccactggcacggcagggagacttctatgtgcctgagatgaaggagacagagtggaaatggcgggggcttgtggaggccattgacacccaggtggatggcacagg

SEQ ID NO: 328159 - DNA, 1417 bp, Artificial Sequence
  derived and/or modified sequence
gtgcgcggcgggcgcgcgcaggctccgtaaccgaaccctgagccgcctgcgcggatcggcgtccgcagcgggcggctgctgaggggaaattcacgttacctctccacgtgccgaccaaggctctgagacccccagctgccttgaggtgcagtgttggggatccagagccatgtcggacctgctactactgggcctgattgggggcctgactctcttactgctgctgacgctgctggcctttgccgggtactcagggctactggctggggtggaagtgagtgctgggtcaccccccatccgcaacgtcactgtggcctacaagttccacatggggctctatggtgagactgggcggcttttcactgagagctgcagcatctctcccaagctccgctccatcgctgtctactatgacaacccccacatggtgccccctgataagtgccgatgtgccgtgggcagcatcctgagtgaaggtgaggaatcgccctcccctgagctcatcgacctctaccagaaatttggcttcaaggtgttctccttcccggcacccagccatgtggtgacagccaccttcccctacaccaccattctgtccatctggctggctacccgccgtgtccatcctgccttggacacctacatcaaggagcggaagctgtgtgcctatcctcggctggagatctaccaggaagaccagatccatttcatgtgcccactggcacggcagggagacttctatgtgcctgagatgaaggagacagagtggaaatggcgggggcttgtggaggccattgacacccaggtggatggcacaggagctgacacaatgagtgacacgagttctgtaagcttggaagtgagccctggcagccgggagacttcagctgccacactgtcacctggggcgagcagccgtggctgggatgacggtgacacccgcagcgagcacagctacagcgagtcaggtgccagcggctcctcttttgaggagctggacttggagggcgaggggcccttaggggagtcacggctggaccctgggactgagcccctggggactaccaagtggctctgggagcccactgcccctgagaagggcaaggagtaacccatggcctgcaccctcctgcagtgcagttgctgaggaactgagcagactctccagcagactctccagccctcttcctccttcctctgggggaggaggggttcctgagggacctgacttcccctgctccaggcctcttgctaagccttctcctcactgccctttaggctcccagggccagaggagccagggactattttctgcaccagcccccagggctgccacccctgttgtgtctttttttcagactcacagtggagcttccaggacccagaataaagccaatgatttacttgtttcacctgg

SEQ ID NO: 328160 - DNA, 1155 bp, Artificial Sequence
  derived and/or modified sequence
ccggccctccgccgccgcgcacgtgagcggcaccaggaagctggctgggcgcagccttccctgaggctcgctggcaccggccgcacgcgtccatcccgggcctctgagcggagggggagccgaggctagagggagggcgcagtctgcccaaggtcagcggcagcggcagtttctgggcgccaagtgtgattggagtactccaggaagaggggcgtgaccagagctctagcgaagagacctgacattgtaaagctaggtttggcttctgatttccacagggggtttgagaatgggacgagggtgctttagagggaccggtaggctttccctgaggacggtaatcagggcatgatggttggctcagtggttatttcctgggcaggggtgactgttctttcagctcccagcactggagcgctcggcccctgccgcactggatgccagcagttactaaaagtgagcctggcatttcagctgccttgaggtgcagtgttggggatccagagccatgtcggacctgctactactgggcctgattgggggcctgactctcttactgctgctgacgctgctggcctttgccgggtactcagggctactggctggggtggaagtgagtgctgggtcaccccccatccgcaacgtcactgtggcctacaagttccacatggggctctatggtgagactgggcggcttttcactgagagctgcagcatctctcccaagctccgctccatcgctgtctactatgacaacccccacatggtgccccctgataagtgccgatgtgccgtgggcagcatcctgagtgaaggtgaggaatcgccctcccctgagctcatcgacctctaccagaaatttggcttcaaggtgttctccttcccggcacccagccatgtggtgacagccaccttcccctacaccaccattctgtccatctggctggctacccgccgtgtccatcctgccttggacacctacatcaaggagcggaagctgtgtgcctatcctcggctggagatctaccaggaagaccagatccatttcatgtgcccactggcacggcagggagacttctatgtgcctgagatgaaggagacagagtggaaatggcgggggcttgtggaggccattgacacccaggtggatggcac

SEQ ID NO: 328161 - DNA, 1340 bp, Artificial Sequence
  derived and/or modified sequence
gtaaccgaaccctgagccgcctgcgcggatcggcgtccgcagcgggcggctgctgagctgccttgaggtgcagtgttggggatccagagccatgtcggacctgctactactgggcctgattgggggcctgactctcttactgctgctgacgctgctggcctttgccgggtactcagggctactggctggggtggaagtgagtgctgggtcaccccccatccgcaacgtcactgtggcctacaagttccacatggggctctatggtgagactgggcggcttttcactgagagctgcagcatctctcccaagctccgctccatcgctgtctactatgacaacccccacatggtgccccctgataagtgccgatgtgccgtgggcagcatcctgagtgaaggtgaggaatcgccctcccctgagctcatcgacctctaccagaaatttggcttcaaggtgttctccttcccggcacccagccatgtggtgacagccaccttcccctacaccaccattctgtccatctggctggctacccgccgtgtccatcctgccttggacacctacatcaaggagcggaagctgtgtgcctatcctcggctggagatctaccaggaagaccagatccatttcatgtgcccactggcacggcagggagacttctatgtgcctgagatgaaggagacagagtggaaatggcgggggcttgtggaggccattgacacccaggtggatggcacaggagctgacacaatgagtgacacgagttctgtaagcttggaagtgagccctggcagccgggagacttcagctgccacactgtcacctggggcgagcagccgtggctgggatgacggtgacacccgcagcgagcacagctacagcgagtcaggtgccagcggctcctcttttgaggagctggacttggagggcgaggggcccttaggggagtcacggctggaccctgggactgagcccctggggactaccaagtggctctgggagcccactgcccctgagaagggcaaggagtaacccatggcctgcaccctcctgcagtgcagttgctgaggaactgagcagactctccagcagactctccagccctcttcctccttcctctgggggaggaggggttcctgagggacctgacttcccctgctccaggcctcttgctaagccttctcctcactgccctttaggctcccagggccagaggagccagggactattttctgcaccagcccccagggctgccacccctgttgtgtctttttttcagactcacagtggagcttccaggacccagaataaagccaatgatttacttgtttcacctgga

SEQ ID NO: 328162 - protein, 87 aa, Artificial Sequence
  derived and/or modified sequence
MSPAFRAMDVEPRAKGVLLEPFVHQVGGHSCVLRFNETTLCKPLVPREHQFYETLPAEMRKFTPQYKGDISSHQHGGVFVGEWGSLL

SEQ ID NO: 328163 - DNA, 1309 bp, Artificial Sequence
  derived and/or modified sequence
gagccaatagtgaggggcaccgggagcgaggtgcagggggcggggctcggcctggccgcagccattttggtgcgagagaaacaataggacggaaacgccgaggaacccggctgaggcggcagcagagcatcctggccagaacaagccaaggagccaagacgagagggacacacggacaaacaacagacagaagacgtactggccgctggactccgctgcctcccccatctccccgccatctgcgcccggaggatgagcccagccttcagggccatggatgtggagccccgcgccaaaggcgtccttctggagccctttgtccaccaggtcggggggcactcatgcgtgctccgcttcaatgagacaaccctgtgcaagcccctggtcccaagggaacatcagttctacgagaccctccctgctgagatgcgcaaattcactccccagtacaaaggggacatcagcagccaccagcatggtggggtctttgttggggagtgggggagtcttttgtaaatcaagacaaagccaaaggccccttgttagctggccatccctgccccattttttcccctggtcctttcccctgtggccacagggaagtgtggcctgaataccccaccccggctcctctgcacccagagctgggggccacctcagaagtgtcatctctctctgagcacgcattcccctgcagcagtcgaggactgagcagattgagtgatgctggggcagagaggcctgggaggaaaggtgttcagccagtcgtttgtaaggcgctcgtcggcacctgctgaaacgcccccacctgacagccccatcctcaaagactgtcttaattactcatggcaggttctagagacttaaggggaaaagctgctttcaaggccaccacatgtctgtgctccccaaccagctctatctgccttgtgttcattttgttattttgtgacgtgagactgcaaagaccaataaaaacatattttataagaacaaaaggcctgggtgcctacccgtgtgggggcactgtgggaagcctttgctagggtgtcttgtgctgtgtggtttgttttgtttgcccctttattttgctttgcttacccagtcttcccttactcttggatgcttcttaaccctcaggcaaacctgtgttccccctgtattcaggctctgctttaaagcaagccatgaggctgttggagtttctgtttagggcattaaaaattcccgcaaactataaagagcaatgttttcagtcttttaggattagaagaattacataaaaattaataaacattttcaatgatgg

SEQ ID NO: 328164 - DNA, 264 bp, Artificial Sequence
  derived and/or modified sequence
atgtcacctgccttccgtgctatggacgtggaaccccgcgccaagggcgtcctgctggagcctttcgtgcaccaggtaggaggccacagctgtgtactgcggttcaacgagactacgttatgcaagccccttgtacctcgtgagcaccagttctacgagacgctcccggccgagatgcggaaattcaccccacagtacaaaggcgatattagcagccatcagcacgggggcgtgtttgtaggggaatggggatccctgctgtag

SEQ ID NO: 328165 - DNA, 264 bp, Artificial Sequence
  derived and/or modified sequence
atgagccctgccttccgggccatggatgtggagccccgggccaagggcgtgctgctggagccctttgtgcaccaggtgggcggccacagctgtgtgctgcgcttcaatgagaccaccctgtgcaagcccctggtgccccgggagcaccagttctatgagaccctgcctgctgagatgaggaagttcaccccccagtacaagggggacatcagcagccaccagcacggcggcgtgtttgtgggggagtggggcagcctgctgtag

SEQ ID NO: 328166 - DNA, 264 bp, Artificial Sequence
  derived and/or modified sequence
atgagccccgccttccgggccatggacgtggagccccgggccaagggcgtcctgcttgaaccttttgtgcatcaggtgggcggtcactcttgtgtcctgagattcaatgagaccactctatgcaaaccactggtgccacgggaacaccagttctatgaaaccctgcctgctgaaatgaggaagtttaccccccagtacaagggggacattagttctcatcagcacggaggtgtttttgtcggagaatggggctccctgttgtag

SEQ ID NO: 328167 - DNA, 264 bp, Artificial Sequence
  derived and/or modified sequence
atgtctcctgctttcagggccatggacgtcgaaccccgagccaaaggggtgctgctcgaacctttcgtccaccaggtgggcggtcactcttgcgtgctgaggttcaacgaaactactctgtgcaaacctctggtcccccgagaacaccagttttacgaaaccctccctgctgagatgcgcaaattcactccccaatataaaggagatatctcttcccatcagcatggcggagtatttgtcggggaatgggggtcattgctgtag

SEQ ID NO: 328168 - DNA, 264 bp, Artificial Sequence
  derived and/or modified sequence
atgagccccgccttcagagccatggacgtggagcccagagccaagggcgtgctgctggagcccttcgtgcaccaggtgggcggccacagctgcgtgctgagattcaacgagaccaccctgtgcaagcccctggtgcccagagagcaccagttctacgagaccctgcccgccgagatgagaaagttcaccccccagtacaagggcgacatcagcagccaccagcacggcggcgtgttcgtgggcgagtggggcagcctgctgtag

SEQ ID NO: 328169 - DNA, 1329 bp, Artificial Sequence
  derived and/or modified sequence
atgaccatggttgacacagagatgccattctggcccaccaactttgggatcagctccgtggatctctccgtaatggaagaccactcccactcctttgatatcaagcccttcactactgttgacttctccagcatttctactccacattacgaagacattccattcacaagaacagatccagtggttgcagattacaagtatgacctgaaacttcaagagtaccaaagtgcaatcaaagtggagcctgcatctccaccttattattctgagaagactcagctctacaataagcctcatgaagagccttccaactccctcatggcaattgaatgtcgtgtctgtggagataaagcttctggatttcactatggagttcatgcttgtgaaggatgcaagggtttcttccggagaacaatcagattgaagcttatctatgacagatgtgatcttaactgtcggatccacaaaaaaagtagaaataaatgtcagtactgtcggtttcagaaatgccttgcagtggggatgtctcataatgaggaactacaaaaggatagttattagattgccaaatcctgcagaacctccagcaggcacaagttggtttttctccctcaagaaagagaagtgagccaagcgtggtggtgcatgcctgtggtcccagctactcaggaggctgagccatcaggtttgggcggatgccacaggccgagaaggagaagctgttggcggagatctccagtgatatcgaccagctgaatccagagtccgctgacctccgggccctggcaaaacatttgtatgactcatacataaagtccttcccgctgaccaaagcaaaggcgagggcgatcttgacaggaaagacaacagacaaatcaccattcgttatctatgacatgaattccttaatgatgggagaagataaaatcaagttcaaacacatcacccccctgcaggagcagagcaaagaggtggccatccgcatctttcagggctgccagtttcgctccgtggaggctgtgcaggagatcacagagtatgccaaaagcattcctggttttgtaaatcttgacttgaacgaccaagtaactctcctcaaatatggagtccacgagatcatttacacaatgctggcctccttgatgaataaagatggggttctcatatccgagggccaaggcttcatgacaagggagtttctaaagagcctgcgaaagccttttggtgactttatggagcccaagtttgagtttgctgtgaagttcaatgcactggaattagatgacagcgacttggcaatatttattgctgtcattattctcagtggag

SEQ ID NO: 328170 - protein, 250 aa, Artificial Sequence
  derived and/or modified sequence
MTMVDTEMPFWPTNFGISSVDLSVMEDHSHSFDIKPFTTVDFSSISTPHYEDIPFTRTDPVVADYKYDLKLQEYQSAIKVEPASPPYYSEKTQLYNKPHEEPSNSLMAIECRVCGDKASGFHYGVHACEGCKGFFRRTIRLKLIYDRCDLNCRIHKKSRNKCQYCRFQKCLAVGMSHNAIRFGRMPQAEKEKLLAEISSDIDQLNPESADLRALAKHLYDSYIKSFPLTKAKARAILTGKTTDKSTAQVC

SEQ ID NO: 328171 - protein, 248 aa, Artificial Sequence
  derived and/or modified sequence
MVDTEMPFWPTNFGISSVDLSVMEDHSHSFDIKPFTTVDFSSISTPHYEDIPFTRTDPVVADYKYDLKLQEYQSAIKVEPASPPYYSEKTQLYNKPHEEPSNSLMAIECRVCGDKASGFHYGVHACEGCKGFFRRTIRLKLIYDRCDLNCRIHKKSRNKCQYCRFQKCLAVGMSHNAIRFGRMPQAEKEKLLAEISSDIDQLNPESADLRALAKHLYDSYIKSFPLTKAKARAILTGKTTDKSTAQVC

SEQ ID NO: 328172 - DNA, 1122 bp, Artificial Sequence
  derived and/or modified sequence
gaagccaacactaaaccacaaatatacaacaaggccattttctcaaacgagagtcagcctttaacgaaatgaccatggttgacacagagatgccattctggcccaccaactttgggatcagctccgtggatctctccgtaatggaagaccactcccactcctttgatatcaagcccttcactactgttgacttctccagcatttctactccacattacgaagacattccattcacaagaacagatccagtggttgcagattacaagtatgacctgaaacttcaagagtaccaaagtgcaatcaaagtggagcctgcatctccaccttattattctgagaagactcagctctacaataagcctcatgaagagccttccaactccctcatggcaattgaatgtcgtgtctgtggagataaagcttctggatttcactatggagttcatgcttgtgaaggatgcaagggtttcttccggagaacaatcagattgaagcttatctatgacagatgtgatcttaactgtcggatccacaaaaaaagtagaaataaatgtcagtactgtcggtttcagaaatgccttgcagtggggatgtctcataatgccatcaggtttgggcggatgccacaggccgagaaggagaagctgttggcggagatctccagtgatatcgaccagctgaatccagagtccgctgacctccgggccctggcaaaacatttgtatgactcatacataaagtccttcccgctgaccaaagcaaaggcgagggcgatcttgacaggaaagacaacagacaaatcaaccgcccaggtttgctgaatgtgaagcccattgaagacattcaagacaacctgctacaagccctggagctccagctgaagctgaaccaccctgagtcctcacagctgtttgccaagctgctccagaaaatgacagacctcagacagattgtcacggaacacgtgcagctactgcaggtgatcaagaagacggagacagacatgagtcttcacccgctcctgcaggagatctacaaggacttgtactagcagagagtcctgagccactgccaacatttcccttcttccagttgcactattctgagggaaaatctgacacc

SEQ ID NO: 328173 - DNA, 560 bp, Artificial Sequence
  derived and/or modified sequence
ttagtatacaatgaatttataaatgtaaccatacaatttcatgcttagagaacgttttctctccattctctctacctttagaccattctgcagtttaaatcttgaaccaaaatgtcatttaaccatccttctgaacgataactccataattaactcaagcaccaaataagtcatctagctcttgatgatttgaaagaagccaacactaaaccacaaatatacaacaaggccattttctcaaacgagagtcagcctttaacgaaatgaccatggttgacacagagatgccattctggcccaccaactttgggatcagctccgtggatctctccgtaatggaagaccactcccactcctttgatatcaagcccttcactactgttgacttctccagcatttctactccacattacgaagacattccattcacaagaacagatccagtggttgcagattacaagtatgacctgaaacttcaagagtaccaaagtgcaatcaaagtggagcctgcatctccaccttattattctgagaagactcagctctacaataagcctcat

SEQ ID NO: 328174 - DNA, 428 bp, Artificial Sequence
  derived and/or modified sequence
ctttgtgggctcctgcaagtgccaggcgctgaccactcctcctgggagcctaactgaggggggtagaggcagcagaggttaacagaaatctcaggtcccttggtggaaggtgggtgtgtagtcgtggtactttacgcctcggtgtttagggaggagcctaaggtaaggagtcagaaacggggagtaaccgagctgcggcttttatataaggtcagtggtaggtaaggaaggggccttaacctctgctggtgaccagaagcctgcatttctgcattctgcttaattccctttccttagaaatgaccatggttgacacagagatgccattctggcccaccaactttgggatcagctccgtggatctctccgtaatggaagaccactcccactcctttgatatcaagcccttcactactgttgacttctcc

SEQ ID NO: 328175 - DNA, 561 bp, Artificial Sequence
  derived and/or modified sequence
atgaccatggtggacaccgagatgcccttctggcccaccaacttcggcatcagcagcgtggacctgagcgtgatggaggaccacagccacagcttcgacatcaagcccttcaccaccgtggacttcagcagcatcagcaccccccactacgaggacatccccttcaccagaaccgaccccgtggtggccgactacaagtacgacctgaagctgcaggagtaccagagcgccatcaaggtggagcccgccagccccccctactacagcgagaagacccagctgtacaacaagccccacgaggagcccagcaacagcctgatggccatcgagtgcagagtgtgcggcgacaaggccagcggcttccactacggcgtgcacgcctgcgagggctgcaagggcttcttcagaagaaccatcagactgaagctgatctacgacagatgcgacctgaactgcagaatccacaagaagagcagaaacaagtgccagtactgcagattccagaagtgcctggccgtgggcatgagccacaacgaggagctgcagaaggacagctactag

SEQ ID NO: 328176 - DNA, 561 bp, Artificial Sequence
  derived and/or modified sequence
atgacgatggtggacacagaaatgcctttctggcctaccaacttcggtatcagctctgtggaccttagtgttatggaggaccactcccatagctttgatataaaaccatttaccacagtggattttagctcaataagcacaccccactatgaagacattcctttcaccagaacagaccccgtcgtggctgactacaagtacgatttaaagctccaagaataccaaagcgctataaaggtggagcccgcatccccaccctattacagtgaaaagacacagctttacaacaagccgcacgaggagccatccaacagccttatggccatcgaatgtcgtgtgtgcggcgacaaagcttcaggattccactacggcgtccatgcctgcgagggctgcaagggtttcttcagaaggacgatccggctgaagctcatctatgataggtgtgatctcaattgccgaatccacaagaagtcaagaaacaagtgccagtactgtaggtttcaaaagtgcctagctgttggtatgagtcacaatgaggagctgcagaaggatagttactag

SEQ ID NO: 328177 - DNA, 561 bp, Artificial Sequence
  derived and/or modified sequence
atgaccatggtggacacagagatgcccttctggcccaccaactttggcatcagctctgtggacctgtctgtgatggaggaccacagccacagctttgacatcaagcccttcaccaccgtggacttcagcagcatcagcaccccccactatgaggacatccccttcaccaggacagatcctgtggtggccgactacaagtatgacctgaagctgcaggagtaccagagcgccatcaaggtggagcccgccagccccccctactacagcgagaagacccagctgtacaacaagccccatgaggagcccagcaacagcctgatggccatcgagtgccgggtgtgtggggacaaggccagcggcttccactatggagtgcacgcctgtgagggctgcaagggcttcttccggaggaccatccggctgaagctgatctatgacagatgtgacctgaactgccgcatccacaagaagagcaggaacaagtgccagtactgccgcttccagaagtgcctggccgtgggcatgagccacaatgaggagctgcagaaggacagctactag

SEQ ID NO: 328178 - DNA, 561 bp, Artificial Sequence
  derived and/or modified sequence
atgaccatggtggacaccgagatgcccttctggcccaccaacttcggcatatcctctgtggatttaagcgttatggaggatcattcccacagctttgacatcaaaccttttactaccgtagacttttcctctatcagcacaccacactacgaggacatcccatttacaagaactgatcccgtcgtggctgattataaatatgatctgaaactgcaggaataccagtctgcaatcaaggtagagcctgcgtcccctccgtattactcagagaagacccagctgtacaataagccccacgaggaaccatcaaacagtctaatggccatagagtgccgggtttgcggcgacaaggcctcaggctttcattacggtgttcacgcttgcgaaggttgcaaaggattttttcgtcgcaccattaggctgaagttgatctacgaccgctgcgacctgaattgtaggatacacaagaaaagtcgtaataagtgccagtactgcaggtttcagaaatgtctggccgtgggcatgtcccacaatgaggagttacagaaggactcctactag

SEQ ID NO: 328179 - DNA, 561 bp, Artificial Sequence
  derived and/or modified sequence
atgaccatggttgacactgagatgcccttttggcctacaaacttcggcatttcgtccgtcgacctcagcgtcatggaggaccacagtcattcgttcgatattaagcccttcacgactgtagatttcagttcaatctccaccccccattatgaggacatccccttcaccaggaccgaccctgtggtggccgactacaagtatgatcttaaattacaggagtaccaatccgctataaaagtggagcccgctagtcctccgtactacagtgaaaaaacacaactgtacaataaaccacatgaggagccgagcaactccctgatggccatcgagtgtcgtgtgtgcggggacaaagcctccggcttccactatggcgtgcacgcctgcgagggatgcaaagggtttttcagacgcacaatccgactgaagctgatctacgatcgttgcgatctaaattgcagaatccacaagaagtcacgcaacaaatgtcagtactgtcgctttcagaaatgcctggcagttggaatgagtcacaacgaggagctgcaaaaggatagttattag

SEQ ID NO: 328180 - DNA, 753 bp, Artificial Sequence
  derived and/or modified sequence
atgaccatggtcgacacggaaatgcccttctggcctacaaactttggtatctcgtctgtggacctgtctgtgatggaagaccattcacactcattcgatatcaaacccttcactaccgtggacttcagctcgatttctacacctcactacgaggacattcccttcacaagaacagaccctgtggtcgcggactataagtacgacctgaagctccaggaataccagtcggctataaaagttgaaccagcatcaccaccgtactattctgaaaagactcagctctacaacaagcctcacgaggagccatctaattccctcatggctatcgagtgcagagtatgtggggataaggcgagtggctttcattatggagtgcacgcgtgcgaggggtgcaagggcttctttcgacgaactatccgcctcaagcttatttacgatcgttgtgacctgaactgtaggatccataaaaagtcacgcaacaaatgccagtactgcagatttcagaagtgtctcgccgtgggcatgtctcacaatgccattaggtttggccgtatgcctcaggctgaaaaagaaaaactcctggctgagatctccagtgatattgaccaactgaatcctgagtccgcagatttgcgcgccttggctaaacatctctacgactcttacataaaaagtttccctttgacaaaagcgaaagctcgcgctattcttactggtaaaactaccgataagagcaccgcacaggtgtgctag

SEQ ID NO: 328181 - DNA, 399 bp, Artificial Sequence
  derived and/or modified sequence
atgacaatggtggacaccgagatgccattctggcccacaaattttgggatctcctctgttgacctctccgtaatggaagaccattcacactcctttgatataaagcccttcaccaccgtggacttcagttcaatctccactccccattacgaagatataccatttacccgtacagaccccgtggtggccgattacaagtacgatctgaagctccaggagtaccaaagcgccattaaggtggaacctgccagcccgccgtactacagtgaaaagacccagctgtacaataaacctcatgaagagccctcgaattctctcatggccatcgagtgtcgcgtctgcggggataaggcatcgggctttcattacggagttcacgcctgcgaaggttgcaagtag

SEQ ID NO: 328182 - DNA, 300 bp, Artificial Sequence
  derived and/or modified sequence
atgaccatggttgacacagagatgcccttctggcccaccaactttggcattagcagcgtggacctctcggtcatggaggatcacagtcactctttcgacattaaacccttcaccacagttgactttagctcaattagtacaccgcattacgaagacataccctttacgaggactgaccccgtggtcgctgattacaagtacgacttgaaactacaggaatatcaaagtgctataaaggtggaacctgcttcgccaccatattatagtgagaagactcaactttacaacaagccccactag

SEQ ID NO: 328183 - DNA, 132 bp, Artificial Sequence
  derived and/or modified sequence
atgaccatggtggatacggaaatgcccttttggcccaccaacttcggtatatcaagcgtggacctctcagtgatggaagaccacagtcatagctttgatatcaagccattcaccacagtcgatttcagttag

SEQ ID NO: 328184 - DNA, 747 bp, Artificial Sequence
  derived and/or modified sequence
atggtagatacagaaatgcctttttggcccactaatttcggcatatcttctgtggatctctccgtgatggaagatcattcgcattcattcgacataaaaccttttaccactgtggacttcagttcaatctccacaccccactacgaggatattccattcacacggaccgatcctgttgtggccgactacaagtacgatctgaagctgcaggagtaccagtctgcaatcaaagtggagccagccagtcccccgtactattctgagaagactcagctgtacaacaaaccacacgaagagccaagcaacagtctgatggcaatagaatgtcgagtgtgcggcgataaagcctccggatttcactacggggtgcatgcctgtgagggatgtaaaggtttctttcgacggacgatccgcctaaagcttatttacgatcgctgtgatctgaattgccggatccataagaagtcccgcaacaagtgtcagtattgtcgctttcagaaatgtcttgctgtcggaatgagccacaatgcgattcgttttggcaggatgccacaggctgagaaagaaaaactgcttgcagagatctcttccgatattgaccagcttaatcccgaatccgccgacctgcgcgcattagccaagcacctgtatgattcctacattaagtcattccccttgaccaaggccaaagcaagggccatactcaccgggaaaacaaccgacaaatcaaccgctcaagtgtgttag

SEQ ID NO: 328185 - DNA, 753 bp, Artificial Sequence
  derived and/or modified sequence
atgaccatggtggacacagagatgcccttctggcccaccaactttggcatcagctctgtggacctgtctgtgatggaggaccacagccacagctttgacatcaagcccttcaccaccgtggacttcagcagcatcagcaccccccactatgaggacatccccttcaccaggacagatcctgtggtggccgactacaagtatgacctgaagctgcaggagtaccagagcgccatcaaggtggagcccgccagccccccctactacagcgagaagacccagctgtacaacaagccccatgaggagcccagcaacagcctgatggccatcgagtgccgggtgtgtggggacaaggccagcggcttccactatggagtgcacgcctgtgagggctgcaagggcttcttccggaggaccatccggctgaagctgatctatgacagatgtgacctgaactgccgcatccacaagaagagcaggaacaagtgccagtactgccgcttccagaagtgcctggccgtgggcatgagccacaatgccatccgcttcggccgcatgccccaggccgagaaggagaagctgctggccgagatcagcagtgacatcgaccagctgaaccctgagagcgctgacctgcgggccctggccaagcacctgtatgacagctacatcaagagcttccccctgaccaaggccaaggcccgggccatcctgaccgggaagaccacagacaagagcacagcccaggtgtgctag

SEQ ID NO: 328186 - DNA, 399 bp, Artificial Sequence
  derived and/or modified sequence
atgaccatggtggacacagagatgcccttctggcccaccaactttggcatcagctctgtggacctgtctgtgatggaggaccacagccacagctttgacatcaagcccttcaccaccgtggacttcagcagcatcagcaccccccactatgaggacatccccttcaccaggacagatcctgtggtggccgactacaagtatgacctgaagctgcaggagtaccagagcgccatcaaggtggagcccgccagccccccctactacagcgagaagacccagctgtacaacaagccccatgaggagcccagcaacagcctgatggccatcgagtgccgggtgtgtggggacaaggccagcggcttccactatggagtgcacgcctgtgagggctgcaagtag

SEQ ID NO: 328187 - DNA, 300 bp, Artificial Sequence
  derived and/or modified sequence
atgaccatggtggacacagagatgcccttctggcccaccaactttggcatcagctctgtggacctgtctgtgatggaggaccacagccacagctttgacatcaagcccttcaccaccgtggacttcagcagcatcagcaccccccactatgaggacatccccttcaccaggacagatcctgtggtggccgactacaagtatgacctgaagctgcaggagtaccagagcgccatcaaggtggagcccgccagccccccctactacagcgagaagacccagctgtacaacaagccccactag

SEQ ID NO: 328188 - DNA, 132 bp, Artificial Sequence
  derived and/or modified sequence
atgaccatggtggacacagagatgcccttctggcccaccaactttggcatcagctctgtggacctgtctgtgatggaggaccacagccacagctttgacatcaagcccttcaccaccgtggacttctcctag

SEQ ID NO: 328189 - DNA, 747 bp, Artificial Sequence
  derived and/or modified sequence
atggtggacacagagatgcccttctggcccaccaactttggcatcagctctgtggacctgtctgtgatggaggaccacagccacagctttgacatcaagcccttcaccaccgtggacttcagcagcatcagcaccccccactatgaggacatccccttcaccaggacagatcctgtggtggccgactacaagtatgacctgaagctgcaggagtaccagagcgccatcaaggtggagcccgccagccccccctactacagcgagaagacccagctgtacaacaagccccatgaggagcccagcaacagcctgatggccatcgagtgccgggtgtgtggggacaaggccagcggcttccactatggagtgcacgcctgtgagggctgcaagggcttcttccggaggaccatccggctgaagctgatctatgacagatgtgacctgaactgccgcatccacaagaagagcaggaacaagtgccagtactgccgcttccagaagtgcctggccgtgggcatgagccacaatgccatccgcttcggccgcatgccccaggccgagaaggagaagctgctggccgagatcagcagtgacatcgaccagctgaaccctgagagcgctgacctgcgggccctggccaagcacctgtatgacagctacatcaagagcttccccctgaccaaggccaaggcccgggccatcctgaccgggaagaccacagacaagagcacagcccaggtgtgctag

SEQ ID NO: 328190 - DNA, 753 bp, Artificial Sequence
  derived and/or modified sequence
atgaccatggtggacaccgagatgcccttctggcccaccaacttcggcattagttccgtggatctgtctgtgatggaagatcacagccattccttcgacatcaaaccatttaccacagtggacttcagcagtatttctacaccccactacgaggacatcccttttacaaggacagaccctgtcgtcgccgattacaaatacgacttgaagttgcaagaatatcagtctgccatcaaagtggaaccggccagccctccgtactattccgaaaagacccagctttataataagccgcatgaggaacccagtaattctctcatggctatcgagtgcagagtttgtggtgataaagcttcgggatttcattatggcgtgcacgcttgcgaagggtgtaaaggcttcttccgtcggactattcgactgaagctgatatacgacaggtgtgacttgaattgtaggattcataaaaagtccaggaataagtgccagtattgtaggtttcaaaagtgcctggcggtgggaatgagccataatgctatcaggtttggaaggatgccccaggccgagaaggagaaactgctggcggagataagctccgacattgatcagcttaatccggagtcagccgacctgcgggccctggccaagcacctgtacgactcctatattaagagcttcccactgactaaagccaaggcccgggcaatcttgaccggcaagactaccgataagtctactgcacaggtgtgttag

SEQ ID NO: 328191 - DNA, 399 bp, Artificial Sequence
  derived and/or modified sequence
atgaccatggtggacaccgagatgcccttctggcccaccaacttcggaattagcagcgtagacttgtccgtgatggaggatcactctcattctttcgatattaaacccttcactacggtggacttcagctccatttccaccccacactacgaagatattccatttacacgtaccgatccggtggtggccgactataagtacgacttgaaactgcaagagtatcaaagcgcgattaaggtggagcccgcctcgcctccgtactattccgagaagacccagctgtacaacaaaccccatgaagagcctagcaatagcctgatggcgattgaatgcagggtatgcggcgacaaggcaagcggctttcactacggagtgcacgcctgcgaaggttgtaagtag

SEQ ID NO: 328192 - DNA, 300 bp, Artificial Sequence
  derived and/or modified sequence
atgaccatggtggacaccgagatgcccttctggcccaccaacttcggcattagctcagtcgatctctcagttatggaggaccacagtcacagctttgacattaaacccttcacaacagttgattttagcagtattagcactccgcactacgaggacataccgttcactagaaccgacccagtggtagctgactataagtacgatcttaaactacaggagtatcagtctgcgataaaagtagagccagctagccctccatattacagcgaaaagacacaactttataacaaacctcactag

SEQ ID NO: 328193 - DNA, 132 bp, Artificial Sequence
  derived and/or modified sequence
atgaccatggtggacaccgagatgcccttctggcccaccaacttcggcatcagcagcgttgatctgagcgtgatggaagaccactctcattctttcgacataaagccattcacaacagtggattttagctag

SEQ ID NO: 328194 - DNA, 747 bp, Artificial Sequence
  derived and/or modified sequence
atggtggacaccgagatgcccttctggcccaccaacttcggcatcagttcagttgatttgtcagtcatggaagaccactcccactcttttgacattaaaccattcaccacagtggactttagttccatttccacccctcattacgaggatattcctttcactaggaccgaccccgttgttgccgactacaaatacgacctgaaactccaggagtaccagtcggctataaaggtggaacctgcctcccctccatactatagcgagaagactcagctgtacaacaaaccacacgaagagccaagtaactctctaatggctatagaatgtcgcgtgtgtggagataaagcttccggatttcactatggtgtgcatgcgtgcgagggctgtaaagggtttttcaggcgaacaatcagactgaaattgatttacgaccggtgcgaccttaattgtcgcattcacaaaaagtctaggaacaaatgtcagtactgccggttccagaagtgcctcgctgtggggatgagccataatgccatccgtttcgggagaatgcctcaggcagagaaggaaaagttgttggctgaaatttcctcggacatagatcagctaaatcccgagtcagcagacctgagggctctggcaaagcacctttacgatagctatatcaaatccttcccactgaccaaggccaaggcccgggctatcctcacaggaaaaacaactgacaaatcgactgctcaggtgtgttag

SEQ ID NO: 328195 - DNA, 686 bp, Artificial Sequence
  derived and/or modified sequence
tctgaaagtgtgcagcaccaccgatcagaagagaaaaccaagggacccgaaatatgctttaattaaattttcttttaaaatgtcactggaaagaacatcttgggaagacggcctggccgatcgccgtgtgaagggcaagccactctggccgagagggagccccacacctcggtctccccagaccggccctggccgggggcatccccctaaacttcggatccctcctcggaaatgggaccctctctgggccgcctcccagcggtggtggcgaggagcaaacgacaccagaaatgaccatggttgacacagagatgccattctggcccaccaactttgggatcagctccgtggatctctccgtaatggaagaccactcccactcctttgatatcaagcccttcactactgttgacttctccagcatttctactccacattacgaagacattccattcacaagaacagatccagtggttgcagattacaagtatgacctgaaacttcaagagtaccaaagtgcaatcaaagtggagcctgcatctccaccttattattctgagaagactcagctctacaataagcctcatgaagagccttccaactccctcatggcaattgaatgtcgtgtctgtggagataaagcttctggatttcactatggagttcatgcttgtgaaggatgcaag

SEQ ID NO: 328196 - DNA, 753 bp, Artificial Sequence
  derived and/or modified sequence
atgaccatggtggatacggaaatgccattctggcctaccaatttcggcatcagtagcgtggatcttagtgttatggaagatcacagccactcattcgatatcaagccctttaccacggtagacttttcttcaattagtactcctcattacgaggatatcccattcactaggactgatcccgtagtggctgattataagtatgatttgaaactgcaggagtaccagagcgcaatcaaggtggagccagcttctcccccatattattccgagaagacccagttgtataacaagccacacgaggagcccagcaactccctgatggctatcgagtgtcgggtctgcggtgataaagccagcgggtttcactatggggtgcatgcttgcgagggctgtaaggggttcttccgaaggacaattcggctgaagttgatttacgatcggtgcgacctgaattgtcggattcataagaaatcacgcaacaaatgtcaatactgcaggttccaaaaatgccttgcagtcgggatgtcccacaatgctattagattcggcaggatgccgcaggccgaaaaggaaaagctgctggccgagatttcctctgacatcgaccagctcaatcccgagagtgcagacctaagagccctcgcaaagcacctttatgattcctacattaaatcattccctcttacaaaagctaaggccagagctatcctcacagggaagaccactgataagagcaccgcccaggtttgctag

SEQ ID NO: 328197 - DNA, 399 bp, Artificial Sequence
  derived and/or modified sequence
atgacaatggtcgatactgagatgcccttctggccaacaaattttggaatctccagcgtggacctgtcagtgatggaggatcattcacatagcttcgacataaaaccctttaccacagtagacttttcttctatcagtactccacactacgaggatataccctttactaggacagacccagtggtggccgactacaagtacgatttgaaactccaggagtaccaaagtgccatcaaggtggagccagcctctccaccatattactcagaaaaaacccaactgtataacaagccccacgaggaaccatccaattctcttatggcaattgagtgtcgggtctgcggcgacaaggcttcaggcttccactatggagtgcatgcatgcgagggatgcaagtag

SEQ ID NO: 328198 - DNA, 300 bp, Artificial Sequence
  derived and/or modified sequence
atgactatggtcgacaccgaaatgcccttctggcccacgaattttggtatctcctctgtcgacctgagtgtcatggaagatcattcccattcttttgatatcaaaccattcaccacagtggattttagcagcatatccacacctcattacgaagatatcccttttacgcgaacagatcccgtggtggccgattacaagtacgatctgaaactgcaagagtatcagagcgctattaaggttgaacccgctagccccccttactactccgagaagacccagctgtataataagccacattag

SEQ ID NO: 328199 - DNA, 132 bp, Artificial Sequence
  derived and/or modified sequence
atgaccatggtagatacagagatgccattttggccaactaacttcggaatctcctccgtagacctaagtgttatggaggaccacagccactcctttgacattaagccatttaccacagtggatttcagttag

SEQ ID NO: 328200 - DNA, 747 bp, Artificial Sequence
  derived and/or modified sequence
atggttgatacagagatgcctttctggcccactaatttcgggatcagtagcgtagatctgtccgtgatggaagaccacagccactcttttgacattaaaccattcaccactgtagacttcagttcaatttcaacaccccattacgaggacatccccttcaccaggactgaccccgttgtggccgactacaaatatgacctcaaactgcaggagtatcagagcgccatcaaggtcgagccagcctcacccccttattattccgaaaaaacacagttgtataataagcctcacgaggagccgtccaattcgcttatggccattgagtgcagggtatgcggtgataaggcttctgggtttcactacggagtgcatgcttgcgaagggtgcaaaggctttttcaggcgcactattcggctgaaacttatctatgatagatgcgatctgaattgcaggattcacaagaaatctcgcaataagtgccagtattgtcggtttcagaaatgcttagcggtagggatgtctcataacgctatcaggttcggccgtatgccccaggcagaaaaggaaaagctgctcgctgagatcagctccgatatcgatcaactgaatccagaaagcgctgaccttcgtgcccttgccaaacatctttacgactcatacattaaaagcttcccactgaccaaagctaaggcccgtgctattctaaccggaaaaacgacagataagtccacggcacaggtttgctag

SEQ ID NO: 328201 - DNA, 753 bp, Artificial Sequence
  derived and/or modified sequence
atgaccatggtggacaccgagatgcccttctggcccaccaacttcggcatcagcagcgtggacctgagcgtgatggaggaccacagccacagcttcgacatcaagcccttcaccaccgtggacttcagcagcatcagcaccccccactacgaggacatccccttcaccagaaccgaccccgtggtggccgactacaagtacgacctgaagctgcaggagtaccagagcgccatcaaggtggagcccgccagccccccctactacagcgagaagacccagctgtacaacaagccccacgaggagcccagcaacagcctgatggccatcgagtgcagagtgtgcggcgacaaggccagcggcttccactacggcgtgcacgcctgcgagggctgcaagggcttcttcagaagaaccatcagactgaagctgatctacgacagatgcgacctgaactgcagaatccacaagaagagcagaaacaagtgccagtactgcagattccagaagtgcctggccgtgggcatgagccacaacgccatcagattcggcagaatgccccaggccgagaaggagaagctgctggccgagatcagcagcgacatcgaccagctgaaccccgagagcgccgacctgagagccctggccaagcacctgtacgacagctacatcaagagcttccccctgaccaaggccaaggccagagccatcctgaccggcaagaccaccgacaagagcaccgcccaggtgtgctag

SEQ ID NO: 328202 - DNA, 399 bp, Artificial Sequence
  derived and/or modified sequence
atgaccatggtggacaccgagatgcccttctggcccaccaacttcggcatcagcagcgtggacctgagcgtgatggaggaccacagccacagcttcgacatcaagcccttcaccaccgtggacttcagcagcatcagcaccccccactacgaggacatccccttcaccagaaccgaccccgtggtggccgactacaagtacgacctgaagctgcaggagtaccagagcgccatcaaggtggagcccgccagccccccctactacagcgagaagacccagctgtacaacaagccccacgaggagcccagcaacagcctgatggccatcgagtgcagagtgtgcggcgacaaggccagcggcttccactacggcgtgcacgcctgcgagggctgcaagtag

SEQ ID NO: 328203 - DNA, 300 bp, Artificial Sequence
  derived and/or modified sequence
atgaccatggtggacaccgagatgcccttctggcccaccaacttcggcatcagcagcgtggacctgagcgtgatggaggaccacagccacagcttcgacatcaagcccttcaccaccgtggacttcagcagcatcagcaccccccactacgaggacatccccttcaccagaaccgaccccgtggtggccgactacaagtacgacctgaagctgcaggagtaccagagcgccatcaaggtggagcccgccagccccccctactacagcgagaagacccagctgtacaacaagccccactag

SEQ ID NO: 328204 - DNA, 132 bp, Artificial Sequence
  derived and/or modified sequence
atgaccatggtggacaccgagatgcccttctggcccaccaacttcggcatcagcagcgtggacctgagcgtgatggaggaccacagccacagcttcgacatcaagcccttcaccaccgtggacttcagctag

SEQ ID NO: 328205 - DNA, 747 bp, Artificial Sequence
  derived and/or modified sequence
atggtggacaccgagatgcccttctggcccaccaacttcggcatcagcagcgtggacctgagcgtgatggaggaccacagccacagcttcgacatcaagcccttcaccaccgtggacttcagcagcatcagcaccccccactacgaggacatccccttcaccagaaccgaccccgtggtggccgactacaagtacgacctgaagctgcaggagtaccagagcgccatcaaggtggagcccgccagccccccctactacagcgagaagacccagctgtacaacaagccccacgaggagcccagcaacagcctgatggccatcgagtgcagagtgtgcggcgacaaggccagcggcttccactacggcgtgcacgcctgcgagggctgcaagggcttcttcagaagaaccatcagactgaagctgatctacgacagatgcgacctgaactgcagaatccacaagaagagcagaaacaagtgccagtactgcagattccagaagtgcctggccgtgggcatgagccacaacgccatcagattcggcagaatgccccaggccgagaaggagaagctgctggccgagatcagcagcgacatcgaccagctgaaccccgagagcgccgacctgagagccctggccaagcacctgtacgacagctacatcaagagcttccccctgaccaaggccaaggccagagccatcctgaccggcaagaccaccgacaagagcaccgcccaggtgtgctag

SEQ ID NO: 328206 - protein, 595 aa, Artificial Sequence
  derived and/or modified sequence
MESQPFLNMKFETDYFVKVVPFPSIKNESNYHPFFFRTRACDLLLQPDNLACKPFWKPRNLNISQHGSDMQVSFDHAPHNFGFRFFYLHYKLKHEGPFKRKTCKQEQTTETTSCLLQNVSPGDYIIELVDDTNTTRKVMHYALKPVHSPWAGPIRAVAITVPLVVISAFATLFTVMCRKKQQENIYSHLDEESSESSTYTAALPRERLRPRPKVFLCYSSKDGQNHMNVVQCFAYFLQDFCGCEVALDLWEDFSLCREGQREWVIQKIHESQFIIVVCSKGMKYFVDKKNYKHKGGGRGSGKGELFLVAVSAIAEKLRQAKQSSSAALSKFIAVYFDYSCEGDVPGILDLSTKYRLMDNLPQLCSHLHSRDHGLQEPGQHTRQGSRRNYFRSKSGRSLYVAICNMHQFIDEEPDWFEKQFVPFHPPPLRYREPVLEKFDSGLVLNDVMCKPGPESDFCLKVEAAVLGATGPADSQHESQHGGLDQDGEARPALDGSAALQPLLHTVKAGSPSDMPRDSGIYDSSVPSSELSLPLMEGLSTDQTETSSLTESVSSSSGLGEEEPPALPSKLLSSGSCKADLGCRSYTDELHAVAPL

SEQ ID NO: 328207 - protein, 715 aa, Artificial Sequence
  derived and/or modified sequence
MPRASASGVPALFVSGEQGVGPASRNSGLYNITFKYDNCTTYLNPVGKHVIADAQNITISQYACHDQVAVTILWSPGALGIEFLKGFRVILEELKSEGRQCQQLILKDPKQLNSSFKRTGMESQPFLNMKFETDYFVKVVPFPSIKNESNYHPFFFRTRACDLLLQPDNLACKPFWKPRNLNISQHGSDMQVSFDHAPHNFGFRFFYLHYKLKHEGPFKRKTCKQEQTTETTSCLLQNVSPGDYIIELVDDTNTTRKVMHYALKPVHSPWAGPIRAVAITVPLVVISAFATLFTVMCRKKQQENIYSHLDEESSESSTYTAALPRERLRPRPKVFLCYSSKDGQNHMNVVQCFAYFLQDFCGCEVALDLWEDFSLCREGQREWVIQKIHESQFIIVVCSKGMKYFVDKKNYKHKGGGRGSGKGELFLVAVSAIAEKLRQAKQSSSAALSKFIAVYFDYSCEGDVPGILDLSTKYRLMDNLPQLCSHLHSRDHGLQEPGQHTRQGSRRNYFRSKSGRSLYVAICNMHQFIDEEPDWFEKQFVPFHPPPLRYREPVLEKFDSGLVLNDVMCKPGPESDFCLKVEAAVLGATGPADSQHESQHGGLDQDGEARPALDGSAALQPLLHTVKAGSPSDMPRDSGIYDSSVPSSELSLPLMEGLSTDQTETSSLTESVSSSSGLGEEEPPALPSKLLSSGSCKADLGCRSYTDELHAVAPL

SEQ ID NO: 328208 - protein, 73 aa, Artificial Sequence
  derived and/or modified sequence
MESQPFLNMKFETDYFVKVVPFPSIKNESNYHPFFFRTRACDLLLQPDNLACKPFWKPRNLNISQHGSDMQVS

SEQ ID NO: 328209 - DNA, 2148 bp, Artificial Sequence
  derived and/or modified sequence
atgccccgagcaagcgccagcggggtgccagcgctttttgtgagcggagagcagggtgtcggacccgccagcaggaacagtggcctttataatatcacgtttaagtatgacaattgtacaacctacctcaatccagtgggcaagcatgtcatcgccgacgctcagaatattactatcagccagtacgcatgccacgatcaggtggccgtaactattctttggtctccaggcgctctgggcatcgaatttctcaaaggctttcgagtgattctggaggaactaaaaagtgaagggcgccagtgccagcaactgatccttaaggaccccaagcaactgaatagcagcttcaaacgcacaggcatggaatcccagcccttccttaatatgaagtttgaaaccgattatttcgttaaggtggtcccttttccctctattaaaaacgagtcaaactaccaccctttctttttcaggacgcgggcgtgcgatttgctgctacaaccggacaacctcgcttgcaagcccttctggaagcctagaaacctcaatatttcacaacacggctctgatatgcaagtctccttcgaccatgcgccccataactttgggttccggtttttctacttacactataagttgaagcacgaaggtcccttcaagcgcaagacttgcaaacaagaacaaaccacagagaccaccagctgtttgcttcagaatgtgtcaccaggggactatatcatcgagctggtggacgatactaacactacgagaaaggtgatgcattatgccttaaagcccgtgcatagtccttgggcgggccccatccgtgctgtggcaattacagtgccccttgtggtgatatcagcgttcgccacactgtttacggttatgtgccgaaagaaacagcaggagaatatctattcccacctcgacgaagaaagctcggagtcatctacctatactgcagcactacctagggaacggctgcgtccacgcccaaaagtcttcctgtgctattccagtaaagacggtcagaaccacatgaacgtggtgcagtgcttcgcctatttcctgcaggatttctgcggatgcgaagtggccctagacctttgggaagatttctctctgtgccgtgagggtcaacgggaatgggtgatacaaaagatccatgagagccagttcatcatcgtagtctgcagcaagggcatgaagtactttgtggacaagaagaattacaagcacaaaggcggtggccggggatccgggaagggagagttgttccttgtggcagtgagcgccatcgccgagaagttacgacaggccaaacagtcgagttctgcggctctctccaagtttatcgccgtgtattttgattacagctgtgagggggacgttcccggcatcctggacttatcgaccaagtataggctgatggataatctcccccagctatgttctcatctgcatagtagggaccatggtctccaggagccaggacaacacacaaggcagggaagtagacgtaattattttaggagcaagtccggtagatcactctatgtcgctatctgcaacatgcaccagtttatcgatgaggagcccgactggttcgagaaacagttcgtgccttttcacccaccacctcttcgctatcgggaaccagtcttagaaaaattcgatagcgggctcgtgttgaatgacgtgatgtgtaaaccaggacccgagagcgatttttgcctgaaggtcgaagccgctgttctcggggctactggacctgcagatagccagcatgagtcgcagcacggcggactcgaccaggacggagaggcccgccccgcactagacgggagcgcggccttgcagcctctgctccacaccgttaaagccgggtcgccatccgacatgccccgggactcaggcatatatgactcatctgtgccctctagtgaactttccctgccccttatggaaggcctctccaccgatcagaccgaaacttcgtctctcacagagtccgttagtagtagcagcggtttaggtgaagaggagccaccggctctaccgagtaagctcctaagcagcggctcatgtaaagccgacctggggtgtcggtcctacactgacgagctgcatgcagtggcaccactttag

SEQ ID NO: 328210 - DNA, 4291 bp, Artificial Sequence
  derived and/or modified sequence
atgccacgcgcttctgcctcaggtgttcctgcgttgtttgtcagtggagagcagggagtggggccagccagcagaaacagtgggctgtacaacatcaccttcaaatatgacaattgtaccacctacttgaatccagtggggaagcatgtgattgctgacgcccagaatatcaccatcagccagtatgcttgccatgaccaagtggcagtcaccattctttggtccccaggggccctcggcatcgaattcctgaaaggatttcgggtaatactggaggagctgaagtcggagggaagacagtgccaacaactgattctaaaggatccgaagcagctcaacagtagcttcaaaagaactggaatggaatctcaacctttcctgaatatgaaatttgaaacggattatttcgtaaaggttgtcccttttccttccattaaaaacgaaagcaattaccaccctttcttctttagaacccgagcctgtgacctgttgttacagccggacaatctagcttgtaaacccttctggaagcctcggaacctgaacatcagccagcatggctcggacatgcaggtgtccttcgaccatgcaccgcacaacttcggcttccgtttcttctatcttcactacaagctcaagcacgaaggacctttcaagcgaaagacctgtaagcaggagcaaactacagagacgaccagctgcctccttcaaaatgtttctccaggggattatataattgagctggtggatgacactaacacaacaagaaaagtgatgcattatgccttaaagccagtgcactccccgtgggccgggcccatcagagccgtggccatcacagtgccactggtagtcatatcggcattcgcgacgctcttcactgtgatgtgccgcaagaagcaacaagaaaatatatattcacatttagatgaagagagctctgagtcttccacatacactgcagcactcccaagagagaggctccggccgcggccgaaggtctttctctgctattccagtaaagatggccagaatcacatgaatgtcgtccagtgtttcgcctacttcctccaggacttctgtggctgtgaggtggctctggacctgtgggaagacttcagcctctgtagagaagggcagagagaatgggtcatccagaagatccacgagtcccagttcatcattgtggtttgttccaaaggtatgaagtactttgtggacaagaagaactacaaacacaaaggaggtggccgaggctcggggaaaggagagctcttcctggtggcggtgtcagccattgccgaaaagctccgccaggccaagcagagttcgtccgcggcgctcagcaagtttatcgccgtctactttgattattcctgcgagggagacgtccccggtatcctagacctgagtaccaagtacagactcatggacaatcttcctcagctctgttcccacttgcactcccgagaccacggcctccaggagccggggcagcacacgcgacagggcagcagaaggaactacttccggagcaagtcaggccggtccctatacgtcgccatttgcaacatgcaccagtttattgacgaggagcccgactggttcgaaaagcagttcgttcccttccatcctcctccactgcgctaccgggagccagtcttggagaaatttgattcgggcttggttttaaatgatgtcatgtgcaaaccagggcctgagagtgacttctgcctaaaggtagaggcggctgttcttggggcaaccggaccagccgactcccagcacgagagtcagcatgggggcctggaccaagacggggaggcccggcctgcccttgacggtagcgccgccctgcaacccctgctgcacacggtgaaagccggcagcccctcggacatgccgcgggactcaggcatctatgactcgtctgtgccctcatccgagctgtctctgccactgatggaaggactctcgacggaccagacagaaacgtcttccctgacggagagcgtgtcctcctcttcaggcctgggtgaggaggaacctcctgcccttccttccaagctcctctcttctgggtcatgcaaagcagatcttggttgccgcagctacactgatgaactccacgcggtcgcccctttgtaacaaaacgaaagagtctaagcattgccactttagctgctgcctccctctgattccccagctcatctccctggttgcatggcccacttggagctgaggtctcatacaaggatatttggagtgaaatgctggccagtacttgttctcccttgccccaaccctttaccggatatcttgacaaactctccaattttctaaaatgatatggagctctgaaaggcatgtccataaggtctgacaacagcttgccaaatttggttagtccttggatcagagcctgttgtgggaggtagggaggaaatatgtaaagaaaaacaggaagatacctgcactaatcattcagacttcattgagctctgcaaactttgcctgtttgctattggctaccttgatttgaaatgctttgtgaaaaaaggcacttttaacatcatagccacagaaatcaagtgccagtctatctggaatccatgttgtattgcagataatgttctcatttatttttgatgtagaatttacattgccatgggtgttaaataagctttgagtcaaaagtcaagaaagtgactgaatatacagtcaccttttatgaaatgagtctctgtgttactgggtggcatgactgattgaggtgaagctcacggggccaggctgaccgtcttgaccgttccacttgagataggttggtcatcgtgcagaaggccccaggacctcagcacacacagcctcctcttggtctgagtaggcatcatgtgggggccagatctgcctgctgtttccatgggttacatttactgtgctgtatctcagatgttggtgtctggaagtttattcttaagagactgctacccagctggtctgtattattggaagttgcagttcgtgctttggttggccttctggtctaaagctgtgtcctgaatattagggatcacaattcactgaaatacagcagtgtgtggaggtgatggccagttaatctgctgaactggttttgactaatgacaaacctctttttaagatggtagaatggaggtgatagtcacaaaagtaaatgttccatttttatgaatgactttctacagagtttctatttctaaagaaaaaacaattgttcacatcccatctgatgattagcatgtgtgtaatgaatgctgtcttggtctcccctgtggaaacccttctccctgtgccttagagcaggtgtgtacatctctcactacctttctcatgggtgctgttagattttggcacccgttttctcagcattcagcccagggaatgtggttttcacttcttcgtcagataagaccaacatgaaggggtatgttgagaaacatcctgaggcaaggtgggaggtgggatggggcaggactttcccttccaagcacatgcatggcaggtggggaaaggggggcttgcacccctgctggaaagaaaaggtttgtgtatatttctgatgcaaatgtcatactcactgctctgtaaaggcagctggcagctttttgggaaaagaacgtgctcgtctgttctctggcatcaagtttcttgcagctgctctgagggagagacagtgagctgcaagactgcctccccataacaacaggcaactcagagaagagtcattttatgttgttcctatggaatctggaatgagtgcagagctcctacccacacatgactgccccgccatttcatcctaggcattctgtgaaggagattggttagtccaaacttgctaacatacgaaaattcacttggaacatgatgagagatttcttattgaggccaagagatgtttcctgtcccagaggaaccattaggagtcgcttttagggtattcagctttgttcatgaaataaggcatctctgagaaagtggccccagggagagaatggaggactgggaggagaagcattaactgagctccaagggtgtgtgggcagagagcttgctatgtgaactcactccttaagaaaatggaagagaaaaagagagtgctagttaaaaaatcgggatgttttagtttggatttagggttttgatacttatgttgaaatactaatgtttctgatcaataaaatcaaactcttaatataccgagtaatgaaaccatagtgtgattgcctcagaataaattgagaagtcc

SEQ ID NO: 328211 - DNA, 2348 bp, Artificial Sequence
  derived and/or modified sequence
gcctcaggtgttcctgcgttgtttgtcagtggagagcagggagtggggccagccagcagaaacagtgggctgtacaacatcaccttcaaatatgacaattgtaccacctacttgaatccagtggggaagcatgtgattgctgacgcccagaatatcaccatcagccagtatgcttgccatgaccaagtggcagtcaccattctttggtccccaggggccctcggcatcgaattcctgaaaggatttcgggtaatactggaggagctgaagtcggagggaagacagtgccaacaactgattctaaaggatccgaagcagctcaacagtagcttcaaaagaactggaatggaatctcaacctttcctgaatatgaaatttgaaacggattatttcgtaaaggttgtcccttttccttccattaaaaacgaaagcaattaccaccctttcttctttagaacccgagcctgtgacctgttgttacagccggacaatctagcttgtaaacccttctggaagcctcggaacctgaacatcagccagcatggctcggacatgcaggtgtccttcgaccatgcaccgcacaacttcggcttccgtttcttctatcttcactacaagctcaagcacgaaggacctttcaagcgaaagacctgtaagcaggagcaaactacagagacgaccagctgcctccttcaaaatgtttctccaggggattatataattgagctggtggatgacactaacacaacaagaaaagtgatgcattatgccttaaagccagtgcactccccgtgggccgggcccatcagagccgtggccatcacagtgccactggtagtcatatcggcattcgcgacgctcttcactgtgatgtgccgcaagaagcaacaagaaaatatatattcacatttagatgaagagagctctgagtcttccacatacactgcagcactcccaagagagaggctccggccgcggccgaaggtctttctctgctattccagtaaagatggccagaatcacatgaatgtcgtccagtgtttcgcctacttcctccaggacttctgtggctgtgaggtggctctggacctgtgggaagacttcagcctctgtagagaagggcagagagaatgggtcatccagaagatccacgagtcccagttcatcattgtggtttgttccaaaggtatgaagtactttgtggacaagaagaactacaaacacaaaggaggtggccgaggctcggggaaaggagagctcttcctggtggcggtgtcagccattgccgaaaagctccgccaggccaagcagagttcgtccgcggcgctcagcaagtttatcgccgtctactttgattattcctgcgagggagacgtccccggtatcctagacctgagtaccaagtacagactcatggacaatcttcctcagctctgttcccacttgcactcccgagaccacggcctccaggagccggggcagcacacgcgacagggcagcagaaggaactacttccggagcaagtcaggccggtccctatacgtcgccatttgcaacatgcaccagtttattgacgaggagcccgactggttcgaaaagcagttcgttcccttccatcctcctccactgcgctaccgggagccagtcttggagaaatttgattcgggcttggttttaaatgatgtcatgtgcaaaccagggcctgagagtgacttctgcctaaaggtagaggcggctgttcttggggcaaccggaccagccgactcccagcacgagagtcagcatgggggcctggaccaagacggggaggcccggcctgcccttgacggtagcgccgccctgcaacccctgctgcacacggtgaaagccggcagcccctcggacatgccgcgggactcaggcatctatgactcgtctgtgccctcatccgagctgtctctgccactgatggaaggactctcgacggaccagacagaaacgtcttccctgacggagagcgtgtcctcctcttcaggcctgggtgaggaggaacctcctgcccttccttccaagctcctctcttctgggtcatgcaaagcagatcttggttgccgcagctacactgatgaactccacgcggtcgcccctttgtaacaaaacgaaagagtctaagcattgccactttagctgctgcctccctctgattccccagctcatctccctggttgcatggcccacttggagctgaggtctcatacaaggatatttggagtgaaatgctggccagtacttgttctcccttgccccaaccctttaccggatatcttgacaaactctccaattttctaaaatgatatggagctctgaaa

SEQ ID NO: 328212 - DNA, 2148 bp, Artificial Sequence
  derived and/or modified sequence
atgccccgggccagcgccagcggcgtgcctgccctgtttgtgtctggagagcagggcgtgggccctgccagcagaaattctggcctgtacaacatcaccttcaagtatgacaactgcaccacctacctgaaccctgtgggcaagcacgtgattgctgatgcccagaacatcaccatcagccagtatgcctgccacgaccaggtggccgtgaccatcctgtggagccctggggccctgggcatcgagttcctgaagggcttccgggtcatcctggaggagctgaagtctgagggccggcagtgccagcagctgatcctgaaggaccccaagcagctgaacagcagcttcaagaggacaggcatggagagccagcccttcctgaacatgaagtttgaaacagactactttgtgaaggtggtgcccttccccagcatcaagaatgaaagcaactaccaccccttcttcttccgcacccgggcctgtgacctgctgctgcagcctgacaacctggcctgcaagcccttctggaagcccaggaacctgaacatcagccagcacggcagtgacatgcaggtgtcctttgaccacgccccccacaactttggcttccgcttcttctacctgcactacaagctgaagcatgagggccccttcaagaggaagacctgcaagcaggagcagaccacagagaccaccagctgcctgctgcagaatgtgtcccctggggactacatcatcgagctggtggatgacaccaacaccaccaggaaggtgatgcactacgccctgaagcctgtgcacagcccctgggccggccccatccgggctgtggccatcaccgtgcccctggtggtgatcagcgcctttgccaccctcttcaccgtgatgtgcaggaagaagcagcaggagaacatctacagccacctggatgaggagagcagcgagagcagcacctacacagctgccctgccccgggagcggctgcggccccggcccaaggtgttcctgtgctacagcagcaaggatggccagaaccacatgaatgtggtgcagtgctttgcctacttcctgcaggacttctgtggctgtgaggtggccctggacctgtgggaggacttcagcctgtgccgggagggccagcgggagtgggtgatccagaagatccacgagagccagttcatcatcgtggtgtgcagcaagggcatgaagtactttgtggacaagaagaactacaagcacaagggcggcggccggggcagcggcaagggggagctgttcctggtggccgtgtctgccatcgccgagaagctgcggcaggccaagcagagcagcagcgctgccctgagcaagttcatcgctgtgtactttgactacagctgtgaaggagatgtgcccggcatcctggacctgagcaccaagtaccgcctgatggacaacctgccccagctgtgcagccacctgcacagccgggaccacggcctgcaggagcccggccagcacacccggcagggcagcagaagaaactacttccgcagcaagagcggccgcagcctgtatgtggccatctgcaacatgcaccagttcattgatgaggagccagactggtttgagaagcagtttgtgcccttccaccccccacccctgcgctaccgggagcctgtgctggagaagtttgacagcggcctggtgctgaatgatgtgatgtgcaagccaggccctgagagtgacttctgcctgaaggtggaggccgctgtgctgggcgccactggacctgctgacagccagcacgagagccagcacggcggcctggaccaggatggagaggcccggcctgccctggatggcagcgctgccctgcagcccctgctgcacacagtgaaggccggcagccccagcgacatgccccgggacagcggcatctatgacagctctgtgcccagcagcgagctgagcctgcccctgatggagggcctgagcacagaccagacagagaccagcagcctgacagaatctgtgagcagcagcagcggcctgggggaggaggagcccccagccctgcccagcaagctgctgagcagcggcagctgcaaggctgacctgggctgccgcagctacacagatgagctgcatgctgtggcccccctgtag

SEQ ID NO: 328213 - DNA, 2148 bp, Artificial Sequence
  derived and/or modified sequence
atgccccgggccagcgccagcggcgtgcccgccctgttcgtgagcggagagcagggagttggtcccgccagtaggaactcaggcttatacaacattaccttcaaatacgacaattgtactacctatctgaaccccgtaggtaagcacgtgattgcagatgcccaaaacataactatctcccagtacgcttgccacgaccaggtcgccgttactattctatggtcgcccggcgcattaggaattgagtttttgaaaggttttcgcgtgatcttggaggagctcaaatctgagggtcgtcaatgccagcaactgattttgaaggatccaaagcagctcaatagctcattcaagagaacaggtatggaatctcagccatttctcaacatgaaatttgagacagattatttcgtaaaagtagttcccttcccgtccattaaaaatgagtctaactaccacccttttttctttcggacacgggcttgtgacctgttgttacagccagacaatctagcctgtaaacctttctggaagcccagaaaccttaacatctctcagcacggcagcgatatgcaggtatcctttgaccacgcccctcacaatttcgggttccgcttcttttatctccactataagttaaaacacgagggaccgtttaagaggaagacgtgcaagcaagagcagactacagagacaacctcctgcctactgcaaaacgtgtctcccggcgattacataatcgagctggtggacgacacgaataccacccggaaggtgatgcactacgccttaaagccagtgcacagcccgtgggctggccccatacgagccgtagccattaccgtccccctggtggtgatctccgcattcgcaactctctttacagtcatgtgccgcaaaaagcagcaggagaacatctattcccacctggatgaggagtctagcgaaagcagcacgtataccgctgctttaccgcgggagcgtttgaggcctagacccaaggtgtttttatgttattcaagcaaagacggccaaaatcacatgaacgtagtacagtgcttcgcatacttcttacaggacttttgcgggtgcgaggttgcgcttgatctatgggaggatttcagcctgtgtcgggagggccagagggaatgggttatacagaagatacacgagagccagttcattatcgttgtttgttcgaaaggaatgaagtacttcgtggacaagaagaactacaagcacaagggcggtggacgcgggtcagggaagggagagctctttcttgtggccgtgagcgctatagctgagaagctgcgacaggccaagcaaagctcttcagcagctctatcaaagttcatagctgtctactttgattactcctgcgagggcgacgtgccaggcatcctggatctctcaaccaagtacaggttgatggataatcttccacagctatgctctcaccttcatagccgggatcacgggctgcaggagccaggccagcatacaagacaggggtcccggaggaattatttcaggtctaagagcggtcgctcactctacgttgccatctgcaatatgcaccagtttatagacgaagagcccgactggtttgagaagcagttcgtaccttttcacccccccccactgaggtatcgcgagcccgttctggagaagtttgatagtgggctagtcctgaatgatgttatgtgtaagcccggaccagaatctgatttttgtctgaaggtcgaagcggcagttctgggcgccaccggacctgcagactctcaacacgagagccagcatggcgggctggaccaagacggcgaggcccgtcccgctttagatggctctgcagctcttcaaccattacttcacacagtcaaggcggggtctcccagcgacatgccacgtgatagtggcatctacgatagtagcgtcccttcatcagagctctcattacccctgatggaagggctgtctactgaccagacagagacctcctccctcaccgagtccgtgagctcaagcagtggattaggcgaagaagagccacctgctctcccatctaagctcttgtcaagcggcagctgtaaggcagacctcggctgcaggagctacactgacgagttacacgctgtggctcccctgtag

SEQ ID NO: 328214 - DNA, 2148 bp, Artificial Sequence
  derived and/or modified sequence
atgcccagggcgtccgctagcggtgtccccgctctctttgtgagcggtgagcagggcgtcggccctgcgtctcggaacagcgggctgtacaatatcacttttaaatacgacaactgcaccacctacctaaaccccgtaggtaaacacgtgattgcagatgctcaaaatattactattagccagtatgcttgccacgatcaggtcgcagtcactatcctgtggagcccaggcgctctcggaatagaattcttgaaggggttcagagttattctcgaggaactgaagagtgagggacggcagtgccaacagcttattctgaaagaccccaagcagctgaatagcagcttcaagaggactggcatggaatcacaacccttcctcaacatgaaattcgagacggattactttgtcaaagtagtcccgtttccaagcataaagaacgaatccaattaccaccctttttttttcagaacgcgcgcttgcgacttgctgctccagcccgacaacctggcttgcaaacctttctggaagcccagaaacctcaatattagtcagcacggctctgacatgcaagtctctttcgaccatgctccccacaattttgggtttcgctttttttacctccactacaagctgaaacacgaagggccattcaaacgaaagacttgcaagcaggaacagactacagagaccaccagttgcctgttgcagaacgtgtccccgggagactacataatcgaactggtcgatgataccaacactacccgtaaggtgatgcactatgccctgaagccagtgcactcgccatgggcgggtcccatcagggctgtcgccattactgttcccctggtggttatctccgccttcgctacgctctttacagtcatgtgtagaaagaagcaacaagaaaacatttactcccatctggatgaggaatcatctgagtcttccacgtacacagccgcactcccacgggagcgcctccggcctcggcctaaagtttttctgtgctacagttcaaaagacggacagaaccatatgaatgtcgtccagtgtttcgcctattttcttcaggatttctgtgggtgcgaggtcgcactcgatctctgggaagatttctctctttgtagagaaggccagcgggaatgggtgattcagaagatacacgaaagccagtttatcatcgtcgtctgctctaagggaatgaagtatttcgtggataaaaaaaactacaaacataagggaggaggcaggggatcagggaagggagagctgttcctggtcgccgtgagtgctatagccgaaaagttgcgccaggccaagcagtcatcctctgctgctctgtcgaaatttatcgccgtctacttcgactacagttgcgaaggagatgtgcctgggatcttggatctcagcacaaaatatcgcttgatggacaatctcccacagctgtgttcacacctgcattcacgagatcacggtcttcaagaaccaggacagcataccaggcagggcagtcggcgtaactactttcgcagtaaatctggacggtccttgtacgtcgccatttgcaacatgcatcagttcatcgatgaggagccagactggttcgaaaagcagtttgtccccttccatcccccacccttgcggtaccgggagcccgtgctcgaaaaatttgactctggactcgtgctcaatgatgttatgtgcaagccagggcctgaaagtgacttctgtttgaaagtggaggccgcagtgctcggcgcaacaggcccagcagactcccaacacgagtcacagcacgggggactggatcaagatggagaagccagacccgctctggatggcagtgctgccctgcagccactgttgcacaccgtcaaagccggatcaccaagtgatatgccgcgagactctggaatatacgactcatctgtgccctcttctgaattaagcctcccactgatggagggcctctcaacagatcagacagaaacctctagcctaactgagtcagtgtcctcctcgagcggcctcggcgaggaggagccccctgccttaccgtccaaactgctgagcagcggatcatgcaaggccgatctgggttgtcggagttacaccgatgagcttcacgccgtcgctccattgtag

SEQ ID NO: 328215 - DNA, 2148 bp, Artificial Sequence
  derived and/or modified sequence
atgcccagagccagcgccagcggcgtgcccgccctgttcgtgagcggcgagcagggcgtgggccccgccagcagaaacagcggcctgtacaacatcaccttcaagtacgacaactgcaccacctacctgaaccccgtgggcaagcacgtgatcgccgacgcccagaacatcaccatcagccagtacgcctgccacgaccaggtggccgtgaccatcctgtggagccccggcgccctgggcatcgagttcctgaagggcttcagagtgatcctggaggagctgaagagcgagggcagacagtgccagcagctgatcctgaaggaccccaagcagctgaacagcagcttcaagagaaccggcatggagagccagcccttcctgaacatgaagttcgagaccgactacttcgtgaaggtggtgcccttccccagcatcaagaacgagagcaactaccaccccttcttcttcagaaccagagcctgcgacctgctgctgcagcccgacaacctggcctgcaagcccttctggaagcccagaaacctgaacatcagccagcacggcagcgacatgcaggtgagcttcgaccacgccccccacaacttcggcttcagattcttctacctgcactacaagctgaagcacgagggccccttcaagagaaagacctgcaagcaggagcagaccaccgagaccaccagctgcctgctgcagaacgtgagccccggcgactacatcatcgagctggtggacgacaccaacaccaccagaaaggtgatgcactacgccctgaagcccgtgcacagcccctgggccggccccatcagagccgtggccatcaccgtgcccctggtggtgatcagcgccttcgccaccctgttcaccgtgatgtgcagaaagaagcagcaggagaacatctacagccacctggacgaggagagcagcgagagcagcacctacaccgccgccctgcccagagagagactgagacccagacccaaggtgttcctgtgctacagcagcaaggacggccagaaccacatgaacgtggtgcagtgcttcgcctacttcctgcaggacttctgcggctgcgaggtggccctggacctgtgggaggacttcagcctgtgcagagagggccagagagagtgggtgatccagaagatccacgagagccagttcatcatcgtggtgtgcagcaagggcatgaagtacttcgtggacaagaagaactacaagcacaagggcggcggcagaggcagcggcaagggcgagctgttcctggtggccgtgagcgccatcgccgagaagctgagacaggccaagcagagcagcagcgccgccctgagcaagttcatcgccgtgtacttcgactacagctgcgagggcgacgtgcccggcatcctggacctgagcaccaagtacagactgatggacaacctgccccagctgtgcagccacctgcacagcagagaccacggcctgcaggagcccggccagcacaccagacagggcagcagaagaaactacttcagaagcaagagcggcagaagcctgtacgtggccatctgcaacatgcaccagttcatcgacgaggagcccgactggttcgagaagcagttcgtgcccttccaccccccccccctgagatacagagagcccgtgctggagaagttcgacagcggcctggtgctgaacgacgtgatgtgcaagcccggccccgagagcgacttctgcctgaaggtggaggccgccgtgctgggcgccaccggccccgccgacagccagcacgagagccagcacggcggcctggaccaggacggcgaggccagacccgccctggacggcagcgccgccctgcagcccctgctgcacaccgtgaaggccggcagccccagcgacatgcccagagacagcggcatctacgacagcagcgtgcccagcagcgagctgagcctgcccctgatggagggcctgagcaccgaccagaccgagaccagcagcctgaccgagagcgtgagcagcagcagcggcctgggcgaggaggagccccccgccctgcccagcaagctgctgagcagcggcagctgcaaggccgacctgggctgcagaagctacaccgacgagctgcacgccgtggcccccctgtag

SEQ ID NO: 328216 - DNA, 2495 bp, Artificial Sequence
  derived and/or modified sequence
taattgtgagctggttaagaagtttttagatccaaacaactattccgcaaactatactgagattgccttgcaacaggtttccatgttcttccgatcagaaccaaagtgggaggtggtggaacctttgaaagacataggttggagaataaggaagaaatatttcttgatgaagattaaaaatcagccaaaggaacggctagtgttaagctgggctgaccttggcccagacaagtatttgtcagataaagattttcagtgtctaatcaaacttctgccttcttgtttgcacccttacatctatcgggttacctttgccacagctaatgaatcctcagcgttgctaattaggatgtttaacgaaaagggaacattgaaggatctgatctacaaggcaaaaccaaaagacccatttctaaagaagtactgcaaccctaagaagattcagggcctggaactccagcaaataaaaacatatggacggcaaatattagaggtactgaagtttcttcatgacaagggattcccttatgggcatcttcacgcctccaatgtgatgctcgatggggacacttgccggctgctggaccttgagaattccttattgggcctgccttccttctaccgatcttatttttcacaattcaggaaaatcaatacattggaaagtgtggatgtccactgctttggccacttactgtatgaaatgacttatggacgaccgccagactcggtgcctgtggactccttccctcctgccccgtccatggctgtggtggccgtgttggagtctacgctgtcttgtgaagcctgtaaaaatggcatgcctaccatctcccggctcttacagatgccattattcagcgatgttttactaaccacttctgaaaaaccacagtttaagatccctacaaagttaaaagaggcattgagaattgccaaagaatgtatagagaagagactaattgaggaacagaaacagattcaccagcatcgaagactgacaagagctcagtcccaccatggatctgaggaggaaagaaaaaagaaagattttagctcgaaagaagtcaaaacgatctgctcttgaaaatagtgaagagcattcagcgaagtacagcaactccaataattcagcaggatctggggccagctcacctctcacgtccccgtcatcgccaactccaccctctacatcagtagagcatgcaccattttgaacgtgaattttcgggatatctgcattacctccacctcctccacctccaccaccaccagcagctcccttgcctcctgcgagcaccgaggcacctgcccagctctcgtctcaggctgtgaatggcatgagccgaggggccttgctcagctccatccagaatttccaaaaaggaactttgaggaaagccaaaacctgtgatcacagtgctccgaagatcggctgaagcttcctgtttacacttggagggaaaagttcttttttattcctactcacccctaccccccaaactaccctcttcctgggaaagtaattgctgagccagtacagccacaaacagtactattttgcagatgctcatgtaagcagcttttcgagagaaataattctttaagcagaataaagttaggctggcattgctcccttaagatcttgctcctttattaaccctgtaaaggagtcttgtttatcctctaatggccaggcttttgggacagcagcatattgaaatattttcaccaactaaaggaaatagacagaaaaacaatgacaatattcaatcacagcagtaaatggcctttgtgttgcaatcccttctaccccatcagacagctcctagaaacattcctcttacagttcatttctctaaagcattttctgattcttagataactccaatttttgctacctttatcttagacattaacactatagcccaaagcatagttactttgctaaatcagaaagcaactgagttctttgttttctcctcaaatagaatggggaacgttcacaacattctcttaagttctaacaggaataccattgtggttatagaactcagggctgctaaagcaactactctagacccatagttctttttagttagatgtattgaaacagacaaaaatattaacatcagaaaaagctcttgccaattagaggatcttcttaatcctcagcaattaagtttggggtttgaggggggcaggtcattgttacaacagaagtaaatttggcatctatagaaatcaattatgatttttgaaagatttatctaaatatatcaatatagcatctctttaatgttagtcatttattagaaagatcctttatcctgatttgcttaaacctttcaataaattgcactttaaaggattataaataatccatttaaaaattcaagtacacacatcagtgttggttactatgcagagaatgtcattgtgtatagtttcatgtaatctgttatgtcagctgtattttttattaaaatcatgtc

SEQ ID NO: 328217 - DNA, 210 bp, Artificial Sequence
  derived and/or modified sequence
atgcagaagtactgcatctaccagcacttccagttccagctgctgatccagcacctgtggatcgccgccaactgcgacatctgggccaaggtggccagagtgatcggcctgctggccagccacaagaccgacctgcaggagaacacccccgtggtggaggccttccccaacagccccagaacccccaccctgcccggcgtgctgacctag

SEQ ID NO: 328218 - DNA, 210 bp, Artificial Sequence
  derived and/or modified sequence
atgcaaaaatactgcatttatcagcattttcagttccagttgctgattcagcacctgtggatcgccgccaactgcgacatctgggctaaggtagcaagggtgataggtctcctggcttcacacaaaaccgatctgcaggagaacacacccgttgtggaagcattcccaaactcgcccaggacacctacactccccggagtgctgacatag

SEQ ID NO: 328219 - DNA, 210 bp, Artificial Sequence
  derived and/or modified sequence
atgcagaaatactgcatttatcaacacttccaatttcagcttttgatacagcacctttggatcgcagcaaattgcgacatttgggcaaaagtggcccgcgttatcggactgctggcctcccacaaaactgacctccaggagaatacgcccgtggtggaagccttcccaaatagcccccgcactccaaccctgcccggcgtgctgacgtag

SEQ ID NO: 328220 - DNA, 210 bp, Artificial Sequence
  derived and/or modified sequence
atgcagaagtactgcatctaccagcacttccagttccagctgctgatccagcacctgtggattgctgccaactgtgacatctgggccaaggtggcccgggtgattggcctgctggccagccacaagacagacctgcaggagaacacccctgtggtggaggccttccccaacagccccaggacccccaccctgcccggggtgctgacctag

SEQ ID NO: 328221 - DNA, 210 bp, Artificial Sequence
  derived and/or modified sequence
atgcagaagtactgcatctaccagcacttccagttccagctgctgatccagcacctttggatagcagccaactgtgatatttgggccaaggtagcgcgcgtaatcgggctgctcgccagtcacaaaaccgacctccaggagaatactcccgtggtggaggcttttccgaactcgccccgtactcccaccttgcccggagttttaacttag

SEQ ID NO: 328222 - DNA, 210 bp, Artificial Sequence
  derived and/or modified sequence
atgcagaagtactgcatctaccagcacttccagttccagctgctgattcaacacctctggatcgctgccaactgcgacatctgggctaaagtggctagggttataggcctgctagccagtcacaaaactgacttacaagaaaatacaccggttgtggaggcttttcccaatagccctagaacgccgacattgcccggcgttctgacatag

SEQ ID NO: 328223 - DNA, 210 bp, Artificial Sequence
  derived and/or modified sequence
atgcagaaatactgtatttatcagcattttcagttccagttgctgatccagcatctgtggatcgccgctaattgtgacatctgggcgaaagttgctagggttattggacttctcgcttctcacaagactgacctgcaggaaaacacccctgtggtcgaagcctttccgaactcaccacgtactccaactcttcccggagtcttaacatag

SEQ ID NO: 328224 - DNA, 210 bp, Artificial Sequence
  derived and/or modified sequence
atgcagaagtactgcatctatcagcactttcagtttcagctgctgattcagcacctgtggatcgccgcaaattgcgacatctgggcaaaggtggcgcgagtgatcgggctactcgcgtcccataaaaccgatttgcaggaaaatacccctgtcgtagaggctttcccaaacagccccagaacaccgacgttaccaggtgttctgacctag

SEQ ID NO: 328225 - DNA, 210 bp, Artificial Sequence
  derived and/or modified sequence
atgcagaagtattgtatttatcagcactttcagtttcaattactgatccagcacctttggatagccgccaactgtgatatctgggctaaagtagctcgggtcatcggcctgctggcctcccacaagacagacctccaggaaaatactcccgtagttgaggcatttccaaactcccctagaacccctaccttgccaggggttctaacttag

SEQ ID NO: 328226 - DNA, 210 bp, Artificial Sequence
  derived and/or modified sequence
atgcagaagtactgcatctaccagcacttccagttccagctgctgatccagcacctctggattgccgctaattgtgacatttgggccaaggttgcgcgggtcattggattgctcgccagccacaagaccgacctacaagaaaacacgccagtggtggaggctttcccaaactccccgcgtacgcccacactccccggtgtgcttacatag

SEQ ID NO: 328227 - DNA, 210 bp, Artificial Sequence
  derived and/or modified sequence
atgcagaagtactgtatttaccagcacttccagttccagttactaatacaacacctgtggatagcagcaaactgcgatatctgggctaaagtagctcgggtgatcggactactggcttcacacaaaactgaccttcaagaaaacacccccgttgtggaggctttccccaactccccacgaaccccaacactacctggggtgctgacatag

SEQ ID NO: 328228 - DNA, 2095 bp, Artificial Sequence
  derived and/or modified sequence
cttttaaagtttgaggggcggtggtggcggcggccggcaggcgcgggggaacacaggggccgctacgggagccgcgccgccgcccatgtcattccacttcaagtgacttcatgtgatgtcagctgaatgtaaaagacagtgatctcacgcggaggggaagatgtttgccatcaaaatgtgacagaagagacacgctgcatggctcggaacgcatctccttggtggtgggggaaagagacttagaggagagaggctgcgccctggcccagcctggctcggctcagctccgcgcgccatggcaagctcggcttccctggagaccatggtgcccccggcctgcccgcgcgccggagcgtcgccggccacttccaagacactggccttttccatcgagcgcatcatggccaagacgtcggagccccgtgcgccctttgagccccggcctggagcgctagaggcggacggcagccagggcaagaaactgctcaacctctgctcgccgctgccctgtatgatccccctccagcccctaggctacgaggtgccgtcaaagacactgctcagttactcggagctctggaaaagcagcctccgggcgggcggcggcggaggcggcggcggcggtggcggcggcggcggcgggggggccccagtgtgcggcgccagcggcttgtgcaaaaccaactgtggcgtgtgctgcaaggccgagctgggcctggcgccgtccgcgctgcccgcgggcagggtcatcaagccgcaggtcatcaaccaggctgtggggctgccggccagcggctcgctctactacttcaactacctggactcgaccgcgtacccgccgtctgagctcctcagcggccacctcttcccgtctggcctcctcaatgcgcaggcccccgccgccctggctgctcaccccaagctctttctgctggagaacgccaagctggccggcctggctgcggacaagttcccccacccggctccctatccccataaggagcgcttgccggcgccgctggagcaggtactgaaggaaaactcggccctgactgccgagcgcggaggcgtcaagggccacagcaagctgccaggaggctccgcagatggcaagcccaaaaacttcacctgcgaggtgtgcggcaaggtgtttaacgctcactataatctcacccgccacatgccggtccacaccggagccagaccgttcgtgtgcaaagtctgcggcaaaggctttcgccaggccagcacgctctgcaggcacaaaattatccacacccaggaaaagccacataaatgcaaccagtgcggcaaagcgttcaaccgcagctccacgctcaacacgcatatccgcatccacgcgggctacaagcccttcgtctgcgaattttgcggcaaaggctttcaccaaaaagggaactacaagaaccacaagctgacccacagcggcgagaagcagtacaaatgtaccatctgcaacaaggccttccaccaggtctacaacctaaccttccatatgcacacccacaacgacaagaagcctttcacgtgcgccacttgcggcaaagggttttgcagaaactttgacttaaagaaacatgtgcgcaaactccacgacagcgtgggccctgctgccccctccgcaaaggacctgactaggacagtgcagagctgagagctactgccttgcccttccttccctccctgtaccacctgaaaacagatcacacatataaacttatttctaaaattaaaagaaaaaaaaactatagcagagaggctaaaatctatttatcgaaaccagcatatttttggaaagctaaatgtttcctcgatgactggcagcaaactcgtggcccccacctttgtatattcaggaaacttatttaaatccagtgcgccgaaacgtatttaattccaggcctccgcttctcctggggcagccagttttaaccccagcctgtcaccgtgagcgccccagaagagcgcggcgcccctagccatctttatacagccatgtaaatcctcctgtacaagcgaacacggaatatatacatatataactcaataaacagaatcattagtgaaaaaaaaa

SEQ ID NO: 328229 - DNA, 2074 bp, Artificial Sequence
  derived and/or modified sequence
cttttaaagtttgaggggcggtggtggcggcggccggcaggcgcgggggaacacaggggccgctacgggagccgcgccgccgcccatgtcattccacttcaagtgacttcatgtgatgtcagctgaatgtaaaagacagtgatctcacgcggaggggaagatgtttgccatcaaaatgtgacagaagagacacgctgcatggctcggaacgcatctccttggtggtgggggaaagagacttagaggagagaggctgcgccctggcccagcctggctcggctcagctccgcgcgccatggcaagctcggcttccctggagaccatggtgcccccggcctgcccgcgcgccggagcgtcgccggccacttccaagacactggccttttccatcgagcgcatcatggccaagacgtcggagccccgtgcgccctttgagccccggcctggagcgctagaggcggacggcagccagggcaagaaactgctcaacctctgctcgccgctgccctgtatgatccccctccagcccctaggctacgaggtgccgtcaaagacactgctcagttactcggagctctggaaaagcagcctccgggcgggcggcggcggaggcggcggcggcggtggcggcggcggcggcgggggggccccagtgtgcggcgccagcggcttgtgcaaaaccaactgtggcgtgtgctgcaaggccgagctgggcctggcgccgtccgcgctgcccgcgggcagggtcatcaagccgcaggtcatcaaccaggctgtggggctgccggccagcggctcgctctactacttcaactacctggactcgaccgcgtacccgccgtctgagctcctcagcggccacctcttcccgtctggcctcctcaatgcgcaggcccccgccgccctggctgctcaccccaagctctttctgctggagaacgccaagctggccggcctggctgcggacaagttcccccacccggctccctatccccataaggagcgcttgccggcgccgctggagcaggtactgaaggaaaactcggccctgactgccgagcgcggaggcgtcaagggccacagcaagctgccaggaggctccgcagatggcaagcccaaaaacttcacctgcgaggtgtgcggcaaggtgtttaacgctcactataatctcacccgccacatgccggtccacaccggagccagaccgttcgtgtgcaaagtctgcggcaaaggctttcgccaggccagcacgctctgcaggcacaaaattatccacacccaggaaaagccacataaatgcaaccagtgcggcaaagcgttcaaccgcagctccacgctcaacacgcatatccgcatccacgcgggctacaagcccttcgtctgcgaattttgcggcaaaggctttcaccaaaaagggaactacaagaaccacaagctgacccacagcggcgagaagcagtacaaatgtaccatctgcaacaaggccttccaccaggtctacaacctaaccttccatatgcacacccacaacgacaagaagcctttcacgtgcgccacttgcggcaaagggttttgcagaaactttgacttaaagaaacatgtgcgcaaactccacgacagcgtgggccctgctgccccctccgcaaaggacctgactaggacagtgcagagctgagagctactgccttgcccttccttccctccctgtaccacctgaaaacagatcacacatataaacttatttctaaaattaaaagaaaaaaaaactatagcagagaggctaaaatctatttatcgaaaccagcatatttttggaaagctaaatgtttcctcgatgactggcagcaaactcgtggcccccacctttgtatattcaggaaacttatttaaatccagtgcgccgaaacgtatttaattccaggcctccgcttctcctggggcagccagttttaaccccagcctgtcaccgtgagcgccccagaagagcgcggcgcccctagccatctttatacagccatgtaaatcctcctgtacaagcgaacacggaatatatacatatataactcaataaaca

SEQ ID NO: 328230 - DNA, 1918 bp, Artificial Sequence
  derived and/or modified sequence
cctgttcatttgaatgcaaatgggtgacccgggcccgactaggtgcttattaaattgcagttttcccccctgccttttccggaatgcagacttagaggagagaggctgcgccctggcccagcctggctcggctcagctccgcgcgccatggcaagctcggcttccctggagaccatggtgcccccggcctgcccgcgcgccggagcgtcgccggccacttccaagacactggccttttccatcgagcgcatcatggccaagacgtcggagccccgtgcgccctttgagccccggcctggagcgctagaggcggacggcagccagggcaagaaactgctcaacctctgctcgccgctgccctgtatgatccccctccagcccctaggctacgaggtgccgtcaaagacactgctcagttactcggagctctggaaaagcagcctccgggcgggcggcggcggaggcggcggcggcggtggcggcggcggcggcgggggggccccagtgtgcggcgccagcggcttgtgcaaaaccaactgtggcgtgtgctgcaaggccgagctgggcctggcgccgtccgcgctgcccgcgggcagggtcatcaagccgcaggtcatcaaccaggctgtggggctgccggccagcggctcgctctactacttcaactacctggactcgaccgcgtacccgccgtctgagctcctcagcggccacctcttcccgtctggcctcctcaatgcgcaggcccccgccgccctggctgctcaccccaagctctttctgctggagaacgccaagctggccggcctggctgcggacaagttcccccacccggctccctatccccataaggagcgcttgccggcgccgctggagcaggtactgaaggaaaactcggccctgactgccgagcgcggaggcgtcaagggccacagcaagctgccaggaggctccgcagatggcaagcccaaaaacttcacctgcgaggtgtgcggcaaggtgtttaacgctcactataatctcacccgccacatgccggtccacaccggagccagaccgttcgtgtgcaaagtctgcggcaaaggctttcgccaggccagcacgctctgcaggcacaaaattatccacacccaggaaaagccacataaatgcaaccagtgcggcaaagcgttcaaccgcagctccacgctcaacacgcatatccgcatccacgcgggctacaagcccttcgtctgcgaattttgcggcaaaggctttcaccaaaaagggaactacaagaaccacaagctgacccacagcggcgagaagcagtacaaatgtaccatctgcaacaaggccttccaccaggtctacaacctaaccttccatatgcacacccacaacgacaagaagcctttcacgtgcgccacttgcggcaaagggttttgcagaaactttgacttaaagaaacatgtgcgcaaactccacgacagcgtgggccctgctgccccctccgcaaaggacctgactaggacagtgcagagctgagagctactgccttgcccttccttccctccctgtaccacctgaaaacagatcacacatataaacttatttctaaaattaaaagaaaaaaaaactatagcagagaggctaaaatctatttatcgaaaccagcatatttttggaaagctaaatgtttcctcgatgactggcagcaaactcgtggcccccacctttgtatattcaggaaacttatttaaatccagtgcgccgaaacgtatttaattccaggcctccgcttctcctggggcagccagttttaaccccagcctgtcaccgtgagcgccccagaagagcgcggcgcccctagccatctttatacagccatgtaaatcctcctgtacaagcgaacacggaatatatacatatataactc

SEQ ID NO: 328231 - DNA, 2001 bp, Artificial Sequence
  derived and/or modified sequence
gatgggaccttctcaattatacaaacatgacttcatgtgatgtcagctgaatgtaaaagacagtgatctcacgcggaggggaagatgtttgccatcaaaatgtgacagaagagacacgctgcatggctcggaacgcatctccttggtggtgggggaaagagacttagaggagagaggctgcgccctggcccagcctggctcggctcagctccgcgcgccatggcaagctcggcttccctggagaccatggtgcccccggcctgcccgcgcgccggagcgtcgccggccacttccaagacactggccttttccatcgagcgcatcatggccaagacgtcggagccccgtgcgccctttgagccccggcctggagcgctagaggcggacggcagccagggcaagaaactgctcaacctctgctcgccgctgccctgtatgatccccctccagcccctaggctacgaggtgccgtcaaagacactgctcagttactcggagctctggaaaagcagcctccgggcgggcggcggcggaggcggcggcggcggtggcggcggcggcggcgggggggccccagtgtgcggcgccagcggcttgtgcaaaaccaactgtggcgtgtgctgcaaggccgagctgggcctggcgccgtccgcgctgcccgcgggcagggtcatcaagccgcaggtcatcaaccaggctgtggggctgccggccagcggctcgctctactacttcaactacctggactcgaccgcgtacccgccgtctgagctcctcagcggccacctcttcccgtctggcctcctcaatgcgcaggcccccgccgccctggctgctcaccccaagctctttctgctggagaacgccaagctggccggcctggctgcggacaagttcccccacccggctccctatccccataaggagcgcttgccggcgccgctggagcaggtactgaaggaaaactcggccctgactgccgagcgcggaggcgtcaagggccacagcaagctgccaggaggctccgcagatggcaagcccaaaaacttcacctgcgaggtgtgcggcaaggtgtttaacgctcactataatctcacccgccacatgccggtccacaccggagccagaccgttcgtgtgcaaagtctgcggcaaaggctttcgccaggccagcacgctctgcaggcacaaaattatccacacccaggaaaagccacataaatgcaaccagtgcggcaaagcgttcaaccgcagctccacgctcaacacgcatatccgcatccacgcgggctacaagcccttcgtctgcgaattttgcggcaaaggctttcaccaaaaagggaactacaagaaccacaagctgacccacagcggcgagaagcagtacaaatgtaccatctgcaacaaggccttccaccaggtctacaacctaaccttccatatgcacacccacaacgacaagaagcctttcacgtgcgccacttgcggcaaagggttttgcagaaactttgacttaaagaaacatgtgcgcaaactccacgacagcgtgggccctgctgccccctccgcaaaggacctgactaggacagtgcagagctgagagctactgccttgcccttccttccctccctgtaccacctgaaaacagatcacacatataaacttatttctaaaattaaaagaaaaaaaaactatagcagagaggctaaaatctatttatcgaaaccagcatatttttggaaagctaaatgtttcctcgatgactggcagcaaactcgtggcccccacctttgtatattcaggaaacttatttaaatccagtgcgccgaaacgtatttaattccaggcctccgcttctcctggggcagccagttttaaccccagcctgtcaccgtgagcgccccagaagagcgcggcgcccctagccatctttatacagccatgtaaatcctcctgtacaagcgaacacggaatatatacatatataactcaataaacagaa

SEQ ID NO: 328232 - protein, 38 aa, Artificial Sequence
  derived and/or modified sequence
MKVTLSALDTSESSFTPLVVIELAQDVKEETKEWLKNR

SEQ ID NO: 328233 - DNA, 81 bp, Artificial Sequence
  derived and/or modified sequence
atgggatccaagcgccggagagctacctccccctctagtagcgtgtcgggtgattttgatgacggacaccacagcgtgtag

SEQ ID NO: 328234 - DNA, 132 bp, Artificial Sequence
  derived and/or modified sequence
atgggatctaaaaggcgccgcgctacgtccccctctagcagcgtgagtggcgactttgatgacggacatcactctgtgagcacccccggaccctcccggaagcgccgccgactcagcaatttacccacatag

SEQ ID NO: 328235 - DNA, 357 bp, Artificial Sequence
  derived and/or modified sequence
atggggtctaagcgccggcgggctacttccccgagctcatctgtcagtggagacttcgacgatgggcaccattccgtcagtacacctggccctagtagaaagcggcggagactgagcaacttgcccaccgtggaccccatcgcggtgtgccatgaactgtacaacacaattcgagattacaaagacgagcagggaagacttctctgtgagctgttcatcagggccccaaagcggaggaaccaacccgactactatgaggtggtttcccagcccattgacctaatgaaaattcagcagaagctgaagatggaagaatacgacgacgtgaacctcttgaccgctgatttccaattgtag

SEQ ID NO: 328236 - DNA, 264 bp, Artificial Sequence
  derived and/or modified sequence
atgggctcaaaacggcgcagagccacaagcccatcttcctcggtgagtggagactttgatgacggccatcattctgtgtctacacccggcccttcacgcaaacggagacggctcagcaatctcccaactgtagacccaattgccgtgtgtcacgagctatacaacaccatccgtgattacaaggatgagcagggaagactgttgtgcgagctcttcattagggcacccaagcggaggaatcaacccgactactacgaggtgtag

SEQ ID NO: 328237 - DNA, 132 bp, Artificial Sequence
  derived and/or modified sequence
atgggtagtaaaaggcggcgcgccaccagcccctcttcgtcagtatctggagattttgatgacgggcaccactctgtgtcaacaccaggaccgagcaggaaaaggagaagactttctaatttgccaacttag

SEQ ID NO: 328238 - DNA, 81 bp, Artificial Sequence
  derived and/or modified sequence
atgggcagcaagagaagaagagccaccagccccagcagctctgtgtctggggactttgatgatggccaccacagcgtgtag

SEQ ID NO: 328239 - DNA, 132 bp, Artificial Sequence
  derived and/or modified sequence
atgggcagcaagagaagaagagccaccagccccagcagctctgtgtctggggactttgatgatggccaccacagcgtgtccaccccaggccccagcaggaagagaagaaggctgagcaacctgcccacctag

SEQ ID NO: 328240 - DNA, 357 bp, Artificial Sequence
  derived and/or modified sequence
atgggcagcaagagaagaagagccaccagccccagcagctctgtgtctggggactttgatgatggccaccacagcgtgtccaccccaggccccagcaggaagagaagaaggctgagcaacctgcccaccgtggaccccatcgctgtgtgccacgagctgtacaacaccatccgggactacaaggatgagcagggccgcctgctgtgtgagctgttcatccgggcccccaagagaagaaaccagcctgactactatgaggtggtgtcccagcccatcgacctgatgaagatccagcagaagctgaagatggaggagtatgatgatgtgaacctgctgacagctgacttccagctgtag

SEQ ID NO: 328241 - DNA, 264 bp, Artificial Sequence
  derived and/or modified sequence
atgggcagcaagagaagaagagccaccagccccagcagctctgtgtctggggactttgatgatggccaccacagcgtgtccaccccaggccccagcaggaagagaagaaggctgagcaacctgcccaccgtggaccccatcgctgtgtgccacgagctgtacaacaccatccgggactacaaggatgagcagggccgcctgctgtgtgagctgttcatccgggcccccaagagaagaaaccagcctgactactatgaggtgtag

SEQ ID NO: 328242 - DNA, 81 bp, Artificial Sequence
  derived and/or modified sequence
atgggcagcaagcggcggcgggccaccagccccagcagcagcgtgtccggagattttgatgatggccaccactcggtgtag

SEQ ID NO: 328243 - DNA, 132 bp, Artificial Sequence
  derived and/or modified sequence
atgggcagcaagcggcggcgggccaccagccccagcagcagcgtgtcaggcgattttgacgatggccaccactccgtgtcaacccctgggccctcacggaagcgcaggcggctctcaaacctgcccacatag

SEQ ID NO: 328244 - DNA, 357 bp, Artificial Sequence
  derived and/or modified sequence
atgggcagcaagcggcggcgggccaccagccccagcagcagcgtgagtggggactttgacgacggacaccactctgtgagtacgcctgggcctagccgcaaacgacgtagactttcaaatctgccaaccgtagatccaatcgccgtgtgtcacgaactgtacaacaccatacgtgactacaaggatgagcagggtcgactcctgtgcgagctgtttatcagagctccaaaacgaaggaaccaacctgactattatgaagtcgtgtcacagccaattgacctaatgaaaatacaacagaagctcaaaatggaggaatacgatgatgttaatttgcttaccgcggatttccagttatag

SEQ ID NO: 328245 - DNA, 264 bp, Artificial Sequence
  derived and/or modified sequence
atgggcagcaagcggcggcgggccaccagccccagcagcagcgtgagcggtgatttcgacgatgggcatcactccgtctccacacccggtcccagtagaaaacggcgccggctctcaaatctgcccactgtggacccaattgctgtgtgccacgaactctacaacacaatccgggactacaaggacgagcaagggaggctactgtgtgagctctttatccgagctcccaaaaggagaaatcaaccagactactacgaagtgtag

SEQ ID NO: 328246 - DNA, 132 bp, Artificial Sequence
  derived and/or modified sequence
atgggcagcaagcggcggcgggccaccagccccagcagcagcgtgtctggtgatttcgatgatggacatcactcggtctctacccccgggccttctcggaaaaggagacgactgtccaacttgccgacatag

SEQ ID NO: 328247 - DNA, 517 bp, Artificial Sequence
  derived and/or modified sequence
cggatgggcccagtagccttgtcgcacctgccggcagggacaaaggcgcactacgggtcggaaactccccgcgctcctctttcccgctcgtcgcggggcagcttcaaagctgtcaacgtttccctcagtccccaataccagtgacagaagaagttggattccatgggttccaagagaagaagagctacctccccttccagcagtgtcagcggggactttgatgatgggcaccattctgtgtcaacaccaggcccaagcaggaaaaggaggagactttccaatcttccaactgtagatcctattgccgtgtgccatgaactctataataccatccgagactataaggatgaacagggcagacttctctgtgagctcttcattagggcaccaaagcgaagaaatcaaccagactattatgaagtggtttctcagcccattgacttgatgaaaatccaacagaaactaaaaatggaagagtatgatgatgttaatttgctgactgctgacttccagcttc

SEQ ID NO: 328248 - DNA, 81 bp, Artificial Sequence
  derived and/or modified sequence
atggggagcaaacgcaggcgggctacatccccaagtagcagcgtctccggcgattttgacgacgggcatcattcagtgtag

SEQ ID NO: 328249 - DNA, 132 bp, Artificial Sequence
  derived and/or modified sequence
atgggatcaaagaggcgaagggcgaccagccctagtagcagtgtcagcggcgattttgacgacgggcaccatagcgtgtcaacgcctgggccttcacgaaagcggagaagactgtccaatcttccgacatag

SEQ ID NO: 328250 - DNA, 357 bp, Artificial Sequence
  derived and/or modified sequence
atgggtagcaagcggagacgagcaacctccccaagctcttcagtatcgggggactttgacgatggtcaccatagcgtttctaccccgggaccctctcgcaagaggaggaggctgtctaatctgccaaccgtagaccctatagccgtgtgccatgaactttacaatacaattcgggactacaaagatgagcagggtcgtcttctctgcgaacttttcattagggccccaaagcgacgtaatcagccagactattatgaggtcgtcagtcagccaattgatcttatgaagatccagcagaaactgaaaatggaagagtacgatgacgtgaatcttctgaccgccgactttcagctatag

SEQ ID NO: 328251 - DNA, 264 bp, Artificial Sequence
  derived and/or modified sequence
atgggttccaaacgtagaagagctacgagtcctagcagctcagtctcaggagattttgatgacgggcaccattccgtgtcaacgcctgggccaagcaggaagcggcgacgactctctaacttgccaactgtcgatcctatcgctgtttgccacgagttgtataataccataagagattacaaggatgaacaggggaggctgctgtgtgaactgtttatcagagcccctaagcgccgtaaccagccagattactacgaggtatag

SEQ ID NO: 328252 - DNA, 132 bp, Artificial Sequence
  derived and/or modified sequence
atgggcagtaagaggcggagagcaactagcccttcttcctcagtctccggtgacttcgatgacggccatcactcagtctctactcctggtcctagtcgcaaacggagaagattgagcaatttacccacatag

SEQ ID NO: 328253 - DNA, 81 bp, Artificial Sequence
  derived and/or modified sequence
atgggcagcaagagaagaagagccaccagccccagcagcagcgtgagcggcgacttcgacgacggccaccacagcgtgtag

SEQ ID NO: 328254 - DNA, 132 bp, Artificial Sequence
  derived and/or modified sequence
atgggcagcaagagaagaagagccaccagccccagcagcagcgtgagcggcgacttcgacgacggccaccacagcgtgagcacccccggccccagcagaaagagaagaagactgagcaacctgcccacctag

SEQ ID NO: 328255 - DNA, 357 bp, Artificial Sequence
  derived and/or modified sequence
atgggcagcaagagaagaagagccaccagccccagcagcagcgtgagcggcgacttcgacgacggccaccacagcgtgagcacccccggccccagcagaaagagaagaagactgagcaacctgcccaccgtggaccccatcgccgtgtgccacgagctgtacaacaccatcagagactacaaggacgagcagggcagactgctgtgcgagctgttcatcagagcccccaagagaagaaaccagcccgactactacgaggtggtgagccagcccatcgacctgatgaagatccagcagaagctgaagatggaggagtacgacgacgtgaacctgctgaccgccgacttccagctgtag

SEQ ID NO: 328256 - DNA, 264 bp, Artificial Sequence
  derived and/or modified sequence
atgggcagcaagagaagaagagccaccagccccagcagcagcgtgagcggcgacttcgacgacggccaccacagcgtgagcacccccggccccagcagaaagagaagaagactgagcaacctgcccaccgtggaccccatcgccgtgtgccacgagctgtacaacaccatcagagactacaaggacgagcagggcagactgctgtgcgagctgttcatcagagcccccaagagaagaaaccagcccgactactacgaggtgtag

SEQ ID NO: 328257 - protein, 1689 aa, Artificial Sequence
  derived and/or modified sequence
MGSKRRRATSPSSSVSGDFDDGHHSVSTPGPSRKRRRLSNLPTVDPIAVCHELYNTIRDYKDEQGRLLCELFIRAPKRRNQPDYYEVVSQPIDLMKIQQKLKMEEYDDVNLLTADFQLLFNNAKSYYKPDSPEYKAACKLWDLYLRTRNEFVQKGEADDEDDDEDGQDNQGTVTEGSSPAYLKEILEQLLEAIVVATNPSGRLISELFQKLPSKVQYPDYYAIIKEPIDLKTIAQRIQNGSYKSIHAMAKDIDLLAKNAKTYNEPGSQVFKDANSIKKIFYMKKAEIEHHEMAKSSLRMRTPSNLAAARLTGPSHSKGSLGEERNPTSKYYRNKRAVQGGRLSAITMALQYGSESEEDAALAAARYEEGESEAESITSFMDVSNPFYQLYDTVRSCRNNQGQLIAEPFYHLPSKKKYPDYYQQIKMPISLQQIRTKLKNQEYETLDHLECDLNLMFENAKRYNVPNSAIYKRVLKLQQVMQAKKKELARRDDIEDGDSMISSATSDTGSAKRKSKKNIRKQRMKILFNVVLEAREPGSGRRLCDLFMVKPSKKDYPDYYKIILEPMDLKIIEHNIRNDKYAGEEGMIEDMKLMFRNARHYNEEGSQVYNDAHILEKLLKEKRKELGPLPDDDDMASPKLKLSRKSGISPKKSKYMTPMQQKLNEVYEAVKNYTDKRGRRLSAIFLRLPSRSELPDYYLTIKKPMDMEKIRSHMMANKYQDIDSMVEDFVMMFNNACTYNEPESLIYKDALVLHKVLLETRRDLEGDEDSHVPNVTLLIQELIHNLFVSVMSHQDDEGRCYSDSLAEIPAVDPNFPNKPPLTFDIIRKNVENNRYRRLDLFQEHMFEVLERARRMNRTDSEIYEDAVELQQFFIKIRDELCKNGEILLSPALSYTTKHLHNDVEKERKEKLPKEIEEDKLKREEEKREAEKSEDSSGAAGLSGLHRTYSQDCSFKNSMYHVGDYVYVEPAEANLQPHIVCIERLWEDSAGEKWLYGCWFYRPNETFHLATRKFLEKEVFKSDYYNKVPVSKILGKCVVMFVKEYFKLCPENFRDEDVFVCESRYSAKTKSFKKIKLWTMPISSVRFVPRDVPLPVVRVASVFANADKGDDEKNTDNSEDSRAEDNFNLEKEKEDVPVEMSNGEPGCHYFEQLHYNDMWLKVGDCVFIKSHGLVRPRVGRIEKVWVRDGAAYFYGPIFIHPEETEHEPTKMFYKKEVFLSNLEETCPMTCILGKCAVLSFKDFLSCRPTEIPENDILLCESRYNESDKQMKKFKGLKRFSLSAKVVDDEIYYFRKPIVPQKEPSPLLEKKIQLLEAKFAELEGGDDDIEEMGEEDSEVIEPPSLPQLQTPLASELDLMPYTPPQSTPKSAKGSAKKEGSKRKINMSGYILFSSEMRAVIKAQHPDYSFGELSRLVGTEWRNLETAKKAEYEERAAKVAEQQERERAAQQQQPSASPRAGTPVGALMGVVPPPTPMGMLNQQLTPVAGMMGGYPPGLPPLQGPVDGLVSMGSMQPLHPGGPPPHHLPPGVPGLPGIPPPGVMNQGVAPMVGTPAPGGSPYGQQVGVLGPPGQQAPPPYPGPHPAGPPVIQQPTTPMFVAPPPKTQRLLHSEAYLKYIEGLSAESNSISKWDQTLAARRRDVHLSKEQESRLPSHWLKSKGAHTTMADALWRLRDLMLRDTLNIRQAYNLENV

SEQ ID NO: 328258 - DNA, 5070 bp, Artificial Sequence
  derived and/or modified sequence
atgggatcaaagagacgtcgggccacatctcccagtagctccgtgtcgggggactttgacgatggacatcactccgtctcaactcccggcccatctcgaaagagacggcggttaagcaacctgcccaccgtagaccctatcgccgtatgccatgaattgtacaatacaattagagactataaagatgagcagggcagattgctgtgtgagttgtttattagggcgccaaaaagacggaatcaacccgattattacgaagtggtgtcgcagccaatagatctgatgaaaattcagcaaaagctcaaaatggaggagtacgacgatgtgaatctgcttactgccgatttccagctgttgttcaacaatgctaagagctattacaagcccgattcgcccgaatacaaggctgcttgtaaactctgggatctgtacctgagaactcgcaatgagtttgtccagaagggggaggcggacgatgaggatgacgacgaggatggtcaagacaaccagggtacggtcaccgagggctcttctccagcgtatctgaaggagatcctggagcagctgctggaagccatcgtcgtggccacaaatccctcaggccgactgattagcgagctgttccagaagctacccagcaaggtgcagtaccccgattattatgccattatcaaggagcctattgacctaaaaaccatcgcacagcgcatccaaaatggttcttacaagagcatacacgcgatggctaaggacatcgacctattggccaagaacgccaagacttacaatgaacctggatcgcaggtgtttaaggacgctaactcaatcaaaaagatcttctatatgaagaaagcagagatcgagcatcacgaaatggccaagtccagcttacgcatgaggacacctagtaacttggccgccgccagactgactggcccatcccatagcaagggctcactgggcgaggaaagaaacccaacctcaaaatactatagaaataagcgtgccgttcagggcggccggctgtcagctatcaccatggctttgcagtacggctccgagagcgaggaggacgccgccctggcagcggcacgttacgaagaaggcgagtccgaagccgaaagtatcacttcattcatggacgtctcaaatccattctaccagctatatgacaccgtccgttcttgccgaaacaaccagggccaattgatagcagaacctttttatcacctgccgtctaagaagaaatatcctgattattaccagcaaattaagatgcctatctctctgcagcagattaggacaaaactcaaaaaccaggagtacgagactttagaccacctcgaatgtgacttgaatctaatgttcgaaaacgctaagcgctacaacgtgccaaactcagctatttacaagagggtgctaaagctgcaacaggtgatgcaagctaagaaaaaagagctggcccgccgggacgatatagaggatggagacagcatgatcagtagcgctacatccgacactggctccgctaagcgaaagtcaaagaagaatatccgaaaacagcggatgaaaatcctgtttaatgtggtattggaagcccgggaacccggttccggcagacggctttgcgacctgttcatggtgaagccatccaaaaaggactatccagactattacaaaataatcctggagcccatggatctaaaaatcatagagcacaatattaggaacgacaagtacgctggagaagaagggatgatcgaggacatgaagcttatgtttagaaacgcgaggcattacaacgaagaaggtagtcaggtatacaacgatgctcatattctggagaaactcctgaaagagaaaagaaaggagctagggcctctacctgacgatgatgatatggcatcgccgaaactgaagctctcccgaaaatctggcatatcccccaagaaaagtaaatacatgaccccaatgcagcaaaaactgaatgaggtgtatgaggccgtcaagaactatacagacaaaagggggcggaggctgtccgccatattcctgaggctgccatctaggtcagagttgccagactattatctgacaatcaagaagcccatggacatggagaagatccggtcccacatgatggcgaacaaatatcaggatatagacagcatggtggaagactttgtgatgatgttcaataacgcttgtacctataacgagcccgagtctctaatctacaaagacgccctcgtgctgcacaaggtcctgttagagacacgacgcgatctggaaggcgacgaggatagccacgttcctaacgtcaccctgctgattcaggagctcatccacaacttgttcgtgagtgtcatgtcacatcaagacgatgagggacggtgctactctgatagtcttgccgagatccccgccgtggatccaaacttcccgaataaacccccactcacgtttgacatcatccgcaagaacgtggagaacaacaggtaccggaggttggacctctttcaggagcacatgtttgaagtgttggagcgagctcggcgcatgaatcggacagattccgagatctacgaggacgccgtcgagctccagcagttcttcataaaaatccgagacgagctttgcaaaaacggagaaatcctgctctcccctgccctgtcttacaccaccaaacacttgcacaacgatgtggaaaaggagcggaaggaaaagctaccaaaggaaattgaggaagataagctcaagagggaggaggaaaagagagaagcagagaaatcagaagatagcagcggagctgccgggctttctggcctgcacaggacctacagtcaggactgctcctttaagaactccatgtatcatgtgggtgactatgtctatgtggagcctgccgaggcaaacctccagcctcacatagtctgtattgaaaggctctgggaggactccgcaggagagaaatggctatacggatgttggttttaccgaccaaatgaaacatttcacctggccaccaggaagttcttggagaaggaagtgtttaagtctgactactacaataaagtgccggtttccaaaatcctgggcaagtgtgtagtgatgttcgtgaaagagtacttcaagctctgtccagaaaattttcgagatgaggatgtgttcgtgtgtgaatcacgatacagtgctaagacgaagtcattcaaaaagattaagttatggacaatgcctatcagctcagttagattcgtgcctagggacgtgccattgccagtggtgagggttgcttcggtatttgcaaatgcagacaagggagatgatgaaaaaaacacagacaactccgaagacagcagggctgaagacaatttcaaccttgaaaaagaaaaggaggacgtgcccgttgagatgagcaatggagaaccggggtgccactacttcgaacaactccactacaacgacatgtggctgaaggtgggggactgtgtatttattaaatctcacgggcttgtgagaccgagagtgggcagaattgaaaaagtttgggtgcgcgatggggctgcctatttttacggaccgatattcattcatcccgaagaaaccgagcatgaaccgactaaaatgttctacaaaaaggaagtatttctgtcaaacctcgaggagacatgtcctatgacctgtattttaggaaaatgtgccgtcctctccttcaaggacttcttgtcctgccgtcccacagaaattcctgagaatgacattctgctatgtgaatcacgttacaatgagtcggacaagcagatgaagaagttcaagggactgaagaggttcagccttagcgccaaagtagtggacgatgaaatttattatttcaggaagccgatcgtgcctcagaaggaacctagccccctactagagaagaagatccaactacttgaagccaaattcgcggagctggagggcggagacgatgatatagaggagatgggggaggaagatagcgaggtgatcgagccaccaagccttccccaattgcagacccccctggccagcgagcttgacctcatgccttacactccacctcagtccacacccaagtcagcgaaaggctctgctaagaaggaaggcagtaagagaaagatcaacatgtccggttacattcttttctctagcgagatgcgagccgttatcaaagcacagcatcccgactatagctttggagagctttcacgactagtcggaactgagtggagaaatctggagaccgccaagaaggcggagtacgaagaaagggccgccaaagtcgcggaacagcaagaaagggagcgtgccgcacagcagcaacaaccgagcgcctccccacgtgctggcacccctgtcggggcgctgatgggtgtcgtaccgccacccaccccaatgggaatgctcaaccagcaacttacaccggtggcaggtatgatgggcggatatccacccggcctgcccccactgcaagggcccgtggatggccttgtgtcaatgggaagcatgcagcctctgcacccaggcggtccacctccacaccacttgccccctggcgtgcctggtctacctggaattcctccgccaggagtgatgaaccagggcgtagccccaatggtgggaaccccagcccctggtggttctccctacggccagcaggtcggggtcctagggcctccggggcaacaagccccacctccgtatcctgggcctcacccagccggccctccggtgattcagcagcctacaactcctatgtttgtggcgccaccgcctaagactcagaggctgttgcacagcgaagcttacctgaagtatatcgaggggcttagcgcagagtccaacagtatctcgaagtgggatcagacgctggccgcccgacgcagagacgtgcacctgtcaaaggagcaggagagcagactcccaagtcactggctgaagtcaaagggggcacatacgacaatggccgatgcactttggcgactgagggacctaatgctcagggatacattgaacatccgacaagcgtacaatttggagaacgtgtag

SEQ ID NO: 328259 - DNA, 5070 bp, Artificial Sequence
  derived and/or modified sequence
atgggcagcaagagaagaagagccaccagccccagcagctctgtgtctggggactttgatgatggccaccacagcgtgtccaccccaggccccagcaggaagagaagaaggctgagcaacctgcccaccgtggaccccatcgctgtgtgccacgagctgtacaacaccatccgggactacaaggatgagcagggccgcctgctgtgtgagctgttcatccgggcccccaagagaagaaaccagcctgactactatgaggtggtgtcccagcccatcgacctgatgaagatccagcagaagctgaagatggaggagtatgatgatgtgaacctgctgacagctgacttccagctgctcttcaacaatgccaagagctactacaagccagacagccctgagtacaaggccgcctgcaagctgtgggacctgtacctgcggaccagaaatgaatttgtgcagaagggggaggctgatgatgaagatgatgatgaagatggccaggacaaccagggcaccgtgacagagggcagcagccctgcctacctgaaggagatcctggagcagctgctggaggccatcgtggtggccaccaaccccagcggccgcctcatcagcgagctgttccagaagctgcccagcaaggtgcagtacccagactactatgccatcatcaaggagcccatcgacctgaagaccatcgcccagaggatccagaatggcagctacaagagcatccacgccatggccaaggacatcgacctgctggccaagaatgccaagacctacaatgaacctggcagccaggtgttcaaggatgccaacagcatcaagaagatcttctacatgaagaaggccgagattgagcaccacgagatggccaagagcagcctgaggatgaggacccccagcaacctggccgccgcccggctgaccggccccagccacagcaagggcagcctgggggaggagaggaaccccaccagcaagtactacagaaacaagagagctgtgcagggcggccgcctgagcgccatcaccatggccctgcagtatggcagcgagagtgaagaagatgctgccctggccgccgcccgctatgaggagggggagagcgaggccgagagcatcaccagcttcatggatgtgagcaaccccttctaccagctgtatgacacagtgcgcagctgcaggaacaaccagggccagctgattgctgagcccttctaccacctgcccagcaagaagaagtacccagactactaccagcagatcaagatgcccatcagcctgcagcagatccgcaccaagctgaagaaccaggagtatgagaccctggaccacctggagtgtgacctgaacctgatgtttgaaaatgccaagcgctacaacgtgcccaacagcgccatctacaagagggtgctgaagctgcagcaggtgatgcaggccaagaagaaggagctggccaggagagatgacattgaagatggagacagcatgatcagcagcgccaccagtgacaccggcagcgccaagaggaagagcaagaagaacatcaggaagcagaggatgaagatcctcttcaacgtggtgctggaggcccgggagcccggcagcggccggcggctgtgtgacctcttcatggtgaagcccagcaagaaggactacccagactactacaagatcatcctggagcccatggacctgaagatcatcgagcacaacatcagaaatgacaagtatgctggggaggagggcatgattgaggacatgaagctgatgttcagaaatgcccggcactacaatgaggagggcagccaggtgtacaatgatgcccacatcctggagaagctgctgaaggagaagaggaaggagctgggccccctgcctgatgatgatgacatggccagccccaagctgaagctgagcaggaagagcggcatcagccccaagaagagcaagtacatgacccccatgcagcagaagctgaatgaggtgtatgaggccgtgaagaactacacagacaagaggggccggcggctgagcgccatcttcctgcggctgcccagccgctctgagctgcctgactactacctgaccatcaagaagcccatggacatggagaagatccgcagccacatgatggccaacaagtaccaggacatcgacagcatggtggaggactttgtgatgatgttcaacaatgcctgcacctacaatgaacctgagagcctcatctacaaggatgccctggtgctgcacaaggtgctgctggagacccggcgggacctggagggagatgaggacagccacgtgcccaacgtgaccctgctgatccaggagctgatccacaacctgtttgtgtctgtgatgagccaccaggatgatgagggccgctgctacagcgacagcctggccgagatcccagctgtggaccccaacttccccaacaagccacccctgacctttgacatcatcaggaagaatgtggagaacaaccgctacagaaggctggacctcttccaggagcacatgtttgaggtgctggagcgggcccggaggatgaacagaacagattctgagatctatgaagatgctgtggagctgcagcagttcttcatcaagatcagagatgagctgtgcaagaatggagagatcctgctgagccctgccctgagctacaccaccaagcacctgcacaatgatgtggagaaggagaggaaggagaagctgcccaaggagattgaggaggacaagctgaagcgggaggaggagaagcgggaggccgagaagtctgaggacagcagtggagctgctggcctgagcggcctgcacaggacctacagccaggactgcagcttcaagaacagcatgtaccacgtgggggactatgtgtatgtggagcctgctgaggccaacctgcagccccacatcgtgtgcatcgagcggctgtgggaggacagcgctggggagaagtggctgtatggctgctggttctaccggcccaatgagaccttccacctggccaccaggaagttcctggagaaggaggtgttcaagagtgactactacaacaaggtgcctgtgtccaagatcctgggcaaatgtgtggtgatgtttgtgaaggagtacttcaagctgtgcccagagaacttcagagatgaagatgtgtttgtgtgtgagagccgctacagcgccaagaccaagagcttcaagaagatcaagctgtggaccatgcccatcagctctgtgcgctttgtgcccagagatgtgcccctgcctgtggtgcgggtggcctctgtgtttgccaatgctgacaagggagatgatgagaagaacacagacaacagcgaggacagcagagctgaggacaacttcaacctggagaaggagaaggaggatgtgcctgtggagatgagcaatggagagcccggctgccactactttgagcagctgcactacaatgacatgtggctgaaggtgggggactgtgtgttcatcaagagccacggcctggtgcggccccgggtgggcagaattgagaaggtgtgggtgagagatggagctgcctacttctacggccccatcttcatccaccctgaggagacagagcacgagcccaccaagatgttctacaagaaggaggtgttcctgagcaacctggaggagacctgccccatgacctgcatcctgggcaaatgtgctgtgctgtccttcaaggacttcctgagctgccggcccacagagatcccagaaaatgacatcctgctgtgtgagagccgctacaatgaaagtgacaagcagatgaagaagttcaagggcctgaagcgcttcagcctgagcgccaaggtggtggatgatgagatctactacttcaggaagcccatcgtgccccagaaggagcccagccccctgctggagaagaagatccagctgctggaggccaagtttgctgagctggagggcggagatgatgacatcgaggagatgggagaggaggacagcgaggtgattgagccccccagcctgccccagctgcagacccccctggccagcgagctggacctgatgccctacaccccaccccagagcacccccaagagcgccaagggcagcgccaagaaggagggcagcaagaggaagatcaacatgagcggctacatcctcttcagcagcgagatgagagctgtgatcaaggcccagcacccagactacagctttggagagctgagccggctggtgggcacagagtggaggaacctggagacagccaagaaggccgagtatgaggagcgggccgccaaggtggccgagcagcaggagcgggagcgggccgcccagcagcagcagcccagcgccagcccccgggccggcacccctgtgggcgccctgatgggcgtggtgcccccacccacccccatgggcatgctgaaccagcagctgacccctgtggccggcatgatgggcggctacccacctggcctgccccccctgcagggccctgtggatggcctggtgtccatgggctccatgcagcccctgcaccctgggggccccccaccccaccacctgcccccaggagtgcccggcctgcccggcatccccccacctggggtgatgaaccagggcgtggcccccatggtgggcaccccagcccctgggggcagcccctacggccagcaggtgggcgtgctgggccccccaggccagcaggcccccccaccctacccaggcccccaccctgctggcccccctgtgatccagcagcccaccacccccatgtttgtggcccccccacccaagacccagaggctgctgcacagcgaggcctacctgaagtacatcgagggcctgtctgctgagagcaacagcatcagcaagtgggaccagaccctggccgccaggagaagagatgtgcacctgagcaaggagcaggagagccggctgcccagccactggctgaagagcaagggggcccacaccaccatggctgatgccctgtggaggctgcgggacctgatgctgcgggacaccctgaacatccggcaggcctacaacctggagaatgtgtag

SEQ ID NO: 328260 - DNA, 5070 bp, Artificial Sequence
  derived and/or modified sequence
atgggcagcaagcggcggcgggccaccagccccagcagcagcgtgtcgggcgatttcgacgacgggcatcacagcgtatctacccccggcccctcccgcaagcggagacgactgtctaatttgcctactgtggatcccatcgctgtttgccacgaactgtacaataccatccgcgattacaaggacgagcagggacggctcctgtgcgagctcttcatccgcgctccaaagaggcgcaatcagcccgattactatgaggtcgtgtcacagccaattgacctgatgaaaattcaacagaagctgaagatggaagagtacgatgatgttaatctgctgacggccgattttcagctcctgtttaacaacgcgaagagttattataagcctgattcccctgaatacaaagccgcctgcaaactttgggacctctatcttaggacacgcaatgaattcgttcagaagggagaagcagacgacgaggacgatgacgaagacggacaggacaaccagggaactgtcaccgaaggatcttcaccagcttatttgaaggaaatcctggagcagctgctggaagcaatagtcgtagcgacaaacccgtctggaaggctcattagcgagctcttccagaagctaccaagcaaagtccagtaccccgactactacgcgataattaaagaaccaatcgatttgaaaacaattgcacaacgcattcaaaacggatcttataaatctatccacgctatggccaaagacatcgaccttctcgctaaaaacgccaaaacatataatgagccaggttcacaggtctttaaagacgctaatagcattaaaaagatcttctatatgaaaaaagccgagatcgagcatcacgaaatggccaagagttcactgagaatgcgtacaccctctaacctggccgctgcaagacttaccggtccttctcactcaaagggatcgctgggtgaagagcgcaatcctactagcaagtactaccgcaacaaaagagctgtacagggagggcgcctatctgcgatcacgatggccctgcagtatggctctgagagcgaggaggacgcagcattggcagccgcccgttatgaggagggagaatccgaagctgagtcaataacgagctttatggacgtcagcaatcctttctaccaactttacgacaccgttagatcatgccgaaacaatcagggccagttaattgcagagccattttatcacctgccgtctaaaaagaagtaccctgattattatcaacagataaagatgcccatctcactccagcagatccgcactaagctaaagaaccaagagtacgaaacattggatcacctcgaatgtgatctgaatctgatgttcgagaatgcaaagagatataatgttccaaactccgccatttataaaagggtgcttaagctccaacaagtgatgcaggcaaaaaaaaaggagctggcccgtcgggatgacatcgaggacggcgattcaatgatctctagtgctacatctgacactggcagtgccaagagaaaatccaagaagaacatcagaaagcagagaatgaagatcctttttaatgtggtgctcgaagcacgtgaaccagggtctggcaggcgactctgcgatctgttcatggtcaagcccagtaagaaagattaccctgattactataagatcattctggagcctatggatcttaaaattattgaacataacattcgcaatgataaatacgccggagaggagggaatgatcgaggatatgaagcttatgttccgcaatgcccgtcactataatgaagaaggctcacaagtgtataacgatgcccacatcctggagaagctccttaaggagaaacgcaaggagcttggcccgctgcccgatgatgacgatatggcctctccgaaactaaaactcagtcggaagagcggcatctcccccaagaaatccaaatacatgacgcccatgcaacagaaactgaacgaggtgtacgaagctgtgaagaattacaccgataaacgcgggcgaaggctgagtgccatattcttacggctcccgtcgagaagcgaattacctgactattatctgaccatcaaaaagccgatggacatggaaaagatccgttctcacatgatggcaaacaagtaccaggacattgactcgatggttgaggactttgtgatgatgttcaacaacgcgtgtacatacaatgagcctgaatctttaatttacaaggatgcactggtcttgcataaagtattactggaaacaaggcgtgacttagaaggagatgaggattcacacgtgcctaacgtgacactcttgatccaggagctgatccacaaccttttcgtgtctgtgatgtctcatcaggatgacgaaggacggtgctactccgacagcctcgccgaaatccccgcagtagatcctaacttccccaacaagcccccattaaccttcgacataatcaggaaaaatgtcgagaataatcgctatcgaagactcgatttattccaggaacacatgtttgaggtgctagagcgggcaagacggatgaataggacagacagcgaaatatatgaggatgccgttgaacttcagcagttttttatcaaaattagggacgaactctgcaaaaacggagagatccttctaagtcccgccctgtcttatacaaccaaacacctccacaatgacgtagaaaaggagcggaaggagaaactccccaaagagattgaggaagacaagcttaagcgggaggaggaaaaacgggaagccgagaagtctgaggattcaagcggggcagccggactcagcgggctgcaccgaacctactcgcaagattgcagctttaaaaacagcatgtatcatgttggggactacgtctacgtggagcccgcggaagcaaatctccagccacacatcgtgtgcatcgagcggttatgggaagacagtgccggagagaagtggctgtacggatgttggttttaccgaccaaacgagaccttccacctggcaactcggaaatttttagagaaggaagtgtttaaaagcgattactataataaggtgcccgtctccaagatccttggaaagtgcgtggtgatgtttgtgaaggaatattttaagctgtgccccgagaatttccgagacgaggatgtcttcgtttgtgagtcaaggtattctgctaaaaccaagtcattcaaaaaaattaagctatggacaatgcctattagctctgtgcggtttgtgccacgggacgttccactaccggttgttagagtcgcctctgtgtttgccaatgccgataagggagacgatgaaaagaatacggacaattcagaagattcccgtgcggaggacaattttaatctcgaaaaagagaaggaggatgtgcccgtcgagatgtctaacggagagccaggctgtcattattttgagcaactccactacaacgatatgtggttaaaagtgggcgactgcgtgtttatcaagtctcatgggctggtgcgcccccgcgtgggccgaattgagaaggtttgggtcagagacggagcagcctacttttatggcccgatttttatccatcctgaggagaccgaacatgaaccaacaaagatgttctacaaaaaagaggttttcctgagtaatcttgaggaaacctgccctatgacatgtatcctgggtaaatgtgccgtactgtcgttcaaagactttctctcctgtcggccaacagaaattcccgaaaacgatatcctactgtgtgaaagtcgttataatgaatccgataagcaaatgaagaagttcaagggactgaaaaggttctccctgtctgccaaggtcgtggacgacgaaatctattactttagaaagcctatcgttccgcagaaggaaccgtcccccctcctggagaagaaaatccaactcctggaggccaaattcgcagaactggagggaggagatgatgacatcgaggagatgggcgaagaggacagcgaggttattgaacctccctctctgcctcagctccagacaccattagcgtccgaactggatcttatgccctacacgccgccacagtctacacccaaatctgctaagggttccgcaaagaaagagggctctaagaggaagatcaacatgtcaggctacatcttgttttctagcgagatgcgcgctgtgataaaagcccagcacccggattactctttcggagaactttctcgcctcgtgggaactgagtggcgcaatctggagacagccaagaaggccgagtatgaagaacgcgccgccaaggtagccgagcagcaggagagagagcgggctgcgcagcagcagcaaccctctgcaagccctagagccggcacccccgtgggggccttgatgggcgtcgtgcccccccccacccctatgggaatgctgaaccagcagctgaccccagtggccggcatgatgggagggtacccaccagggctcccacctcttcaggggcccgtggatgggctagtgtctatgggctctatgcagcctctccatcccgggggacctccaccccaccacctcccccccggggtaccggggttgccaggaattccgccccccggcgtcatgaaccagggggtggctccaatggtcggcaccccagcccctggcggatccccctatgggcaacaggtgggagtgctcggacctcccggccaacaagcccctcccccgtacccgggcccccatccagctggcccacccgtgattcaacaaccaaccacgccgatgttcgtcgcaccacctccaaaaacccagagactgctgcattcggaagcatacctgaaatatattgagggcctcagcgcagaatcaaactccatcagtaaatgggatcagactctggcagctaggcggcgcgacgttcacctgtccaaggagcaagagtcccggttgcctagccactggctcaagagcaagggagcccatacgactatggccgatgcactgtggaggctgcgcgatctgatgctgcgagataccctgaatatcaggcaagcatataatctggaaaatgtctag

SEQ ID NO: 328261 - DNA, 5145 bp, Artificial Sequence
  derived and/or modified sequence
ccatgggttccaagagaagaagagctacctccccttccagcagtgtcagcggggactttgatgatgggcaccattctgtgtcaacaccaggcccaagcaggaaaaggaggagactttccaatcttccaactgtagatcctattgccgtgtgccatgaactctataataccatccgagactataaggatgaacagggcagacttctctgtgagctcttcattagggcaccaaagcgaagaaatcaaccagactattatgaagtggtttctcagcccattgacttgatgaaaatccaacagaaactaaaaatggaagagtatgatgatgttaatttgctgactgctgacttccagcttctttttaacaatgcaaagtcctattataagccagattctcctgaatataaagccgcttgcaaactctgggatttgtaccttcgaacaagaaatgagtttgttcagaaaggagaagcagatgacgaagatgatgatgaagatgggcaagacaatcagggcacagtgactgaaggatcttctccagcttacttgaaggagatcctggagcagcttcttgaagccatagttgtagctacaaatccatcaggacgtctcattagcgaactttttcagaaactgccttctaaagtgcaatatccagattattatgcaataattaaggagcctatagatctcaagaccattgcccagaggatacagaatggaagctacaaaagtattcatgcaatggccaaagatatagatctcctcgcaaaaaatgccaaaacttataatgagcctggctctcaagtattcaaggatgcaaattcaattaaaaaaatattttatatgaaaaaggctgaaattgaacatcatgaaatggctaagtcaagtcttcgaatgaggactccatccaacttggctgcagccagactgacaggtccttcacacagtaaaggcagccttggtgaagagagaaatcccactagcaagtattaccgtaataaaagagcagtacaaggaggtcgtttatcagcaattacaatggcacttcaatatggctcagaaagtgaagaagatgctgctttagctgctgcacgctatgaagagggagagtcagaagcagaaagcatcacttcctttatggatgtttcaaatcctttttatcagctttatgacacagttaggagttgtcggaataaccaagggcagctaatagctgaacctttttaccatttgccttcaaagaaaaaataccctgattattaccagcaaattaaaatgcccatatcactacaacagatccgaacaaaactgaagaatcaagaatatgaaactttagatcatttggagtgtgatctgaatttaatgtttgaaaatgccaaacgctataatgtgcccaattcagccatctacaagcgagttctaaaattgcagcaagttatgcaggcaaagaagaaagagcttgccaggagagacgatatcgaggacggagacagcatgatctcttcagccacctctgatactggtagtgccaaaagaaaaagtaaaaagaacataagaaagcagcgaatgaaaatcttattcaatgttgttcttgaagctcgagagccaggttcaggcagaagactttgtgacctatttatggttaaaccatccaaaaaggactatcctgattattataaaatcatcttggagccaatggacttgaaaataattgagcataacatccgcaatgacaaatatgctggtgaagagggaatgatagaagacatgaagctgatgttccggaatgccaggcactataatgaggagggctcccaggtttataatgatgcacatatcctggagaagttactcaaggagaaaaggaaagagctgggcccactgcctgatgatgatgacatggcttctcccaaactcaagctgagtaggaagagtggcatttctcctaaaaaatcaaaatacatgactccaatgcagcagaaactaaatgaggtctatgaagctgtaaagaactatactgataagaggggtcgccgcctcagtgccatatttctgaggcttccctctagatctgagttgcctgactactatctgactattaaaaagcccatggacatggaaaaaattcgaagtcacatgatggccaacaagtaccaagatattgactctatggttgaggactttgtcatgatgtttaataatgcctgtacatacaatgagccggagtctttgatctacaaagatgctcttgttctacacaaagtcctgcttgaaacacgcagagacctggagggagatgaggactctcatgtcccaaatgtgactttgctgattcaagagcttatccacaatctttttgtgtcagtcatgagtcatcaggatgatgagggaagatgctacagcgattctttagcagaaattcctgctgtggatcccaactttcctaacaaaccaccccttacatttgacataattaggaagaatgttgaaaataatcgctaccgtcggcttgatttatttcaagagcatatgtttgaagtattggaacgagcaagaaggatgaatcggacagattcagaaatatatgaagatgcagtagaacttcagcagttttttattaaaattcgtgatgaactctgcaaaaatggagagattcttctttcaccggcactcagctataccacaaaacatttgcataatgatgtggagaaagagagaaaggaaaaattgccaaaagaaatagaggaagataaactaaaacgagaagaagaaaaaagagaagctgaaaagagtgaagattcctctggtgctgcaggcctctcaggcttacatcgcacatacagccaggactgtagctttaaaaacagcatgtaccatgttggagattacgtctatgtggaacctgcagaggccaacctacaaccacatatcgtctgtattgaaagactgtgggaggattcagctggtgaaaaatggttgtatggctgttggttttaccgaccaaatgaaacattccacctggctacacgaaaatttctagaaaaagaagtttttaagagtgactattacaacaaagttccagttagtaaaattctaggcaagtgtgtggtcatgtttgtcaaggaatactttaagttatgcccagaaaacttccgagatgaggatgtttttgtctgtgaatcacggtattctgccaaaaccaaatcttttaagaaaattaaactgtggaccatgcccatcagctcagtcaggtttgtccctcgggatgtgcctctgcctgtggttcgcgtggcctctgtatttgcaaatgcagataaaggtgatgatgagaagaatacagacaactcagaggacagtcgagctgaagacaattttaacttggaaaaggaaaaagaagatgtccctgtggaaatgtccaatggtgaaccaggttgccactactttgagcagctccattacaatgacatgtggctgaaggttggcgactgtgtcttcatcaagtcccatggcctggtgcgtcctcgtgtgggcagaattgaaaaagtatgggttcgagatggagctgcatatttttatggccccatcttcattcacccagaagaaacagagcatgagcccacaaaaatgttctacaaaaaagaagtatttctgagtaatctggaagaaacctgccccatgacatgtattctcggaaagtgtgctgtgttgtcattcaaggacttcctctcctgcaggccaactgaaataccagaaaatgacattctgctttgtgagagccgctacaatgagagcgacaagcagatgaagaaattcaaaggattgaagaggttttcactctctgctaaagtggtagatgatgaaatttactacttcagaaaaccaattgttcctcagaaggagccatcacctttgctggaaaagaagatccagttgctagaagctaaatttgccgagttagaaggtggagatgatgatattgaagagatgggagaagaagatagtgaggtcattgaacctccttctctacctcagcttcagacccccctggccagtgagctggacctcatgccctacacacccccacagtctaccccaaagtctgccaaaggcagtgcaaagaaggaaggctccaaacggaaaatcaacatgagtggctacatcctgttcagcagtgagatgagggctgtgattaaggcccaacacccagactactctttcggggagctcagccgcctggtggggacagaatggagaaatcttgagacagccaagaaagcagaatatgaagagcgggcagctaaagttgctgagcagcaggagagagagcgagcagcacagcaacagcagccgagtgcttctccccgagcaggcacccctgtgggggctctcatgggggtggtgccaccaccaacaccaatggggatgctcaatcagcagttgacacctgttgcaggcatgatgggtggctatccgccaggccttccacctttgcagggcccagttgatggccttgttagcatgggcagcatgcagccacttcaccctggggggcctccaccccaccatcttccgccaggtgtgcctggcctcccgggcatcccaccaccgggtgtgatgaaccaaggagtggcccctatggtagggactccagcaccaggtggaagtccatatggacaacaggtgggagttttggggcctccagggcagcaggcaccacctccatatcccggcccacatccagctggaccccctgtcatacagcagccaacaacacccatgtttgtagctcccccaccaaagacccagcggcttcttcactcagaggcctacctgaaatacattgaaggactcagtgcggagtccaacagcattagcaagtgggatcagacactggcagctcgaagacgcgacgtccatttgtcgaaagaacaggagagccgcctaccctctcactggctgaaaagcaaaggggcccacaccaccatggcagatgccctctggcgccttcgagatttgatgctccgggacaccctcaacattcgccaagcatacaacctagaaaatgtttaatcacatcattacgtttcttttatatagaagcataaagagttgtggatcagtagccattttagttactgggggt

SEQ ID NO: 328262 - DNA, 5070 bp, Artificial Sequence
  derived and/or modified sequence
atgggaagtaaaagaagaagagcaaccagtcccagctctagcgtctcaggtgattttgatgatggtcatcactcagtgtctaccccaggaccctccagaaagaggcggcgattatccaatctccccacagtggacccaattgcggtttgtcacgaactgtataacaccattcgagattacaaagacgaacagggtagactcctctgcgagttattcattcgcgctccgaaaagaaggaatcaacccgattattacgaagtcgtctcacaaccaattgatctgatgaagatccagcagaagctcaagatggaagagtatgatgacgtgaacctgctgactgctgattttcagctgctgttcaacaatgccaagtcgtactataagccagatagtcccgagtataaggccgcttgtaagctgtgggatctctacctccgaaccaggaacgagtttgtccagaaaggcgaagctgatgacgaggacgatgacgaagatggccaagacaatcagggaactgtcaccgagggatcttcacctgcatacctgaaagagattctcgaacaattactggaggcaattgtcgtggccactaacccgtccgggagactgatcagcgagctgtttcaaaagctaccttctaaagtgcagtatcccgattactacgcaatcataaaagaacctattgacctgaaaaccatcgcacagcggatccaaaatggtagctacaagtctatccacgccatggcaaaagatatcgatcttctagccaagaatgccaagacctacaacgagccaggcagccaggtctttaaagatgccaacagtattaaaaagatcttctatatgaaaaaggcggagattgagcaccacgaaatggctaagagtagtctgcgaatgaggaccccctccaacctggctgccgcacggctcaccggcccaagtcattccaaagggtccctgggggaagagagaaaccctaccagtaaatactacagaaacaaacgcgcagtgcaaggtgggcgtctgtcggccatcactatggccctgcagtacggcagtgagtctgaggaagatgcagctttggccgctgctcgctacgaggaaggcgagtctgaggctgagagcatcacttcttttatggatgtgtccaaccccttctatcagctgtacgatacggtccggtcgtgccgcaataatcaggggcaactgattgctgaacctttttaccacttgcctagtaagaaaaagtatccagactactatcagcaaataaagatgccgatcagcctgcagcagataagaaccaaattaaagaatcaggagtatgaaacactcgaccacctggagtgtgacctgaacctgatgttcgagaacgcaaaaagatacaacgtacccaatagcgccatttacaaacgcgtcttaaaactccagcaggtgatgcaagcaaagaaaaaagagcttgctagacgggacgacattgaagacggtgattccatgatcagttcggccactagtgataccggcagcgccaagcggaaaagtaagaaaaatattagaaaacagcggatgaaaatcctgttcaacgtggtgcttgaggctagagaacccggaagtgggaggcggctttgcgacctgtttatggtcaaacccagcaaaaaagactaccctgactattataagatcatactggagccaatggacctaaagattatcgagcacaacatcagaaatgacaagtacgccggtgaggagggaatgattgaggacatgaaacttatgtttcgcaatgcgagacactataatgaagagggaagccaagtctacaatgatgcccacatcctggagaaattgctgaaagagaaacggaaagagttgggtcccctccctgacgacgatgatatggcctctcctaagcttaagctcagccggaagtccgggatctctccaaagaagagcaaatacatgacaccgatgcaacaaaagctcaatgaagtgtatgaggcagttaagaattataccgacaagcggggtcggagactgtcagctattttcctccgcctaccttctaggagcgaacttcctgactactatctgaccatcaaaaaacctatggacatggagaagatccgaagccacatgatggctaacaagtaccaggacatcgattcaatggtggaggattttgtcatgatgtttaacaatgcttgtacctataacgaaccagagagcttgatatacaaagacgccctagttctgcataaggtgctgctcgagacgagacgggatctggagggggacgaggattcccacgttcctaatgtcacacttctgattcaggagttgattcacaacctctttgtttccgtgatgtcacaccaggacgacgaaggtcgttgttatagtgactctctggctgaaatcccagctgtggatccgaattttcccaacaagcctcccctgactttcgacatcatccgaaaaaatgtggagaacaaccgttaccgtcgacttgatctatttcaggagcacatgttcgaggtactggagcgcgcacgcaggatgaacaggactgactcggagatctatgaggatgctgtggagctgcagcaattcttcatcaaaatccgggacgagttatgcaaaaacggcgagattttgctaagcccagccttgtcttacaccaccaagcacctgcacaacgacgtggagaaagagcgcaaggagaagctccctaaggagattgaggaggataagcttaagagagaggaggagaaacgcgaagcagaaaaatcagaggactcctcgggcgctgccggtctctccggacttcatagaacatactcacaagattgctcatttaagaacagcatgtaccacgtgggagattacgtatatgtggagccagccgaagccaatcttcagcctcatattgtctgcatagagagactgtgggaggacagcgctggagagaagtggctgtacggttgctggttctaccggccaaacgagacttttcacctcgccacgcggaaattcttggaaaaggaagtatttaaaagcgactattacaataaggtgcccgttagcaaaattcttggtaaatgcgtggttatgttcgtcaaggagtatttcaagttatgccctgaaaatttcagggatgaggacgtattcgtgtgcgaaagtcgctattcagcaaaaactaagagcttcaagaagatcaagttatggaccatgcccatttcctccgtgcgttttgtgccacgagatgttcctctgccggtggtgcgcgttgcctccgtcttcgcgaatgccgacaaaggagatgacgaaaagaataccgacaactctgaagacagtagggccgaggataatttcaacctggagaaagagaaagaagacgttccggtcgaaatgtccaatggcgagcccggatgtcactatttcgagcaactgcactacaacgacatgtggttaaaagtcggcgactgcgtatttatcaaatctcatgggctagtgcggccaagagtcgggagaatcgaaaaagtttgggtccgagacggcgcagcatacttttacgggcctattttcatccaccctgaagaaaccgaacacgagccaacaaagatgttttacaaaaaagaggtattcttaagtaacctggaagaaacctgcccaatgacatgcatcctgggcaaatgcgctgtgctgtccttcaaggattttctctcttgtcgacccacagagatcccggaaaatgacatcctcctctgtgagagcagatataatgagtctgataagcaaatgaaaaaatttaaagggcttaagcgcttcagtcttagcgccaaggtcgtggatgatgagatctactattttagaaaaccaatcgtccctcagaaggaaccttctcctctcctggaaaaaaagattcagctcctcgaagcaaaatttgccgaactggagggcggtgatgatgatatcgaagaaatgggcgaggaagatagcgaggtgatcgagcctccttcgcttccccagctgcagacccctttggccagcgagctggatcttatgccttacacccccccacaaagcacacctaaatctgccaaggggagcgccaagaaggaagggtcgaaacgcaagattaacatgagcggctacattctcttcagctcggagatgagagcagtgatcaaggcgcagcatccggattattccttcggcgagctgagccggttggtcggaacagaatggcgaaatctcgagaccgccaagaaagctgaatacgaggaaagggcagcgaaggtggcagaacagcaggaaagggagagagccgctcagcagcagcagccgagcgcgtccccacgtgccggaactcctgtgggggcactgatgggcgtggtcccaccaccaaccccaatgggcatgctcaatcagcagctgacgcctgttgccggtatgatgggaggctacccacctgggctaccccctcttcagggccctgtggacggcctggtgagtatgggttcgatgcaacctctgcatccagggggaccaccccctcaccatctgccaccgggtgtgccgggactccccggtattccccctcctggcgttatgaaccaaggagtggcaccaatggttggcacccccgctccaggaggaagcccttatggccagcaagtgggagttctggggcctccaggacaacaggcgcctcccccttatcccggtcctcatcccgctgggccaccagtgatccaacagcccaccaccccgatgttcgtcgccccaccgccaaagacccaacgcttgctccattcagaggcataccttaagtatattgaaggcctcagtgccgagtccaactccatctcaaagtgggaccaaacactcgctgcaagacgaagggatgtgcatttatctaaagagcaggagtctcggctgccatcccattggctgaagtcaaagggtgctcacaccaccatggctgatgctctgtggaggttaagagacctaatgctccgggatactctcaatatccgccaggcctataacctcgagaacgtttag

SEQ ID NO: 328263 - DNA, 5070 bp, Artificial Sequence
  derived and/or modified sequence
atgggcagcaagagaagaagagccaccagccccagcagcagcgtgagcggcgacttcgacgacggccaccacagcgtgagcacccccggccccagcagaaagagaagaagactgagcaacctgcccaccgtggaccccatcgccgtgtgccacgagctgtacaacaccatcagagactacaaggacgagcagggcagactgctgtgcgagctgttcatcagagcccccaagagaagaaaccagcccgactactacgaggtggtgagccagcccatcgacctgatgaagatccagcagaagctgaagatggaggagtacgacgacgtgaacctgctgaccgccgacttccagctgctgttcaacaacgccaagagctactacaagcccgacagccccgagtacaaggccgcctgcaagctgtgggacctgtacctgagaaccagaaacgagttcgtgcagaagggcgaggccgacgacgaggacgacgacgaggacggccaggacaaccagggcaccgtgaccgagggcagcagccccgcctacctgaaggagatcctggagcagctgctggaggccatcgtggtggccaccaaccccagcggcagactgatcagcgagctgttccagaagctgcccagcaaggtgcagtaccccgactactacgccatcatcaaggagcccatcgacctgaagaccatcgcccagagaatccagaacggcagctacaagagcatccacgccatggccaaggacatcgacctgctggccaagaacgccaagacctacaacgagcccggcagccaggtgttcaaggacgccaacagcatcaagaagatcttctacatgaagaaggccgagatcgagcaccacgagatggccaagagcagcctgagaatgagaacccccagcaacctggccgccgccagactgaccggccccagccacagcaagggcagcctgggcgaggagagaaaccccaccagcaagtactacagaaacaagagagccgtgcagggcggcagactgagcgccatcaccatggccctgcagtacggcagcgagagcgaggaggacgccgccctggccgccgccagatacgaggagggcgagagcgaggccgagagcatcaccagcttcatggacgtgagcaaccccttctaccagctgtacgacaccgtgagaagctgcagaaacaaccagggccagctgatcgccgagcccttctaccacctgcccagcaagaagaagtaccccgactactaccagcagatcaagatgcccatcagcctgcagcagatcagaaccaagctgaagaaccaggagtacgagaccctggaccacctggagtgcgacctgaacctgatgttcgagaacgccaagagatacaacgtgcccaacagcgccatctacaagagagtgctgaagctgcagcaggtgatgcaggccaagaagaaggagctggccagaagagacgacatcgaggacggcgacagcatgatcagcagcgccaccagcgacaccggcagcgccaagagaaagagcaagaagaacatcagaaagcagagaatgaagatcctgttcaacgtggtgctggaggccagagagcccggcagcggcagaagactgtgcgacctgttcatggtgaagcccagcaagaaggactaccccgactactacaagatcatcctggagcccatggacctgaagatcatcgagcacaacatcagaaacgacaagtacgccggcgaggagggcatgatcgaggacatgaagctgatgttcagaaacgccagacactacaacgaggagggcagccaggtgtacaacgacgcccacatcctggagaagctgctgaaggagaagagaaaggagctgggccccctgcccgacgacgacgacatggccagccccaagctgaagctgagcagaaagagcggcatcagccccaagaagagcaagtacatgacccccatgcagcagaagctgaacgaggtgtacgaggccgtgaagaactacaccgacaagagaggcagaagactgagcgccatcttcctgagactgcccagcagaagcgagctgcccgactactacctgaccatcaagaagcccatggacatggagaagatcagaagccacatgatggccaacaagtaccaggacatcgacagcatggtggaggacttcgtgatgatgttcaacaacgcctgcacctacaacgagcccgagagcctgatctacaaggacgccctggtgctgcacaaggtgctgctggagaccagaagagacctggagggcgacgaggacagccacgtgcccaacgtgaccctgctgatccaggagctgatccacaacctgttcgtgagcgtgatgagccaccaggacgacgagggcagatgctacagcgacagcctggccgagatccccgccgtggaccccaacttccccaacaagccccccctgaccttcgacatcatcagaaagaacgtggagaacaacagatacagaagactggacctgttccaggagcacatgttcgaggtgctggagagagccagaagaatgaacagaaccgacagcgagatctacgaggacgccgtggagctgcagcagttcttcatcaagatcagagacgagctgtgcaagaacggcgagatcctgctgagccccgccctgagctacaccaccaagcacctgcacaacgacgtggagaaggagagaaaggagaagctgcccaaggagatcgaggaggacaagctgaagagagaggaggagaagagagaggccgagaagagcgaggacagcagcggcgccgccggcctgagcggcctgcacagaacctacagccaggactgcagcttcaagaacagcatgtaccacgtgggcgactacgtgtacgtggagcccgccgaggccaacctgcagccccacatcgtgtgcatcgagagactgtgggaggacagcgccggcgagaagtggctgtacggctgctggttctacagacccaacgagaccttccacctggccaccagaaagttcctggagaaggaggtgttcaagagcgactactacaacaaggtgcccgtgagcaagatcctgggcaagtgcgtggtgatgttcgtgaaggagtacttcaagctgtgccccgagaacttcagagacgaggacgtgttcgtgtgcgagagcagatacagcgccaagaccaagagcttcaagaagatcaagctgtggaccatgcccatcagcagcgtgagattcgtgcccagagacgtgcccctgcccgtggtgagagtggccagcgtgttcgccaacgccgacaagggcgacgacgagaagaacaccgacaacagcgaggacagcagagccgaggacaacttcaacctggagaaggagaaggaggacgtgcccgtggagatgagcaacggcgagcccggctgccactacttcgagcagctgcactacaacgacatgtggctgaaggtgggcgactgcgtgttcatcaagagccacggcctggtgagacccagagtgggcagaatcgagaaggtgtgggtgagagacggcgccgcctacttctacggccccatcttcatccaccccgaggagaccgagcacgagcccaccaagatgttctacaagaaggaggtgttcctgagcaacctggaggagacctgccccatgacctgcatcctgggcaagtgcgccgtgctgagcttcaaggacttcctgagctgcagacccaccgagatccccgagaacgacatcctgctgtgcgagagcagatacaacgagagcgacaagcagatgaagaagttcaagggcctgaagagattcagcctgagcgccaaggtggtggacgacgagatctactacttcagaaagcccatcgtgccccagaaggagcccagccccctgctggagaagaagatccagctgctggaggccaagttcgccgagctggagggcggcgacgacgacatcgaggagatgggcgaggaggacagcgaggtgatcgagccccccagcctgccccagctgcagacccccctggccagcgagctggacctgatgccctacacccccccccagagcacccccaagagcgccaagggcagcgccaagaaggagggcagcaagagaaagatcaacatgagcggctacatcctgttcagcagcgagatgagagccgtgatcaaggcccagcaccccgactacagcttcggcgagctgagcagactggtgggcaccgagtggagaaacctggagaccgccaagaaggccgagtacgaggagagagccgccaaggtggccgagcagcaggagagagagagagccgcccagcagcagcagcccagcgccagccccagagccggcacccccgtgggcgccctgatgggcgtggtgcccccccccacccccatgggcatgctgaaccagcagctgacccccgtggccggcatgatgggcggctacccccccggcctgccccccctgcagggccccgtggacggcctggtgagcatgggcagcatgcagcccctgcaccccggcggcccccccccccaccacctgccccccggcgtgcccggcctgcccggcatccccccccccggcgtgatgaaccagggcgtggcccccatggtgggcacccccgcccccggcggcagcccctacggccagcaggtgggcgtgctgggcccccccggccagcaggccccccccccctaccccggcccccaccccgccggcccccccgtgatccagcagcccaccacccccatgttcgtggcccccccccccaagacccagagactgctgcacagcgaggcctacctgaagtacatcgagggcctgagcgccgagagcaacagcatcagcaagtgggaccagaccctggccgccagaagaagagacgtgcacctgagcaaggagcaggagagcagactgcccagccactggctgaagagcaagggcgcccacaccaccatggccgacgccctgtggagactgagagacctgatgctgagagacaccctgaacatcagacaggcctacaacctggagaacgtgtag

SEQ ID NO: 328264 - protein, 118 aa, Artificial Sequence
  derived and/or modified sequence
MGSKRRRATSPSSSVSGDFDDGHHSVSTPGPSRKRRRLSNLPTVDPIAVCHELYNTIRDYKDEQGRLLCELFIRAPKRRNQPDYYEVVSQPIDLMKIQQKLKMEEYDDVNLLTADFQL

SEQ ID NO: 328265 - protein, 1634 aa, Artificial Sequence
  derived and/or modified sequence
MGSKRRRATSPSSSVSGDFDDGHHSVSTPGPSRKRRRLSNLPTVDPIAVCHELYNTIRDYKDEQGRLLCELFIRAPKRRNQPDYYEVVSQPIDLMKIQQKLKMEEYDDVNLLTADFQLLFNNAKSYYKPDSPEYKAACKLWDLYLRTRNEFVQKGEADDEDDDEDGQDNQGTVTEGSSPAYLKEILEQLLEAIVVATNPSGRLISELFQKLPSKVQYPDYYAIIKEPIDLKTIAQRIQNGSYKSIHAMAKDIDLLAKNAKTYNEPGSQVFKDANSIKKIFYMKKAEIEHHEMAKSSLRMRTPSNLAAARLTGPSHSKGSLGEERNPTSKYYRNKRAVQGGRLSAITMALQYGSESEEDAALAAARYEEGESEAESITSFMDVSNPFYQLYDTVRSCRNNQGQLIAEPFYHLPSKKKYPDYYQQIKMPISLQQIRTKLKNQEYETLDHLECDLNLMFENAKRYNVPNSAIYKRVLKLQQVMQAKKKELARRDDIEDGDSMISSATSDTGSAKRKSKKNIRKQRMKILFNVVLEAREPGSGRRLCDLFMVKPSKKDYPDYYKIILEPMDLKIIEHNIRNDKYAGEEGMIEDMKLMFRNARHYNEEGSQVYNDAHILEKLLKEKRKELGPLPDDDDMASPKLKLSRKSGISPKKSKYMTPMQQKLNEVYEAVKNYTDKRGRRLSAIFLRLPSRSELPDYYLTIKKPMDMEKIRSHMMANKYQDIDSMVEDFVMMFNNACTYNEPESLIYKDALVLHKVLLETRRDLEGDEDSHVPNVTLLIQELIHNLFVSVMSHQDDEGRCYSDSLAEIPAVDPNFPNKPPLTFDIIRKNVENNRYRRLDLFQEHMFEVLERARRMNRTDSEIYEDAVELQQFFIKIRDELCKNGEILLSPALSYTTKHLHNDVEKERKEKLPKEIEEDKLKREEEKREAEKSEDSSGAAGLSGLHRTYSQDCSFKNSMYHVGDYVYVEPAEANLQPHIVCIERLWEDSAGEKWLYGCWFYRPNETFHLATRKFLEKEVFKSDYYNKVPVSKILGKCVVMFVKEYFKLCPENFRDEDVFVCESRYSAKTKSFKKIKLWTMPISSVRFVPRDVPLPVVRVASVFANADKGDDEKNTDNSEDSRAEDNFNLEKEKEDVPVEMSNGEPGCHYFEQLHYNDMWLKVGDCVFIKSHGLVRPRVGRIEKVWVRDGAAYFYGPIFIHPEETEHEPTKMFYKKEVFLSNLEETCPMTCILGKCAVLSFKDFLSCRPTEIPENDILLCESRYNESDKQMKKFKGLKRFSLSAKVVDDEIYYFRKPIVPQKEPSPLLEKKIQLLEAKFAELEGGDDDIEEMGEEDSEVIEPPSLPQLQTPLASELDLMPYTPPQSTPKSAKGSAKKEGSKRKINMSGYILFSSEMRAVIKAQHPDYSFGELSRLVGTEWRNLETAKKAEYEGMMGGYPPGLPPLQGPVDGLVSMGSMQPLHPGGPPPHHLPPGVPGLPGIPPPGVMNQGVAPMVGTPAPGGSPYGQQVGVLGPPGQQAPPPYPGPHPAGPPVIQQPTTPMFVAPPPKTQRLLHSEAYLKYIEGLSAESNSISKWDQTLAARRRDVHLSKEQESRLPSHWLKSKGAHTTMADALWRLRDLMLRDTLNIRQAYNLENV

SEQ ID NO: 328266 - DNA, 4905 bp, Artificial Sequence
  derived and/or modified sequence
atgggcagcaagagaagacgggcaacttctccctccagtagcgtgtccggcgattttgacgatggacatcactcggtcagcacccccggccctagtcggaagagacgacggctgtccaatctgccaacagtggaccctattgcagtgtgccacgagctatacaataccatacgggactataaagacgaacagggacgccttctttgtgaactgttcatcagagctcccaaaaggagaaaccagcctgactattatgaggtggtgagccaaccaatcgaccttatgaaaatccagcagaagttgaagatggaggaatacgacgatgtgaacctgctgaccgccgacttccaactactgttcaataatgctaagtcctattataagcctgactctccagagtacaaagctgcctgtaagctctgggacttatatttacggacacgcaatgaattcgtgcaaaaaggcgaggcagatgacgaagatgacgatgaagacgggcaggacaaccagggaaccgtcactgagggcagctcccctgcgtatttgaaagagatcctggaacaactcctggaggccattgttgtggcgacgaacccaagcggccggctgattagtgaattgttccagaaattgcccagcaaggtccaatatccagactattatgccatcataaaggagcctatagatctgaagacaatcgcccaaagaatccaaaacgggtcgtataagtctattcacgcaatggccaaggatattgatctgctcgctaagaacgccaaaacatacaatgaaccaggttctcaggtctttaaggacgctaactccattaaaaaaatcttttatatgaaaaaggccgagatagaacatcatgagatggctaaaagttcactgcgcatgagaaccccttccaatctggcggctgcacgcttgaccggcccaagccatagtaaaggtagcctgggagaagagagaaacccgactagtaaatactatcggaacaagcgtgcagttcagggagggagactgagcgccatcacaatggccctgcagtacgggagcgagtcggaagaggatgcggctctcgctgctgcgcggtacgaggagggtgagtctgaggcggaaagtattacttctttcatggacgtgtccaaccctttctaccagctgtacgatactgtcaggtcctgtaggaacaaccaggggcagttgattgccgagccattttatcacctgccctctaaaaaaaagtacccggattactaccagcagatcaagatgccaattagtctccagcagattaggaccaaacttaagaaccaggaatatgagacactggaccacctggaatgcgatctgaacctcatgtttgagaacgctaaaaggtacaacgtccccaacagtgcaatttacaagcgtgtgctaaaactgcagcaggtaatgcaggccaaaaagaaagaacttgcccgccgtgacgacatcgaagatggtgattccatgatttcatccgcgacgtctgacactggctccgccaagagaaagtccaagaagaatatcagaaagcaacgaatgaagatcctctttaacgtggtgctggaagccagagaaccagggagcggtcgccgtctgtgtgatctcttcatggtgaaaccctccaagaaggattaccccgactattacaagattatcctagagccgatggaccttaagattatagagcacaatatcagaaatgacaagtatgccggtgaggaaggtatgatcgaggatatgaaactgatgttccgcaatgctcgacactacaatgaggaaggttctcaggtctataatgatgcacacatccttgaaaaattgctaaaggaaaagcgaaaagaactgggaccactgcccgacgacgatgatatggctagtcccaagctgaaactctcccggaagtcaggcattagtccaaaaaagtctaaatatatgactcctatgcaacaaaaactgaacgaggtatacgaggccgtgaaaaattataccgacaagcgcggtcgccgactcagcgcaatcttccttagactgcccagccggagcgaactgcctgactactatttgaccatcaaaaagcccatggacatggaaaagatcagatcacacatgatggctaataagtaccaggacatagactccatggtggaggactttgtcatgatgttcaacaacgcatgtacctataacgagccagaatcactgatctataaggacgcattggtcctacacaaagttctgctggagacaaggcgagacttggaaggagatgaagattcccatgtaccaaacgttacactgctgatccaggaactgatccacaatctattcgtgtctgtcatgtcccatcaggatgacgaggggcggtgctattctgactcgttagctgagataccagctgtagatcctaacttccccaacaaacctcccctcacatttgatattatccgtaagaacgtagagaacaatcgttaccgaaggctggacctcttccaggaacatatgtttgaagtactcgaacgggcaagaaggatgaaccggacagattccgaaatctacgaggacgcagtcgaattacagcagttctttatcaagattcgcgatgagctgtgtaaaaatggggaaatcctgctcagccctgcactgtcctataccacgaagcatttacacaacgatgttgaaaaagagcgcaaggaaaagctgcccaaggaaatcgaggaagacaaactgaaacgcgaggaagaaaaacgcgaggcagaaaaaagcgaggacagcagcggggcagccggactaagtggtttacatcgtacctattcccaagactgctccttcaaaaatagtatgtaccacgtgggcgattacgtctatgttgaaccggcggaggccaacttgcagccccacattgtttgcattgaaagactttgggaagattccgctggcgaaaagtggttgtacggatgttggttttatagacccaacgaaaccttccacttggctactcgcaaattcctggagaaggaagtctttaagtctgactattataacaaggtccccgtctcaaagatcttggggaaatgtgtagttatgttcgttaaggagtatttcaagttgtgcccggaaaatttcagagatgaagacgtgtttgtgtgcgaaagtaggtattctgcaaaaactaaatcgttcaagaagatcaaattgtggaccatgcccattagtagtgtccgcttcgttccaagggatgtgcctctacctgtggtgagagtcgcctccgtgtttgccaacgcggacaagggagacgatgagaagaatacagataactcagaggactccagggcagaggacaactttaatctggagaaggagaaggaggatgtgcctgtcgagatgtcaaacggcgaaccaggttgccactacttcgagcagctgcattacaacgacatgtggttaaaggttggcgattgcgtgttcatcaagagccacggccttgtgaggcccagagtcggtaggatcgaaaaagtttgggtcagagacggcgctgcctacttttacggtcccatctttatccatcccgaggagacggagcacgagccaactaaaatgttttacaagaaggaagtctttctttccaatctcgaggagacctgcccaatgacttgtattctcggaaagtgcgccgtactgtcttttaaagacttcctcagctgtaggcctacagagattcctgagaacgatattctcctgtgtgaatcacggtataatgagagtgataaacagatgaagaagttcaagggcctaaagagattctccctttcagcaaaggttgtagatgatgaaatctactattttaggaagcctatcgtccctcagaaagagccaagtcctctgctcgagaagaagattcaactgcttgaggcaaagtttgcagaactcgaaggaggtgatgacgacattgaagagatgggcgaggaggactctgaggtgatagagccaccctcactgcctcagcttcagacacccctagcatcagagctggatctaatgccatatactccaccccaatcgactcccaaaagcgcaaaaggcagtgctaagaaggagggttcaaaacgcaagattaatatgtctgggtacatcttgttctcttccgaaatgcgtgccgtgatcaaggcacagcatccagattattccttcggcgagctgagtcgcttagtcggtacagagtggagaaatcttgagaccgctaaaaaggccgagtatgaaggcatgatgggcggttacccccccggcctgcctccactgcaggggccagtggatgggctggtgagtatgggttctatgcagcctttacaccccggtggaccaccccctcaccatctgcccccaggagtgccaggccttcccggtattcccccacctggagtcatgaaccagggggtggcccccatggtgggaacccctgctcccggaggaagcccttacggccagcaggtgggggtgctcggcccgccgggacagcaggctcctcccccttaccccggtccccatccagctgggccaccggtgatccagcagccaaccacaccaatgtttgtggctcccccccctaaaacccagcgactcttacacagcgaggcatacctgaaatacattgagggcctatctgctgagtctaactccatctccaagtgggatcagactctcgcagcaaggcggcgtgacgtgcatctgagcaaggagcaggagagtaggctccctagtcactggcttaaaagcaagggcgcacacaccaccatggcggacgcattatggagattacgcgaccttatgctacgagacactctcaacatcaggcaggcctacaaccttgagaatgtctag

SEQ ID NO: 328267 - DNA, 4905 bp, Artificial Sequence
  derived and/or modified sequence
atgggcagcaagagaagaagagccaccagccccagcagctctgtgtctggggactttgatgatggccaccacagcgtgtccaccccaggccccagcaggaagagaagaaggctgagcaacctgcccaccgtggaccccatcgctgtgtgccacgagctgtacaacaccatccgggactacaaggatgagcagggccgcctgctgtgtgagctgttcatccgggcccccaagagaagaaaccagcctgactactatgaggtggtgtcccagcccatcgacctgatgaagatccagcagaagctgaagatggaggagtatgatgatgtgaacctgctgacagctgacttccagctgctcttcaacaatgccaagagctactacaagccagacagccctgagtacaaggccgcctgcaagctgtgggacctgtacctgcggaccagaaatgaatttgtgcagaagggggaggctgatgatgaagatgatgatgaagatggccaggacaaccagggcaccgtgacagagggcagcagccctgcctacctgaaggagatcctggagcagctgctggaggccatcgtggtggccaccaaccccagcggccgcctcatcagcgagctgttccagaagctgcccagcaaggtgcagtacccagactactatgccatcatcaaggagcccatcgacctgaagaccatcgcccagaggatccagaatggcagctacaagagcatccacgccatggccaaggacatcgacctgctggccaagaatgccaagacctacaatgaacctggcagccaggtgttcaaggatgccaacagcatcaagaagatcttctacatgaagaaggccgagattgagcaccacgagatggccaagagcagcctgaggatgaggacccccagcaacctggccgccgcccggctgaccggccccagccacagcaagggcagcctgggggaggagaggaaccccaccagcaagtactacagaaacaagagagctgtgcagggcggccgcctgagcgccatcaccatggccctgcagtatggcagcgagagtgaagaagatgctgccctggccgccgcccgctatgaggagggggagagcgaggccgagagcatcaccagcttcatggatgtgagcaaccccttctaccagctgtatgacacagtgcgcagctgcaggaacaaccagggccagctgattgctgagcccttctaccacctgcccagcaagaagaagtacccagactactaccagcagatcaagatgcccatcagcctgcagcagatccgcaccaagctgaagaaccaggagtatgagaccctggaccacctggagtgtgacctgaacctgatgtttgaaaatgccaagcgctacaacgtgcccaacagcgccatctacaagagggtgctgaagctgcagcaggtgatgcaggccaagaagaaggagctggccaggagagatgacattgaagatggagacagcatgatcagcagcgccaccagtgacaccggcagcgccaagaggaagagcaagaagaacatcaggaagcagaggatgaagatcctcttcaacgtggtgctggaggcccgggagcccggcagcggccggcggctgtgtgacctcttcatggtgaagcccagcaagaaggactacccagactactacaagatcatcctggagcccatggacctgaagatcatcgagcacaacatcagaaatgacaagtatgctggggaggagggcatgattgaggacatgaagctgatgttcagaaatgcccggcactacaatgaggagggcagccaggtgtacaatgatgcccacatcctggagaagctgctgaaggagaagaggaaggagctgggccccctgcctgatgatgatgacatggccagccccaagctgaagctgagcaggaagagcggcatcagccccaagaagagcaagtacatgacccccatgcagcagaagctgaatgaggtgtatgaggccgtgaagaactacacagacaagaggggccggcggctgagcgccatcttcctgcggctgcccagccgctctgagctgcctgactactacctgaccatcaagaagcccatggacatggagaagatccgcagccacatgatggccaacaagtaccaggacatcgacagcatggtggaggactttgtgatgatgttcaacaatgcctgcacctacaatgaacctgagagcctcatctacaaggatgccctggtgctgcacaaggtgctgctggagacccggcgggacctggagggagatgaggacagccacgtgcccaacgtgaccctgctgatccaggagctgatccacaacctgtttgtgtctgtgatgagccaccaggatgatgagggccgctgctacagcgacagcctggccgagatcccagctgtggaccccaacttccccaacaagccacccctgacctttgacatcatcaggaagaatgtggagaacaaccgctacagaaggctggacctcttccaggagcacatgtttgaggtgctggagcgggcccggaggatgaacagaacagattctgagatctatgaagatgctgtggagctgcagcagttcttcatcaagatcagagatgagctgtgcaagaatggagagatcctgctgagccctgccctgagctacaccaccaagcacctgcacaatgatgtggagaaggagaggaaggagaagctgcccaaggagattgaggaggacaagctgaagcgggaggaggagaagcgggaggccgagaagtctgaggacagcagtggagctgctggcctgagcggcctgcacaggacctacagccaggactgcagcttcaagaacagcatgtaccacgtgggggactatgtgtatgtggagcctgctgaggccaacctgcagccccacatcgtgtgcatcgagcggctgtgggaggacagcgctggggagaagtggctgtatggctgctggttctaccggcccaatgagaccttccacctggccaccaggaagttcctggagaaggaggtgttcaagagtgactactacaacaaggtgcctgtgtccaagatcctgggcaaatgtgtggtgatgtttgtgaaggagtacttcaagctgtgcccagagaacttcagagatgaagatgtgtttgtgtgtgagagccgctacagcgccaagaccaagagcttcaagaagatcaagctgtggaccatgcccatcagctctgtgcgctttgtgcccagagatgtgcccctgcctgtggtgcgggtggcctctgtgtttgccaatgctgacaagggagatgatgagaagaacacagacaacagcgaggacagcagagctgaggacaacttcaacctggagaaggagaaggaggatgtgcctgtggagatgagcaatggagagcccggctgccactactttgagcagctgcactacaatgacatgtggctgaaggtgggggactgtgtgttcatcaagagccacggcctggtgcggccccgggtgggcagaattgagaaggtgtgggtgagagatggagctgcctacttctacggccccatcttcatccaccctgaggagacagagcacgagcccaccaagatgttctacaagaaggaggtgttcctgagcaacctggaggagacctgccccatgacctgcatcctgggcaaatgtgctgtgctgtccttcaaggacttcctgagctgccggcccacagagatcccagaaaatgacatcctgctgtgtgagagccgctacaatgaaagtgacaagcagatgaagaagttcaagggcctgaagcgcttcagcctgagcgccaaggtggtggatgatgagatctactacttcaggaagcccatcgtgccccagaaggagcccagccccctgctggagaagaagatccagctgctggaggccaagtttgctgagctggagggcggagatgatgacatcgaggagatgggagaggaggacagcgaggtgattgagccccccagcctgccccagctgcagacccccctggccagcgagctggacctgatgccctacaccccaccccagagcacccccaagagcgccaagggcagcgccaagaaggagggcagcaagaggaagatcaacatgagcggctacatcctcttcagcagcgagatgagagctgtgatcaaggcccagcacccagactacagctttggagagctgagccggctggtgggcacagagtggaggaacctggagacagccaagaaggccgagtatgagggcatgatgggcggctacccacctggcctgccccccctgcagggccctgtggatggcctggtgtccatgggctccatgcagcccctgcaccctgggggccccccaccccaccacctgcccccaggagtgcccggcctgcccggcatccccccacctggggtgatgaaccagggcgtggcccccatggtgggcaccccagcccctgggggcagcccctacggccagcaggtgggcgtgctgggccccccaggccagcaggcccccccaccctacccaggcccccaccctgctggcccccctgtgatccagcagcccaccacccccatgtttgtggcccccccacccaagacccagaggctgctgcacagcgaggcctacctgaagtacatcgagggcctgtctgctgagagcaacagcatcagcaagtgggaccagaccctggccgcccggaggagagatgtgcacctgagcaaggagcaggagagccggctgcccagccactggctgaagagcaaaggagcccacaccaccatggctgatgccctgtggaggctgcgggacctgatgctgcgggacaccctgaacatccggcaggcctacaacctggagaatgtgtag

SEQ ID NO: 328268 - DNA, 4905 bp, Artificial Sequence
  derived and/or modified sequence
atgggcagcaagcggcggcgggccaccagccccagcagcagcgtgtctggggactttgatgatggtcaccacagcgtgtctacacccggcccctctaggaagcgacggagattaagcaacctgcctacagttgatccaatcgctgtgtgccacgagttgtacaataccattcgcgattacaaggatgagcagggaaggcttctatgtgagctgttcatccgggcccctaagcgcaggaatcagcctgactactacgaggttgtttctcagcccatcgatttaatgaagatccaacaaaaattgaagatggaagaatatgatgacgtcaacttactgactgctgacttccagctgttattcaataatgcaaaatcctactacaagccagactctcccgagtataaagccgcatgtaagctgtgggatctttacctgcggactagaaatgaatttgtgcaaaagggcgaagccgacgatgaggacgatgacgaggacgggcaagataaccaaggtaccgtcacagagggctcatcccccgcataccttaaggaaattcttgaacagcttctggaagcgattgtcgttgccactaacccgtctggccgccttatttctgagctgtttcagaagcttccctcaaaggtccagtatccagattattatgctatcatcaaggaaccaatcgacctgaagactatcgcgcagcgcattcaaaacgggtcatataagtctatccatgccatggctaaggacatcgaccttctcgcgaaaaacgcaaaaacctacaacgagcccggatcccaggtgtttaaagatgccaattctatcaagaaaatcttttatatgaaaaaggccgaaattgagcatcacgaaatggctaagagcagcctgcggatgagaaccccaagtaacctggcagcagcacggctaacaggaccctctcattcaaaagggtcactgggtgaagagcgaaacccaacctcgaagtactataggaataaaagggccgttcaggggggcagattatctgcaatcaccatggccctgcagtacgggtcagagtctgaggaggacgcagccttggcagccgcgaggtatgaggaaggcgagtctgaagcagagtccataacctcctttatggacgtgagcaaccctttctaccagctttacgacaccgtccgctcctgcaggaacaatcaagggcagctgatcgctgaaccattctatcatctgccctccaaaaaaaagtaccccgattactatcagcagatcaagatgcccatttcccttcaacagatacggaccaagctgaaaaatcaagagtacgagacgttggatcacctggaatgtgatctgaacttaatgttcgagaacgccaaacggtacaacgttcctaactccgcaatttataaaagggtgctgaaactgcagcaggttatgcaggcaaaaaaaaaagaactggcacgtcgagatgacatcgaagatggggactctatgatctcctctgcaacctccgacactggatccgctaagcgcaagtccaagaagaacatcaggaagcaaaggatgaaaattctattcaatgtcgtcctagaagcaagagagcctggcagcggtcgaaggctgtgcgatctgtttatggtgaaaccaagcaagaaggactatccggactactataaaatcatattggaacctatggatctgaagattatagagcacaatatcagaaacgataagtacgccggagaggagggaatgatcgaagacatgaaactaatgtttaggaacgctaggcattacaacgaagagggtagccaggtatacaacgatgcccacatactcgagaaactgctcaaggagaaacggaaagagttgggacctttgccggatgatgacgatatggcctctccgaaactgaagctgagccgcaagagcggaattagcccgaaaaaatctaagtacatgacccccatgcagcagaaactgaacgaagtatacgaagccgttaagaattacactgacaaacgcggcagaagactgtcggccatattcctgagactgccaagcaggtccgagctccccgattactacctgaccatcaaaaaacccatggatatggagaagattcgcagccatatgatggccaacaagtatcaagacatagactctatggtagaggatttcgtcatgatgtttaataatgcctgtacatacaacgagccagagtctctgatttataaagatgccctggtgttgcataaagttctattggagacccgtagagacctcgaaggcgatgaggactcacacgtccccaacgttaccctgctgatccaagaactgatccataatctgttcgtatccgtgatgagccaccaggatgacgagggccgttgctattcagattcattggccgagatacctgcagtcgaccccaattttcccaacaaaccaccactcacgtttgatatcattcgaaagaatgtggaaaacaaccgctatcgcagacttgatctgtttcaggagcacatgttcgaggttctggaaagggcccgacgaatgaaccgaaccgactccgaaatttatgaagacgctgtggagctgcagcagttcttcataaaaatccgagatgagctgtgtaagaacggggaaatactgctgtcaccagccctaagctataccaccaagcatctgcacaacgatgtggagaaggagcggaaagagaagctcccaaaggaaatagaagaggacaaactgaaaagagaggaagagaagcgcgaagctgagaagtccgaggacagttccggcgcggccgggcttagtggcttgcatcggacctacagtcaagattgctcattcaaaaatagcatgtatcacgtgggagattatgtgtatgtggaaccggccgaggcaaacctgcagcctcatatagtgtgcatcgaacggctctgggaggacagcgcaggggaaaagtggctctacggatgttggttctatagacctaacgaaacattccatctcgcgacaagaaaattccttgagaaggaagtgtttaaatcggactactacaacaaggtgccggtcagcaaaatcttgggaaagtgtgtggttatgttcgtgaaagagtacttcaagctgtgtcccgagaacttccgcgacgaggacgtgttcgtctgcgaaagccgctatagcgctaagactaagtcattcaagaagataaagctgtggacgatgcccatctctagtgtaagatttgttcccagggatgttcctctgccagtggtgagggtcgcttctgtattcgcaaacgcggacaaaggagatgacgagaagaatacagacaattccgaggactcacgggccgaagataacttcaacctcgaaaaggaaaaggaagacgtgcctgtcgagatgtccaacggggagcccggctgccattattttgagcagctgcattataatgatatgtggttaaaagtgggcgactgcgtgtttattaagtcccacggtctggtgcggcctcgggtcggacggatcgagaaggtctgggttcgggacggtgctgcttatttttacggccctatattcattcatcccgaagaaacagaacatgagcccactaaaatgttctataaaaaagaagtgttcctgagcaatctggaggaaacctgtccaatgacttgcatactgggaaagtgtgccgttctctcttttaaggattttcttagctgtagacctacagagattcctgaaaatgatattctcctgtgcgaaagtcggtacaacgagagcgataagcagatgaagaaatttaagggattaaagcgctttagtttaagcgccaaagtggtggacgacgaaatctactacttcaggaaacccatcgttccacagaaggagccatccccgttactggaaaagaagatccagctgttggaagcaaagtttgcggaactcgagggaggggacgacgacatcgaagagatgggcgaggaggattccgaggtcatcgagccccctagtctgccccagttacaaactcccttggcaagtgaactggacctcatgccatacactccaccacaaagcactcctaagagtgctaagggatctgccaaaaaagagggatccaagcgaaagattaatatgtcagggtacatattattctcgtccgaaatgagagccgtgattaaggcgcagcatccagactacagttttggggagctctccaggttggtcggcaccgagtggcgaaatctagagaccgccaagaaggcggaatacgaaggcatgatgggcggatacccaccagggcttcccccactccaagggcctgtcgacggtttggtgtccatgggatcaatgcaacccctgcaccccgggggtccacctccccaccatctcccccccggtgtccccggtttgcccggtattccaccccccggggtaatgaatcagggcgtagccccgatggttggcacacctgctcctggcggcagtccatacggacagcaggtgggggtcttagggccacctggccaacaagctcctcctccttacccagggcctcaccccgcagggcccccagtaattcaacagccaactacgccgatgttcgtggccccccccccaaagactcagcgcttactgcactccgaggcatatctcaagtacatcgaagggctaagcgccgaatcgaattctatctctaaatgggatcaaaccctcgccgcgagacgccgcgacgtgcatctgagtaaagaacaggagtccagactgccgtctcattggctgaaatctaaaggcgcccacactacaatggccgacgccctttggaggcttcgggacttaatgctgagggacaccctaaacatccggcaggcgtataatttggagaacgtttag

SEQ ID NO: 328269 - DNA, 4980 bp, Artificial Sequence
  derived and/or modified sequence
tccatgggttccaagagaagaagagctacctccccttccagcagtgtcagcggggactttgatgatgggcaccattctgtgtcaacaccaggcccaagcaggaaaaggaggagactttccaatcttccaactgtagatcctattgccgtgtgccatgaactctataataccatccgagactataaggatgaacagggcagacttctctgtgagctcttcattagggcaccaaagcgaagaaatcaaccagactattatgaagtggtttctcagcccattgacttgatgaaaatccaacagaaactaaaaatggaagagtatgatgatgttaatttgctgactgctgacttccagcttctttttaacaatgcaaagtcctattataagccagattctcctgaatataaagccgcttgcaaactctgggatttgtaccttcgaacaagaaatgagtttgttcagaaaggagaagcagatgacgaagatgatgatgaagatgggcaagacaatcagggcacagtgactgaaggatcttctccagcttacttgaaggagatcctggagcagcttcttgaagccatagttgtagctacaaatccatcaggacgtctcattagcgaactttttcagaaactgccttctaaagtgcaatatccagattattatgcaataattaaggagcctatagatctcaagaccattgcccagaggatacagaatggaagctacaaaagtattcatgcaatggccaaagatatagatctcctcgcaaaaaatgccaaaacttataatgagcctggctctcaagtattcaaggatgcaaattcaattaaaaaaatattttatatgaaaaaggctgaaattgaacatcatgaaatggctaagtcaagtcttcgaatgaggactccatccaacttggctgcagccagactgacaggtccttcacacagtaaaggcagccttggtgaagagagaaatcccactagcaagtattaccgtaataaaagagcagtacaaggaggtcgtttatcagcaattacaatggcacttcaatatggctcagaaagtgaagaagatgctgctttagctgctgcacgctatgaagagggagagtcagaagcagaaagcatcacttcctttatggatgtttcaaatcctttttatcagctttatgacacagttaggagttgtcggaataaccaagggcagctaatagctgaacctttttaccatttgccttcaaagaaaaaataccctgattattaccagcaaattaaaatgcccatatcactacaacagatccgaacaaaactgaagaatcaagaatatgaaactttagatcatttggagtgtgatctgaatttaatgtttgaaaatgccaaacgctataatgtgcccaattcagccatctacaagcgagttctaaaattgcagcaagttatgcaggcaaagaagaaagagcttgccaggagagacgatatcgaggacggagacagcatgatctcttcagccacctctgatactggtagtgccaaaagaaaaagtaaaaagaacataagaaagcagcgaatgaaaatcttattcaatgttgttcttgaagctcgagagccaggttcaggcagaagactttgtgacctatttatggttaaaccatccaaaaaggactatcctgattattataaaatcatcttggagccaatggacttgaaaataattgagcataacatccgcaatgacaaatatgctggtgaagagggaatgatagaagacatgaagctgatgttccggaatgccaggcactataatgaggagggctcccaggtttataatgatgcacatatcctggagaagttactcaaggagaaaaggaaagagctgggcccactgcctgatgatgatgacatggcttctcccaaactcaagctgagtaggaagagtggcatttctcctaaaaaatcaaaatacatgactccaatgcagcagaaactaaatgaggtctatgaagctgtaaagaactatactgataagaggggtcgccgcctcagtgccatatttctgaggcttccctctagatctgagttgcctgactactatctgactattaaaaagcccatggacatggaaaaaattcgaagtcacatgatggccaacaagtaccaagatattgactctatggttgaggactttgtcatgatgtttaataatgcctgtacatacaatgagccggagtctttgatctacaaagatgctcttgttctacacaaagtcctgcttgaaacacgcagagacctggagggagatgaggactctcatgtcccaaatgtgactttgctgattcaagagcttatccacaatctttttgtgtcagtcatgagtcatcaggatgatgagggaagatgctacagcgattctttagcagaaattcctgctgtggatcccaactttcctaacaaaccaccccttacatttgacataattaggaagaatgttgaaaataatcgctaccgtcggcttgatttatttcaagagcatatgtttgaagtattggaacgagcaagaaggatgaatcggacagattcagaaatatatgaagatgcagtagaacttcagcagttttttattaaaattcgtgatgaactctgcaaaaatggagagattcttctttcaccggcactcagctataccacaaaacatttgcataatgatgtggagaaagagagaaaggaaaaattgccaaaagaaatagaggaagataaactaaaacgagaagaagaaaaaagagaagctgaaaagagtgaagattcctctggtgctgcaggcctctcaggcttacatcgcacatacagccaggactgtagctttaaaaacagcatgtaccatgttggagattacgtctatgtggaacctgcagaggccaacctacaaccacatatcgtctgtattgaaagactgtgggaggattcagctggtgaaaaatggttgtatggctgttggttttaccgaccaaatgaaacattccacctggctacacgaaaatttctagaaaaagaagtttttaagagtgactattacaacaaagttccagttagtaaaattctaggcaagtgtgtggtcatgtttgtcaaggaatactttaagttatgcccagaaaacttccgagatgaggatgtttttgtctgtgaatcacggtattctgccaaaaccaaatcttttaagaaaattaaactgtggaccatgcccatcagctcagtcaggtttgtccctcgggatgtgcctctgcctgtggttcgcgtggcctctgtatttgcaaatgcagataaaggtgatgatgagaagaatacagacaactcagaggacagtcgagctgaagacaattttaacttggaaaaggaaaaagaagatgtccctgtggaaatgtccaatggtgaaccaggttgccactactttgagcagctccattacaatgacatgtggctgaaggttggcgactgtgtcttcatcaagtcccatggcctggtgcgtcctcgtgtgggcagaattgaaaaagtatgggttcgagatggagctgcatatttttatggccccatcttcattcacccagaagaaacagagcatgagcccacaaaaatgttctacaaaaaagaagtatttctgagtaatctggaagaaacctgccccatgacatgtattctcggaaagtgtgctgtgttgtcattcaaggacttcctctcctgcaggccaactgaaataccagaaaatgacattctgctttgtgagagccgctacaatgagagcgacaagcagatgaagaaattcaaaggattgaagaggttttcactctctgctaaagtggtagatgatgaaatttactacttcagaaaaccaattgttcctcagaaggagccatcacctttgctggaaaagaagatccagttgctagaagctaaatttgccgagttagaaggtggagatgatgatattgaagagatgggagaagaagatagtgaggtcattgaacctccttctctacctcagcttcagacccccctggccagtgagctggacctcatgccctacacacccccacagtctaccccaaagtctgccaaaggcagtgcaaagaaggaaggctccaaacggaaaatcaacatgagtggctacatcctgttcagcagtgagatgagggctgtgattaaggcccaacacccagactactctttcggggagctcagccgcctggtggggacagaatggagaaatcttgagacagccaagaaagcagaatatgaaggcatgatgggtggctatccgccaggccttccacctttgcagggcccagttgatggccttgttagcatgggcagcatgcagccacttcaccctggggggcctccaccccaccatcttccgccaggtgtgcctggcctcccgggcatcccaccaccgggtgtgatgaaccaaggagtggcccctatggtagggactccagcaccaggtggaagtccatatggacaacaggtgggagttttggggcctccagggcagcaggcaccacctccatatcccggcccacatccagctggaccccctgtcatacagcagccaacaacacccatgtttgtagctcccccaccaaagacccagcggcttcttcactcagaggcctacctgaaatacattgaaggactcagtgcggagtccaacagcattagcaagtgggatcagacactggcagctcgaagacgcgacgtccatttgtcgaaagaacaggagagccgcctaccctctcactggctgaaaagcaaaggggcccacaccaccatggcagatgccctctggcgccttcgagatttgatgctccgggacaccctcaacattcgccaagcatacaacctagaaaatgtttaatcacatcattacgtttcttttatatagaagcataaagagttgtggatcagtagccattttagttactggggg

SEQ ID NO: 328270 - DNA, 4905 bp, Artificial Sequence
  derived and/or modified sequence
atgggcagcaagcggcgacgcgcaacgtcgccaagttcttccgtgtcaggagatttcgatgacggtcatcactcagtatctaccccagggccaagccggaaacggcgaaggttgtcaaatttgcctaccgtcgaccctatcgccgtttgccacgaactgtacaacactattcgggactataaggacgaacaggggagactcctctgtgaactgttcattagggcccctaagcgcagaaatcagcctgactattatgaggtcgttagtcagcctatcgacttgatgaagattcaacagaagctgaagatggaggagtacgatgacgtcaacctgctgacagctgacttccagctcctcttcaataacgccaaatcttattataaacctgactcgcccgaatataaggccgcttgtaaattatgggacctttatctgcgcactagaaacgaattcgttcaaaaaggtgaagcagacgatgaagatgacgacgaggacgggcaagataatcagggcacggtcaccgaggggagctcaccggcttaccttaaggagatccttgagcaactcctagaggcgatcgttgttgccacaaatccttcaggtcgtttgatctccgaactgtttcagaagttgcctagtaaagtacagtatcctgactactacgctataattaaggaacctatcgacttgaagacgattgcccagcggattcaaaacggctcatataaatctatccatgccatggctaaggacattgatcttctggctaaaaatgccaaaacatataacgagccaggaagtcaagtgttcaaagatgccaactctatcaaaaagatcttctacatgaagaaagcagagattgaacaccacgagatggcaaagtcttctctcagaatgcgcaccccctcaaacctagctgcagccagactgacagggccatcacattctaagggctccctcggagaagaacgtaatcctaccagcaaatactatcgcaataagcgcgctgtgcaaggcggtagactgtccgccatcaccatggccttacagtatggatctgaaagcgaggaggatgctgcactcgcagcagcaagatacgaagaaggagaatctgaggctgagagcatcacttccttcatggacgtgtccaatcctttctatcagttgtatgacaccgtcaggagttgtcggaataatcaggggcaactgatagctgagccgttctatcatttgccctcaaagaaaaagtaccctgactactatcagcagattaagatgcccatttctttacagcagattagaaccaagctcaagaaccaggagtacgaaactctggatcatctcgagtgtgacttaaatctgatgttcgagaacgccaaaaggtacaacgtgcccaactcagcaatatataagcgcgtgctgaagctgcagcaagtaatgcaagcaaaaaagaaggaactggcccgtagagacgacatcgaggacggggacagcatgatttcatccgctacctctgacaccggaagcgccaagaggaagtcaaagaagaacattaggaagcagcgaatgaaaatacttttcaacgtcgtgctggaggccagagaaccaggatccgggcgacgcctgtgcgaccttttcatggtcaagccttctaagaaagactatccggactactataagattatccttgagccaatggacctgaaaatcatcgaacataacatccgcaatgacaaatacgctggtgaggagggcatgatcgaggacatgaaactcatgtttcggaacgctaggcactataacgaagagggcagccaggtgtacaacgacgcgcacattctggagaaactgcttaaggagaaacgcaaagagctgggaccgctccctgacgacgatgacatggccagcccgaaacttaaactgtcccgaaagagtggaattagcccaaagaaatccaagtacatgacccctatgcagcaaaaactgaatgaagtatatgaagcagtgaaaaattataccgacaagcggggtagaaggctgtccgcaatttttctaagactgcccagtagaagcgagctgccagactactacttaaccatcaagaagcctatggacatggagaagatcagaagtcatatgatggcaaacaagtatcaggacattgactcgatggtggaggatttcgtcatgatgttcaacaacgcgtgtacctataacgaaccggaatctctgatctacaaggatgcactcgttctgcacaaagtgctgctggaaacccggagggatcttgagggcgacgaggactcccatgtgcctaacgttaccctgctgatccaggagctgatccacaatctttttgtaagcgttatgagtcaccaagacgatgagggaagatgctacagcgatagcttagcggagatacccgctgtggacccgaatttccccaacaagccacccctgacgttcgacataatccggaaaaacgtagagaataataggtataggaggctggatctgtttcaggaacacatgttcgaggtcctggagcgggctaggcggatgaaccgcacagacagtgagatctacgaagatgctgtcgaactgcagcagtttttcatcaagataagagacgaactgtgcaagaacggtgagatcctgctatcacctgctctgtcttacactacaaagcacctacacaatgacgttgaaaaagaacgcaaggaaaagctgccaaaggaaatcgaggaggataagctgaagcgggaggaagagaaacgagaagccgagaagtccgaagatagctcaggtgccgcaggcctctccgggctgcatcgcacgtactcccaggattgctcttttaagaattctatgtatcacgtgggggactatgtctatgtggaaccagccgaggcaaaccttcaaccgcacatcgtttgcattgagcggttgtgggaggatagtgctggcgaaaagtggctgtacggttgctggttttaccgtcccaatgagaccttccatttggccacgaggaaatttctcgagaaggaggtgttcaaatcagactattacaataaagttcctgtttctaaaattctgggtaaatgcgtagttatgtttgtgaaggagtactttaaattatgtccggaaaatttcagagacgaagatgtatttgtttgtgagtctagatactctgccaaaaccaagtcattcaaaaagatcaaactgtggacaatgcccatcagctcagtccggttcgtaccccgtgacgtcccactgcctgtcgttcgcgtcgctagcgtgtttgctaacgcagacaagggcgatgacgaaaaaaacactgataactcggaagatagcagggccgaggacaatttcaaccttgaaaaggagaaagaggatgtccctgttgagatgtcgaatggagaaccaggatgccactatttcgagcagttacactacaatgacatgtggctgaaagtgggagactgtgtgtttattaaaagccacggcctcgtaagacctcgagtggggaggatcgagaaagtctgggtgagagatggcgctgcttatttctacggcccaatttttattcaccccgaggaaactgagcacgagcctacaaagatgttctacaaaaaagaagtctttctctccaatctggaagagacctgtcccatgacctgcattcttggcaaatgcgccgtcctgtcatttaaggattttctgagttgccgtccaacagaaattcccgaaaatgacatcctgctgtgcgagtcaagatacaatgagtcagacaaacagatgaagaaatttaaaggtcttaagagattttctctgagcgccaaggtcgtcgatgatgagatctactattttaggaagcccatcgttccccaaaaagagccctccccgctgctcgaaaagaaaatccagctgctggaggcgaagtttgcagaactggagggaggggacgacgacatcgaggaaatgggcgaggaggactctgaggtcattgagccccctagtctgccacaactgcagactccactggcctcagaactcgacctgatgccttacactcctccacagagcaccccaaagagtgctaaaggatctgcaaagaaagaagggtcgaaaagaaaaattaacatgtctggatacatcctctttagttctgagatgcgtgccgtgatcaaggctcagcatccagattactccttcggtgagttgtcccgtttggtgggaacagaatggagaaatctcgagaccgccaagaaagctgagtatgaaggtatgatgggtggctatcctcctggtctgccccctcttcagggccctgtggatggcctcgtatctatggggagtatgcagcccctccatccaggaggtccccctccacatcacctgccaccaggcgtcccagggctacccggtatcccacctcctggggtcatgaaccagggcgtcgctccgatggtggggaccccagcccctgggggaagtccgtacggtcaacaggtgggagtcctgggtcccccagggcaacaggcgcctcccccataccccggacctcaccctgcaggaccgccagtcatccaacaaccgaccacccccatgttcgtcgccccacctcccaagacacagcgcctcctccacagcgaggcttatctgaagtacattgagggcttatcggccgaatccaactcaatcagcaagtgggaccagaccctcgctgccagaaggagggacgtccacctgagcaaagagcaagagtcccgactgccaagccactggctgaagagcaagggggctcatacgacaatggctgatgccctgtggcgcttacgggatctgatgttgcgggacacactcaacattaggcaggcgtataacctggaaaacgtgtag

SEQ ID NO: 328271 - DNA, 4905 bp, Artificial Sequence
  derived and/or modified sequence
atgggcagcaagagaagaagagccaccagccccagcagcagcgtgagcggcgacttcgacgacggccaccacagcgtgagcacccccggccccagcagaaagagaagaagactgagcaacctgcccaccgtggaccccatcgccgtgtgccacgagctgtacaacaccatcagagactacaaggacgagcagggcagactgctgtgcgagctgttcatcagagcccccaagagaagaaaccagcccgactactacgaggtggtgagccagcccatcgacctgatgaagatccagcagaagctgaagatggaggagtacgacgacgtgaacctgctgaccgccgacttccagctgctgttcaacaacgccaagagctactacaagcccgacagccccgagtacaaggccgcctgcaagctgtgggacctgtacctgagaaccagaaacgagttcgtgcagaagggcgaggccgacgacgaggacgacgacgaggacggccaggacaaccagggcaccgtgaccgagggcagcagccccgcctacctgaaggagatcctggagcagctgctggaggccatcgtggtggccaccaaccccagcggcagactgatcagcgagctgttccagaagctgcccagcaaggtgcagtaccccgactactacgccatcatcaaggagcccatcgacctgaagaccatcgcccagagaatccagaacggcagctacaagagcatccacgccatggccaaggacatcgacctgctggccaagaacgccaagacctacaacgagcccggcagccaggtgttcaaggacgccaacagcatcaagaagatcttctacatgaagaaggccgagatcgagcaccacgagatggccaagagcagcctgagaatgagaacccccagcaacctggccgccgccagactgaccggccccagccacagcaagggcagcctgggcgaggagagaaaccccaccagcaagtactacagaaacaagagagccgtgcagggcggcagactgagcgccatcaccatggccctgcagtacggcagcgagagcgaggaggacgccgccctggccgccgccagatacgaggagggcgagagcgaggccgagagcatcaccagcttcatggacgtgagcaaccccttctaccagctgtacgacaccgtgagaagctgcagaaacaaccagggccagctgatcgccgagcccttctaccacctgcccagcaagaagaagtaccccgactactaccagcagatcaagatgcccatcagcctgcagcagatcagaaccaagctgaagaaccaggagtacgagaccctggaccacctggagtgcgacctgaacctgatgttcgagaacgccaagagatacaacgtgcccaacagcgccatctacaagagagtgctgaagctgcagcaggtgatgcaggccaagaagaaggagctggccagaagagacgacatcgaggacggcgacagcatgatcagcagcgccaccagcgacaccggcagcgccaagagaaagagcaagaagaacatcagaaagcagagaatgaagatcctgttcaacgtggtgctggaggccagagagcccggcagcggcagaagactgtgcgacctgttcatggtgaagcccagcaagaaggactaccccgactactacaagatcatcctggagcccatggacctgaagatcatcgagcacaacatcagaaacgacaagtacgccggcgaggagggcatgatcgaggacatgaagctgatgttcagaaacgccagacactacaacgaggagggcagccaggtgtacaacgacgcccacatcctggagaagctgctgaaggagaagagaaaggagctgggccccctgcccgacgacgacgacatggccagccccaagctgaagctgagcagaaagagcggcatcagccccaagaagagcaagtacatgacccccatgcagcagaagctgaacgaggtgtacgaggccgtgaagaactacaccgacaagagaggcagaagactgagcgccatcttcctgagactgcccagcagaagcgagctgcccgactactacctgaccatcaagaagcccatggacatggagaagatcagaagccacatgatggccaacaagtaccaggacatcgacagcatggtggaggacttcgtgatgatgttcaacaacgcctgcacctacaacgagcccgagagcctgatctacaaggacgccctggtgctgcacaaggtgctgctggagaccagaagagacctggagggcgacgaggacagccacgtgcccaacgtgaccctgctgatccaggagctgatccacaacctgttcgtgagcgtgatgagccaccaggacgacgagggcagatgctacagcgacagcctggccgagatccccgccgtggaccccaacttccccaacaagccccccctgaccttcgacatcatcagaaagaacgtggagaacaacagatacagaagactggacctgttccaggagcacatgttcgaggtgctggagagagccagaagaatgaacagaaccgacagcgagatctacgaggacgccgtggagctgcagcagttcttcatcaagatcagagacgagctgtgcaagaacggcgagatcctgctgagccccgccctgagctacaccaccaagcacctgcacaacgacgtggagaaggagagaaaggagaagctgcccaaggagatcgaggaggacaagctgaagagagaggaggagaagagagaggccgagaagagcgaggacagcagcggcgccgccggcctgagcggcctgcacagaacctacagccaggactgcagcttcaagaacagcatgtaccacgtgggcgactacgtgtacgtggagcccgccgaggccaacctgcagccccacatcgtgtgcatcgagagactgtgggaggacagcgccggcgagaagtggctgtacggctgctggttctacagacccaacgagaccttccacctggccaccagaaagttcctggagaaggaggtgttcaagagcgactactacaacaaggtgcccgtgagcaagatcctgggcaagtgcgtggtgatgttcgtgaaggagtacttcaagctgtgccccgagaacttcagagacgaggacgtgttcgtgtgcgagagcagatacagcgccaagaccaagagcttcaagaagatcaagctgtggaccatgcccatcagcagcgtgagattcgtgcccagagacgtgcccctgcccgtggtgagagtggccagcgtgttcgccaacgccgacaagggcgacgacgagaagaacaccgacaacagcgaggacagcagagccgaggacaacttcaacctggagaaggagaaggaggacgtgcccgtggagatgagcaacggcgagcccggctgccactacttcgagcagctgcactacaacgacatgtggctgaaggtgggcgactgcgtgttcatcaagagccacggcctggtgagacccagagtgggcagaatcgagaaggtgtgggtgagagacggcgccgcctacttctacggccccatcttcatccaccccgaggagaccgagcacgagcccaccaagatgttctacaagaaggaggtgttcctgagcaacctggaggagacctgccccatgacctgcatcctgggcaagtgcgccgtgctgagcttcaaggacttcctgagctgcagacccaccgagatccccgagaacgacatcctgctgtgcgagagcagatacaacgagagcgacaagcagatgaagaagttcaagggcctgaagagattcagcctgagcgccaaggtggtggacgacgagatctactacttcagaaagcccatcgtgccccagaaggagcccagccccctgctggagaagaagatccagctgctggaggccaagttcgccgagctggagggcggcgacgacgacatcgaggagatgggcgaggaggacagcgaggtgatcgagccccccagcctgccccagctgcagacccccctggccagcgagctggacctgatgccctacacccccccccagagcacccccaagagcgccaagggcagcgccaagaaggagggcagcaagagaaagatcaacatgagcggctacatcctgttcagcagcgagatgagagccgtgatcaaggcccagcaccccgactacagcttcggcgagctgagcagactggtgggcaccgagtggagaaacctggagaccgccaagaaggccgagtacgagggcatgatgggcggctacccccccggcctgccccccctgcagggccccgtggacggcctggtgagcatgggcagcatgcagcccctgcaccccggcggcccccccccccaccacctgccccccggcgtgcccggcctgcccggcatccccccccccggcgtgatgaaccagggcgtggcccccatggtgggcacccccgcccccggcggcagcccctacggccagcaggtgggcgtgctgggcccccccggccagcaggccccccccccctaccccggcccccaccccgccggcccccccgtgatccagcagcccaccacccccatgttcgtggcccccccccccaagacccagagactgctgcacagcgaggcctacctgaagtacatcgagggcctgagcgccgagagcaacagcatcagcaagtgggaccagaccctggccgccagaagaagagacgtgcacctgagcaaggagcaggagagcagactgcccagccactggctgaagagcaagggcgcccacaccaccatggccgacgccctgtggagactgagagacctgatgctgagagacaccctgaacatcagacaggcctacaacctggagaacgtgtag

SEQ ID NO: 328272 - protein, 1602 aa, Artificial Sequence
  derived and/or modified sequence
MGSKRRRATSPSSSVSGDFDDGHHSVSTPGPSRKRRRLSNLPTVDPIAVCHELYNTIRDYKDEQGRLLCELFIRAPKRRNQPDYYEVVSQPIDLMKIQQKLKMEEYDDVNLLTADFQLLFNNAKSYYKPDSPEYKAACKLWDLYLRTRNEFVQKGEADDEDDDEDGQDNQGTVTEGSSPAYLKEILEQLLEAIVVATNPSGRLISELFQKLPSKVQYPDYYAIIKEPIDLKTIAQRIQNGSYKSIHAMAKDIDLLAKNAKTYNEPGSQVFKDANSIKKIFYMKKAEIEHHEMAKSSLRMSNKRAVQGGRLSAITMALQYGSESEEDAALAAARYEEGESEAESITSFMDVSNPFYQLYDTVRSCRNNQGQLIAEPFYHLPSKKKYPDYYQQIKMPISLQQIRTKLKNQEYETLDHLECDLNLMFENAKRYNVPNSAIYKRVLKLQQVMQAKKKELARRDDIEDGDSMISSATSDTGSAKRKSKKNIRKQRMKILFNVVLEAREPGSGRRLCDLFMVKPSKKDYPDYYKIILEPMDLKIIEHNIRNDKYAGEEGMIEDMKLMFRNARHYNEEGSQVYNDAHILEKLLKEKRKELGPLPDDDDMASPKLKLSRKSGISPKKSKYMTPMQQKLNEVYEAVKNYTDKRGRRLSAIFLRLPSRSELPDYYLTIKKPMDMEKIRSHMMANKYQDIDSMVEDFVMMFNNACTYNEPESLIYKDALVLHKVLLETRRDLEGDEDSHVPNVTLLIQELIHNLFVSVMSHQDDEGRCYSDSLAEIPAVDPNFPNKPPLTFDIIRKNVENNRYRRLDLFQEHMFEVLERARRMNRTDSEIYEDAVELQQFFIKIRDELCKNGEILLSPALSYTTKHLHNDVEKERKEKLPKEIEEDKLKREEEKREAEKSEDSSGAAGLSGLHRTYSQDCSFKNSMYHVGDYVYVEPAEANLQPHIVCIERLWEDSAGEKWLYGCWFYRPNETFHLATRKFLEKEVFKSDYYNKVPVSKILGKCVVMFVKEYFKLCPENFRDEDVFVCESRYSAKTKSFKKIKLWTMPISSVRFVPRDVPLPVVRVASVFANADKGDDEKNTDNSEDSRAEDNFNLEKEKEDVPVEMSNGEPGCHYFEQLHYNDMWLKVGDCVFIKSHGLVRPRVGRIEKVWVRDGAAYFYGPIFIHPEETEHEPTKMFYKKEVFLSNLEETCPMTCILGKCAVLSFKDFLSCRPTEIPENDILLCESRYNESDKQMKKFKGLKRFSLSAKVVDDEIYYFRKPIVPQKEPSPLLEKKIQLLEAKFAELEGGDDDIEEMGEEDSEVIEPPSLPQLQTPLASELDLMPYTPPQSTPKSAKGSAKKEGSKRKINMSGYILFSSEMRAVIKAQHPDYSFGELSRLVGTEWRNLETAKKAEYEGMMGGYPPGLPPLQGPVDGLVSMGSMQPLHPGGPPPHHLPPGVPGLPGIPPPGVMNQGVAPMVGTPAPGGSPYGQQVGVLGPPGQQAPPPYPGPHPAGPPVIQQPTTPMFVAPPPKTQRLLHSEAYLKYIEGLSAESNSISKWDQTLAARRRDVHLSKEQESRLPSHWLKSKGAHTTMADALWRLRDLMLRDTLNIRQAYNLENV

SEQ ID NO: 328273 - protein, 26 aa, Artificial Sequence
  derived and/or modified sequence
MGSKRRRATSPSSSVSGDFDDGHHSV

SEQ ID NO: 328274 - DNA, 4809 bp, Artificial Sequence
  derived and/or modified sequence
atgggaagcaagaggcgaagagcgacatccccttcctcatctgtcagtggtgacttcgacgatgggcaccatagcgtgtcgacccccggaccttcacgcaagagacggagactgtcgaatctaccaacggtggaccccatagctgtgtgccatgagctctataatactattagagactacaaagatgagcagggtcgcctgctctgtgagttatttattagagctcctaaaaggagaaaccagccagactattacgaggtagtgtcccagccaatcgaccttatgaagatccaacaaaagcttaagatggaggagtatgacgatgtgaacctcttgaccgccgactttcagctgctttttaacaatgccaagtcctactacaagcccgacagccctgaatataaggcagcgtgtaaactctgggatctctacctcagaaccagaaacgaattcgtgcaaaagggcgaggccgatgacgaggatgacgatgaagatggacaggataatcaggggacagtcacggaaggtagtagtcctgcttatctaaaagaaatcctggagcaactgttagaggccattgtcgtggctacgaatcctagcgggcgactcataagtgaactgttccagaagttgccttccaaggtgcagtacccggattactacgccatcattaaggaaccaatcgacctaaaaacgatcgcccagcgtattcagaatggtagctataaatccatccatgcaatggcaaaagatattgatctgctggctaaaaatgcgaaaacctacaatgagccaggatcacaagtgttcaaagatgcaaactctatcaagaaaatcttctatatgaagaaggccgagatagagcatcacgaaatggccaagtcttccctgagaatgtctaacaagagagctgtccaagggggacgtttgtcagcaattaccatggctctacagtacggttccgagagcgaggaggatgctgcattggcggcggcaagatacgaggagggagagagcgaagcagagtctataaccagcttcatggatgtgagtaatccgttctatcaactgtatgacactgtccgctcctgcaggaataatcagggccagttgatcgcagagcctttctaccatttgccttctaagaagaagtaccccgattactaccagcagatcaaaatgccaatttcgttgcagcagatccgtaccaagctgaagaatcaggagtatgagactctcgaccatttggaatgcgatcttaatctgatgttcgagaatgccaaaagatacaatgtcccaaatagtgcaatttacaagcgggttctcaagctgcagcaagtgatgcaagccaagaagaaggagctggctcgcagggatgacattgaagatggtgattccatgatcagttcagctacttctgacaccggatccgccaaacgtaaatcgaaaaaaaacatacgcaaacagaggatgaaaatccttttcaatgtcgtattggaagcaagggagccaggtagcggcaggcgcttgtgcgacctgtttatggtaaagccaagcaaaaaggattacccggactattacaagataattctcgagcctatggatttgaaaatcatcgagcacaatatcagaaatgataagtatgccggtgaagaggggatgattgaagacatgaagctgatgttcaggaacgcaagacattataatgaggagggaagccaagtttataatgacgctcacattctggaaaagctgctaaaagaaaagcgcaaggaactcggtcctctgcccgatgacgacgacatggcctcccccaaactcaagttgagccgaaaatcaggcatatctccaaaaaagagcaagtacatgacgccaatgcagcaaaagctcaatgaagtctacgaagcggtgaagaactacacagacaaacgggggaggcggctgtcagctatcttcctccgcctacctagcagatctgaattgcccgattattaccttacaatcaagaaacctatggacatggagaagattcgatcccacatgatggccaacaagtaccaagatatcgattcgatggtcgaggacttcgtcatgatgttcaataatgcctgtacatataatgagccagagtcactcatctataaagatgccctagttttgcataaggttctgctagaaacaagaagagaccttgaaggagatgaggactcccacgtccccaatgttaccctcctaatccaggagctcatacacaacctctttgtgtctgttatgtctcaccaggacgacgagggtagatgttattctgatagcctggccgagatccccgcagtagatccaaattttccaaacaagcccccactcacgtttgacatcatccgtaaaaacgtcgagaacaacaggtatcggcgactggatctgttccaggaacacatgtttgaagttctggaaagagcccgccggatgaatagaacggactcagaaatctacgaagacgccgtggaactgcagcagttttttataaaaataagagacgagctctgcaagaacggggagattcttctctctccagccctttcatatactaccaagcatctacataatgatgtcgagaaggagcgcaaggagaaactcccaaaagagatagaagaggataaactgaaacgcgaagaggagaaacgggaagccgaaaagagtgaggattcctctggcgccgctggactctccggcctgcacagaacctattcccaagactgttcattcaagaactctatgtatcacgtgggtgactacgtctatgtcgagcctgccgaggccaatctacaaccacacatagtgtgtatagaaagactgtgggaagactccgccggtgaaaagtggctgtatgggtgctggttctaccgcccaaatgagaccttccatttagctacgaggaaattcctagagaaggaggttttcaagtccgattattataataaagtacccgtatccaagatcttgggaaagtgtgttgtgatgttcgtgaaagagtacttcaagctgtgtcctgagaacttccgagatgaggacgtttttgtgtgcgagtccagatactctgctaagacgaaaagtttcaagaaaatcaagctctggacaatgcctatttcatctgtgaggttcgtgccacgcgatgttcctctgccagtggtgagagttgcctctgtcttcgcaaacgcagacaagggagatgacgagaaaaacaccgacaactctgaggactcaagggccgaagacaatttcaatctcgagaaggagaaagaagacgtgccagtcgagatgagcaatggggagcctggctgtcattacttcgaacaactccattacaacgatatgtggctcaaggtgggagattgcgtcttcattaaatcacacggcctggtaaggccacgcgttgggaggattgaaaaagtgtgggtccgggatggagccgcctacttttatggtccaatttttatccacccggaagaaactgaacacgaacctacaaagatgttttataagaaggaggtttttctgtcaaacctggaggagacttgcccaatgacatgtattctgggcaagtgcgccgttcttagtttcaaggacttcctgtcctgccgccctacagagatcccagaaaacgacatccttctctgcgaaagccgctataacgagagtgataagcagatgaagaaattcaagggtctgaagcggtttagtctgtcggcaaaagtggtcgacgatgaaatctattacttcaggaagcccatcgtgccgcagaaggaacccagtccactcctcgagaagaaaatacagctcctagaggccaagttcgctgaattggaaggcggcgacgatgacatcgaagaaatgggagaagaggattctgaagtcatagaacccccctccctccctcagctgcagacccctctggctagcgagctggaccttatgccttacactcctcctcaatcaacccctaaaagcgccaagggaagtgctaagaaagagggaagtaaacggaagatcaatatgagtggatatatcctgttctcctcagagatgcgcgctgtgataaaggctcagcaccctgattactcgtttggggaattatcaagactggtggggacagaatggagaaacctcgagacagcgaagaaggccgagtatgagggcatgatggggggatacccgcctgggttgccccccttgcagggcccagttgacgggctggtcagtatgggttcaatgcagcccctgcatcccggcgggccgccacctcaccacttgccacctggcgtgccaggtctccccgggataccaccaccaggagttatgaaccagggcgtagccccaatggtcggcacccccgctccaggtggcagtccttacggacagcaggtgggtgtgctcggacctccaggccagcaagcccctccgccgtaccctggaccccaccctgccggaccacctgtcatccagcagcctacgacacctatgtttgtcgctccccctcccaaaacccagcgacttctccattcagaggcctatctgaagtatatagaaggtttgtccgccgaaagcaacagtattagcaaatgggaccagacattggccgctcgcagaagagacgtgcacctgtcaaaagagcaagagagtagactgccaagccactggctcaaaagcaagggggctcataccactatggccgatgcactgtggcggctgagggatctgatgctacgcgatacccttaacattcgtcaggcctacaacctcgagaatgtttag

SEQ ID NO: 328275 - DNA, 4809 bp, Artificial Sequence
  derived and/or modified sequence
atgggcagcaagagaagaagagccaccagccccagcagctctgtgtctggggactttgatgatggccaccacagcgtgtccaccccaggccccagcaggaagagaagaaggctgagcaacctgcccaccgtggaccccatcgctgtgtgccacgagctgtacaacaccatccgggactacaaggatgagcagggccgcctgctgtgtgagctgttcatccgggcccccaagagaagaaaccagcctgactactatgaggtggtgtcccagcccatcgacctgatgaagatccagcagaagctgaagatggaggagtatgatgatgtgaacctgctgacagctgacttccagctgctcttcaacaatgccaagagctactacaagccagacagccctgagtacaaggccgcctgcaagctgtgggacctgtacctgcggaccagaaatgaatttgtgcagaagggggaggctgatgatgaagatgatgatgaagatggccaggacaaccagggcaccgtgacagagggcagcagccctgcctacctgaaggagatcctggagcagctgctggaggccatcgtggtggccaccaaccccagcggccgcctcatcagcgagctgttccagaagctgcccagcaaggtgcagtacccagactactatgccatcatcaaggagcccatcgacctgaagaccatcgcccagaggatccagaatggcagctacaagagcatccacgccatggccaaggacatcgacctgctggccaagaatgccaagacctacaatgaacctggcagccaggtgttcaaggatgccaacagcatcaagaagatcttctacatgaagaaggccgagattgagcaccacgagatggccaagagcagcctgaggatgagcaacaagagagctgtgcagggcggccgcctgagcgccatcaccatggccctgcagtatggcagcgagagtgaagaagatgctgccctggccgccgcccgctatgaggagggggagagcgaggccgagagcatcaccagcttcatggatgtgagcaaccccttctaccagctgtatgacacagtgcgcagctgcaggaacaaccagggccagctgattgctgagcccttctaccacctgcccagcaagaagaagtacccagactactaccagcagatcaagatgcccatcagcctgcagcagatccgcaccaagctgaagaaccaggagtatgagaccctggaccacctggagtgtgacctgaacctgatgtttgaaaatgccaagcgctacaacgtgcccaacagcgccatctacaagagggtgctgaagctgcagcaggtgatgcaggccaagaagaaggagctggccaggagagatgacattgaagatggagacagcatgatcagcagcgccaccagtgacaccggcagcgccaagaggaagagcaagaagaacatcaggaagcagaggatgaagatcctcttcaacgtggtgctggaggcccgggagcccggcagcggccggcggctgtgtgacctcttcatggtgaagcccagcaagaaggactacccagactactacaagatcatcctggagcccatggacctgaagatcatcgagcacaacatcagaaatgacaagtatgctggggaggagggcatgattgaggacatgaagctgatgttcagaaatgcccggcactacaatgaggagggcagccaggtgtacaatgatgcccacatcctggagaagctgctgaaggagaagaggaaggagctgggccccctgcctgatgatgatgacatggccagccccaagctgaagctgagcaggaagagcggcatcagccccaagaagagcaagtacatgacccccatgcagcagaagctgaatgaggtgtatgaggccgtgaagaactacacagacaagaggggccggcggctgagcgccatcttcctgcggctgcccagccgctctgagctgcctgactactacctgaccatcaagaagcccatggacatggagaagatccgcagccacatgatggccaacaagtaccaggacatcgacagcatggtggaggactttgtgatgatgttcaacaatgcctgcacctacaatgaacctgagagcctcatctacaaggatgccctggtgctgcacaaggtgctgctggagacccggcgggacctggagggagatgaggacagccacgtgcccaacgtgaccctgctgatccaggagctgatccacaacctgtttgtgtctgtgatgagccaccaggatgatgagggccgctgctacagcgacagcctggccgagatcccagctgtggaccccaacttccccaacaagccacccctgacctttgacatcatcaggaagaatgtggagaacaaccgctacagaaggctggacctcttccaggagcacatgtttgaggtgctggagcgggcccggaggatgaacagaacagattctgagatctatgaagatgctgtggagctgcagcagttcttcatcaagatcagagatgagctgtgcaagaatggagagatcctgctgagccctgccctgagctacaccaccaagcacctgcacaatgatgtggagaaggagaggaaggagaagctgcccaaggagattgaggaggacaagctgaagcgggaggaggagaagcgggaggccgagaagtctgaggacagcagtggagctgctggcctgagcggcctgcacaggacctacagccaggactgcagcttcaagaacagcatgtaccacgtgggggactatgtgtatgtggagcctgctgaggccaacctgcagccccacatcgtgtgcatcgagcggctgtgggaggacagcgctggggagaagtggctgtatggctgctggttctaccggcccaatgagaccttccacctggccaccaggaagttcctggagaaggaggtgttcaagagtgactactacaacaaggtgcctgtgtccaagatcctgggcaaatgtgtggtgatgtttgtgaaggagtacttcaagctgtgcccagagaacttcagagatgaagatgtgtttgtgtgtgagagccgctacagcgccaagaccaagagcttcaagaagatcaagctgtggaccatgcccatcagctctgtgcgctttgtgcccagagatgtgcccctgcctgtggtgcgggtggcctctgtgtttgccaatgctgacaagggagatgatgagaagaacacagacaacagcgaggacagcagagctgaggacaacttcaacctggagaaggagaaggaggatgtgcctgtggagatgagcaatggagagcccggctgccactactttgagcagctgcactacaatgacatgtggctgaaggtgggggactgtgtgttcatcaagagccacggcctggtgcggccccgggtgggcagaattgagaaggtgtgggtgagagatggagctgcctacttctacggccccatcttcatccaccctgaggagacagagcacgagcccaccaagatgttctacaagaaggaggtgttcctgagcaacctggaggagacctgccccatgacctgcatcctgggcaaatgtgctgtgctgtccttcaaggacttcctgagctgccggcccacagagatcccagaaaatgacatcctgctgtgtgagagccgctacaatgaaagtgacaagcagatgaagaagttcaagggcctgaagcgcttcagcctgagcgccaaggtggtggatgatgagatctactacttcaggaagcccatcgtgccccagaaggagcccagccccctgctggagaagaagatccagctgctggaggccaagtttgctgagctggagggcggagatgatgacatcgaggagatgggagaggaggacagcgaggtgattgagccccccagcctgccccagctgcagacccccctggccagcgagctggacctgatgccctacaccccaccccagagcacccccaagagcgccaagggcagcgccaagaaggagggcagcaagaggaagatcaacatgagcggctacatcctcttcagcagcgagatgagagctgtgatcaaggcccagcacccagactacagctttggagagctgagccggctggtgggcacagagtggaggaacctggagacagccaagaaggccgagtatgagggcatgatgggcggctacccacctggcctgccccccctgcagggccctgtggatggcctggtgtccatgggctccatgcagcccctgcaccctgggggccccccaccccaccacctgcccccaggagtgcccggcctgcccggcatccccccacctggggtgatgaaccagggcgtggcccccatggtgggcaccccagcccctgggggcagcccctacggccagcaggtgggcgtgctgggccccccaggccagcaggcccccccaccctacccaggcccccaccctgctggcccccctgtgatccagcagcccaccacccccatgtttgtggcccccccacccaagacccagaggctgctgcacagcgaggcctacctgaagtacatcgagggcctgtctgctgagagcaacagcatcagcaagtgggaccagaccctggccgcccggaggagagatgtgcacctgagcaaggagcaggagagccggctgcccagccactggctgaagagcaaaggagcccacaccaccatggctgatgccctgtggaggctgcgggacctgatgctgcgggacaccctgaacatccggcaggcctacaacctggagaatgtgtag

SEQ ID NO: 328276 - DNA, 4809 bp, Artificial Sequence
  derived and/or modified sequence
atgggcagcaagcggcggcgggccaccagccccagcagcagcgtgtctggagacttcgacgatggccaccactccgtgagcacccctgggccaagtagaaagaggagaagactgagtaacttgcctactgtggacccaattgccgtgtgccatgaactgtacaatactatccgggactacaaagacgagcagggtagactgctttgcgagctctttattcgcgccccgaagcgacgtaatcagccagactactacgaggttgtctcccaacctatagacctgatgaaaattcagcagaaacttaagatggaggaatatgacgacgtgaaccttctgactgctgactttcaactgctctttaacaacgcaaaatcctattacaaacccgacagcccagagtataaagcggcctgcaaactgtgggacctgtacttgcggactcggaatgaattcgtccagaagggtgaagctgatgatgaagacgacgatgaagacggacaggacaatcaggggactgtgaccgaaggttcaagcccggcctacctgaaggagatcttggagcagctactggaggcaatcgttgtggctactaacccctccggccggcttatcagcgagcttttccagaagctacccagcaaggttcaatatcccgattactacgcaattatcaaggaaccaatcgatcttaagaccatcgctcaacgcatccagaatggcagttacaagtccattcacgccatggctaaggatatcgatttattggccaagaacgcaaagacttacaatgagccgggaagtcaagtgttcaaggatgcgaactccattaagaaaatcttctacatgaagaaggcggaaatcgagcaccacgaaatggccaaatcgtcactgagaatgagtaataaacgggctgtacagggcgggcgcctgagtgctattacaatggctcttcaatacggttcagagagcgaggaggatgccgctttagcagccgcccgctatgaggagggagaaagcgaggcggagtctatcacaagtttcatggatgtcagcaacccattctatcagctctacgacaccgtgcggagttgcagaaacaatcagggtcagctgatagccgaaccgttttaccatctccccagcaagaagaagtatcctgactattatcagcaaattaaaatgcctatcagtctgcagcaaattagaacaaagctcaagaatcaagagtacgagaccctggaccatttagaatgcgatctgaacctaatgtttgaaaacgccaagcggtataacgtgccaaatagcgcaatatacaaacgggttttaaaactgcagcaggttatgcaggcaaagaagaaagagcttgcgcggcgagacgacattgaagacggtgattccatgatttcctctgccactagcgacactggatcagctaaaaggaaatccaagaagaatatccgcaagcagaggatgaagatactgttcaatgtggtgctagaggccagagagccaggctcgggcaggagattgtgtgatcttttcatggtgaaaccatccaagaaagattaccccgattactataagatcatactggagcctatggacttgaaaatcatcgaacacaacatccggaatgataagtacgccggcgaggagggtatgatcgaggatatgaagctcatgttcaggaacgcacggcattacaatgaggaaggctcgcaggtgtataatgatgcccatatactggaaaaactcctcaaggagaagagaaaggagcttggacccctgcctgatgatgatgatatggccagccctaagctgaagctttcaaggaagtctgggataagtcctaaaaaatccaagtacatgaccccgatgcagcagaagctgaatgaagtctacgaggccgtgaaaaattatactgacaaaagggggagacggctgagcgctattttcctaagacttccttctcgctcggagctgcccgactattacctgacaatcaaaaaaccaatggatatggagaaaatacgaagccacatgatggcgaacaagtaccaggacattgatagcatggtggaggactttgttatgatgtttaataacgcctgcacctataacgaaccggagtcgcttatatacaaggacgcccttgtgctgcataaagttctcttggaaacaaggcgcgacctggaaggggacgaggactcccacgtgccgaatgtgactcttttgatacaggaactcattcacaacctgttcgtgagcgtcatgagtcatcaggacgatgagggcaggtgttattccgacagtctggccgagataccggccgtggatcccaattttcctaataaaccccctttaacttttgacatcatccgaaaaaacgttgagaacaacaggtatcgcaggctggacctctttcaggaacatatgttcgaagtcttggagcgtgcacgacggatgaatcggactgattctgaaatctatgaagatgccgtggagctccagcagttcttcattaagattcgcgatgaattgtgtaaaaacggagagatactgctgagtcctgccctgagctataccactaagcacctccacaacgatgtggagaaggaaaggaaagaaaaactgccgaaggagatcgaggaggataaactgaaaagggaggaagagaagagagaagccgagaaatctgaagactcgagcggggccgccggcctttctggcctgcacagaacatactcacaggactgctcctttaagaactcaatgtatcatgtgggagactacgtgtatgtcgagcccgccgaggccaaccttcagccccatattgtctgcattgaacgtctatgggaggattcagccggagagaagtggctctacgggtgttggttctatcggccaaatgagactttccacttggccactagaaaattcctggaaaaagaggtatttaagagtgattattacaataaagtgcctgtgagtaagatactcgggaaatgtgtggtaatgtttgtgaaggaatattttaagttgtgtcccgaaaacttccgggacgaagatgtctttgtttgcgagtctcgatattcggctaagacaaaatcatttaagaaaataaaactctggacaatgcctataagcagtgtgcgttttgtgccgcgcgatgtgccgttaccagttgtgcgcgtggcttctgtgtttgccaacgccgataagggggacgacgagaagaacaccgacaatagcgaggattcaagggctgaagacaacttcaaccttgagaaagaaaaggaggatgttccggtcgaaatgagtaatggggaacccgggtgtcattacttcgagcaactgcactataacgacatgtggctcaaggtgggagactgtgtttttatcaagagccacgggctcgtgcggccccgagtcggccgcatagagaaagtctgggtcagggacggcgccgcgtacttctatggacccattttcattcaccctgaagagactgaacacgaacccaccaaaatgttttataaaaaagaggtcttcctctcaaacctcgaggaaacgtgccctatgacctgcattctgggaaagtgcgctgtgctatctttcaaagactttttgtcctgtcgccccacagagatccccgagaacgacattctgctgtgtgaatctcggtataacgaatcagacaaacagatgaaaaagtttaaaggactgaaaagattcagtttgtcagctaaggtggtggacgatgagatttattatttccggaagcctattgtacctcagaaggaacccagccctcttctagaaaaaaaaatccagcttctagaggcaaagttcgctgaactcgaaggaggagacgatgacatcgaggaaatgggggaagaggatagtgaagtaatagagccccctagtctgccccagctgcagacaccactggcctctgaactggacctcatgccttacacccccccccagtcgacgcccaagagcgctaaggggagtgccaaaaaagagggaagcaagaggaagataaatatgtccggttacattctatttagtagcgagatgcgggctgtgattaaggcgcagcaccccgactatagctttggagagctgtccaggttggtgggcaccgagtggcgcaatctggagaccgccaaaaaagccgagtatgagggcatgatgggaggttaccctccaggcctgcctccactacagggccccgtggatggtctggtgagcatgggatcaatgcagcccttacaccccgggggtcctccgcctcatcacttaccccctggtgtgcccggtctgcccggaattcccccccccggagtaatgaaccaaggagtagcgccaatggttggtacaccagcccctgggggctcaccctacgggcagcaggtgggggtgctgggacctcccggacagcaggcacctccaccctaccccgggccccaccccgcaggacctccagtgattcaacaaccaactacaccaatgttcgtcgcgcctccccccaagacacaacgcctgctgcatagtgaagcctatttgaaatacattgagggactcagtgccgagagtaactcaattagtaaatgggaccaaaccttagccgccagacgccgggacgtgcatctgtctaaagagcaggagtcaagactcccctcccattggctcaagtccaaaggggctcacaccaccatggcggatgctctctggaggctgagagacctcatgctcagagacacactgaacattcgccaggcttacaacctggaaaatgtgtag

SEQ ID NO: 328277 - DNA, 7523 bp, Artificial Sequence
  derived and/or modified sequence
tccatgggttccaagagaagaagagctacctccccttccagcagtgtcagcggggactttgatgatgggcaccattctgtgtcaacaccaggcccaagcaggaaaaggaggagactttccaatcttccaactgtagatcctattgccgtgtgccatgaactctataataccatccgagactataaggatgaacagggcagacttctctgtgagctcttcattagggcaccaaagcgaagaaatcaaccagactattatgaagtggtttctcagcccattgacttgatgaaaatccaacagaaactaaaaatggaagagtatgatgatgttaatttgctgactgctgacttccagcttctttttaacaatgcaaagtcctattataagccagattctcctgaatataaagccgcttgcaaactctgggatttgtaccttcgaacaagaaatgagtttgttcagaaaggagaagcagatgacgaagatgatgatgaagatgggcaagacaatcagggcacagtgactgaaggatcttctccagcttacttgaaggagatcctggagcagcttcttgaagccatagttgtagctacaaatccatcaggacgtctcattagcgaactttttcagaaactgccttctaaagtgcaatatccagattattatgcaataattaaggagcctatagatctcaagaccattgcccagaggatacagaatggaagctacaaaagtattcatgcaatggccaaagatatagatctcctcgcaaaaaatgccaaaacttataatgagcctggctctcaagtattcaaggatgcaaattcaattaaaaaaatattttatatgaaaaaggctgaaattgaacatcatgaaatggctaagtcaagtcttcgaatgagtaataaaagagcagtacaaggaggtcgtttatcagcaattacaatggcacttcaatatggctcagaaagtgaagaagatgctgctttagctgctgcacgctatgaagagggagagtcagaagcagaaagcatcacttcctttatggatgtttcaaatcctttttatcagctttatgacacagttaggagttgtcggaataaccaagggcagctaatagctgaacctttttaccatttgccttcaaagaaaaaataccctgattattaccagcaaattaaaatgcccatatcactacaacagatccgaacaaaactgaagaatcaagaatatgaaactttagatcatttggagtgtgatctgaatttaatgtttgaaaatgccaaacgctataatgtgcccaattcagccatctacaagcgagttctaaaattgcagcaagttatgcaggcaaagaagaaagagcttgccaggagagacgatatcgaggacggagacagcatgatctcttcagccacctctgatactggtagtgccaaaagaaaaagtaaaaagaacataagaaagcagcgaatgaaaatcttattcaatgttgttcttgaagctcgagagccaggttcaggcagaagactttgtgacctatttatggttaaaccatccaaaaaggactatcctgattattataaaatcatcttggagccaatggacttgaaaataattgagcataacatccgcaatgacaaatatgctggtgaagagggaatgatagaagacatgaagctgatgttccggaatgccaggcactataatgaggagggctcccaggtttataatgatgcacatatcctggagaagttactcaaggagaaaaggaaagagctgggcccactgcctgatgatgatgacatggcttctcccaaactcaagctgagtaggaagagtggcatttctcctaaaaaatcaaaatacatgactccaatgcagcagaaactaaatgaggtctatgaagctgtaaagaactatactgataagaggggtcgccgcctcagtgccatatttctgaggcttccctctagatctgagttgcctgactactatctgactattaaaaagcccatggacatggaaaaaattcgaagtcacatgatggccaacaagtaccaagatattgactctatggttgaggactttgtcatgatgtttaataatgcctgtacatacaatgagccggagtctttgatctacaaagatgctcttgttctacacaaagtcctgcttgaaacacgcagagacctggagggagatgaggactctcatgtcccaaatgtgactttgctgattcaagagcttatccacaatctttttgtgtcagtcatgagtcatcaggatgatgagggaagatgctacagcgattctttagcagaaattcctgctgtggatcccaactttcctaacaaaccaccccttacatttgacataattaggaagaatgttgaaaataatcgctaccgtcggcttgatttatttcaagagcatatgtttgaagtattggaacgagcaagaaggatgaatcggacagattcagaaatatatgaagatgcagtagaacttcagcagttttttattaaaattcgtgatgaactctgcaaaaatggagagattcttctttcaccggcactcagctataccacaaaacatttgcataatgatgtggagaaagagagaaaggaaaaattgccaaaagaaatagaggaagataaactaaaacgagaagaagaaaaaagagaagctgaaaagagtgaagattcctctggtgctgcaggcctctcaggcttacatcgcacatacagccaggactgtagctttaaaaacagcatgtaccatgttggagattacgtctatgtggaacctgcagaggccaacctacaaccacatatcgtctgtattgaaagactgtgggaggattcagctggtgaaaaatggttgtatggctgttggttttaccgaccaaatgaaacattccacctggctacacgaaaatttctagaaaaagaagtttttaagagtgactattacaacaaagttccagttagtaaaattctaggcaagtgtgtggtcatgtttgtcaaggaatactttaagttatgcccagaaaacttccgagatgaggatgtttttgtctgtgaatcacggtattctgccaaaaccaaatcttttaagaaaattaaactgtggaccatgcccatcagctcagtcaggtttgtccctcgggatgtgcctctgcctgtggttcgcgtggcctctgtatttgcaaatgcagataaaggtgatgatgagaagaatacagacaactcagaggacagtcgagctgaagacaattttaacttggaaaaggaaaaagaagatgtccctgtggaaatgtccaatggtgaaccaggttgccactactttgagcagctccattacaatgacatgtggctgaaggttggcgactgtgtcttcatcaagtcccatggcctggtgcgtcctcgtgtgggcagaattgaaaaagtatgggttcgagatggagctgcatatttttatggccccatcttcattcacccagaagaaacagagcatgagcccacaaaaatgttctacaaaaaagaagtatttctgagtaatctggaagaaacctgccccatgacatgtattctcggaaagtgtgctgtgttgtcattcaaggacttcctctcctgcaggccaactgaaataccagaaaatgacattctgctttgtgagagccgctacaatgagagcgacaagcagatgaagaaattcaaaggattgaagaggttttcactctctgctaaagtggtagatgatgaaatttactacttcagaaaaccaattgttcctcagaaggagccatcacctttgctggaaaagaagatccagttgctagaagctaaatttgccgagttagaaggtggagatgatgatattgaagagatgggagaagaagatagtgaggtcattgaacctccttctctacctcagcttcagacccccctggccagtgagctggacctcatgccctacacacccccacagtctaccccaaagtctgccaaaggcagtgcaaagaaggaaggctccaaacggaaaatcaacatgagtggctacatcctgttcagcagtgagatgagggctgtgattaaggcccaacacccagactactctttcggggagctcagccgcctggtggggacagaatggagaaatcttgagacagccaagaaagcagaatatgaaggcatgatgggtggctatccgccaggccttccacctttgcagggcccagttgatggccttgttagcatgggcagcatgcagccacttcaccctggggggcctccaccccaccatcttccgccaggtgtgcctggcctcccgggcatcccaccaccgggtgtgatgaaccaaggagtggcccctatggtagggactccagcaccaggtggaagtccatatggacaacaggtgggagttttggggcctccagggcagcaggcaccacctccatatcccggcccacatccagctggaccccctgtcatacagcagccaacaacacccatgtttgtagctcccccaccaaagacccagcggcttcttcactcagaggcctacctgaaatacattgaaggactcagtgcggagtccaacagcattagcaagtgggatcagacactggcagctcgaagacgcgacgtccatttgtcgaaagaacaggagagccgcctaccctctcactggctgaaaagcaaaggggcccacaccaccatggcagatgccctctggcgccttcgagatttgatgctccgggacaccctcaacattcgccaagcatacaacctagaaaatgtttaatcacatcattacgtttcttttatatagaagcataaagagttgtggatcagtagccattttagttactgggggtggggggaaggaacaaaggaggataatttttattgcattttactgtacatcacaaggccatttttatatacggacacttttaataagctatttcaatttgtttgttatattaagttgactttatcaaatacacaaagatttttttgcatatgtttccttcgtttaaaaccagtttcataattggttgtatatgtagacttggagttttatctttttacttgttgccatggaactgaaaccattagaggtttttgtcttggcttggggtttttgttttcttggttttgggtttttttatatatatatataaaagaacaaaatgaaaaaaaacacacacacacaagagtttacagattagtttaaattgataatgaaatgtgaagtttgtcctagtttacatcttagagaggggagtatacttgtgtttgtttcatgtgcctgaatatcttaagccactttctgcaaaagctgtttcttacagatgaagtgctttctttgaaaggtggttatttaggttttagatgtttaatagacacagcacatttgctctattaactcagaggctcactacagaaatatgtaatcagtgctgtgcatctgtctgcagctaatgtacctcctggacaccaggaggggaaaaagcactttttcaattgtgctgagttagacatctgtgagttagactatggtgtcagtgatttttgcagaacacgtgcacaaccctgaggtatgtttaatctaggcaggtacgtttaaggatattttgatctatttataatgaattcacaatttatgcctataaatttcagatgatttaaaattttaaacctgttacattgaaaaacattgaagttcgtcttgaagaaagcattaaggtatgcatggaggtgatttatttttaaacataacacctaacctaacatgggtaagagagtatggaactagatatgagctgtataagaagcataattgtgaacaagtagattgattgccttcatatacaagtatgttttagtattccttatttccttattatcagatgtattttttcttttaagtttcaatgttgttataattctcaaccagaaatttaatactttctaaaatattttttaaatttagcttgtgcttttgaattacaggagaagggaatcataatttaataaaacgcttactagaaagaccattacagatcccaaacacttgggtttggtgaccctgtctttcttatatgaccctacaataaacatttgaaggcagcataggatggcagacagtaggaacattgtttcacttggcggcatgtttttgaaacctgctttatagtaactgggtgattgccattgtggtagagcttccactgctgtttataatctgagagagttaatctcagaggatgcttttttccttttaatctgctatgaatcagtacccagatgtttaattactgtacttattaaatcatgagggcaaaagagtgtagaatggaaaaaagtctcttgtatctagatactttaaatatgggaggccctttaacttaattgcctttagtcaaccactggatttgaatttgcatcaagtattttaaataatattgaatttaaaaaaatgtattgcagtagtgtgtcagtaccttattgttaaagtgagtcagataaatcttcaattcctggctatttgggcaattgaatcatcatggactgtataatgcaatcagattattttgtttctagacatccttgaattacaccaaagaacatgaaatttagttgtggttaaattatttatttatttcatgcattcattttatttcccttaaggtctggatgagacttctttggggagcctctaaaaaaatttttcactgggggccacgtgggtcattagaagccagagctctcctccaggctccttcccagtgcctagaggtgctataggaaacatagatccagccaggggcttccctaaagcagtgcagcaccggcccagggcatcactagacaggccctaattaagttttttttaaaaagcctgtgtatttattttagaatcatgtttttctgtatattaacttgggggatatcgttaatatttaggatataagatttgaggtcagccatcttcaaaaaagaaaaaaaaattgactcaagaaagtacaagtaaactatacacctttttttcataagttttaggaactgtagtaatgtggcttagaaagtataatggcctaaatgttttcaaaatgtaagttcctgtggagaagaattgtttatattgcaaacggggggactgaggggaacctgtaggtttaaaacagtatgtttgtcagccaactgatttaaaaggcctttaactgttttggttgttgttttttttttaagccactctccccttcctatgaggaagaattgagaggggcacctatttctgtaaaatccccaaattggtgttgatgattttgagcttgaatgttttcatacctgattaaaacttggtttattctaatttctgtatcatatcatctgaggtttacgtggtaactagtcttataacatgtatgtatcttttttttgttgttcatctaaagctttttaatccaaataaatacagagtttgcaaagtgatttggattaaccagg

SEQ ID NO: 328278 - DNA, 4808 bp, Artificial Sequence
  derived and/or modified sequence
atggggagtaagcggcgacgtgctacttcccccagttcttcagtctcaggagacttcgacgacggacatcacagtgtgagtacccctggccctagtaggaagcgtaggcgtctcagtaatctcccgactgttgatcctattgcggtctgtcacgagctgtataataccatccgagactacaaagacgaacagggccgattactgtgtgaactgttcatcagagccccaaaaaggcgaaaccagcccgactattacgaggttgtcagccagccaatcgacctgatgaagattcagcagaaactcaagatggaagaatatgatgacgtgaacctccttacagcagactttcagttactgttcaataacgcaaagagttattacaagcccgacagtccagagtataaagccgcatgtaagctgtgggacctgtacctgcgtactcggaacgagtttgttcagaagggagaagcagacgacgaagacgatgacgaagacgggcaagacaaccaggggaccgtaacagaagggagctcgccagcgtacctgaaagaaatattagagcagctcctggaagctatcgtggtcgccactaaccccagtggacggctgatctcagagctgttccaaaaactacccagtaaggtacagtatccagactactacgccattattaaggagcctatagatctgaagacaattgcgcagcggattcagaacggatcctacaagtctattcacgcgatggccaaagacattgatctactcgctaagaatgctaaaacctataatgagccaggatcacaagtattcaaagacgccaatagtattaaaaaaattttctacatgaaaaaagccgagatcgaacaccacgagatggcgaaatcctccctgcgcatgtctaacaagcgcgctgtccaagggggtcgcctttcggccatcaccatggccctacagtatgggtctgaatccgaggaagacgcggctctagccgcagcacggtacgaagagggggaatccgaggccgagtcgattacatccttcatggatgtgtcaaatcctttttaccaactttatgacaccgtaagaagctgcaggaataatcagggccagttgattgccgaacctttctatcacttaccaagtaagaaaaagtatccagactattaccagcaaattaaaatgccgatcagtctacagcagatacggaccaagcttaaaaatcaggagtatgaaactctcgaccatctggaatgtgacttaaatcttatgttcgagaacgcaaaaagatataacgtcccaaactccgccatttacaagagagtgctgaaactgcagcaggtgatgcaggccaaaaagaaggaattagcccgtagagatgatattgaagacggggacagtatgattagttcagccacttccgacactggaagtgcaaagagaaaatcaaaaaagaatattaggaaacagagaatgaaaattctcttcaatgtcgttctcgaggccagggaacccggtagtggtcgcagactctgtgatctgtttatggtgaaaccaagtaaaaaagactaccccgactactataaaattatcctcgagcctatggatctcaagattatcgaacataatattcgcaacgacaagtatgctggggaggagggcatgatagaagacatgaaactgatgtttcgcaacgccaggcactacaatgaggagggctctcaggtgtataacgatgcacatatattggagaagctcctgaaggagaaacgaaaggaattgggaccactcccggatgacgatgacatggcttctcccaaacttaagctaagtagaaaaagtggtatatctccaaagaagagtaagtacatgaccccaatgcagcagaaactgaacgaggtatatgaagctgtcaaaaactataccgacaaacggggacgccgactgagcgccattttcctgagactccctagcagatcggaattgccggattattacctgacgatcaagaagcccatggacatggagaagatccggtcccacatgatggccaataaatatcaggatatcgacagtatggtagaagattttgtgatgatgtttaataacgcatgcacatataatgagcctgagtccctgatctacaaggacgcactggtgttacacaaggttctccttgaaacacgcagagatctggaaggcgatgaggactcccatgtccctaatgtgacccttttgatccaggaacttatccacaatctgtttgtctcggtcatgtctcaccaggatgacgagggacgctgctattccgactccttagctgaaatccctgctgtggacccaaattttcctaataagccacctttgacctttgacattatccgaaagaacgtcgagaacaataggtaccgtcggctggacctctttcaggagcacatgttcgaggtactggagcgtgcccgacgaatgaacaggacagattccgagatttacgaggacgccgtcgagttgcagcagttttttataaagatccgggacgagttgtgtaaaaacggagaaatattgctctccccggcactgtcatataccaccaaacacctgcataacgacgtcgagaaagaacgtaaggaaaaactccccaaggaaatcgaagaggataaattaaagagggaggaggagaaaagggaagctgagaaaagtgaggactccagcggcgcagctgggctgtccggattgcaccgcacctatagccaggactgctctttcaaaaacagcatgtaccatgtcggcgactacgtgtacgtagagccagctgaggctaatttacagccccatatcgtttgcatagaacgactgtgggaagattcggcaggcgaaaaatggctgtacggctgctggttttacaggcctaatgagaccttccatctagcaacccgcaagttcctggaaaaggaagtgtttaagtcagattactacaataaggttcccgtctctaaaatcctgggtaagtgcgtcgtgatgtttgtcaaagagtatttcaagctttgccccgagaactttagagatgaggacgtgtttgtgtgcgagagtaggtactcagccaaaacaaaaagcttcaagaaaattaagctctggacaatgcccatctcttcagtgcggtttgttcctagagacgtgcctctccccgtggtacgagtagcgagtgtattcgcgaacgctgacaaaggagatgatgagaagaatactgataattcggaggattcaagggccgaggataattttaacctggagaaagagaaagaggatgttcccgtggagatgagtaacggcgaaccaggttgccactactttgagcagctgcattacaacgatatgtggctgaaagtgggcgattgtgtgtttatcaagagccacggcctggttcgcccaagagtcggacggatcgagaaggtgtgggttagagacggcgcagcctatttttacgggcctatcttcatccacccggaggagacagagcacgagccaaccaagatgttctataaaaaagaggtcttccttagcaatcttgaagaaacctgcccaatgacctgcattctgggcaaatgcgccgtgttgagttttaaagatttcctgtcgtgccgtcctacagaaatcccagaaaacgacattttattatgtgagagccggtacaatgagtcagacaaacagatgaaaaagttcaagggcctgaagcgattcagcctgtccgcaaaagtagtggacgacgagatttattatttcaggaagcccattgtgcctcagaaagaaccctcgccattgttggaaaaaaaaattcaactcttagaagccaaattcgcagagctggaaggaggagacgacgatatcgaggaaatgggggaagaagactccgaggtcattgagcccccatcactgcctcagctgcagaccccactggctagcgaacttgatctcatgccgtatacccccccacagtctacgcccaagagtgctaaaggatcagccaaaaaggaaggctctaagcgtaagatcaatatgtccggatacatcctgtttagtagcgaaatgcgagcagtcatcaaggctcaacatcctgattattcatttggcgagctttcaagattggtagggaccgaatggaggaacctggagaccgcaaagaaggcagagtatgaggggatgatgggcggttatcctccagggctgcctcctcttcaggggccagtcgatggacttgtgtctatgggcagcatgcaacctttgcaccctggtggtccgcctccccatcaccttcctcccggagtacccggactgcctggcatcccccctcccggtgtaatgaatcagggggtggcccctatggttggaactccggctcccggaggatccccttatggacaacaggtgggcgtcctaggaccgccaggccaacaggcacctccaccttatcccggaccacatccagccggtccaccagtcattcagcagccaaccacccctatgttcgtagccccaccccctaaaacgcagcggctcctccacagcgaggcttacctaaaatacattgagggactgtcagctgagtctaactctattagcaaatgggaccagaccctagcggctagacgtagagatgtgcacctgagcaaagaacaggagtccagactcccttcgcactggctgaagtccaagggggctcataccaccatggctgatgctctttggaggctgagggacctgatgctgcgcgataccctgaacataagacaggcctacaacctcgagaacgttta

SEQ ID NO: 328279 - DNA, 4809 bp, Artificial Sequence
  derived and/or modified sequence
atgggcagcaagagaagaagagccaccagccccagcagcagcgtgagcggcgacttcgacgacggccaccacagcgtgagcacccccggccccagcagaaagagaagaagactgagcaacctgcccaccgtggaccccatcgccgtgtgccacgagctgtacaacaccatcagagactacaaggacgagcagggcagactgctgtgcgagctgttcatcagagcccccaagagaagaaaccagcccgactactacgaggtggtgagccagcccatcgacctgatgaagatccagcagaagctgaagatggaggagtacgacgacgtgaacctgctgaccgccgacttccagctgctgttcaacaacgccaagagctactacaagcccgacagccccgagtacaaggccgcctgcaagctgtgggacctgtacctgagaaccagaaacgagttcgtgcagaagggcgaggccgacgacgaggacgacgacgaggacggccaggacaaccagggcaccgtgaccgagggcagcagccccgcctacctgaaggagatcctggagcagctgctggaggccatcgtggtggccaccaaccccagcggcagactgatcagcgagctgttccagaagctgcccagcaaggtgcagtaccccgactactacgccatcatcaaggagcccatcgacctgaagaccatcgcccagagaatccagaacggcagctacaagagcatccacgccatggccaaggacatcgacctgctggccaagaacgccaagacctacaacgagcccggcagccaggtgttcaaggacgccaacagcatcaagaagatcttctacatgaagaaggccgagatcgagcaccacgagatggccaagagcagcctgagaatgagcaacaagagagccgtgcagggcggcagactgagcgccatcaccatggccctgcagtacggcagcgagagcgaggaggacgccgccctggccgccgccagatacgaggagggcgagagcgaggccgagagcatcaccagcttcatggacgtgagcaaccccttctaccagctgtacgacaccgtgagaagctgcagaaacaaccagggccagctgatcgccgagcccttctaccacctgcccagcaagaagaagtaccccgactactaccagcagatcaagatgcccatcagcctgcagcagatcagaaccaagctgaagaaccaggagtacgagaccctggaccacctggagtgcgacctgaacctgatgttcgagaacgccaagagatacaacgtgcccaacagcgccatctacaagagagtgctgaagctgcagcaggtgatgcaggccaagaagaaggagctggccagaagagacgacatcgaggacggcgacagcatgatcagcagcgccaccagcgacaccggcagcgccaagagaaagagcaagaagaacatcagaaagcagagaatgaagatcctgttcaacgtggtgctggaggccagagagcccggcagcggcagaagactgtgcgacctgttcatggtgaagcccagcaagaaggactaccccgactactacaagatcatcctggagcccatggacctgaagatcatcgagcacaacatcagaaacgacaagtacgccggcgaggagggcatgatcgaggacatgaagctgatgttcagaaacgccagacactacaacgaggagggcagccaggtgtacaacgacgcccacatcctggagaagctgctgaaggagaagagaaaggagctgggccccctgcccgacgacgacgacatggccagccccaagctgaagctgagcagaaagagcggcatcagccccaagaagagcaagtacatgacccccatgcagcagaagctgaacgaggtgtacgaggccgtgaagaactacaccgacaagagaggcagaagactgagcgccatcttcctgagactgcccagcagaagcgagctgcccgactactacctgaccatcaagaagcccatggacatggagaagatcagaagccacatgatggccaacaagtaccaggacatcgacagcatggtggaggacttcgtgatgatgttcaacaacgcctgcacctacaacgagcccgagagcctgatctacaaggacgccctggtgctgcacaaggtgctgctggagaccagaagagacctggagggcgacgaggacagccacgtgcccaacgtgaccctgctgatccaggagctgatccacaacctgttcgtgagcgtgatgagccaccaggacgacgagggcagatgctacagcgacagcctggccgagatccccgccgtggaccccaacttccccaacaagccccccctgaccttcgacatcatcagaaagaacgtggagaacaacagatacagaagactggacctgttccaggagcacatgttcgaggtgctggagagagccagaagaatgaacagaaccgacagcgagatctacgaggacgccgtggagctgcagcagttcttcatcaagatcagagacgagctgtgcaagaacggcgagatcctgctgagccccgccctgagctacaccaccaagcacctgcacaacgacgtggagaaggagagaaaggagaagctgcccaaggagatcgaggaggacaagctgaagagagaggaggagaagagagaggccgagaagagcgaggacagcagcggcgccgccggcctgagcggcctgcacagaacctacagccaggactgcagcttcaagaacagcatgtaccacgtgggcgactacgtgtacgtggagcccgccgaggccaacctgcagccccacatcgtgtgcatcgagagactgtgggaggacagcgccggcgagaagtggctgtacggctgctggttctacagacccaacgagaccttccacctggccaccagaaagttcctggagaaggaggtgttcaagagcgactactacaacaaggtgcccgtgagcaagatcctgggcaagtgcgtggtgatgttcgtgaaggagtacttcaagctgtgccccgagaacttcagagacgaggacgtgttcgtgtgcgagagcagatacagcgccaagaccaagagcttcaagaagatcaagctgtggaccatgcccatcagcagcgtgagattcgtgcccagagacgtgcccctgcccgtggtgagagtggccagcgtgttcgccaacgccgacaagggcgacgacgagaagaacaccgacaacagcgaggacagcagagccgaggacaacttcaacctggagaaggagaaggaggacgtgcccgtggagatgagcaacggcgagcccggctgccactacttcgagcagctgcactacaacgacatgtggctgaaggtgggcgactgcgtgttcatcaagagccacggcctggtgagacccagagtgggcagaatcgagaaggtgtgggtgagagacggcgccgcctacttctacggccccatcttcatccaccccgaggagaccgagcacgagcccaccaagatgttctacaagaaggaggtgttcctgagcaacctggaggagacctgccccatgacctgcatcctgggcaagtgcgccgtgctgagcttcaaggacttcctgagctgcagacccaccgagatccccgagaacgacatcctgctgtgcgagagcagatacaacgagagcgacaagcagatgaagaagttcaagggcctgaagagattcagcctgagcgccaaggtggtggacgacgagatctactacttcagaaagcccatcgtgccccagaaggagcccagccccctgctggagaagaagatccagctgctggaggccaagttcgccgagctggagggcggcgacgacgacatcgaggagatgggcgaggaggacagcgaggtgatcgagccccccagcctgccccagctgcagacccccctggccagcgagctggacctgatgccctacacccccccccagagcacccccaagagcgccaagggcagcgccaagaaggagggcagcaagagaaagatcaacatgagcggctacatcctgttcagcagcgagatgagagccgtgatcaaggcccagcaccccgactacagcttcggcgagctgagcagactggtgggcaccgagtggagaaacctggagaccgccaagaaggccgagtacgagggcatgatgggcggctacccccccggcctgccccccctgcagggccccgtggacggcctggtgagcatgggcagcatgcagcccctgcaccccggcggcccccccccccaccacctgccccccggcgtgcccggcctgcccggcatccccccccccggcgtgatgaaccagggcgtggcccccatggtgggcacccccgcccccggcggcagcccctacggccagcaggtgggcgtgctgggcccccccggccagcaggccccccccccctaccccggcccccaccccgccggcccccccgtgatccagcagcccaccacccccatgttcgtggcccccccccccaagacccagagactgctgcacagcgaggcctacctgaagtacatcgagggcctgagcgccgagagcaacagcatcagcaagtgggaccagaccctggccgccagaagaagagacgtgcacctgagcaaggagcaggagagcagactgcccagccactggctgaagagcaagggcgcccacaccaccatggccgacgccctgtggagactgagagacctgatgctgagagacaccctgaacatcagacaggcctacaacctggagaacgtgtag

SEQ ID NO: 328280 - protein, 1582 aa, Artificial Sequence
  derived and/or modified sequence
MGSKRRRATSPSSSVSGDFDDGHHSVSTPGPSRKRRRLSNLPTVDPIAVCHELYNTIRDYKDEQGRLLCELFIRAPKRRNQPDYYEVVSQPIDLMKIQQKLKMEEYDDVNLLTADFQLLFNNAKSYYKPDSPEYKAACKLWDLYLRTRNEFVQKGEADDEDDDEDGQDNQGTVTEGSSPAYLKEILEQLLEAIVVATNPSGRLISELFQKLPSKVQYPDYYAIIKEPIDLKTIAQRIQNGSYKSIHAMAKDIDLLAKNAKTYNEPGSQVFKDANSIKKIFYMKKAEIEHHEMAKSSLRMRTPSNLAAARLTGPSHSKGSLGEERNPTSKYYRNKRAVQGGRLSAITMALQYGSESEEDAALAAARYEEGESEAESITSFMDVSNPFYQLYDTVRSCRNNQGQLIAEPFYHLPSKKKYPDYYQQIKMPISLQQIRTKLKNQEYETLDHLECDLNLMFENAKRYNVPNSAIYKRVLKLQQVMQAKKKELARRDDIEDGDSMISSATSDTGSAKRKSKKNIRKQRMKILFNVVLEAREPGSGRRLCDLFMVKPSKKDYPDYYKIILEPMDLKIIEHNIRNDKYAGEEGMIEDMKLMFRNARHYNEEGSQVYNDAHILEKLLKEKRKELGPLPDDDDMASPKLKLSRKSGISPKKSKYMTPMQQKLNEVYEAVKNYTDKRGRRLSAIFLRLPSRSELPDYYLTIKKPMDMEKIRSHMMANKYQDIDSMVEDFVMMFNNACTYNEPESLIYKDALVLHKVLLETRRDLEGDEDSHVPNVTLLIQELIHNLFVSVMSHQDDEGRCYSDSLAEIPAVDPNFPNKPPLTFDIIRKNVENNRYRRLDLFQEHMFEVLERARRMNRTDSEIYEDAVELQQFFIKIRDELCKNGEILLSPALSYTTKHLHNDVEKERKEKLPKEIEEDKLKREEEKREAEKSEDSSGAAGLSGLHRTYSQDCSFKNSMYHVGDYVYVEPAEANLQPHIVCIERLWEDSAGEKWLYGCWFYRPNETFHLATRKFLEKEVFKSDYYNKVPVSKILGKCVVMFVKEYFKLCPENFRDEDVFVCESRYSAKTKSFKKIKLWTMPISSVRFVPRDVPLPVVRVASVFANADKGDDEKNTDNSEDSRAEDNFNLEKEKEDVPVEMSNGEPGCHYFEQLHYNDMWLKVGDCVFIKSHGLVRPRVGRIEKVWVRDGAAYFYGPIFIHPEETEHEPTKMFYKKEVFLSNLEETCPMTCILGKCAVLSFKDFLSCRPTEIPENDILLCESRYNESDKQMKKFKGLKRFSLSAKVVDDEIYYFRKPIVPQKEPSPLLEKKIQLLEAKFAELEGGDDDIEEMGEEDSEVIEPPSLPQLQTPLASELDLMPYTPPQSTPKSAKGSAKKEGSKRKINMSGYILFSSEMRAVIKAQHPDYSFGELSRLVGTEWRNLETAKKAEYEGVMNQGVAPMVGTPAPGGSPYGQQVGVLGPPGQQAPPPYPGPHPAGPPVIQQPTTPMFVAPPPKTQRLLHSEAYLKYIEGLSAESNSISKWDQTLAARRRDVHLSKEQESRLPSHWLKSKGAHTTMADALWRLRDLMLRDTLNIRQAYNLENV

SEQ ID NO: 328281 - protein, 43 aa, Artificial Sequence
  derived and/or modified sequence
MGSKRRRATSPSSSVSGDFDDGHHSVSTPGPSRKRRRLSNLPT

SEQ ID NO: 328282 - DNA, 4749 bp, Artificial Sequence
  derived and/or modified sequence
atggggagcaaacgccggcgagcgacatcacctagctctagcgtctccggggactttgatgacggccaccacagcgtttccacgccagggccctcccggaaaagaagaagactgtctaaccttccaaccgtagacccaattgccgtgtgccacgagttgtacaatactataagggactataaggacgagcagggcagactcctatgcgagcttttcatccgtgctccaaaacgacggaaccagcctgattactacgaggtcgttagtcaacctatcgacctcatgaaaatccaacagaagctgaagatggaagaatatgacgacgtcaacctgcttacagccgattttcaactgctatttaataatgccaaatcgtattataaacccgattcccccgagtacaaagcggcctgtaaactctgggacctttatttgcgaacccggaatgaattcgtgcagaaaggtgaggccgacgacgaagatgatgacgaggacggtcaggataatcaggggacagtgactgagggttcttcacctgcatacttgaaagagatcttagaacaactgttggaggccatcgtcgttgccactaacccgtcaggtcgcctcattagcgagctgttccaaaagttgccatctaaagtgcagtacccggattactatgctatcattaaggagccaattgatttgaagactattgcacaacgtattcagaatgggtcctataagtctatccacgctatggcaaaagatatcgatttgctggctaagaacgccaagacttacaatgaacctgggtcccaggtgtttaaggacgctaatagtatcaaaaaaatcttctatatgaagaaggctgaaatcgaacaccacgagatggctaagtcctctcttcgcatgaggacaccatcaaatctggccgctgcccgtctaactgggccttcgcactccaagggcagcctaggagaggagagaaaccctactagcaaatattataggaacaaaagagctgtgcagggcggcaggctgtccgccataaccatggcactccagtacggatccgagtctgaagaggacgcagctctcgccgctgcccgatacgaggagggagaatctgaggccgagagtatcacgagttttatggatgtgagtaaccctttctatcagttatatgacacggtgcggagctgccggaacaaccaggggcagctgattgccgaaccattctatcacttacctagtaaaaaaaagtatccggattactaccaacagatcaaaatgcccatttctctgcagcaaatccgtaccaagcttaagaatcaggaatatgaaaccctggaccacctcgagtgtgacctcaatctgatgtttgagaatgccaagcgctacaacgtgcctaatagcgctatctacaaacgggtcctcaagcttcaacaggttatgcaagccaagaagaaggagctggcacgcagagacgacattgaggacggcgatagcatgataagctcggctacgagtgacacaggaagcgcaaagagaaagtctaaaaagaacatacgtaagcagcggatgaaaattctgttcaacgtggttttggaggcgagggaacctggcagtggacggcgattatgcgacctatttatggttaaacctagcaagaaggactatccagattattacaaaattattctagagcccatggacctaaagattatagagcataatatcagaaacgacaagtatgcgggagaggagggcatgatcgaggacatgaagttgatgttcaggaacgcgcgacattacaatgaagagggctcacaggtatacaatgacgcccatattttagaaaaattgctcaaggagaagcggaaagagttgggccctctgcccgatgacgatgacatggccagccctaagttgaagctgagccgaaaatccggcatttcccccaaaaagtccaaatacatgacccctatgcagcagaagctgaatgaggtatacgaggccgtaaagaattacacagataaaagaggccgccgtctgtcagccatcttcttaaggctccctagcaggtcagaactcccagactattatcttaccatcaaaaaaccaatggatatggaaaaaataaggtcacacatgatggcgaataaatatcaggacattgacagcatggtagaggattttgtgatgatgtttaacaacgcctgcacctataatgaaccggagagtctaatctacaaggacgcccttgtcttacataaggtgcttctcgagacacgccgcgatctagaaggtgatgaagattcccacgtccccaacgtgacactgctgatccaggaactgatccacaacctttttgtgagtgtcatgtctcatcaggatgacgaaggccgctgctattctgatagtctcgctgagattccggctgtggacccaaactttccaaacaagccccctttaacattcgatatcattcggaagaatgtggaaaacaataggtaccgacggctggacctgtttcaagagcacatgttcgaggtattagaacgtgccagaaggatgaatcggaccgactctgaaatttatgaggatgccgtcgagctgcagcagtttttcatcaagattcgagatgagctctgtaaaaacggcgagattttactgagccctgccttatcatatacgacgaagcatctacacaacgatgtagaaaaagaacgcaaagagaaacttcccaaggagattgaggaagataagctgaagagagaagaagagaaacgcgaagcggagaagagtgaagatagttccggcgctgccggcctctccggcctacacagaacgtactctcaggactgtagttttaaaaattcaatgtatcatgttggtgattacgtgtacgtcgaaccagctgaagccaatttacagcctcatatcgtttgcatcgaaaggctatgggaggattcggccggggaaaagtggctgtacggctgttggttttataggccaaacgagacatttcatctggcgactcggaaattcttggaaaaggaggtgttcaaaagcgactattataataaagtccccgtaagtaagatactaggtaagtgcgtcgtgatgttcgtgaaggagtacttcaaactttgtccagaaaacttcagagatgaggacgtgttcgtctgcgaatctcgttattctgcaaagaccaaatcctttaagaaaatcaaattatggactatgcccatttcttccgttagatttgtgcctcgggacgtaccactgcccgtggtgcgggtcgcatcagtcttcgctaacgccgacaaaggggacgatgagaaaaacacagacaattcagaagatagtcgcgctgaggacaatttcaatctggagaaagaaaaagaggatgtgccagtggagatgtctaatggcgaacctggctgccactactttgaacagctccactataacgacatgtggctcaaggttggcgattgcgtcttcattaagtctcatgggttggtacggccacgagtaggtcgcatcgaaaaagtttgggtgcgggatggagcagcctatttctatggaccgatattcatccaccctgaagaaactgaacacgaacctaccaaaatgttctacaaaaaggaagtctttctgtcaaatctcgaagaaacgtgccccatgacatgcattctgggcaagtgtgccgtcctgtccttcaaggacttcctctcctgccgtccaactgagattcctgagaacgatatcttactgtgcgagagcagatacaacgagtccgacaagcaaatgaaaaagttcaaaggcctgaagcggttttccctcagcgctaaggtggtcgacgatgagatttactactttcggaaacccatcgtaccccagaaagaaccgagcccattgctggaaaagaagattcagttgctcgaggccaaatttgcagagctggaggggggggatgacgacatagaagaaatgggcgaggaagacagtgaagttattgagcctcccagcctgccccaactgcaaacacctctagcctctgagttggacctgatgccctacactcctccacagagtacacctaaatctgcaaaaggtagcgccaagaaggagggcagtaagcgcaaaattaacatgagtggctacatacttttttcatcagagatgcgggctgtgatcaaggcccagcacccggactactcttttggggaactgtcccgcctagtggggacagagtggagaaacctcgaaaccgctaaaaaagcagaatacgaaggagtgatgaatcagggcgtggccccgatggtgggcacccctgctccagggggatccccgtatggacagcaggtcggcgtactgggcccacctggacagcaagccccccctccttatccagggccccaccctgcagggccaccagtgatacagcaacccactactccaatgttcgttgctccccccccgaaaacccagcgcctgttgcactcagaagcctatctgaaatatatcgaaggactctccgccgagtctaacagcatttcaaagtgggatcagacccttgcggccaggcgtcgagatgtacatctttctaaggaacaggagtccagactcccctcccactggcttaagagcaagggtgcacacaccaccatggccgatgccttgtggcgtttacgggacctgatgctccgggacaccctgaacatcagacaggcctataaccttgagaacgtgtag

SEQ ID NO: 328283 - DNA, 4749 bp, Artificial Sequence
  derived and/or modified sequence
atgggcagcaagagaagaagagccaccagccccagcagctctgtgtctggggactttgatgatggccaccacagcgtgtccaccccaggccccagcaggaagagaagaaggctgagcaacctgcccaccgtggaccccatcgctgtgtgccacgagctgtacaacaccatccgggactacaaggatgagcagggccgcctgctgtgtgagctgttcatccgggcccccaagagaagaaaccagcctgactactatgaggtggtgtcccagcccatcgacctgatgaagatccagcagaagctgaagatggaggagtatgatgatgtgaacctgctgacagctgacttccagctgctcttcaacaatgccaagagctactacaagccagacagccctgagtacaaggccgcctgcaagctgtgggacctgtacctgcggaccagaaatgaatttgtgcagaagggggaggctgatgatgaagatgatgatgaagatggccaggacaaccagggcaccgtgacagagggcagcagccctgcctacctgaaggagatcctggagcagctgctggaggccatcgtggtggccaccaaccccagcggccgcctcatcagcgagctgttccagaagctgcccagcaaggtgcagtacccagactactatgccatcatcaaggagcccatcgacctgaagaccatcgcccagaggatccagaatggcagctacaagagcatccacgccatggccaaggacatcgacctgctggccaagaatgccaagacctacaatgaacctggcagccaggtgttcaaggatgccaacagcatcaagaagatcttctacatgaagaaggccgagattgagcaccacgagatggccaagagcagcctgaggatgaggacccccagcaacctggccgccgcccggctgaccggccccagccacagcaagggcagcctgggggaggagaggaaccccaccagcaagtactacagaaacaagagagctgtgcagggcggccgcctgagcgccatcaccatggccctgcagtatggcagcgagagtgaagaagatgctgccctggccgccgcccgctatgaggagggggagagcgaggccgagagcatcaccagcttcatggatgtgagcaaccccttctaccagctgtatgacacagtgcgcagctgcaggaacaaccagggccagctgattgctgagcccttctaccacctgcccagcaagaagaagtacccagactactaccagcagatcaagatgcccatcagcctgcagcagatccgcaccaagctgaagaaccaggagtatgagaccctggaccacctggagtgtgacctgaacctgatgtttgaaaatgccaagcgctacaacgtgcccaacagcgccatctacaagagggtgctgaagctgcagcaggtgatgcaggccaagaagaaggagctggccaggagagatgacattgaagatggagacagcatgatcagcagcgccaccagtgacaccggcagcgccaagaggaagagcaagaagaacatcaggaagcagaggatgaagatcctcttcaacgtggtgctggaggcccgggagcccggcagcggccggcggctgtgtgacctcttcatggtgaagcccagcaagaaggactacccagactactacaagatcatcctggagcccatggacctgaagatcatcgagcacaacatcagaaatgacaagtatgctggggaggagggcatgattgaggacatgaagctgatgttcagaaatgcccggcactacaatgaggagggcagccaggtgtacaatgatgcccacatcctggagaagctgctgaaggagaagaggaaggagctgggccccctgcctgatgatgatgacatggccagccccaagctgaagctgagcaggaagagcggcatcagccccaagaagagcaagtacatgacccccatgcagcagaagctgaatgaggtgtatgaggccgtgaagaactacacagacaagaggggccggcggctgagcgccatcttcctgcggctgcccagccgctctgagctgcctgactactacctgaccatcaagaagcccatggacatggagaagatccgcagccacatgatggccaacaagtaccaggacatcgacagcatggtggaggactttgtgatgatgttcaacaatgcctgcacctacaatgaacctgagagcctcatctacaaggatgccctggtgctgcacaaggtgctgctggagacccggcgggacctggagggagatgaggacagccacgtgcccaacgtgaccctgctgatccaggagctgatccacaacctgtttgtgtctgtgatgagccaccaggatgatgagggccgctgctacagcgacagcctggccgagatcccagctgtggaccccaacttccccaacaagccacccctgacctttgacatcatcaggaagaatgtggagaacaaccgctacagaaggctggacctcttccaggagcacatgtttgaggtgctggagcgggcccggaggatgaacagaacagattctgagatctatgaagatgctgtggagctgcagcagttcttcatcaagatcagagatgagctgtgcaagaatggagagatcctgctgagccctgccctgagctacaccaccaagcacctgcacaatgatgtggagaaggagaggaaggagaagctgcccaaggagattgaggaggacaagctgaagcgggaggaggagaagcgggaggccgagaagtctgaggacagcagtggagctgctggcctgagcggcctgcacaggacctacagccaggactgcagcttcaagaacagcatgtaccacgtgggggactatgtgtatgtggagcctgctgaggccaacctgcagccccacatcgtgtgcatcgagcggctgtgggaggacagcgctggggagaagtggctgtatggctgctggttctaccggcccaatgagaccttccacctggccaccaggaagttcctggagaaggaggtgttcaagagtgactactacaacaaggtgcctgtgtccaagatcctgggcaaatgtgtggtgatgtttgtgaaggagtacttcaagctgtgcccagagaacttcagagatgaagatgtgtttgtgtgtgagagccgctacagcgccaagaccaagagcttcaagaagatcaagctgtggaccatgcccatcagctctgtgcgctttgtgcccagagatgtgcccctgcctgtggtgcgggtggcctctgtgtttgccaatgctgacaagggagatgatgagaagaacacagacaacagcgaggacagcagagctgaggacaacttcaacctggagaaggagaaggaggatgtgcctgtggagatgagcaatggagagcccggctgccactactttgagcagctgcactacaatgacatgtggctgaaggtgggggactgtgtgttcatcaagagccacggcctggtgcggccccgggtgggcagaattgagaaggtgtgggtgagagatggagctgcctacttctacggccccatcttcatccaccctgaggagacagagcacgagcccaccaagatgttctacaagaaggaggtgttcctgagcaacctggaggagacctgccccatgacctgcatcctgggcaaatgtgctgtgctgtccttcaaggacttcctgagctgccggcccacagagatcccagaaaatgacatcctgctgtgtgagagccgctacaatgaaagtgacaagcagatgaagaagttcaagggcctgaagcgcttcagcctgagcgccaaggtggtggatgatgagatctactacttcaggaagcccatcgtgccccagaaggagcccagccccctgctggagaagaagatccagctgctggaggccaagtttgctgagctggagggcggagatgatgacatcgaggagatgggagaggaggacagcgaggtgattgagccccccagcctgccccagctgcagacccccctggccagcgagctggacctgatgccctacaccccaccccagagcacccccaagagcgccaagggcagcgccaagaaggagggcagcaagaggaagatcaacatgagcggctacatcctcttcagcagcgagatgagagctgtgatcaaggcccagcacccagactacagctttggagagctgagccggctggtgggcacagagtggaggaacctggagacagccaagaaggccgagtatgagggcgtgatgaaccagggcgtggcccccatggtgggcaccccagcccctgggggcagcccctacggccagcaggtgggcgtgctgggccccccaggccagcaggcccccccaccctacccaggcccccaccctgctggcccccctgtgatccagcagcccaccacccccatgtttgtggcccccccacccaagacccagaggctgctgcacagcgaggcctacctgaagtacatcgagggcctgtctgctgagagcaacagcatcagcaagtgggaccagaccctggccgcccggaggagagatgtgcacctgagcaaggagcaggagagccggctgcccagccactggctgaagagcaaaggagcccacaccaccatggctgatgccctgtggaggctgcgggacctgatgctgcgggacaccctgaacatccggcaggcctacaacctggagaatgtgtag

SEQ ID NO: 328284 - DNA, 4749 bp, Artificial Sequence
  derived and/or modified sequence
atgggcagcaagcggcggcgggccaccagccccagcagcagcgtgagcggtgatttcgatgacggacatcattctgtcagtacccccggaccgtcacggaaaaggcggcggttatctaacctccctactgtggacccaattgccgtctgtcatgagttgtataacacaatccgagactacaaagatgagcagggcaggctgctctgcgagctgttcattcgagcacccaagcgcaggaaccaaccagattattacgaagtcgtgagccagcctatcgatcttatgaagattcagcagaaactgaagatggaagagtacgacgatgtgaatttattaacagctgacttccagcttcttttcaacaacgctaagtcctattacaagccggattctcccgagtataaagctgcctgtaagctgtgggacctttacttaaggacccggaatgaatttgtgcagaaaggggaagctgatgatgaagacgacgacgaggacggacaggacaatcaggggaccgtgaccgaggggtcgtctccagcctatctgaaggagattctcgagcagctcctggaggctattgtggttgctactaaccctagcgggcggctgataagcgagctgtttcagaagctgccgagcaaggtgcaataccccgattactacgccattatcaaagaacctatcgatctgaaaaccatagctcagcgtatccagaacgggagctataaaagtatccatgcaatggccaaggatattgatctgctcgcaaagaatgccaagacttacaacgagcccgggagccaggtgtttaaagacgcgaattccataaaaaaaattttttacatgaaaaaggccgaaatagaacatcacgaaatggccaaaagttctttacggatgagaactccttccaacctggctgcagcgaggctcactgggcccagccacagcaagggtagcctgggcgaagaaagaaatcctacgtcaaaatactatcgcaacaagcgggccgtgcagggaggcaggctctcagctatcacaatggcattacagtatggaagtgaaagtgaggaagatgccgcgctagccgcagctcggtacgaggagggtgagagcgaagccgagagcatcacgtctttcatggatgtgagcaaccccttttaccaattgtacgatacagtgagatcctgcagaaacaatcagggccagcttatagcagagcccttttatcaccttccctctaaaaagaagtaccctgattactatcagcagattaaaatgccaatctccctccagcagattcgcacgaaattgaagaaccaggagtatgagaccctggatcacctggaatgtgatcttaatctgatgttcgagaacgctaagcggtacaacgtaccaaattccgcaatttataagcgcgtactaaaattacagcaggtgatgcaggccaaaaaaaaagaattagcacggcgagacgacattgaggacggagactccatgatctcctcagcaacaagcgataccggcagcgccaagcggaagagcaaaaaaaacattagaaagcaacgaatgaagattctgttcaacgtggtcctagaagcacgggagccaggtagcggcagaaggttgtgtgacttatttatggtgaaacctagcaagaaagactaccccgactattacaaaattatattggaacccatggatttgaaaattatcgagcataatatcagaaacgacaaatacgccggtgaggagggaatgattgaggacatgaaactcatgttcaggaacgccagacattacaatgaagaagggagccaggtctacaatgatgcccacatcttggaaaagctgttgaaagagaagcgcaaagaactgggacccctccccgacgacgacgacatggcctcaccaaagttgaaactgtcccgaaaatctggcatctcacccaagaagagcaaatacatgacacccatgcagcaaaagttgaatgaagtttatgaggcggtgaaaaattacaccgacaaaagagggaggcggctgtcggccatcttcttgcgccttccgtccaggagcgagctgcccgactactatttgacaataaagaagcctatggatatggagaaaatccgtagtcacatgatggcaaataaataccaggacatagactctatggtggaagattttgtgatgatgtttaacaacgcctgcacatacaacgaaccagagtccctcatctataaggatgctttagttttgcataaagtgctgctagaaacaaggcgcgaccttgagggtgatgaggactcccacgtgcccaacgtaacacttctgattcaggaactaatccataatcttttcgtgtccgtgatgagtcatcaggacgatgaaggcaggtgttatagcgactcgctggcggagatccccgctgtcgaccccaacttcccaaacaagcccccccttacctttgacataatccgtaagaatgtcgagaacaatagataccgtcgtctggatctctttcaagaacacatgttcgaagtgttagagcgcgccagacgcatgaaccgcacggacagcgaaatttatgaggatgcggtggaattgcaacaattctttattaagatccgggacgaactatgtaagaacggggaaatccttttgtcacccgcactgtcttatacgacaaagcacctgcacaatgacgtggagaaagaaagaaaggagaagttacccaaagagattgaagaagataagttaaaaagggaagaggagaagcgggaagcagagaagtccgaggattcgtcaggtgccgctggccttagtggcctgcacagaacttatagtcaagattgcagcttcaagaactctatgtaccacgtcggcgattacgtgtacgtagaacccgctgaggcaaatctccagccgcatattgtgtgtattgagcggctgtgggaggactctgcaggtgagaaatggctgtacggatgctggttttaccgtcccaacgagacctttcatcttgccactaggaaatttctcgagaaggaggtgtttaagtccgattattacaacaaagtgcccgtctctaagattctgggaaagtgcgttgtcatgtttgtgaaggagtatttcaaactgtgccccgaaaatttcagagatgaggatgtttttgtgtgcgagtcacgatattctgccaaaacgaagtcattcaagaagattaagctgtggactatgccaatttcctctgtacgattcgtgccccgagatgtgccactgccagttgtccgagtggcctcggtgttcgctaacgccgataaaggagacgacgaaaagaatacagataatagcgaagatagccgagctgaggataacttcaacttagagaaggaaaaagaagacgttccagtggagatgagcaatggtgagccaggatgccattacttcgaacagcttcactataacgacatgtggctcaaggtgggagattgcgtgttcattaaatctcacggtctcgtgagacccagggttgggcggatcgagaaggtatgggtacgggacggtgccgcttatttctatggtccaatttttattcaccctgaagagaccgagcacgagccaacaaaaatgttctataaaaaagaggtgttcctgtcaaatctggaggagacatgtcccatgacttgcattctcggaaagtgcgctgttcttagtttcaaagattttctgtcatgtcgacctacagagattccagaaaatgatatcctcctttgcgaaagtcgttacaatgaaagcgataaacagatgaaaaagtttaagggcctgaagaggttctccctctcggctaaggttgtggatgacgagatctattactttcgcaaaccaatcgtgccacaaaaagagccatcccccctcctggagaaaaaaattcagctcctcgaggctaagtttgccgagctggagggcggcgacgacgacatcgaggagatgggggaagaagactcagaggtcattgagcccccgtcacttcctcagttgcagaccccactggcttccgaattagacttgatgccttatactccgccacagtccacacctaagtccgccaagggctctgcaaaaaaggagggatcaaagaggaagatcaacatgagcgggtacatcctgttttcctcagagatgagagcggtcatcaaggcccagcacccagattactctttcggagagcttagccgcctggtggggaccgagtggagaaacctggaaactgccaagaaggctgaatacgaaggtgtgatgaatcagggagtggctcccatggtcggtactcctgcccccggtggcagcccgtacggacagcaagttggtgtgcttggtcctcctggccagcaggctccacccccgtaccccggcccacatcctgccggccctcctgtcatccaacagccgactactcctatgtttgtggccccccctccaaaaacacagagactcttgcactcggaggcctatcttaaatatattgagggcctcagcgccgaatctaatagtatctccaagtgggaccaaacccttgccgctcgtagaagagatgtccatcttagcaaagagcaagaatcacgcctcccgagccattggctcaagtccaagggggcccacaccacgatggctgacgcactgtggcgcctgagggacctcatgctaagagacacactaaatatccgccaggcatacaatctggaaaatgtgtag

SEQ ID NO: 328285 - DNA, 4825 bp, Artificial Sequence
  derived and/or modified sequence
tccatgggttccaagagaagaagagctacctccccttccagcagtgtcagcggggactttgatgatgggcaccattctgtgtcaacaccaggcccaagcaggaaaaggaggagactttccaatcttccaactgtagatcctattgccgtgtgccatgaactctataataccatccgagactataaggatgaacagggcagacttctctgtgagctcttcattagggcaccaaagcgaagaaatcaaccagactattatgaagtggtttctcagcccattgacttgatgaaaatccaacagaaactaaaaatggaagagtatgatgatgttaatttgctgactgctgacttccagcttctttttaacaatgcaaagtcctattataagccagattctcctgaatataaagccgcttgcaaactctgggatttgtaccttcgaacaagaaatgagtttgttcagaaaggagaagcagatgacgaagatgatgatgaagatgggcaagacaatcagggcacagtgactgaaggatcttctccagcttacttgaaggagatcctggagcagcttcttgaagccatagttgtagctacaaatccatcaggacgtctcattagcgaactttttcagaaactgccttctaaagtgcaatatccagattattatgcaataattaaggagcctatagatctcaagaccattgcccagaggatacagaatggaagctacaaaagtattcatgcaatggccaaagatatagatctcctcgcaaaaaatgccaaaacttataatgagcctggctctcaagtattcaaggatgcaaattcaattaaaaaaatattttatatgaaaaaggctgaaattgaacatcatgaaatggctaagtcaagtcttcgaatgaggactccatccaacttggctgcagccagactgacaggtccttcacacagtaaaggcagccttggtgaagagagaaatcccactagcaagtattaccgtaataaaagagcagtacaaggaggtcgtttatcagcaattacaatggcacttcaatatggctcagaaagtgaagaagatgctgctttagctgctgcacgctatgaagagggagagtcagaagcagaaagcatcacttcctttatggatgtttcaaatcctttttatcagctttatgacacagttaggagttgtcggaataaccaagggcagctaatagctgaacctttttaccatttgccttcaaagaaaaaataccctgattattaccagcaaattaaaatgcccatatcactacaacagatccgaacaaaactgaagaatcaagaatatgaaactttagatcatttggagtgtgatctgaatttaatgtttgaaaatgccaaacgctataatgtgcccaattcagccatctacaagcgagttctaaaattgcagcaagttatgcaggcaaagaagaaagagcttgccaggagagacgatatcgaggacggagacagcatgatctcttcagccacctctgatactggtagtgccaaaagaaaaagtaaaaagaacataagaaagcagcgaatgaaaatcttattcaatgttgttcttgaagctcgagagccaggttcaggcagaagactttgtgacctatttatggttaaaccatccaaaaaggactatcctgattattataaaatcatcttggagccaatggacttgaaaataattgagcataacatccgcaatgacaaatatgctggtgaagagggaatgatagaagacatgaagctgatgttccggaatgccaggcactataatgaggagggctcccaggtttataatgatgcacatatcctggagaagttactcaaggagaaaaggaaagagctgggcccactgcctgatgatgatgacatggcttctcccaaactcaagctgagtaggaagagtggcatttctcctaaaaaatcaaaatacatgactccaatgcagcagaaactaaatgaggtctatgaagctgtaaagaactatactgataagaggggtcgccgcctcagtgccatatttctgaggcttccctctagatctgagttgcctgactactatctgactattaaaaagcccatggacatggaaaaaattcgaagtcacatgatggccaacaagtaccaagatattgactctatggttgaggactttgtcatgatgtttaataatgcctgtacatacaatgagccggagtctttgatctacaaagatgctcttgttctacacaaagtcctgcttgaaacacgcagagacctggagggagatgaggactctcatgtcccaaatgtgactttgctgattcaagagcttatccacaatctttttgtgtcagtcatgagtcatcaggatgatgagggaagatgctacagcgattctttagcagaaattcctgctgtggatcccaactttcctaacaaaccaccccttacatttgacataattaggaagaatgttgaaaataatcgctaccgtcggcttgatttatttcaagagcatatgtttgaagtattggaacgagcaagaaggatgaatcggacagattcagaaatatatgaagatgcagtagaacttcagcagttttttattaaaattcgtgatgaactctgcaaaaatggagagattcttctttcaccggcactcagctataccacaaaacatttgcataatgatgtggagaaagagagaaaggaaaaattgccaaaagaaatagaggaagataaactaaaacgagaagaagaaaaaagagaagctgaaaagagtgaagattcctctggtgctgcaggcctctcaggcttacatcgcacatacagccaggactgtagctttaaaaacagcatgtaccatgttggagattacgtctatgtggaacctgcagaggccaacctacaaccacatatcgtctgtattgaaagactgtgggaggattcagctggtgaaaaatggttgtatggctgttggttttaccgaccaaatgaaacattccacctggctacacgaaaatttctagaaaaagaagtttttaagagtgactattacaacaaagttccagttagtaaaattctaggcaagtgtgtggtcatgtttgtcaaggaatactttaagttatgcccagaaaacttccgagatgaggatgtttttgtctgtgaatcacggtattctgccaaaaccaaatcttttaagaaaattaaactgtggaccatgcccatcagctcagtcaggtttgtccctcgggatgtgcctctgcctgtggttcgcgtggcctctgtatttgcaaatgcagataaaggtgatgatgagaagaatacagacaactcagaggacagtcgagctgaagacaattttaacttggaaaaggaaaaagaagatgtccctgtggaaatgtccaatggtgaaccaggttgccactactttgagcagctccattacaatgacatgtggctgaaggttggcgactgtgtcttcatcaagtcccatggcctggtgcgtcctcgtgtgggcagaattgaaaaagtatgggttcgagatggagctgcatatttttatggccccatcttcattcacccagaagaaacagagcatgagcccacaaaaatgttctacaaaaaagaagtatttctgagtaatctggaagaaacctgccccatgacatgtattctcggaaagtgtgctgtgttgtcattcaaggacttcctctcctgcaggccaactgaaataccagaaaatgacattctgctttgtgagagccgctacaatgagagcgacaagcagatgaagaaattcaaaggattgaagaggttttcactctctgctaaagtggtagatgatgaaatttactacttcagaaaaccaattgttcctcagaaggagccatcacctttgctggaaaagaagatccagttgctagaagctaaatttgccgagttagaaggtggagatgatgatattgaagagatgggagaagaagatagtgaggtcattgaacctccttctctacctcagcttcagacccccctggccagtgagctggacctcatgccctacacacccccacagtctaccccaaagtctgccaaaggcagtgcaaagaaggaaggctccaaacggaaaatcaacatgagtggctacatcctgttcagcagtgagatgagggctgtgattaaggcccaacacccagactactctttcggggagctcagccgcctggtggggacagaatggagaaatcttgagacagccaagaaagcagaatatgaaggtgtgatgaaccaaggagtggcccctatggtagggactccagcaccaggtggaagtccatatggacaacaggtgggagttttggggcctccagggcagcaggcaccacctccatatcccggcccacatccagctggaccccctgtcatacagcagccaacaacacccatgtttgtagctcccccaccaaagacccagcggcttcttcactcagaggcctacctgaaatacattgaaggactcagtgcggagtccaacagcattagcaagtgggatcagacactggcagctcgaagacgcgacgtccatttgtcgaaagaacaggagagccgcctaccctctcactggctgaaaagcaaaggggcccacaccaccatggcagatgccctctggcgccttcgagatttgatgctccgggacaccctcaacattcgccaagcatacaacctagaaaatgtttaatcacatcattacgtttcttttatatagaagcataaagagttgtggatcagtagccattttagttactgggggt

SEQ ID NO: 328286 - DNA, 783 bp, Artificial Sequence
  derived and/or modified sequence
gactggttttgcggcggcaccgggaggggtaagggaggtgagggcggcgggtgccgaagcgacggcagcggccgcggccggaggagcaatagcagcagccgtggcggccacggggcggggcgcggcggtcggtgaccgcggccggggctgcaggcggcggagcggctggcttgccaacacttggtgtcacatgtgagcctcccacatgtattcactctccattccagctctgtgattgaactctgctcttattgactagggggcagttgggcaggcatgcctcattcctggaattgacagtcattcctaataagaagttggattccatgggttccaagagaagaagagctacctccccttccagcagtgtcagcggggactttgatgatgggcaccattctgtgtcaacaccaggcccaagcaggaaaaggaggagactttccaatcttccaactgtagatcctattgccgtgtgccatgaactctataataccatccgagactataaggatgaacagggcagacttctctgtgagctcttcattagggcaccaaagcgaagaaatcaaccagactattatgaagtggtttctcagcccattgacttgatgaaaatccaacagaaactaaaaatggaagagtatgatgatgttaatttgctgactgctgacttccagcttctttttaacaatgcaaagtcctattataagccagattctcctgaatataaagccgcttgcaaactctgggatttgtaccttcgaacaagaaatgagtttgttc

SEQ ID NO: 328287 - DNA, 809 bp, Artificial Sequence
  derived and/or modified sequence
gcggccgcggccggaggagcaatagcagcagccgtggcggccacggggcggggcgcggcggtcggtgaccgcggccggggctgcaggcggcggagcggctggaagaagttggattccatgggttccaagagaagaagagctacctccccttccagcagtgtcagcggggactttgatgatgggcaccattctgtgtcaacaccaggcccaagcaggaaaaggaggagactttccaatcttccaactgtagatcctattgccgtgtgccatgaactctataataccatccgagactataaggatgaacagggcagacttctctgtgagctcttcattagggcaccaaagcgaagaaatcaaccagactattatgaagtggtttctcagcccattgacttgatgaaaatccaacagaaactaaaaatggaagagtatgatgatgttaatttgctgactgctgacttccagcttctttttaacaatgcaaagtcctattataagccagattctcctgaatataaagccgcttgcaaactctgggatttgtaccttcgaacaagaaatgagtttgttcagaaaggagaagcagatgacgaagatgatgatgaagatgggcaagacaatcagggcacagtgactgaaggatcttctccagcttacttgaaggagatcctggagcagcttcttgaagccatagttgtagctacaaatccatcaggacgtctcattagcgaactttttcagaaactgccttctaaagtgcaatatccagattattatgcaataattaaggagcctatagatctcaa

SEQ ID NO: 328288 - DNA, 517 bp, Artificial Sequence
  derived and/or modified sequence
gcggccgcggccggaggagcaatagcagcagccgtggcggccacggggcggggcgcggcggtcggtgaccgcggccggggctgcaggcggcggagcggctggcttgccaacacttggtgtcacatgtgagcctcccacatgtattcactctccattccagctctgtgattgaactctgctcttattgactagggggcagttgggcaggcatgcctcattcctggaattgacagtcattcctaataagttggattccatgggttccaagagaagaagagctacctccccttccagcagtgtcagcggggactttgatgatgggcaccattctgtgtcaacaccaggcccaagcaggaaaaggaggagactttccaatcttccaactgtagatcctattgccgtgtgccatgaactctataataccatccgagactataaggatgaacagggcagacttctctgtgagctcttcattagggcaccaaagcgaagaaatcaaccagactattatgaagtg

SEQ ID NO: 328289 - DNA, 476 bp, Artificial Sequence
  derived and/or modified sequence
aggtgagggcggcgggtgccgaagcgacggcagcggccgcggccggaggagcaatagcagcagccgtggcggccacggggcggggcgcggcggtcggtgaccgcggccggggctgcaggcggcggagcggctgggtcgcccatatttgattttgagctccaaaatggaagattggaaaatatgttttgaagagcttgccaacacttggtgtcacatgtgagcctcccacatgtattcactctccattccagctctgtgattgaactctgctcttattgactagggggcagttgggcaggcatgcctcattcctggaattgacagtcattcctaataagttggattccatgggttccaagagaagaagagctacctccccttccagcagtgtcagcggggactttgatgatgggcaccattctgtgtcaacaccaggcccaagcaggaaaaggaggagactttccaatcttccaact

SEQ ID NO: 328290 - DNA, 4749 bp, Artificial Sequence
  derived and/or modified sequence
atgggaagcaagcgcaggcgggcaacgtctccttcctcttctgtgagcggagacttcgacgatggccatcactctgtaagcacgcccggaccctcccgcaaaagacgtaggttgtccaacctgcctacagtggacccaatcgccgtgtgccacgaactttataacaccatccgggattataaggacgagcagggtcggctcctctgcgagttgtttattcgtgccccaaagaggcggaaccaaccagactactacgaagtggtctcacaaccgatcgacctcatgaaaattcagcagaagctaaaaatggaggagtacgatgacgtcaacctcctgaccgcggatttccaactcttgtttaataacgccaaaagctattacaagccggatagcccagaatataaggccgcttgtaaactatgggacctctatctccggaccaggaacgagttcgttcagaagggtgaagccgatgacgaggacgacgatgaggatggccaggataatcagggcacagtcactgaaggcagttcaccagcctaccttaaggaaatccttgaacagctgctagaggcaatagttgtcgcaactaatccctctggcaggctgatctctgaactgtttcagaagctgcccagcaaagtccaatacccggactactacgctattatcaaggaaccgatcgacctgaaaaccatagcccagcgcatccagaatggttcctacaagagcatccacgcaatggctaaagatattgatcttctggctaaaaatgctaagacatacaacgagcccggatctcaagtattcaaagatgccaacagtatcaagaagattttttatatgaaaaaggccgaaatcgaacaccatgagatggcaaagagtagcctacgaatgcggacaccctcgaatcttgctgccgctcgcttaacgggcccatcacattctaaaggatccttgggcgaagagaggaaccctacttctaagtattaccgcaataagagggccgtgcaggggggtcgactgtccgccataacgatggctctgcagtacggcagtgagtctgaggaggatgctgctctcgcggctgcaaggtacgaagaaggggaatccgaggcagaatccattaccagcttcatggacgtctcaaacccattttaccaactgtacgacacagtgaggagctgtcgcaacaatcaaggacaactaattgcggaaccattttatcacttgccttcgaagaagaagtatcccgactactatcagcagattaagatgcctatcagcttacaacaaattcgcactaagttgaaaaatcaggaatacgaaactttagaccatctggaatgtgatctaaacctgatgtttgaaaatgctaaacgctacaatgtgcccaacagcgctatttataaacgggtgcttaaacttcagcaggttatgcaggcaaaaaagaaagagttggccaggcgcgacgacatcgaggacggcgattcaatgatatcctctgcgacaagcgacaccggatccgcaaagcgtaaatctaaaaagaatatccgcaaacagagaatgaagatactcttcaacgtcgtgctggaagcacgggagccgggtagtgggagacgcttgtgtgacttgtttatggtgaagccaagcaaaaaggactatccagactactataaaatcatcttggaaccgatggacctaaagattatcgagcacaacataagaaatgataagtatgcgggagaagagggtatgatcgaggatatgaagctaatgttccgaaatgccagacactataacgaagagggcagccaggtctacaacgacgcgcacatccttgagaagttattgaaggagaaacggaaggaactgggtccactgccagacgatgacgatatggctagcccaaaactgaaattgagccgcaagtctggcattagtcctaagaagtcgaaatatatgaccccaatgcagcagaaactcaatgaggtgtacgaggctgttaaaaattatactgacaagcgcggtaggcgtctaagcgcaatctttttgcgtttaccctcaagatctgaactgcctgattactatctcactatcaagaagcccatggatatggagaagatacggtcgcacatgatggccaacaagtatcaagacatcgactccatggtggaggacttcgtcatgatgttcaataatgcctgcacatacaacgaacccgagagccttatctataaggatgctttagtcctgcacaaggtgctcctagagacaagacgagatctcgaaggcgatgaagactctcatgtccccaacgtgaccctgctaatccaagaactgattcacaacctttttgtatccgtgatgagtcaccaagatgatgaaggccgatgttatagtgactctctagctgagatccctgcggtggatccgaatttccccaataagcccccattgactttcgatataatcagaaagaatgttgagaacaatagatacaggcgcttagatctctttcaggagcacatgttcgaggttctggagcgggctaggcggatgaacaggaccgactccgagatctatgaggatgcagttgagctacaacagttttttataaagatccgcgacgaactctgcaagaacggggaaatccttttatcccccgcactttcgtatacgacaaaacatctccataatgacgtcgagaaggagcggaaagaaaaactgcctaaagagattgaggaggacaagctgaagcgggaggaagagaagcgcgaggcggaaaaatcggaggactcgagtggcgcagcgggtctgtctggtctccaccgaacttattcccaagactgttcgttcaagaattccatgtaccacgtcggcgattacgtttacgttgagcccgctgaagccaatctgcaaccgcacattgtgtgcattgagagactgtgggaagattccgccggtgagaagtggctatatggatgctggttctacaggccaaatgaaacgttccacctagctacacgcaaatttcttgaaaaagaggtgtttaaatccgactattacaataaggtgcctgtgtctaagatcctgggtaagtgtgtggtgatgtttgtcaaggagtactttaaactgtgtcctgagaattttcgtgacgaggacgtgtttgtttgcgagtcaagatatagcgctaagactaaaagtttcaagaagatcaaactttggaccatgcctatttctagcgttagattcgtgccacgagatgtacccctgcccgtggtgagagtcgcctccgtgtttgccaatgctgataagggggacgatgagaaaaatactgataactccgaggactcacgagcagaggacaatttcaatttagagaaagaaaaagaggacgtgccggttgagatgagcaacggcgaacctggctgtcattactttgaacagctgcactacaatgacatgtggctgaaagtgggcgattgcgttttcatcaaatctcacgggcttgtaagacctcgcgtcggacgcattgagaaggtgtgggtgcgagacggcgctgcttatttctacgggcctatttttatacacccggaagaaaccgagcatgagcctacaaagatgttttataagaaagaggtcttcctttcaaacctagaggaaacttgtccgatgacatgtatcctgggcaagtgcgctgtactgtcttttaaagatttcctgtcctgccggccaaccgaaatccccgagaatgatattctgctgtgtgagtcccggtataacgagagcgacaagcagatgaaaaagttcaaaggtttgaaacggttctcactgtctgcaaaggtcgtcgacgacgaaatctactactttagaaagcctattgttcctcagaaagaaccaagccccctattggaaaagaagatacagctcctggaagcaaaattcgccgagttggaaggtggcgacgacgatatcgaagagatgggcgaggaggacagcgaagtgattgagccgccatctcttcctcagttacagactcccttggcatctgagctggacctgatgccatatactcctccccagtctacaccaaaaagcgccaagggtagcgccaaaaaagaaggctcaaaaaggaaaattaacatgtccggatatatcttgttcagcagcgaaatgagagccgtcattaaggcacaacaccccgattactctttcggcgagctgagtagattagtcggtacggaatggagaaacctggagacagccaaaaaagctgaatatgaaggggttatgaatcagggggtcgctcccatggtcgggacaccagcacccggtggctcaccttacgggcagcaggtaggggtgcttggtccacctggacagcaagcacctcctccataccccggaccccaccccgctgggccaccagtgattcagcagcctaccacaccgatgtttgtggcaccaccacctaagacccagaggctgttgcatagcgaagcatatctgaagtatatcgagggcctgtccgccgaatcaaatagcatctcaaaatgggatcagacactggccgctcggagacgcgacgttcacctttcaaaggagcaggaatctagactgcccagccactggttgaagtcgaagggtgcccatacaacgatggctgatgctctctggcgacttcgtgacttgatgctgcgagacacccttaacatacgccaggcctacaatctggaaaatgtatag

SEQ ID NO: 328291 - DNA, 4749 bp, Artificial Sequence
  derived and/or modified sequence
atgggcagcaagagaagaagagccaccagccccagcagcagcgtgagcggcgacttcgacgacggccaccacagcgtgagcacccccggccccagcagaaagagaagaagactgagcaacctgcccaccgtggaccccatcgccgtgtgccacgagctgtacaacaccatcagagactacaaggacgagcagggcagactgctgtgcgagctgttcatcagagcccccaagagaagaaaccagcccgactactacgaggtggtgagccagcccatcgacctgatgaagatccagcagaagctgaagatggaggagtacgacgacgtgaacctgctgaccgccgacttccagctgctgttcaacaacgccaagagctactacaagcccgacagccccgagtacaaggccgcctgcaagctgtgggacctgtacctgagaaccagaaacgagttcgtgcagaagggcgaggccgacgacgaggacgacgacgaggacggccaggacaaccagggcaccgtgaccgagggcagcagccccgcctacctgaaggagatcctggagcagctgctggaggccatcgtggtggccaccaaccccagcggcagactgatcagcgagctgttccagaagctgcccagcaaggtgcagtaccccgactactacgccatcatcaaggagcccatcgacctgaagaccatcgcccagagaatccagaacggcagctacaagagcatccacgccatggccaaggacatcgacctgctggccaagaacgccaagacctacaacgagcccggcagccaggtgttcaaggacgccaacagcatcaagaagatcttctacatgaagaaggccgagatcgagcaccacgagatggccaagagcagcctgagaatgagaacccccagcaacctggccgccgccagactgaccggccccagccacagcaagggcagcctgggcgaggagagaaaccccaccagcaagtactacagaaacaagagagccgtgcagggcggcagactgagcgccatcaccatggccctgcagtacggcagcgagagcgaggaggacgccgccctggccgccgccagatacgaggagggcgagagcgaggccgagagcatcaccagcttcatggacgtgagcaaccccttctaccagctgtacgacaccgtgagaagctgcagaaacaaccagggccagctgatcgccgagcccttctaccacctgcccagcaagaagaagtaccccgactactaccagcagatcaagatgcccatcagcctgcagcagatcagaaccaagctgaagaaccaggagtacgagaccctggaccacctggagtgcgacctgaacctgatgttcgagaacgccaagagatacaacgtgcccaacagcgccatctacaagagagtgctgaagctgcagcaggtgatgcaggccaagaagaaggagctggccagaagagacgacatcgaggacggcgacagcatgatcagcagcgccaccagcgacaccggcagcgccaagagaaagagcaagaagaacatcagaaagcagagaatgaagatcctgttcaacgtggtgctggaggccagagagcccggcagcggcagaagactgtgcgacctgttcatggtgaagcccagcaagaaggactaccccgactactacaagatcatcctggagcccatggacctgaagatcatcgagcacaacatcagaaacgacaagtacgccggcgaggagggcatgatcgaggacatgaagctgatgttcagaaacgccagacactacaacgaggagggcagccaggtgtacaacgacgcccacatcctggagaagctgctgaaggagaagagaaaggagctgggccccctgcccgacgacgacgacatggccagccccaagctgaagctgagcagaaagagcggcatcagccccaagaagagcaagtacatgacccccatgcagcagaagctgaacgaggtgtacgaggccgtgaagaactacaccgacaagagaggcagaagactgagcgccatcttcctgagactgcccagcagaagcgagctgcccgactactacctgaccatcaagaagcccatggacatggagaagatcagaagccacatgatggccaacaagtaccaggacatcgacagcatggtggaggacttcgtgatgatgttcaacaacgcctgcacctacaacgagcccgagagcctgatctacaaggacgccctggtgctgcacaaggtgctgctggagaccagaagagacctggagggcgacgaggacagccacgtgcccaacgtgaccctgctgatccaggagctgatccacaacctgttcgtgagcgtgatgagccaccaggacgacgagggcagatgctacagcgacagcctggccgagatccccgccgtggaccccaacttccccaacaagccccccctgaccttcgacatcatcagaaagaacgtggagaacaacagatacagaagactggacctgttccaggagcacatgttcgaggtgctggagagagccagaagaatgaacagaaccgacagcgagatctacgaggacgccgtggagctgcagcagttcttcatcaagatcagagacgagctgtgcaagaacggcgagatcctgctgagccccgccctgagctacaccaccaagcacctgcacaacgacgtggagaaggagagaaaggagaagctgcccaaggagatcgaggaggacaagctgaagagagaggaggagaagagagaggccgagaagagcgaggacagcagcggcgccgccggcctgagcggcctgcacagaacctacagccaggactgcagcttcaagaacagcatgtaccacgtgggcgactacgtgtacgtggagcccgccgaggccaacctgcagccccacatcgtgtgcatcgagagactgtgggaggacagcgccggcgagaagtggctgtacggctgctggttctacagacccaacgagaccttccacctggccaccagaaagttcctggagaaggaggtgttcaagagcgactactacaacaaggtgcccgtgagcaagatcctgggcaagtgcgtggtgatgttcgtgaaggagtacttcaagctgtgccccgagaacttcagagacgaggacgtgttcgtgtgcgagagcagatacagcgccaagaccaagagcttcaagaagatcaagctgtggaccatgcccatcagcagcgtgagattcgtgcccagagacgtgcccctgcccgtggtgagagtggccagcgtgttcgccaacgccgacaagggcgacgacgagaagaacaccgacaacagcgaggacagcagagccgaggacaacttcaacctggagaaggagaaggaggacgtgcccgtggagatgagcaacggcgagcccggctgccactacttcgagcagctgcactacaacgacatgtggctgaaggtgggcgactgcgtgttcatcaagagccacggcctggtgagacccagagtgggcagaatcgagaaggtgtgggtgagagacggcgccgcctacttctacggccccatcttcatccaccccgaggagaccgagcacgagcccaccaagatgttctacaagaaggaggtgttcctgagcaacctggaggagacctgccccatgacctgcatcctgggcaagtgcgccgtgctgagcttcaaggacttcctgagctgcagacccaccgagatccccgagaacgacatcctgctgtgcgagagcagatacaacgagagcgacaagcagatgaagaagttcaagggcctgaagagattcagcctgagcgccaaggtggtggacgacgagatctactacttcagaaagcccatcgtgccccagaaggagcccagccccctgctggagaagaagatccagctgctggaggccaagttcgccgagctggagggcggcgacgacgacatcgaggagatgggcgaggaggacagcgaggtgatcgagccccccagcctgccccagctgcagacccccctggccagcgagctggacctgatgccctacacccccccccagagcacccccaagagcgccaagggcagcgccaagaaggagggcagcaagagaaagatcaacatgagcggctacatcctgttcagcagcgagatgagagccgtgatcaaggcccagcaccccgactacagcttcggcgagctgagcagactggtgggcaccgagtggagaaacctggagaccgccaagaaggccgagtacgagggcgtgatgaaccagggcgtggcccccatggtgggcacccccgcccccggcggcagcccctacggccagcaggtgggcgtgctgggcccccccggccagcaggccccccccccctaccccggcccccaccccgccggcccccccgtgatccagcagcccaccacccccatgttcgtggcccccccccccaagacccagagactgctgcacagcgaggcctacctgaagtacatcgagggcctgagcgccgagagcaacagcatcagcaagtgggaccagaccctggccgccagaagaagagacgtgcacctgagcaaggagcaggagagcagactgcccagccactggctgaagagcaagggcgcccacaccaccatggccgacgccctgtggagactgagagacctgatgctgagagacaccctgaacatcagacaggcctacaacctggagaacgtgtag

SEQ ID NO: 328292 - protein, 162 aa, Artificial Sequence
  derived and/or modified sequence
MSIAIPLGVTTSDTSYSDMAAGSDPESVEASPAVNEKSVYSTHNYGTTQRHGCRGLPYATIIPRSDLNGLPSPVEERCGDSPNSEGETVPTWCPCGLSQDGFLLNCDKCRGMSRGKVIRLHRRKQDNISGGDSSATESWDEELSPSTVLYTATQHTPTSITL

SEQ ID NO: 328293 - DNA, 4786 bp, Artificial Sequence
  derived and/or modified sequence
ggcagtaccagggattagggtctgggctggaaaaatcctggtgttttgaatatgttcaggtccagttcagactcttgatcccacagccacttcttgagtgagccctgaatctgtggaggctagtccagcagttaatgagaagagcgtgtattccactcataattatgggaccactcagaggcatgggtgtcgaggactgccttatgctacgatcatccctcgttctgacctgaatggcctgccgtcgcctgtagaggaacgctgtggagacagcccgaactctgaaggagaaactgtacctacctggtgtccttgtggtctttctcaggatggcttccttctcaactgtgacaagtgcaggggaatgagcagggggaaggttattagacttcatcggcggaagcaggacaacatatcaggtggggatagcagtgcaacagaaagctgggatgaggagctttctccttccactgtgttgtatacagcaacacagcacacacctacaagcatcaccttaactgttagaagaaccaaacccaagaagcggaaaaagagtccagaaaagggtcgtgcagcaccaaagacgaagaaaatcaaggcatttcgagagggatcccggaagtccttgcggatgaagaattctccctctgaagcacagaatttagatgagaatacaactgagggctgggaaaatcggataagactatggactgaccagtatgaagaagctttcactaatcagtacagtgcagatgtacagaacgcgcttgaacaacacctacattctagcaaggaatttgtgggcaaacctactattttagacactattaataagactgaattggcctgtaataacacagttattggttcccaaatgcagttacagctgggaagagtcactcgtgttcaaaagcaccggaagatcctgagggctgcaagagatttggctttggacactcttataatagagtatcgtgggaaagtcatgttacgacagcaatttgaggtcaatgggcatttcttcaaaaaaccatacccctttgtgctcttctactcaaaattcaatggtgtagagatgtgtgtggatgcccgtactttcggtaatgatgctcggttcatcagaagatcatgtacaccaaatgcagaggtgcgacacatgattgcagatgggatgattcacctgtgcatctatgctgtgtctgccatcaccaaggatgctgaggtcaccatagcatttgattatgagtatagtaactgtaattataaagtggactgtgcctgtcacaagggaaaccggaattgtcctatacaaaaaaggaatcctaatgctacagaactgccactcctaccacctcctccaagcctacccaccattggagcagagactagacgtagaaaagcacgacggaaagagctagagatggagcagcagaatgaggcttcagaggagaataatgaccagcaatcacaagaagttccagaaaaagtaactgtatccagtgatcatgaggaagtagacaatccagaagaaaaaccagaagaagagaaagaagaggttatagatgaccaggagaacctagctcatagcaggaggaccagggaagatagaaaggtagaagccatcatgcatgcttttgaaaacttagagaaaagaaagaagcggcgggatcagcccttggaacagagcaactctgatgtagagattactacaaccacctcagagactcctgttggtgaagagacaaaaactgaagcccctgaatctgaagttagcaactctgtttcaaatgttaccatcccaagcaccccacagagtgttggtgtgaatacccggaggtcttcccaagcaggggatattgctgcagaaaaactagtccccaagccacctccagcaaagccttctaggccccggccgaagagtcgaatttctcggtacaggaccagttcagcccaaagactaaagcgtcagaagcaggccaatgcacagcaggcagaattgtcacaagctgccttggaagagggaggaagtaacagtttagtaactcctactgaagctggaagtctagacagttcaggagaaaacaggccattaacagggtctgacccaactgtggtgtcaattactggatcccatgtcaaccgtgctgcatctaaataccccaaaaccaaaaagtatctagttacagaatggttgaatgacaaagcagagaagcaagagtgccctgttgagtgccctttacgtatcacaacggatccaactgtactggcaacgaccctaaacatgttaccaggtcttatccattccccgttaatttgcaccacccccaaacactacattcgctttggctcaccctttatccctgagagacgtcgaaggccccttctgcctgatggcacattcagctcctgtaagaagcgctggataaaacaagccttagaagaagggatgactcaaacatcatctgtaccccaagagactagaactcagcacctataccaaagcaatgagaatagtagctcttctagtatctgcaaagacaatgcagacttgttgagcccattaaagaaatggaagtctcgctatctgatggagcagaatgtcaccaagttacttcggcctctgtctccagtcacaccaccccctcccaattcaggctcaaagagtccccagctggccacacctggctcatctcacccaggagaagaggagtgtcgaaatggatacagcctcatgttttcaccagtcacatctcttactactgctagtcgctgcaacactcctctacagtttgagctttgtcaccgaaaagacctggatttggcaaaagtaggataccttgactccaacactaacagctgtgctgatagaccttccctactcaactcaggtcattctgacctggctcctcatccctccctcggacccacttctgagactggtttcccaagcagaagtggagatggacatcagaccctcgtgagaaactcagaccaggcatttcggacagagttcaacttgatgtatgcctactcccctttgaatgctatgcctcgagcagatggactgtatcgaggatctcctctagtgggggataggaagcctttacatttggatgggggatattgttcccctgcagaaggattttccagcagatatgaacatggcttaatgaaagacctctctcgtggatccttgtcacctggtggtgaaagggcctgtgaaggagtcccatctgccccccagaacccaccacagaggaaaaaagtatccctgctggagtaccgaaaacggaaacaagaagctaaggaaaattctgctggtgggggaggtgactctgcacagagcaaaagcaagtctgcaggagctgggcaaggcagcagtaactccgtttccgacactggtgcccatggtgtgcagggatcctcagcccgaactccatcttcccctcacaaaaaattctccccatctcattcctctatgtcccatttggaggcggtaagcccatcagattccagaggcacttcttcatctcactgcagacctcaagagaatatcagcagtaggtggatggttcccacatcagtagaacgactccgagaaggagggagcatccccaaggtcctccgaagcagcgtgagggtggcccaaaagggagagccctctcccacatgggagagtaacatcacagagaaagactcagaccctgcagatggagaaggcccagagacattaagctcagcactctctaaaggagcaacagtttacagcccttccagatacagctaccagctcctgcagtgtgatagtcctcggacagaatcacaaagcctccttcagcagagttcctcccccttcagaggacatcctacacagtctccaggatacagttatcgaactactgcactgagacctggaaaccccccctctcacggttcttcagaatcatccctctcttccacgtcctattccagccccgcccaccctgtgtccacagactcgttggccccatttacggggacaccagggtattttagcagccagccacattctggaaacagcactggcagcaatcttccaaggaggagctgcccttctagtgctgctagccctaccctgcagggaccctcagactcgccaacctcagattcagtttctcagtccagcacaggaactctgagttccacctcctttcctcagaactctaggtcgtcattgccatcagacttacggactatcagtctgcccagtgctgggcagtcagctgtctaccaggcctccagggtatctgcggtttccaattcacagcactacccacaccgtgggagtgggggtgtgcaccagtaccgactccagccactgcaagggtcaggagtcaagactcagacgggactttcctagggcttctggatttgggcaaacagaactgaatgagcccatagctgcttccttccagctgcctctggaacctaggccgagcatattgctgaggaacggggggtacaaggtgccagaggattgggtctggtggacaagaaacaagacttgtggtcacaattggcctctggccttggagaaagctgtaaatcttgtctgaagcagagactataaagaagtttctccctgctgtcaagggtacattgttgacaagcaaatggtgtttcggttagtaacggttctaagtgcaatgagttgtgttgaagcctccgtctcccatccttgcctgtagcccgtagtcacttgtgcagtgaggacatctttttaaatttaaaaaaaaaaaaaaaaaaa

SEQ ID NO: 328294 - DNA, 6866 bp, Artificial Sequence
  derived and/or modified sequence
gctcagagactcacgcagccccagtcccgccagtccgccaacacagtagtgccggcccccctctttccctggccctgccccccctccccgcctttggctcgctccgcctttctgccccccacccccacctcacgggtacgggccattcccggccaggaaacgccgtggcgccgcgttgggcctaactcgagtcctgccgcctcccgggagtgccgtgcgccgcagcccgggcccaggccccggcagcgcctgggacaaggtcttcagaactactagcagataatttggggggacttcatattcagaagtctatataaaggattcctcatgtccataacatgttggatgaggctctgcagctcacccccactctcagagtggtcagtctccattaattggaccccgtgatttccaatctctgctgtgttggacgtcatgagcattgcaatccctctgggagtcaccacatcagatacatcctactcagatatggctgctggatcagaccctgaatctgtggaggctagtccagcagttaatgagaagagcgtgtattccactcataattatgggaccactcagaggcatgggtgtcgaggactgccttatgctacgatcatccctcgttctgacctgaatggcctgccgtcgcctgtagaggaacgctgtggagacagcccgaactctgaaggagaaactgtacctacctggtgtccttgtggtctttctcaggatggcttccttctcaactgtgacaagtgcaggggaatgagcagggggaaggttattagacttcatcggcggaagcaggacaacatatcaggtggggatagcagtgcaacagaaagctgggatgaggagctttctccttccactgtgttgtatacagcaacacagcacacacctacaagcatcaccttaactgttagaagaaccaaacccaagaagcggaaaaagagtccagaaaagggtcgtgcagcaccaaagacgaagaaaatcaaggcatttcgagagggatcccggaagtccttgcggatgaagaattctccctctgaagcacagaatttagatgagaatacaactgagggctgggaaaatcggataagactatggactgaccagtatgaagaagctttcactaatcagtacagtgcagatgtacagaacgcgcttgaacaacacctacattctagcaaggaatttgtgggcaaacctactattttagacactattaataagactgaattggcctgtaataacacagttattggttcccaaatgcagttacagctgggaagagtcactcgtgttcaaaagcaccggaagatcctgagggctgcaagagatttggctttggacactcttataatagagtatcgtgggaaagtcatgttacgacagcaatttgaggtcaatgggcatttcttcaaaaaaccatacccctttgtgctcttctactcaaaattcaatggtgtagagatgtgtgtggatgcccgtactttcggtaatgatgctcggttcatcagaagatcatgtacaccaaatgcagaggtgcgacacatgattgcagatgggatgattcacctgtgcatctatgctgtgtctgccatcaccaaggatgctgaggtcaccatagcatttgattatgagtatagtaactgtaattataaagtggactgtgcctgtcacaagggaaaccggaattgtcctatacaaaaaaggaatcctaatgctacagaactgccactcctaccacctcctccaagcctacccaccattggagcagagactagacgtagaaaagcacgacggaaagagctagagatggagcagcagaatgaggcttcagaggagaataatgaccagcaatcacaagaagttccagaaaaagtaactgtatccagtgatcatgaggaagtagacaatccagaagaaaaaccagaagaagagaaagaagaggttatagatgaccaggagaacctagctcatagcaggaggaccagggaagatagaaaggtagaagccatcatgcatgcttttgaaaacttagagaaaagaaagaagcggcgggatcagcccttggaacagagcaactctgatgtagagattactacaaccacctcagagactcctgttggtgaagagacaaaaactgaagcccctgaatctgaagttagcaactctgtttcaaatgttaccatcccaagcaccccacagagtgttggtgtgaatacccggaggtcttcccaagcaggggatattgctgcagaaaaactagtccccaagccacctccagcaaagccttctaggccccggccgaagagtcgaatttctcggtacaggaccagttcagcccaaagactaaagcgtcagaagcaggccaatgcacagcaggcagaattgtcacaagctgccttggaagagggaggaagtaacagtttagtaactcctactgaagctggaagtctagacagttcaggagaaaacaggccattaacagggtctgacccaactgtggtgtcaattactggatcccatgtcaaccgtgctgcatctaaataccccaaaaccaaaaagtatctagttacagaatggttgaatgacaaagcagagaagcaagagtgccctgttgagtgccctttacgtatcacaacggatccaactgtactggcaacgaccctaaacatgttaccaggtcttatccattccccgttaatttgcaccacccccaaacactacattcgctttggctcaccctttatccctgagagacgtcgaaggccccttctgcctgatggcacattcagctcctgtaagaagcgctggataaaacaagccttagaagaagggatgactcaaacatcatctgtaccccaagagactagaactcagcacctataccaaagcaatgagaatagtagctcttctagtatctgcaaagacaatgcagacttgttgagcccattaaagaaatggaagtctcgctatctgatggagcagaatgtcaccaagttacttcggcctctgtctccagtcacaccaccccctcccaattcaggctcaaagagtccccagctggccacacctggctcatctcacccaggagaagaggagtgtcgaaatggatacagcctcatgttttcaccagtcacatctcttactactgctagtcgctgcaacactcctctacagtttgagctttgtcaccgaaaagacctggatttggcaaaagtaggataccttgactccaacactaacagctgtgctgatagaccttccctactcaactcaggtcattctgacctggctcctcatccctccctcggacccacttctgagactggtttcccaagcagaagtggagatggacatcagaccctcgtgagaaactcagaccaggcatttcggacagagttcaacttgatgtatgcctactcccctttgaatgctatgcctcgagcagatggactgtatcgaggatctcctctagtgggggataggaagcctttacatttggatgggggatattgttcccctgcagaaggattttccagcagatatgaacatggcttaatgaaagacctctctcgtggatccttgtcacctggtggtgaaagggcctgtgaaggagtcccatctgccccccagaacccaccacagaggaaaaaagtatccctgctggagtaccgaaaacggaaacaagaagctaaggaaaattctgctggtgggggaggtgactctgcacagagcaaaagcaagtctgcaggagctgggcaaggcagcagtaactccgtttccgacactggtgcccatggtgtgcagggatcctcagcccgaactccatcttcccctcacaaaaaattctccccatctcattcctctatgtcccatttggaggcggtaagcccatcagattccagaggcacttcttcatctcactgcagacctcaagagaatatcagcagtaggtggatggttcccacatcagtagaacgactccgagaaggagggagcatccccaaggtcctccgaagcagcgtgagggtggcccaaaagggagagccctctcccacatgggagagtaacatcacagagaaagactcagaccctgcagatggagaaggcccagagacattaagctcagcactctctaaaggagcaacagtttacagcccttccagatacagctaccagctcctgcagtgtgatagtcctcggacagaatcacaaagcctccttcagcagagttcctcccccttcagaggacatcctacacagtctccaggatacagttatcgaactactgcactgagacctggaaaccccccctctcacggttcttcagaatcatccctctcttccacgtcctattccagccccgcccaccctgtgtccacagactcgttggccccatttacggggacaccagggtattttagcagccagccacattctggaaacagcactggcagcaatcttccaaggaggagctgcccttctagtgctgctagccctaccctgcagggaccctcagactcgccaacctcagattcagtttctcagtccagcacaggaactctgagttccacctcctttcctcagaactctaggtcgtcattgccatcagacttacggactatcagtctgcccagtgctgggcagtcagctgtctaccaggcctccagggtatctgcggtttccaattcacagcactacccacaccgtgggagtgggggtgtgcaccagtaccgactccagccactgcaagggtcaggagtcaagactcagacgggactttcctagggcttctggatttgggcaaacagaactgaatgagcccatagctgcttccttccagctgcctctggaacctaggccgagcatattgctgaggaacggggggtacaaggtgccagaggattgggtctggtggacaagaaacaagacttgtggtcacaattggcctctggccttggagaaagctgtaaatcttgtctgaagcagagactataaagaagtttctccctgctgtcaagggtacattgttgacaagcaaatggtgtttcggttagtaacggttctaagtgcaatgagttgtgttgaagcctccgtctcccatccttgcctgtagcccgtagtcacttgtgcagtgaggacatctttttaaatttaaaaaaaaaaaaaaaaaaagttttcaaaggaaaaaaagttaaaagagccaatctcaaagccccaagccatctgagtactgttagggttttatgcacttaagaaaaaaggtaggtatgtaaatgttcatcctaagacaaccattccaaaagcaggtatctggccaatgtgtgtccaccaagaatactgtttatctttgtcttaagatcaccaagaaataggcaaggatagtaaagcttggaacctgcaccaactggagggtgcctggctctttgaagaaaagctcatggtcagctcttgattattcgggagcagattatttgagtagattgtctgagcctccaactgttaccatcctactcccccttcccaagctatttcacagctcagtaacccatgaagtaagtagacaagaaaaggaggaatgagacatgatataggccaattgcattgctacttaccagcttttggcaataaatttcattaggaaggataccgagtggtttgggaatgcttcgaattttattttttctactcccaattaatcaggagttgatgatcccatgagcaggaccgcctccatgattggggagcatgcacttgtgactgcagggtaagagtgggaagataggtttgtggagtggcaccgacaggactgtgattgtgtgtgggcctgccccacatttctctgggggatgcttatgtgagagtgggcccagtgaaagagttaccaagccacccacacccctaacactgttctggatgagagatgagagcagaccggcttctccccatcagtgcattgtgcctgttgtacacccctggaggagccctggagccagcccaggtggggtacacaatctttttaaattccatatggttgccagcttatttctttcacttgtttactgtaatatctggcgtgtttttatttatctaattttgtattcagttataaccatggtaggggtagtgaatatatgacaggtgtaatccctggtgctgcagtggaccttcttttcttttggacaagataatactgtgagtttccctccttccttccctctaatttgttttccttttttccccagcctcttgcatccccttcttttctaccctgtcctacaactatcatatgcacagtcttctctctttgtgtgtgactgttacaaaatttcacttttcaaaatcgaaatcaggtgtttgctcaaatgaggggagattttttttttttttttttttttaaatgctgagacctcagcagagtacttttctttttgttgtttcccccacaaacccatcagtctgggagagcattgggagtggaaatcatgttgcctgggatgctggtttctttgtatattatataaaacgtatgtaaatgtctctccatttgggctggggtttgcattctccccttggctatttaaccaaggggagaggccagcgggcaggcggccctcaccctgcctggcacgtgcagagaccccagccactctgtgtgggcagggtgctgtcaagaccagacctcttgggggggtaggggcgggggggtggggggaactcttggaagggaagaagtatcacttctttctcaagtggagtgtttacaccttgctgtaacatttgaactttcacaagagatgtaataattttgataataaaattcttaaccataataatcataaagttgagaa

SEQ ID NO: 328295 - protein, 126 aa, Artificial Sequence
  derived and/or modified sequence
MWCLLRGLGRPGALARGALGQQQSLGARALASAGSESRDEYSYVVVGAGSAGCVLAGRLTEDPAERVLLLEAGPKDVLAGSKRLSWKIHMPAALVANLCDDRYNWCYHTEVQRGLDGRVLYWPRGR

SEQ ID NO: 328296 - DNA, 1897 bp, Artificial Sequence
  derived and/or modified sequence
ctcaggctcggcgtccccggccgtggctgagctctgccagaacaccccggagacctttttggaggcctccaagctgctgctcacctatgctgacaacatcctcagaaaccctaatgatgaaaaatatagatccatccggattggaaacacagccttttctactagactcttgcctgtcagaggagctgttgaatgtttatttgaaatgggctttgaagagggagaaacacatctcatctttcctaaaaaagcttcagtggagcagctgcaaaaaattcgtgacctgattgccatagagagaagtagcagactggatggctcaaataagagccacaaagtaaagtcatctcagcaacctgcagccagtacccagcttcctacaacaccatcttcaaatcccagtgggttaaaccagcacacaaggaaccgtcaagggcagtcatcagatccaccatctgcttcaacggttgctgctgactcagccattctagaagttcttcagtccaacattcagcatgtgctggtctatgaaaatcctgctcttcaggagaaagcgttggcttgtattccggtccaagaactaaaaaggaaatcacaagaaaagttatcgagagctagaaaattggataaagatataataaccctgagaaacttttggaaacaagatgtggacggtgtggcgagtgggccaattgttttacactgtgctgccgagctgtagggtttgaagctcgctatgtttgggattacacagaccatgtctggacagaagtctattctccttctcagcagcggtggctgcactgtgatgcatgtgaagatgtctgtgacaagccactcctttatgaaataggatggggcaagaagctttcctatgtcatagcattttcaaaagatgaggtagttgatgtcacttggcgatattcctgcaaacatgaagaggtgattgccagaagaactaaggttaaagaagcattacttcgagacactattaatgggcttaataagcagaggcaactgtttttgtcagaaaacagaaggaaagaacttctccagaggataattgtggagcttgttgaatttatatctcccaaaacccctaaacctggagaacttgggggaagaatatctgggtcagtggcttggagagtagcccgaggtgaaatgggtctacagagaaaagaaaccttgtttattccctgtgaaaatgagaagatttctaaacagctccacctttgttacaatattgtgaaagatcgttatgttcgagtttcaaataacaatcaaaccatttctggatgggagaatggcgtgtggaaaatggaatctatattcagaaaagttgaaacagactggcacatggtatatttggcccgaaaggaaggatcatcttttgcttatatttcctggaagtttgagtgtgggtcagttggcctaaaagtagatagcatttctattagaacaagtagtcaaacttttcagactggaacagtagaatggaaattgcgatctgatacagcacaagtagaactgacaggcgataacagtcttcactcctatgctgatttttctggtgccactgaagttattttggaagcagaattaagcagaggagatggtgatgtcgcttggcaacacacccagctgtttagacaaagcttaaatgaccatgaagaaaattgtttggagataattataaaattcagtgacctttgagaacctgaacattatagaaaagctggcaataatcaaggacttactgaagtagtctgttggttcagtgcatgcttagttggcagttaccaccctgtgctagcatatttcttttgctagctatccatcatgtaaccctcatgaaaattatctttatacgtggactataataaaatattgaatt

SEQ ID NO: 328297 - DNA, 1777 bp, Artificial Sequence
  derived and/or modified sequence
aaaatatagatccatccggattggaaacacagccttttctactagactcttgcctgtcagaggagctgttgaatgtttatttgaaatgggctttgaagagggagaaacacatctcatctttcctaaaaaagcttcagtggagcagctgcaaaaaattcgtgacctgattgccatagagagaagtagcagactggatggctcaaataagagccacaaagtaaagtcatctcagcaacctgcagccagtacccagcttcctacaacaccatcttcaaatcccagtgggttaaaccagcacacaaggaaccgtcaagggcagtcatcagatccaccatctgcttcaacggttgctgctgactcagccattctagaagttcttcagtccaacattcagcatgtgctggtctatgaaaatcctgctcttcaggagaaagcgttggcttgtattccggtccaagaactaaaaaggaaatcacaagaaaagttatcgagagctagaaaattggataaagatataataaccctgagaaacttttggaaacaagatgtggacggtgtggcgagtgggccaattgttttacactgtgctgccgagctgtagggtttgaagctcgctatgtttgggattacacagaccatgtctggacagaagtctattctccttctcagcagcggtggctgcactgtgatgcatgtgaagatgtctgtgacaagccactcctttatgaaataggatggggcaagaagctttcctatgtcatagcattttcaaaagatgaggtagttgatgtcacttggcgatattcctgcaaacatgaagaggtgattgccagaagaactaaggttaaagaagcattacttcgagacactattaatgggcttaataagcagaggcaactgtttttgtcagaaaacagaaggaaagaacttctccagaggataattgtggagcttgttgaatttatatctcccaaaacccctaaacctggagaacttgggggaagaatatctgggtcagtggcttggagagtagcccgaggtgaaatgggtctacagagaaaagaaaccttgtttattccctgtgaaaatgagaagatttctaaacagctccacctttgttacaatattgtgaaagatcgttatgttcgagtttcaaataacaatcaaaccatttctggatgggagaatggcgtgtggaaaatggaatctatattcagaaaagttgaaacagactggcacatggtatatttggcccgaaaggaaggatcatcttttgcttatatttcctggaagtttgagtgtgggtcagttggcctaaaagtagatagcatttctattagaacaagtagtcaaacttttcagactggaacagtagaatggaaattgcgatctgatacagcacaagtagaactgacaggcgataacagtcttcactcctatgctgatttttctggtgccactgaagttattttggaagcagaattaagcagaggagatggtgatgtcgcttggcaacacacccagctgtttagacaaagcttaaatgaccatgaagaaaattgtttggagataattataaaattcagtgacctttgagaacctgaacattatagaaaagctggcaataatcaaggacttactgaagtagtctgttggttcagtgcatgcttagttggcagttaccaccctgtgctagcatatttcttttgctagctatccatcatgtaaccctcatgaaaattatctttatacgtggactataataaaatattgaatt

SEQ ID NO: 328298 - DNA, 723 bp, Artificial Sequence
  derived and/or modified sequence
taatcagggtcagcgtctcctgctgtggcggaattatgtcagaacacccctgaaacctttctggaagcctcaaaattgctacttacctatgcggataacattttacggaaccctaatgacgaaaaatatcgaagtatacggattggtaacacagccttctcgactagattactgccggttcgcggggctgtggagtgtctgtttgagatggggttcgaagagggcgagacccaccttatttttcccaaaaaagcgtctgtagagcagttgcaaaaaatcagggatctgattgcaatagaacgcagtagtcgactcgacgggagtaataaatctcacaaggtgaaaagttctcagcagccggccgcctctactcagctaccaacaacccctagcagtaatccctccggtctgaaccagcacacccgtaaccggcaaggccagagcagcgatccccccagcgctagtaccgttgcggcagatagtgcgatcctagaagttcttcagagtaacattcagcacgtgctcgtttacgaaaaccctgccctgcaggagaaagccttagcctgcattccagttcaggaactcaaacgtaaaagtcaggagaagctgtcaagagcgcgtaaacttgacaaggatattattacactgcgcaatttctggaagcaggatgtggatggcgtggcctccgggcctattgtgctgcattgtgctgctgagctttag

SEQ ID NO: 328299 - DNA, 516 bp, Artificial Sequence
  derived and/or modified sequence
atggggttcgaagaaggagaaacgcatttgatttttccaaagaaggcctccgtggagcagttgcagaagatcagggacctcatagcaattgagcggtcgagccggttggatggatcaaacaagagtcacaaggtgaaatcatcacagcagccggctgcttcaacccagttgccaactactccatccagtaacccctccgggttaaaccagcatactcgcaatcggcagggccagtcctctgatcccccgtccgcttctactgtggccgctgactccgccatcctagaggtcctgcagtccaatattcagcacgtgctggtatatgaaaatccggctctgcaggaaaaagcgttggcgtgcatacccgtgcaggagctgaagaggaagagccaggagaagcttagcagggcacgcaaacttgataaggacatcatcactctgaggaacttctggaagcaggatgtggatggggtggccagtggacccatcgttctccattgtgcagccgagctgtag

SEQ ID NO: 328300 - DNA, 723 bp, Artificial Sequence
  derived and/or modified sequence
tgaagcggcagcgccagccctgctgtggccgagctgtgccagaacaccccagagaccttcctggaggccagcaagctgctgctgacctatgctgacaacatcctgaggaaccccaatgatgagaagtaccgcagcatccgcatcggcaacacagccttcagcacccggctgctgcctgtgagaggagctgtggagtgcctgtttgagatgggctttgaggagggggagacccacctgatcttccccaagaaggcctctgtggagcagctgcagaagatccgggacctgattgccatcgagaggagcagccggctggatggcagcaacaagagccacaaggtgaagagcagccagcagcctgctgccagcacccagctgcccaccacccccagcagcaaccccagcggcctgaaccagcacaccaggaaccggcagggccagagcagtgaccccccatctgccagcacagtggccgctgacagcgccatcctggaggtgctgcagagcaacatccagcacgtgctggtgtatgagaacccagccctgcaggagaaggccctggcctgcatccctgtgcaggagctgaagaggaagagccaggagaagctgagccgggccaggaagctggacaaggacatcatcaccctgaggaacttctggaagcaggatgtggatggagtggccagcggccccatcgtgctgcactgtgccgctgagctgtag

SEQ ID NO: 328301 - DNA, 516 bp, Artificial Sequence
  derived and/or modified sequence
atgggctttgaggagggggagacccacctgatcttccccaagaaggcctctgtggagcagctgcagaagatccgggacctgattgccatcgagaggagcagccggctggatggcagcaacaagagccacaaggtgaagagcagccagcagcctgctgccagcacccagctgcccaccacccccagcagcaaccccagcggcctgaaccagcacaccaggaaccggcagggccagagcagtgacccccccagcgccagcacagtggccgctgacagcgccatcctggaggtgctgcagagcaacatccagcacgtgctggtgtatgaaaatcctgccctgcaggagaaggccctggcctgcatccctgtgcaggagctgaagaggaagagccaggagaagctgagccgggccaggaagctggacaaggacatcatcaccctgaggaacttctggaagcaggatgtggatggagtggccagcggccccatcgtgctgcactgtgccgctgagctgtag

SEQ ID NO: 328302 - DNA, 723 bp, Artificial Sequence
  derived and/or modified sequence
tgaagcggcagcgccagccccgccgtggccgagctgtgccagaacacgccagagacatttctcgaagcatctaagttgctacttacctatgccgataatatcctgagaaaccccaatgatgaaaaatacaggagcatccgcatcggaaatacggcttttagtacccggctccttcccgtgcgaggagcagtagagtgtttgtttgaaatgggattcgaggagggcgaaactcatctgattttcccgaaaaaagcgtccgtggagcagttgcaaaaaattagggacctaatcgctatagagcggtcatctagactcgacggaagcaataagagccacaaggtgaaatcgagccagcagcctgcggcatccacacagctgccaaccaccccctcgtctaacccctcgggtttgaatcagcatacgaggaaccgccaggggcagtcctcagatcctccttccgccagtactgtagccgctgatagcgccatactggaagtgttacaatcaaacatccagcacgttctcgtgtatgagaaccccgcactgcaggagaaggcccttgcttgcattccagtgcaagagctgaagcggaaatcccaagaaaaactctcccgggcgcgcaaactagacaaagatatcattactctcagaaacttctggaagcaggacgtggacggcgtggcctccggacccatagtgctgcactgcgctgccgagctatag

SEQ ID NO: 328303 - DNA, 516 bp, Artificial Sequence
  derived and/or modified sequence
atgggcttcgaggagggcgagacccacctgatcttccccaagaaggcctctgtcgagcagctgcagaaaatcagggacctaatcgctattgaaagaagcagtaggcttgacggatccaataagtcccataaggtcaaatcatcccagcagccagcagcctcaactcagctcccaactacaccttcttctaacccttcgggactgaatcagcacactcgcaacagacagggacaatcatccgaccccccatccgcgtctaccgtggcggctgactcagccatcctcgaggtgttgcaatccaatatacagcacgtgttggtgtacgagaaccccgctctgcaagaaaaagccttggcttgcatcccagtgcaggagctgaaaagaaaatctcaggagaaactgtcacgggcacgaaagctggacaaggacataatcacgctgcggaacttttggaagcaagatgtagatggggttgccagtggccccatcgttcttcactgtgccgctgaactgtag

SEQ ID NO: 328304 - DNA, 723 bp, Artificial Sequence
  derived and/or modified sequence
tagagtgggtcagcctcgcccgcagtggccgaactgtgtcagaacacacctgaaacattcctggaagcaagtaaactcctcctcacctatgctgacaacatccttaggaatcctaacgacgaaaaatacagatctatccggataggtaatacggctttttccaccagactactaccagtgagaggggcagtggagtgcctatttgagatggggtttgaagagggggagactcatttaatctttcctaaaaaggcctctgtggagcaactccaaaagatccgagatctgatcgcaattgagcggtcctctcgcctggacggttccaacaaatcacacaaagtgaagtccagtcagcaacccgcagcatctacacagctcccaacaacaccctccagcaacccaagcggcctcaaccaacatacccgtaacagacaggggcaaagcagcgacccgccatcagcaagtacagtcgccgctgattccgccattcttgaagtgcttcagtctaacatacaacacgttttggtgtacgaaaaccccgcactgcaggagaaggctcttgcctgcataccagtccaggagctgaaacgcaagagccaggaaaagctatcccgagcgagaaagctggacaaagatatcattacgctccggaatttctggaaacaagacgtagacggagtcgcgtccggcccaatcgttctgcactgcgccgcagaactatag

SEQ ID NO: 328305 - DNA, 516 bp, Artificial Sequence
  derived and/or modified sequence
atgggcttcgaggagggtgagacccacttgatatttcccaagaaggcctcagtggagcagcttcagaagatccgggacttaatcgctattgagcggagtagccgccttgatggcagcaacaagagccacaaggtgaagtctagccagcagccggcagctagcacccagttgcctactactccctcctccaatccatccggacttaatcagcatacacgaaacagacaggggcagtctagcgaccctccatccgcatctactgttgcagctgacagcgcaatcttggaagttctccagtccaacatccaacacgtgctagtgtatgagaatccagccctccaagagaaagcactggcgtgtattcccgtccaggaattaaagcgaaaaagccaagaaaaactttcacgcgctagaaagctcgataaagacattatcactctccggaatttttggaaacaggatgttgatggagtggcctccggaccaatcgtgttgcactgtgcagctgaactgtag

SEQ ID NO: 328306 - DNA, 723 bp, Artificial Sequence
  derived and/or modified sequence
tgaagcggcagcgccagccccgccgtggccgagctgtgccagaacacccccgagaccttcctggaggccagcaagctgctgctgacctacgccgacaacatcctgagaaaccccaacgacgagaagtacagaagcatcagaatcggcaacaccgccttcagcaccagactgctgcccgtgagaggcgccgtggagtgcctgttcgagatgggcttcgaggagggcgagacccacctgatcttccccaagaaggccagcgtggagcagctgcagaagatcagagacctgatcgccatcgagagaagcagcagactggacggcagcaacaagagccacaaggtgaagagcagccagcagcccgccgccagcacccagctgcccaccacccccagcagcaaccccagcggcctgaaccagcacaccagaaacagacagggccagagcagcgacccccccagcgccagcaccgtggccgccgacagcgccatcctggaggtgctgcagagcaacatccagcacgtgctggtgtacgagaaccccgccctgcaggagaaggccctggcctgcatccccgtgcaggagctgaagagaaagagccaggagaagctgagcagagccagaaagctggacaaggacatcatcaccctgagaaacttctggaagcaggacgtggacggcgtggccagcggccccatcgtgctgcactgcgccgccgagctgtag

SEQ ID NO: 328307 - DNA, 516 bp, Artificial Sequence
  derived and/or modified sequence
atgggcttcgaggagggcgagacccacctgatcttccccaagaaggccagcgtggagcagctgcagaagatcagagacctgatcgccatcgagagaagcagcagactggacggcagcaacaagagccacaaggtgaagagcagccagcagcccgccgccagcacccagctgcccaccacccccagcagcaaccccagcggcctgaaccagcacaccagaaacagacagggccagagcagcgacccccccagcgccagcaccgtggccgccgacagcgccatcctggaggtgctgcagagcaacatccagcacgtgctggtgtacgagaaccccgccctgcaggagaaggccctggcctgcatccccgtgcaggagctgaagagaaagagccaggagaagctgagcagagccagaaagctggacaaggacatcatcaccctgagaaacttctggaagcaggacgtggacggcgtggccagcggccccatcgtgctgcactgcgccgccgagctgtag

SEQ ID NO: 328308 - protein, 126 aa, Artificial Sequence
  derived and/or modified sequence
MEEMFHKKSEAVRRLVEAAEEAHLKHEFDADLQYEYFNAVLINERDKDGNFLELGKEFILAPNDHFNNLPVNISLSDVQVPTNMYNKDPAIVNGVYWSESLNKVFVDNFDRDPSLIWQYFGSAKGF

SEQ ID NO: 328309 - protein, 525 aa, Artificial Sequence
  derived and/or modified sequence
MEEMFHKKSEAVRRLVEAAEEAHLKHEFDADLQYEYFNAVLINERDKDGNFLELGKEFILAPNDHFNNLPVNISLSDVQVPTNMYNKDPAIVNGVYWSESLNKVFVDNFDRDPSLIWQYFGSAKGFFRQYPGIKWEPDENGVIAFDCRNRKWYIQAATSPKDVVILVDVSGSMKGLRLTIAKQTVSSILDTLGDDDFFNIIAYNEELHYVEPCLNGTLVQADRTNKEHFREHLDKLFAKGIGMLDIALNEAFNILSDFNHTGQGSICSQAIMLITDGAVDTYDTIFAKYNWPDRKVRIFTYLIGREAAFADNLKWMACANKGFFTQISTLADVQENVMEYLHVLSRPKVIDQEHDVVWTEAYIDSTLPQAQKLTDDQGPVLMTTVAMPVFSKQNETRSKGILLGVVGTDVPVKELLKTIPKYKLGIHGYAFAITNNGYILTHPELRLLYEEGKKRRKPNYSSVDLSEVEWEDRDDVLRNAMVNRKTGKFSMEVKKTVDKGFRCGAFQRSWEIFLPRECNHRRRPA

SEQ ID NO: 328310 - DNA, 1578 bp, Artificial Sequence
  derived and/or modified sequence
atggaggaaatgttccacaagaagtccgaggcagtgcggcggctcgtcgaagcagctgaggaggcgcatctgaaacacgagttcgacgcagatctacagtatgagtattttaatgcagtgctaattaacgagcgggacaaggatggtaacttccttgaattagggaaggaatttatcctggcccccaacgaccattttaacaacctacccgtcaacatcagccttagtgatgtgcaggtacccacaaacatgtacaacaaggatcccgctatcgtgaatggagtatactggtcggaatccctaaataaagtttttgtggacaattttgaccgggacccgtcactcatatggcagtactttgggagtgcaaagggtttttttaggcaatatcccggaatcaagtgggaacccgacgagaatggagtgattgctttcgattgccggaatcgcaagtggtatattcaggccgctacctcgccgaaggacgttgtgatactggttgacgtgtccggctctatgaaagggctgcgattgaccatcgctaaacaaacagtgtcgagcatcttggacactctcggagatgacgactttttcaatatcatcgcgtacaatgaggaactccactatgtggaaccctgcctgaacggtaccttagttcaggccgaccgtacaaataaggaacattttagagagcacctcgataaactctttgccaaaggtattgggatgctcgacatcgcactcaacgaggcctttaacattctcagtgatttcaatcatacaggacagggcagcatctgcagccaggccattatgctgattacggacggagccgtagatacttatgatacaattttcgcaaagtataattggcctgaccggaaggttcggattttcacctatctgataggccgagaggcagctttcgctgacaatttgaaatggatggcttgcgcaaataaaggcttctttacgcagattagcactttagcagatgttcaagagaatgtcatggaatatctccacgtcctgagccgacctaaagtgatcgaccaggagcatgacgtcgtttggaccgaggcctatatcgacagtactctcccacaggcacagaagctcaccgatgatcagggcccagtgctcatgacaactgtagctatgccagtgttttctaagcaaaatgaaaccaggagcaagggcatcctcttgggggtagtggggaccgacgtacccgttaaagaactccttaaaaccatccccaaatataaactgggcattcacggctacgcatttgctattaccaataacgggtacattctcacccaccccgagctccgtcttttatatgaagaaggaaaaaagcgcaggaagcctaactatagtagcgtggatttatcagaggttgaatgggaagaccgggacgacgtgctgcgtaacgctatggtgaacaggaagacagggaagtttagtatggaggtgaaaaaaactgtggataaggggttccggtgcggggcctttcaacggtcttgggagatttttctccctcgggagtgtaatcatagacgcagaccggcttag

SEQ ID NO: 328311 - DNA, 1578 bp, Artificial Sequence
  derived and/or modified sequence
atggaggagatgttccacaagaagtctgaggccgtgcggcggctggtggaggccgctgaggaggcccacctgaagcatgaatttgatgctgacctgcagtatgagtacttcaatgctgtgctgatcaatgaaagagacaaggatggcaacttcctggagctgggcaaggagttcatcctggccccaaatgaccacttcaacaacctgcctgtgaacatcagcctgagtgatgtgcaggtgcccaccaacatgtacaacaaggaccctgccatcgtgaatggagtgtactggagcgagagcctgaacaaggtgtttgtggacaactttgaccgggaccccagcctcatctggcagtacttcggcagcgccaagggcttcttccggcagtacccaggcatcaagtgggagccagatgaaaatggagtgattgcctttgactgcaggaacaggaagtggtacatccaggccgccaccagccccaaggatgtggtgatcctggtggatgtgtctggctccatgaagggcctgcggctgaccatcgccaagcagacagtgagcagcatcctggacaccctgggagatgatgacttcttcaacatcatcgcctacaatgaggagctgcactacgtggagccctgcctgaatggcaccctggtgcaggccgacaggaccaacaaggagcacttccgggagcacctggacaagctgtttgccaagggcatcggcatgctggacatcgccctgaatgaggccttcaacatcctgagtgacttcaaccacacaggccagggcagcatctgcagccaggccatcatgctgatcacagatggagctgtggacacctatgacaccatctttgccaagtacaactggccagacaggaaggtgcgcatcttcacctacctgattggccgggaggccgcctttgctgacaacctgaagtggatggcctgtgccaacaagggcttcttcacccagatcagcaccctggctgatgtgcaggagaatgtgatggagtacctgcacgtgctgagccggcccaaggtgattgaccaggagcatgatgtggtgtggacagaggcctacatcgacagcaccctgccccaggcccagaagctgacagatgaccagggccctgtgctgatgaccaccgtggccatgcctgtgttcagcaagcagaatgagaccaggagcaagggcatcctgctgggcgtggtgggcacagatgtgcctgtgaaggagctgctgaagaccatccccaagtacaagctgggcatccacggctacgcctttgccatcaccaacaacggctacatcctgacccaccctgagctgcggctgctgtatgaggagggcaagaagaggaggaagcccaactacagctctgtggacctgtctgaggtggagtgggaggacagagatgatgtgctgagaaatgccatggtgaacaggaagacaggcaagttctccatggaggtgaagaagacagtggacaagggcttccgctgtggggccttccagaggtcctgggagatcttcctgccccgggagtgcaaccacagaagaagacctgcctag

SEQ ID NO: 328312 - DNA, 1578 bp, Artificial Sequence
  derived and/or modified sequence
atggaggagatgttccacaagaagagcgaggccgtgcggcggctggtggaagcggctgaagaggctcatctcaaacatgaatttgacgcggatctccaatacgagtatttcaacgcagtcctgatcaacgaacgcgacaaggatggcaacttccttgagctgggcaaagaatttatactggcgcccaatgaccacttcaacaacctcccagtcaacattagcctgtctgacgtacaggtgcccacaaatatgtataacaaggaccccgccatcgtgaatggagtctattggtccgaaagcctgaataaagtgttcgttgataattttgaccgagatccctctcttatatggcagtacttcgggtccgctaagggcttctttcgccaatatcccggaatcaagtgggaacctgatgagaacggagtgatcgccttcgactgtcggaacagaaaatggtacatccaggccgccacaagtccgaaagatgtcgttattctagttgacgtgtctgggagtatgaaagggttgcgattaacgatcgccaaacagacggtgtcttctatcctcgatacactcggagacgatgattttttcaatatcattgcttacaacgaggaattacactatgtggaaccatgccttaatgggacacttgtgcaggctgatcgcacaaacaaggaacatttccgggaacaccttgacaaacttttcgccaaaggtatagggatgttggatatcgccttgaacgaagccttcaacatcttgtccgatttcaaccacaccggtcagggatccatttgcagtcaggccattatgctgatcactgatggagcagtggatacatatgacaccatcttcgctaagtataactggcccgaccgtaaggttaggattttcacatatctgattggtcgagaagctgcattcgctgacaatctcaagtggatggcctgcgccaacaaaggcttctttacccagatttccacccttgctgatgttcaggagaacgtgatggaatacctgcatgtgctgagccggccgaaggtgatcgatcaggagcacgatgtggtgtggaccgaagcatatatcgattccacccttccgcaggcccagaaactgacagatgatcagggcccggtgttgatgacaactgtggccatgcctgttttttcaaagcagaacgaaaccaggagcaagggaattttattaggggtggtgggaacggacgtgcctgtgaaggagcttttgaaaaccattcctaaatacaaactcgggatccatgggtatgccttcgccattactaacaatggctatatactgacccaccctgaactccgactgctctatgaagagggcaaaaagcgccgaaagccgaattacagctcagtcgatttatctgaagtcgaatgggaggaccgcgatgacgttctcaggaacgccatggtgaatcgaaaaactggcaaatttagtatggaggttaagaagacggtcgacaaggggttcagatgtggtgcctttcaacgatcctgggagatcttcctgcctcgagagtgtaaccacaggcgcaggccagcctag

SEQ ID NO: 328313 - DNA, 1578 bp, Artificial Sequence
  derived and/or modified sequence
atggaggaaatgttccataagaaatctgaagcagtaagaagactagtggaagccgctgaggaagcccaccttaaacacgaatttgacgccgacttgcaatatgagtactttaacgcagttttaatcaatgaaagggacaaagatggcaacttcctcgaactggggaaagaattcattctggcaccaaacgaccatttcaataatttaccagtgaatatttccttgtccgacgtgcaggtcccaacaaatatgtacaacaaagatccagctatagtgaacggggtgtattggtcggagagcctgaataaggtgtttgtagataactttgaccgtgacccctccctcatatggcaatatttcggcagcgcaaagggatttttccgccagtatcccggaatcaaatgggagcccgacgagaacggcgttatcgctttcgattgtcgaaaccggaagtggtatattcaggccgcaacatcacctaaggatgtggtcatccttgtggatgtgtccgggtccatgaaaggcctccggctgacgatcgcaaaacagactgtttcttccatactggatactcttggcgatgatgacttcttcaacataattgcctacaacgaggagctgcactatgtggaaccttgcctcaatggcaccctggtgcaggccgaccgcacaaacaaggagcattttcgggagcatctcgataagttgtttgcaaagggaatcggcatgctcgacatagctctgaatgaagctttcaacatcctctccgactttaaccatactggccagggctcaatatgcagccaagctataatgctgattactgacggagcagtggatacctacgataccattttcgccaaatacaactggccagatcgcaaggtgagaatctttacgtacctcattgggagggaggccgcttttgctgacaacctgaaatggatggcatgcgctaacaagggcttttttacacagatttccacgctggccgacgtgcaggaaaacgtgatggagtacctacacgtgctatcacggcctaaagtcatcgaccaggaacatgatgtcgtttggaccgaggcttacattgatagcacactgccacaggcccagaaactgacagatgaccaaggacccgtccttatgaccacagtcgctatgccggtgttttccaagcagaacgaaacacggagtaaggggattttgctgggagtcgtcggtactgacgtgccagtgaaggagttattaaagaccatacccaagtataaattgggaattcatggttacgcattcgcaattaccaataatggctacatcttaacacaccccgagctccgacttctgtatgaagaaggcaagaagaggcggaaaccaaactactctagcgtagacctaagtgaagtcgagtgggaagacagagacgatgtactccgcaacgccatggtgaatcgtaagaccggcaagttttctatggaagtgaagaagacggtcgacaagggcttccggtgcggcgcattccaaagatcctgggaaatttttctccctagggagtgtaaccacaggcggcgaccagcttag

SEQ ID NO: 328314 - DNA, 1972 bp, Artificial Sequence
  derived and/or modified sequence
gttacatatcttcctgtgccccttctccctgtagggtgaagctctgggcctcggcttttggtggggagataaaatccattgctgctaagtactccggttcccagcttctgcaaaagaaatacaaagagtatgagaaagacgttgccatagaagaaattgatggcctccaactggtaaagaagctggcaaagaacatggaagagatgtttcacaagaagtctgaggccgtcaggcgtctggtggaggctgcagaagaagcacacctgaaacatgaatttgatgcagacttacagtatgaatacttcaatgctgtgctgataaatgaaagggacaaagacgggaattttttggagctgggaaaggaattcatcttagccccaaatgaccattttaataatttgcctgtgaacatcagtctaagtgacgtccaagtaccaacgaacatgtacaacaaagaccctgcaattgtcaatggggtttattggtctgaatctctaaacaaagtttttgtagataactttgaccgtgacccatctctcatatggcagtactttggaagtgcaaagggcttttttaggcagtatccggggattaaatgggaaccagatgagaatggagtcattgccttcgactgcaggaaccgaaaatggtacatccaggcagcaacttctccgaaagacgtggtcattttagttgacgtcagtggcagcatgaaaggactccgtctgactatcgcgaagcaaacagtctcatccattttggatacacttggggatgatgacttcttcaacataattgcttataatgaggagcttcactatgtggaaccttgcctgaatggaactttggtgcaagccgacaggacaaacaaagagcacttcagggagcatctggacaaacttttcgccaaaggaattggaatgttggatatagctctgaatgaggccttcaacattctgagtgatttcaaccacacgggacaaggaagtatctgcagtcaggccatcatgctcataactgatggggcggtggacacctatgatacaatctttgcaaaatacaattggccagatcgaaaggttcgcatcttcacatacctcattggacgagaggctgcgtttgcagacaatctaaagtggatggcctgtgccaacaaaggattttttacccagatctccaccttggctgatgtgcaggagaatgtcatggaataccttcacgtgcttagccggcccaaagtcatcgaccaggagcatgatgtggtgtggaccgaagcttacattgacagcactctccctcaggcacaaaagctgactgatgatcagggccccgtcctgatgaccactgtagccatgcctgtgtttagtaagcagaacgaaaccagatcgaagggcattcttctgggagtggttggcacagatgtcccagtgaaagaacttctgaagaccatccccaaatacaagttagggattcacggttatgcctttgcaatcacaaataatggatatatcctgacgcatccggaactcaggctgctgtacgaagaaggaaaaaagcgaaggaaacctaactatagtagcgttgacctctctgaggtggagtgggaagaccgagatgacgtgttgagaaatgctatggtgaatcgaaagacggggaagttttccatggaggtgaagaagacagtggacaaagggtttaggtgtggcgctttccagaggtcatgggaaatatttcttccgagggaatgtaaccatcgaagaaggcctgcatgacttagaacatcccgatgtgtccttggcagatgaatggtcctactgcaacactgacctacaccctgagcaccgccatctgtctcagttagaagcgattaagctctacctaaaaggcaaagaacctctgctccagtgtgataaagaattgatccaagaagtcctttttgacgcggtggtgagtgcccccattgaagcgtatt

SEQ ID NO: 328315 - DNA, 1578 bp, Artificial Sequence
  derived and/or modified sequence
atggaggagatgttccacaagaagagcgaggccgtgagaagactggtggaggccgccgaggaggcccacctgaagcacgagttcgacgccgacctgcagtacgagtacttcaacgccgtgctgatcaacgagagagacaaggacggcaacttcctggagctgggcaaggagttcatcctggcccccaacgaccacttcaacaacctgcccgtgaacatcagcctgagcgacgtgcaggtgcccaccaacatgtacaacaaggaccccgccatcgtgaacggcgtgtactggagcgagagcctgaacaaggtgttcgtggacaacttcgacagagaccccagcctgatctggcagtacttcggcagcgccaagggcttcttcagacagtaccccggcatcaagtgggagcccgacgagaacggcgtgatcgccttcgactgcagaaacagaaagtggtacatccaggccgccaccagccccaaggacgtggtgatcctggtggacgtgagcggcagcatgaagggcctgagactgaccatcgccaagcagaccgtgagcagcatcctggacaccctgggcgacgacgacttcttcaacatcatcgcctacaacgaggagctgcactacgtggagccctgcctgaacggcaccctggtgcaggccgacagaaccaacaaggagcacttcagagagcacctggacaagctgttcgccaagggcatcggcatgctggacatcgccctgaacgaggccttcaacatcctgagcgacttcaaccacaccggccagggcagcatctgcagccaggccatcatgctgatcaccgacggcgccgtggacacctacgacaccatcttcgccaagtacaactggcccgacagaaaggtgagaatcttcacctacctgatcggcagagaggccgccttcgccgacaacctgaagtggatggcctgcgccaacaagggcttcttcacccagatcagcaccctggccgacgtgcaggagaacgtgatggagtacctgcacgtgctgagcagacccaaggtgatcgaccaggagcacgacgtggtgtggaccgaggcctacatcgacagcaccctgccccaggcccagaagctgaccgacgaccagggccccgtgctgatgaccaccgtggccatgcccgtgttcagcaagcagaacgagaccagaagcaagggcatcctgctgggcgtggtgggcaccgacgtgcccgtgaaggagctgctgaagaccatccccaagtacaagctgggcatccacggctacgccttcgccatcaccaacaacggctacatcctgacccaccccgagctgagactgctgtacgaggagggcaagaagagaagaaagcccaactacagcagcgtggacctgagcgaggtggagtgggaggacagagacgacgtgctgagaaacgccatggtgaacagaaagaccggcaagttcagcatggaggtgaagaagaccgtggacaagggcttcagatgcggcgccttccagagaagctgggagatcttcctgcccagagagtgcaaccacagaagaagacccgcctag

SEQ ID NO: 328316 - protein, 518 aa, Artificial Sequence
  derived and/or modified sequence
EILFHQMQNQIKRLVEAAEEAHLKHEFDADLQYEYFNAVLINERDKDGNFLELGKEFILAPNDHFNNLPVNISLSDVQVPTNMYNKDPAIVNGVYWSESLNKVFVDNFDRDPSLIWQYFGSAKGFFRQYPGIKWEPDENGVIAFDCRNRKWYIQAATSPKDVVILVDVSGSMKGLRLTIAKQTVSSILDTLGDDDFFNIIAYNEELHYVEPCLNGTLVQADRTNKEHFREHLDKLFAKGIGMLDIALNEAFNILSDFNHTGQGSICSQAIMLITDGAVDTYDTIFAKYNWPDRKVRIFTYLIGREAAFADNLKWMACANKGFFTQISTLADVQENVMEYLHVLSRPKVIDQEHDVVWTEAYIDSTLTDDQGPVLMTTVAMPVFSKQNETRSKGILLGVVGTDVPVKELLKTIPKYKLGIHGYAFAITNNGYILTHPELRLLYEEGKKRRKPNYSSVDLSEVEWEDRDDVLRNAMVNRKTGKFSMEVKKTVDKGFRCGAFQRSWEIFLPRECNHRRRPA

SEQ ID NO: 328317 - DNA, 1557 bp, Artificial Sequence
  derived and/or modified sequence
gagatcctatttcaccagatgcagaaccagatcaagcgccttgtagaagccgccgaggaggcccaccttaaacacgaattcgatgcagacctgcagtacgagtatttcaacgccgtcttgatcaacgaacgtgacaaggatggcaacttcctggaactagggaaggagtttatcctggccccgaatgatcatttcaacaatctgccagtaaatatcagcctgtctgacgtgcaggtccccaccaatatgtataataaggaccctgcaatcgttaacggtgtctactggagtgagagcctgaacaaagttttcgtggacaattttgacagggacccttcgctgatctggcagtattttgggtctgccaagggattttttcgccagtaccccggcattaaatgggaaccggacgagaacggagttattgcatttgattgtcgcaatagaaagtggtatattcaggcagcaacctcccctaaggacgtagtaatcctcgttgacgtgagcggctctatgaaaggcctgcgattgacgatcgctaagcagaccgtatcgagcatcctcgacaccttgggcgatgacgattttttcaatattattgcttataacgaggagctgcattatgtagaaccatgtctcaatgggacattggtgcaggccgaccgtacaaacaaggagcacttccgtgagcatttggataagctcttcgccaaagggataggaatgctcgacattgccctgaacgaagcgttcaatatcctgagcgattttaatcataccggtcaaggctcgatttgctcccaggcgattatgctgattaccgacggcgcggtggatacctacgatacaattttcgctaagtacaattggcctgacagaaaagtgcgcatctttacttacttgatcggacgcgaagctgcatttgcagataacctcaaatggatggcatgcgccaataaggggtttttcacgcagatcagcaccctggcggacgtgcaagagaacgtgatggagtatctgcacgtcttgtccagaccaaaagtgatagatcaggagcacgacgtggtctggactgaggcctatatcgactctaccctgaccgacgaccagggccctgttctcatgacgactgtggctatgcctgtgttctctaagcagaacgaaacacggtccaaggggattctgttaggcgttgttggaaccgatgtacccgtcaaagagctcctgaagactattccaaaatataagctgggtatacacgggtacgcgtttgcaataacgaacaacggttacatactgactcaccccgagctgcgcctgttgtacgaggaaggaaagaagaggcgcaaaccaaattacagcagcgtggacctcagtgaggtggaatgggaggatcgggacgacgttctgcgaaacgccatggtaaaccgcaaaactggcaaatttagtatggaggtaaaaaagaccgtagacaaaggatttcggtgtggggcttttcaacgatcatgggagatctttcttccgcgggagtgcaaccaccggagaagacccgcctag

SEQ ID NO: 328318 - DNA, 381 bp, Artificial Sequence
  derived and/or modified sequence
atggaagagatgtttcacaagaagagcgaagccgtgaggaggctggtcgaggctgccgaggaagcccacctgaagcatgaattcgatgccgatctccagtacgagtacttcaacgcagtgctgatcaatgaaagagataaagacggcaacttcctcgagctgggcaaagagttcatactcgcccctaacgaccacttcaataacctgcccgtgaatattagtttgtctgacgttcaagtacctactaatatgtacaacaaagacccagccatcgtgaatggggtgtattggtccgagtccctgaacaaagtgtttgttgataatttcgaccgtgacccaagcctaatctggcagtactttggctccgcaaaaggcttttag

SEQ ID NO: 328319 - DNA, 1557 bp, Artificial Sequence
  derived and/or modified sequence
gagatcctcttccaccagatgcagaaccagatcaagaggctggtggaggccgctgaggaggcccacctgaagcatgaatttgatgctgacctgcagtatgagtacttcaatgctgtgctgatcaatgaaagagacaaggatggcaacttcctggagctgggcaaggagttcatcctggccccaaatgaccacttcaacaacctgcctgtgaacatcagcctgagtgatgtgcaggtgcccaccaacatgtacaacaaggaccctgccatcgtgaatggagtgtactggagcgagagcctgaacaaggtgtttgtggacaactttgaccgggaccccagcctcatctggcagtactttggaagtgccaagggcttcttccggcagtacccaggcatcaagtgggagccagatgaaaatggagtcatcgcctttgactgcaggaacaggaagtggtacatccaggccgccaccagccccaaggatgtggtgatcctggtggatgtgtctggctccatgaagggcctgcggctgaccatcgccaagcagacagtgagcagcatcctggacaccctgggagatgatgacttcttcaacatcatcgcctacaatgaggagctgcactacgtggagccctgcctgaatggcaccctggtgcaggccgacaggaccaacaaggagcacttccgggagcacctggacaagctgtttgccaagggcatcggcatgctggacatcgccctgaatgaggccttcaacatcctgagtgacttcaaccacacaggccagggcagcatctgcagccaggccatcatgctgatcacagatggagctgtggacacctatgacaccatctttgccaagtacaactggccagacaggaaggtgcgcatcttcacctacctgattggccgggaggccgcctttgctgacaacctgaagtggatggcctgtgccaacaagggcttcttcacccagatcagcaccctggctgatgtgcaggagaatgtgatggagtacctgcacgtgctgagccggcccaaggtgattgaccaggagcatgatgtggtgtggacagaggcctacatcgacagcaccctgacagatgaccagggccctgtgctgatgaccaccgtggccatgcctgtgttcagcaagcagaatgagaccaggagcaagggcatcctgctgggcgtggtgggcacagatgtgcctgtgaaggagctgctgaagaccatccccaagtacaagctgggcatccacggctacgcctttgccatcaccaacaacggctacatcctgacccaccctgagctgcggctgctgtatgaggagggcaagaagaggaggaagcccaactacagctctgtggacctgtctgaggtggagtgggaggacagagatgatgtgctgagaaatgccatggtgaacaggaagacaggcaagttctccatggaggtgaagaagacagtggacaagggcttccgctgtggggccttccagaggtcctgggagatcttcctgccccgggagtgcaaccacagaagaagacctgcctag

SEQ ID NO: 328320 - DNA, 381 bp, Artificial Sequence
  derived and/or modified sequence
atggaggagatgttccacaagaagtctgaggccgtgcggcggctggtggaggccgctgaggaggcccacctgaagcatgaatttgatgctgacctgcagtatgagtacttcaatgctgtgctgatcaatgaaagagacaaggatggcaacttcctggagctgggcaaggagttcatcctggccccaaatgaccacttcaacaacctgcctgtgaacatcagcctgagtgatgtgcaggtgcccaccaacatgtacaacaaggaccctgccatcgtgaatggagtgtactggagcgagagcctgaacaaggtgtttgtggacaactttgaccgggaccccagcctcatctggcagtacttcggcagcgccaagggcttctag

SEQ ID NO: 328321 - DNA, 1557 bp, Artificial Sequence
  derived and/or modified sequence
gagatcctgttccaccagatgcagaaccagatcaagcggctggtggaggcggccgaggaggcacatttgaagcatgaatttgatgcagacctgcaatatgagtattttaacgctgtactgatcaatgagcgcgataaagatggcaacttcctggaactggggaaggaattcatcctggccccgaatgaccactttaataacctgcctgtcaatatcagtctgtccgatgtacaggtccctaccaatatgtacaataaggatcctgccattgttaacggggtgtattggtccgaaagcctgaataaggtgttcgtggacaacttcgacagagacccttccctcatctggcagtatttcggaagcgctaaaggtttcttccgccagtatcccggaattaagtgggaacccgatgaaaacggagtgatcgcctttgattgtagaaaccgcaaatggtatattcaggccgctacaagccctaaagatgtggtgattctcgtggacgtgtccggaagcatgaagggattgcgactaaccatcgcaaagcagacggtcagcagcatcctggatactctgggggatgatgacttcttcaacattatcgcctataacgaggaactgcactatgtcgagccctgtctaaatggcactctggtgcaggccgacagaactaataaagaacactttcgtgaacatttggataaactgtttgctaagggcattggcatgctagacatcgccctgaacgaagccttcaatattctgtccgattttaaccacactggtcagggaagcatctgctcacaggcaatcatgctgattactgacggtgccgtcgacacatacgacacgatcttcgccaagtataactggccagatagaaaagtgcgaatatttacttatttgatcggaagggaggcagcctttgcggacaatttaaagtggatggcttgcgccaacaagggtttctttactcagatctccaccctcgctgatgtccaggagaatgtgatggagtacttgcacgtgctgtcacgccccaaagtcattgatcaggagcacgatgtggtttggacagaagcctacattgactctacactcacagatgaccagggacctgtcctgatgaccactgtcgctatgccagtgttttcaaagcagaatgagacacggtctaaagggattctgctgggggtcgtcggaactgacgtccccgtaaaggaattgttgaaaaccattccaaagtacaagttaggcatccacggctacgccttcgccataacgaataacggatacatcctaacccaccctgagctgcggctgctgtacgaggagggcaaaaagagaaggaagcccaattattcctcagtggacctctctgaggtcgaatgggaagatcgagacgatgtcttgcgaaatgctatggtcaatagaaagaccgggaagttcagcatggaggttaaaaagaccgtggacaagggctttcgctgtggcgcgtttcagcggtcttgggaaattttcctgcctagagagtgcaatcacaggcgtcgtcccgcttag

SEQ ID NO: 328322 - DNA, 381 bp, Artificial Sequence
  derived and/or modified sequence
atggaggagatgttccacaagaagagcgaggccgtgcggcggctggtcgaagcggccgaggaggcccacctgaagcacgagtttgacgccgacctgcagtacgagtatttcaacgccgtactgattaacgagcgtgataaagacggtaacttcctcgagctgggcaaagaatttatcttggccccaaatgaccacttcaacaacctgcccgtcaacatctcattgagcgatgtccaggtgcctaccaacatgtacaataaggaccctgctattgtgaatggagtctactggtctgagagtctgaacaaggtcttcgtagataacttcgacagagaccccagtctgatttggcagtatttcgggagtgctaaaggtttttag

SEQ ID NO: 328323 - DNA, 1557 bp, Artificial Sequence
  derived and/or modified sequence
gagattctgttccaccagatgcagaatcagattaaacggttagtcgaggctgctgaagaagctcacctcaagcatgaatttgacgcagacctgcagtacgagtatttcaacgccgtcctgatcaacgagcgagacaaggacggtaatttcctggagctcggcaaggaatttattttggcacccaacgatcatttcaacaatcttccagtcaatataagtctcagtgatgtgcaagtacctacaaacatgtacaataaggatcctgccattgtgaacggtgtgtactggagcgagagtttaaataaagtcttcgtggacaactttgacagggacccaagcctgatctggcagtattttggctcagcgaagggtttcttcagacaataccctggcataaagtgggaaccggatgagaatggtgtcatagcgttcgactgtagaaaccgtaagtggtatatacaagcagccacctccccgaaagatgttgtcattctagttgatgtctctggaagcatgaaaggcctcagattgaccatcgctaagcagactgtaagtagtatcctcgacaccctaggcgacgatgatttcttcaatatcatcgcatacaatgaggagttgcattatgttgagccatgtctaaacgggactctggttcaagccgacagaacaaacaaggagcatttcagagaacacttggataagctgttcgccaaagggattgggatgcttgacatagcactcaatgaggcattcaatatattgtcggactttaaccacaccgggcagggctcaatttgtagccaagctattatgctgattacggatggcgcagtggacacgtatgatacgatttttgccaagtacaattggccagaccgcaaagtgcgaattttcacatacttgatcggtagagaagcagcttttgccgacaacctcaaatggatggcatgcgctaacaaaggctttttcacccagatctccactctggccgatgttcaggagaacgtgatggagtatctgcatgtgctgtcccgcccaaaggtaatcgatcaggaacatgacgtagtgtggaccgaggcttatatcgattctaccctaaccgatgaccaaggcccagtgctcatgacaactgtagctatgccagttttctcaaagcagaatgagacaaggtcgaaagggattcttctgggcgtggttgggacagatgtgccagtgaaagaactgcttaagactattcctaagtataaattgggaattcacggctacgctttcgcaattacaaataacgggtatattttgacccatccggaactgcgcctcttatacgaagaaggtaagaaacggagaaagccgaactactcttctgtggaccttagtgaagttgagtgggaggaccgggacgacgtgctcagaaatgccatggtgaatcgaaagacaggaaagtttagcatggaagtgaagaagacagttgacaagggcttccgctgcggtgcttttcagaggtcctgggaaatatttttgcctagggagtgcaatcaccgacggagacccgcttag

SEQ ID NO: 328324 - DNA, 381 bp, Artificial Sequence
  derived and/or modified sequence
atggaagaaatgttccacaagaagtccgaggctgttaggcgattagtggaagccgcagaggaagcccaccttaagcacgagttcgacgccgatctgcagtacgagtactttaatgcggtcctcattaatgaaagggataaggacggaaactttcttgagttaggcaaagaatttattctcgcgcctaatgaccactttaataacctgcctgtgaacatttcattgtcagatgttcaggtgcccaccaatatgtacaataaagaccctgcaatcgtgaacggagtatactggtctgagtctctcaataaggtgtttgtggacaacttcgatagggacccatcattgatctggcaatactttggatccgcaaaagggttctag

SEQ ID NO: 328325 - DNA, 1554 bp, Artificial Sequence
  derived and/or modified sequence
gaaatattatttcaccaaatgcaaaatcaaattaaacgtctggtggaggctgcagaagaagcacacctgaaacatgaatttgatgcagacttacagtatgaatacttcaatgctgtgctgataaatgaaagggacaaagacgggaattttttggagctgggaaaggaattcatcttagccccaaatgaccattttaataatttgcctgtgaacatcagtctaagtgacgtccaagtaccaacgaacatgtacaacaaagaccctgcaattgtcaatggggtttattggtctgaatctctaaacaaagtttttgtagataactttgaccgtgacccatctctcatatggcagtactttggaagtgcaaagggcttttttaggcagtatccggggattaaatgggaaccagatgagaatggagtcattgccttcgactgcaggaaccgaaaatggtacatccaggcagcaacttctccgaaagacgtggtcattttagttgacgtcagtggcagcatgaaaggactccgtctgactatcgcgaagcaaacagtctcatccattttggatacacttggggatgatgacttcttcaacataattgcttataatgaggagcttcactatgtggaaccttgcctgaatggaactttggtgcaagccgacaggacaaacaaagagcacttcagggagcatctggacaaacttttcgccaaaggaattggaatgttggatatagctctgaatgaggccttcaacattctgagtgatttcaaccacacgggacaaggaagtatctgcagtcaggccatcatgctcataactgatggggcggtggacacctatgatacaatctttgcaaaatacaattggccagatcgaaaggttcgcatcttcacatacctcattggacgagaggctgcgtttgcagacaatctaaagtggatggcctgtgccaacaaaggattttttacccagatctccaccttggctgatgtgcaggagaatgtcatggaataccttcacgtgcttagccggcccaaagtcatcgaccaggagcatgatgtggtgtggaccgaagcttacattgacagcactctgactgatgatcagggccccgtcctgatgaccactgtagccatgcctgtgtttagtaagcagaacgaaaccagatcgaagggcattcttctgggagtggttggcacagatgtcccagtgaaagaacttctgaagaccatccccaaatacaagttagggattcacggttatgcctttgcaatcacaaataatggatatatcctgacgcatccggaactcaggctgctgtacgaagaaggaaaaaagcgaaggaaacctaactatagtagcgttgacctctctgaggtggagtgggaagaccgagatgacgtgttgagaaatgctatggtgaatcgaaagacggggaagttttccatggaggtgaagaagacagtggacaaagggtttaggtgtggcgctttccagaggtcatgggaaatatttcttccgagggaatgtaaccatcgaagaagacctgct

SEQ ID NO: 328326 - DNA, 559 bp, Artificial Sequence
  derived and/or modified sequence
cccctatatttatctttaacctcaagtgaatgttgctgcctttgtagttcatgagcaatgtatactcttgaattccagctctgtgaaatcggtagaaaatgagaaatacaaagagtatgagaaagacgttgccatagaagaaattgatggcctccaactggtaaagaagctggcaaagaacatggaagagatgtttcacaagaagtctgaggccgtcaggcgtctggtggaggctgcagaagaagcacacctgaaacatgaatttgatgcagacttacagtatgaatacttcaatgctgtgctgataaatgaaagggacaaagacgggaattttttggagctgggaaaggaattcatcttagccccaaatgaccattttaataatttgcctgtgaacatcagtctaagtgacgtccaagtaccaacgaacatgtacaacaaagaccctgcaattgtcaatggggtttattggtctgaatctctaaacaaagtttttgtagataactttgaccgtgacccatctctcatatggcagtactttggaagtgcaaagggcttt

SEQ ID NO: 328327 - DNA, 1557 bp, Artificial Sequence
  derived and/or modified sequence
gagatcctgttccaccagatgcagaaccagatcaagagactggtggaggccgccgaggaggcccacctgaagcacgagttcgacgccgacctgcagtacgagtacttcaacgccgtgctgatcaacgagagagacaaggacggcaacttcctggagctgggcaaggagttcatcctggcccccaacgaccacttcaacaacctgcccgtgaacatcagcctgagcgacgtgcaggtgcccaccaacatgtacaacaaggaccccgccatcgtgaacggcgtgtactggagcgagagcctgaacaaggtgttcgtggacaacttcgacagagaccccagcctgatctggcagtacttcggcagcgccaagggcttcttcagacagtaccccggcatcaagtgggagcccgacgagaacggcgtgatcgccttcgactgcagaaacagaaagtggtacatccaggccgccaccagccccaaggacgtggtgatcctggtggacgtgagcggcagcatgaagggcctgagactgaccatcgccaagcagaccgtgagcagcatcctggacaccctgggcgacgacgacttcttcaacatcatcgcctacaacgaggagctgcactacgtggagccctgcctgaacggcaccctggtgcaggccgacagaaccaacaaggagcacttcagagagcacctggacaagctgttcgccaagggcatcggcatgctggacatcgccctgaacgaggccttcaacatcctgagcgacttcaaccacaccggccagggcagcatctgcagccaggccatcatgctgatcaccgacggcgccgtggacacctacgacaccatcttcgccaagtacaactggcccgacagaaaggtgagaatcttcacctacctgatcggcagagaggccgccttcgccgacaacctgaagtggatggcctgcgccaacaagggcttcttcacccagatcagcaccctggccgacgtgcaggagaacgtgatggagtacctgcacgtgctgagcagacccaaggtgatcgaccaggagcacgacgtggtgtggaccgaggcctacatcgacagcaccctgaccgacgaccagggccccgtgctgatgaccaccgtggccatgcccgtgttcagcaagcagaacgagaccagaagcaagggcatcctgctgggcgtggtgggcaccgacgtgcccgtgaaggagctgctgaagaccatccccaagtacaagctgggcatccacggctacgccttcgccatcaccaacaacggctacatcctgacccaccccgagctgagactgctgtacgaggagggcaagaagagaagaaagcccaactacagcagcgtggacctgagcgaggtggagtgggaggacagagacgacgtgctgagaaacgccatggtgaacagaaagaccggcaagttcagcatggaggtgaagaagaccgtggacaagggcttcagatgcggcgccttccagagaagctgggagatcttcctgcccagagagtgcaaccacagaagaagacccgcctag

SEQ ID NO: 328328 - DNA, 381 bp, Artificial Sequence
  derived and/or modified sequence
atggaggagatgttccacaagaagagcgaggccgtgagaagactggtggaggccgccgaggaggcccacctgaagcacgagttcgacgccgacctgcagtacgagtacttcaacgccgtgctgatcaacgagagagacaaggacggcaacttcctggagctgggcaaggagttcatcctggcccccaacgaccacttcaacaacctgcccgtgaacatcagcctgagcgacgtgcaggtgcccaccaacatgtacaacaaggaccccgccatcgtgaacggcgtgtactggagcgagagcctgaacaaggtgttcgtggacaacttcgacagagaccccagcctgatctggcagtacttcggcagcgccaagggcttctag

SEQ ID NO: 328329 - protein, 504 aa, Artificial Sequence
  derived and/or modified sequence
MGIKTALPAAELGLYSLVLSGALAYAGRGLLEASQDGAHRKAFRESVRPGWEYIGRKMDVADFEWVMWFTSFRNVIIFALSGHVLFAKLCTMVAPKLRSWMYAVYGALAVMGTMGPWYLLLLLGHCVGLYVASLLGQPWLCLGLGLASLASFKMDPLISWQSGFVTGTFDLQEVLFHGGSSFTVLRCTSFALESCAHPDRHYSLADLLKYNFYLPFFFFGPIMTFDRFHAQVSQVEPVRREGELWHIRAQAGLSVVAIMAVDIFFHFFYILTIPSDLKFANRLPDSALAGLAYSNLVYDWVKAAVLFGVVNTVACLDHLDPPQPPKCITALYVFAETHFDRGINDWLCKYVYNHIGGEHSAVIPELAATVATFAITTLWLGPCDIVYLWSFLNCFGLNFELWMQKLAEWGPLARIEASLSVQMSRRVRALFGAMNFWAIIMYNLVSLNSLKFTELVARRLLLTGFPQTTLSILFVTYCGVQLVKERERTLALEEEQKQDKEKPE

SEQ ID NO: 328330 - protein, 245 aa, Artificial Sequence
  derived and/or modified sequence
MVAPKLRSWMYAVYGALAVMGTMGPWYLLLLLGHCVGLYVASLLGQPWLCLGLGLASLASFKMDPLISWQSGFVTGTFDLQEVLFHGGSSFTVLRCTSFALESCAHPDRHYSLADLLKYNFYLPFFFFGPIMTFDRFHAQVSQVEPVRREGELWHIRAQAGLSVVAIMAVDIFFHFFYILSPATSSSPTASQTVPSAGLAYSNLVYDWVKGRPLWCCQHWHASTTWTHPPPKCITALYVFAETHF

SEQ ID NO: 328331 - protein, 231 aa, Artificial Sequence
  derived and/or modified sequence
MGIKTALPAAELGLYSLVLSGALAYAGRGLLEASQDGAHRKAFRESVRPGWEYIGRKMDVADFEWVMWFTSFRNVIIFALSGHVLFAKLCTMVAPKLRSWMYAVYGALAVMGTMGPWYLLLLLGHCVGLYVASLLGQPWLCLGLGLASLASFKMDPLISWQSGFVTGTFDLQEVLFHGGSSFTVLRCTSFALESCAHPDRHYSLADLLKYNFYLPFFFFGPIMTFDRFHAQ

SEQ ID NO: 328332 - DNA, 1750 bp, Artificial Sequence
  derived and/or modified sequence
agggcctgaatacacagagcgctgagagagtggggcagtgtggtcacggacacaggtcatgggggccttggcaggagcggttttggcagagggtggggccggtgcctctggaaggtatgaagatgtaaatgaagccctgtccaggctatgggcatcaagacagcattgccggcggctgagctgggcctctactctctggtgctgagtggggccctggcctatgctggccggggcctccttgaggcttcacaagatggggcccacaggaaggccttccgggagtctgtgcgacctggctgggagtacattggccggaagatggatgtggctgacttcgagtgggtgatgtggttcacctcctttcgcaacgtcatcatctttgccctctccggacatgtgctgtttgctaaactctgcacgatggttgccccaaagctccgctcctggatgtatgctgtgtacggggccttggctgtgatgggcacaatgggcccttggtacctgctgctgctgcttggtcactgtgtgggcctctatgtggcctcgcttttgggccagccctggctctgtcttggccttggcttggccagcctggcctccttcaagatggaccccctaatctcttggcagagcgggtttgtaacaggcacttttgatcttcaagaggtgctgtttcatgggggcagcagcttcacagtgctgcgttgcaccagctttgcactggagagctgtgcccaccctgaccgccactactccttagctgacctgctcaagtacaacttctacctgcccttcttcttcttcgggcccatcatgacctttgatcgcttccatgctcaggtgagccaggtggagccagtgagacgcgagggtgagctgtggcacatccgagcccaggcaggcctaagcgtggtggccatcatggccgtcgacatcttctttcacttcttctacatcctcactatccccagcgacctcaagttcgccaaccgcctcccagacagtgccctcgctggcctagcctattcaaacctggtgtatgactgggtgaaggcggccgtcctctttggtgttgtcaacactgtggcatgcctcgaccacctggacccaccccagcctcccaagtgcatcaccgcactctacgtctttgcggaaacgcactttgaccgtggcatcaacgactggctttgcaaatatgtgtataaccacattggtggggagcattccgctgtgatcccagagctggcagccacagtggccacatttgccatcaccacactgtggcttgggccttgtgacattgtctacctgtggtcattccttaactgctttggcctcaactttgagctctggatgcaaaaactggcagagtgggggcccctagcacgaattgaggcctctctgtcagtgcagatgtcccgtagggtccgggccctgtttggagccatgaacttctgggccatcatcatgtacaaccttgtgagcctgaacagcctcaaattcacagagctggttgcccggcgcctgctactcacagggttcccccagaccacgctgtccatcctgtttgtcacctactgtggcgtccagctggtaaaggagcgtgagcgaaccttggcactggaggaggagcagaagcaggacaaagagaagccggagtaggagggagcgggtagagggatgggctctgctcagctattcttgggccagatggggcctgaccgatagaataaaagacttttctacaaca

SEQ ID NO: 328333 - DNA, 1735 bp, Artificial Sequence
  derived and/or modified sequence
agggcctgaatacacagagcgctgagagagtggggcagtgtggtcacggacacaggtcatgggggccttggcaggagcggttttggcagagggtggggccggtgcctctggaaggtatgaagatgtaaatgaagccctgtccaggctatgggcatcaagacagcattgccggcggctgagctgggcctctactctctggtgctgagtggggccctggcctatgctggccggggcctccttgaggcttcacaagatggggcccacaggaaggccttccgggagtctgtgcgacctggctgggagtacattggccggaagatggatgtggctgacttcgagtgggtgatgtggttcacctcctttcgcaacgtcatcatctttgccctctccggacatgtgctgtttgctaaactctgcacgatggttgccccaaagctccgctcctggatgtatgctgtgtacggggccttggctgtgatgggcacaatgggcccttggtacctgctgctgctgcttggtcactgtgtgggcctctatgtggcctcgcttttgggccagccctggctctgtcttggccttggcttggccagcctggcctccttcaagatggaccccctaatctcttggcagagcgggtttgtaacaggcacttttgatcttcaagaggtgctgtttcatgggggcagcagcttcacagtgctgcgttgcaccagctttgcactggagagctgtgcccaccctgaccgccactactccttagctgacctgctcaagtacaacttctacctgcccttcttcttcttcgggcccatcatgacctttgatcgcttccatgctcaggtgagccaggtggagccagtgagacgcgagggtgagctgtggcacatccgagcccaggcaggcctaagcgtggtggccatcatggccgtcgacatcttctttcacttcttctacatcctctccccagcgacctcaagttcgccaaccgcctcccagacagtgccctcggctggcctagcctattcaaacctggtgtatgactgggtgaagggccgtcctctttggtgttgtcaacactggcatgcctcgaccacctggacccacccccctcccaagtgcatcaccgcactctacgtctttgcggaaacgcactttgaccgtggcatcaacgactggctttgcaaatatgtgtataaccacattggtggggagcattccgctgtgatcccagagctggcagccacagtggccacatttgccatcaccacactgtggcttgggccttgtgacattgtctacctgtggtcattccttaactgctttggcctcaactttgagctctggatgcaaaaactggcagagtgggggcccctagcacgaattgaggcctctctgtcagtgcagatgtcccgtagggtccgggccctgtttggagccatgaacttctgggccatcatcatgtacaaccttgtgagcctgaacagcctcaaattcacagagctggttgcccggcgcctgctactcacagggttcccccagaccacgctgtccatcctgtttgtcacctactgtggcgtccagctggtaaaggagcgtgagcgaaccttggcactggaggaggagcagaagcaggacaaagagaagccggagtaggagggagcgggtagagggatgggctctgctcagctattcttgggccagatggggcctgaccgatagaataaaagacttttct

SEQ ID NO: 328334 - DNA, 915 bp, Artificial Sequence
  derived and/or modified sequence
agctctgcagcactcggctctgctccactctgctcagctccgctccaggaaggccacctcctcctccccctcctcctcccgctgtcaccactcaccgctcataacctcaagggggtggggaccccagggctggacacaccccaccgtggccccagagctcagccggtcgcacggacggacagttggaagccggaccccagagcctgagccctgtccaggctatgggcatcaagacagcattgccggcggctgagctgggcctctactctctggtgctgagtggggccctggcctatgctggccggggcctccttgaggcttcacaagatggggcccacaggaaggccttccgggagtctgtgcgacctggctgggagtacattggccggaagatggatgtggctgacttcgagtgggtgatgtggttcacctcctttcgcaacgtcatcatctttgccctctccggacatgtgctgtttgctaaactctgcacgatggttgccccaaagctccgctcctggatgtatgctgtgtacggggccttggctgtgatgggcacaatgggcccttggtacctgctgctgctgcttggtcactgtgtgggcctctatgtggcctcgcttttgggccagccctggctctgtcttggccttggcttggccagcctggcctccttcaagatggaccccctaatctcttggcagagcgggtttgtaacaggcacttttgatcttcaagaggtgctgtttcatgggggcagcagcttcacagtgctgcgttgcaccagctttgcactggagagctgtgcccaccctgaccgccactactccttagctgacctgctcaagtacaacttctacctgcccttcttcttcttcgggcccatcatgacctttgatcgcttccatgctcagg

SEQ ID NO: 328335 - DNA, 1865 bp, Artificial Sequence
  derived and/or modified sequence
agcagctctgcagcactcggctctgctccactctgctcagctccgctccaggaaggccacctcctcctccccctcctcctcccgctgtcaccactcaccgctcataacctcaagggggtggggaccccagggctggacacaccccaccgtggccccagagctcagccggtcgcacggacggacagttggaagccggaccccagagcctgaggtgggcagtgtgccagggtcccttgcggcctcctcaagccctgtccaggctatgggcatcaagacagcattgccggcggctgagctgggcctctactctctggtgctgagtggggccctggcctatgctggccggggcctccttgaggcttcacaagatggggcccacaggaaggccttccgggagtctgtgcgacctggctgggagtacattggccggaagatggatgtggctgacttcgagtgggtgatgtggttcacctcctttcgcaacgtcatcatctttgccctctccggacatgtgctgtttgctaaactctgcacgatggttgccccaaagctccgctcctggatgtatgctgtgtacggggccttggctgtgatgggcacaatgggcccttggtacctgctgctgctgcttggtcactgtgtgggcctctatgtggcctcgcttttgggccagccctggctctgtcttggccttggcttggccagcctggcctccttcaagatggaccccctaatctcttggcagagcgggtttgtaacaggcacttttgatcttcaagaggtgctgtttcatgggggcagcagcttcacagtgctgcgttgcaccagctttgcactggagagctgtgcccaccctgaccgccactactccttagctgacctgctcaagtacaacttctacctgcccttcttcttcttcgggcccatcatgacctttgatcgcttccatgctcaggtgagccaggtggagccagtgagacgcgagggtgagctgtggcacatccgagcccaggcaggcctaagcgtggtggccatcatggccgtcgacatcttctttcacttcttctacatcctcactatccccagcgacctcaagttcgccaaccgcctcccagacagtgccctcgctggcctagcctattcaaacctggtgtatgactgggtgaaggcggccgtcctctttggtgttgtcaacactgtggcatgcctcgaccacctggacccaccccagcctcccaagtgcatcaccgcactctacgtctttgcggaaacgcactttgaccgtggcatcaacgactggctttgcaaatatgtgtataaccacattggtggggagcattccgctgtgatcccagagctggcagccacagtggccacatttgccatcaccacactgtggcttgggccttgtgacattgtctacctgtggtcattccttaactgctttggcctcaactttgagctctggatgcaaaaactggcagagtgggggcccctagcacgaattgaggcctctctgtcagtgcagatgtcccgtagggtccgggccctgtttggagccatgaacttctgggccatcatcatgtacaaccttgtgagcctgaacagcctcaaattcacagagctggttgcccggcgcctgctactcacagggttcccccagaccacgctgtccatcctgtttgtcacctactgtggcgtccagctggtaaaggagcgtgagcgaaccttggcactggaggaggagcagaagcaggacaaagagaagccggagtaggagggagcgggtagagggatgggctctgctcagctattcttgggccagatggggcctgaccgatagaataaaagacttttctacaaca

SEQ ID NO: 328336 - protein, 282 aa, Artificial Sequence
  derived and/or modified sequence
MPTCRLGPKFLLVSGVSAMAALDSLSLFTSLGLSEQKARETLKNSALSAQLREAATQAQQTLGSTIDKATGILLYGLASRLRDTRRLSFLVSYIASKKIHTEPQLSAALEYVRSHPLDPIDTVDFERECGVGVIVTPEQIEEAVEAAINRHRPQLLVERYHFNMGLLMGEARAVLKWADGKMIKNEVDMQVLHLLGPKLEADLEKKFKVAKARLEETDRRTAKDVVENGETADQTLSLMEQLRGEALKFHKPGTYPVPARTQWNPAYWTCQSHQFQLWLCQV

SEQ ID NO: 328337 - DNA, 849 bp, Artificial Sequence
  derived and/or modified sequence
atgcccacatgccgcctggggcccaagtttctcttggtctccggggtcagtgctatggccgccttggattccctttcgctttttacttctctagggttaagcgaacagaaggctagagaaaccctgaaaaattccgctctcagcgctcaattgcgagaagctgccacgcaagctcagcaaactttgggctctacaatcgacaaagctactggcatcctgctctatggcctagcctcgagactaagagacacccgccggttatcattccttgtttcctatattgcatctaagaaaatccacactgaaccacagttgagcgcagcccttgagtacgtgcgttctcatccccttgacccaatcgatactgtagacttcgagagagagtgcggcgtaggggtcattgtgacaccagaacagatcgaggaggccgtggaagccgcgatcaaccgacacagaccacagttactcgtggaaaggtaccattttaatatgggcctgctgatgggtgaagcgagggccgtactcaagtgggcagatggtaaaatgatcaagaacgaagtggatatgcaggttctgcatctcctcggcccaaaacttgaagccgacctcgaaaaaaaatttaaagtcgccaaggccaggcttgaggagacggacaggcgtaccgctaaggatgtagttgagaacggcgagacggctgatcagacactgagtctcatggagcagttaagaggcgaagcgttaaagttccacaaaccaggcacttaccccgtacccgccaggacacagtggaacccagcttattggacatgccaatcacaccagttccaactgtggttatgccaagtgtag

SEQ ID NO: 328338 - DNA, 1287 bp, Artificial Sequence
  derived and/or modified sequence
gcccccgaggacaattactatattgagatggagttaccagggctgaagtagaaaagtcagagcaaaaccacgcctgtgtcttcctcctgcctcagggacgaacaccttccttccaggtccgtggcaaatatctccaaaagccctgccgcctgccaacaccccttcaagttcccagttccacggaggcggaagcaaagcccccggaaaggccggtttgtccgccctgtgttgtttaaaggggatagacgaccttggagcgccccgccccctcccgccaaggaaggaccccattggctctccccggaggcttcactctcattggtcagcgagtgaatgccgacctgcagactggggcctaagtttcttttagtttccggtgtctctgcaatggcggctctagactccctgtcgctcttcactagcctcggcctgagcgagcagaaggcccgcgagacgctcaagaactcggctctgagcgcgcagctgcgcgaggccgctactcaggctcagcagaccctgggttccaccattgacaaagctaccgggatcctgttatatggcttggcctcccgactcagggatacccggcgtctctccttccttgtaagctacatagccagtaagaagatccacactgagccccagctaagcgctgcccttgagtatgtgcggagtcaccccttggaccccatcgacactgtggacttcgagcgggaatgtggcgtgggtgtcattgtgaccccagagcagattgaggaggctgtggaggctgctattaacaggcaccggccccagctcctggtggaacgttaccatttcaacatggggctgctgatgggagaggctcgggctgtgctgaagtgggcagatggcaaaatgatcaagaatgaagtggacatgcaggtcctccaccttctgggccccaagttggaggctgatctggagaagaagttcaaggtggcaaaagctcggctagaagaaacagaccggaggacggcaaaggatgtggtggagaatggcgagactgctgaccagaccctgtctctgatggagcagctccggggggaggcccttaagttccacaagcctggtacgtacccggttcccgccagaacccaatggaatcctgcatattggacatgccaaagccatcaatttcaactttggctatgccaagtttgataaacaggattgtggggctgatggatgatgtgggagttcacagatggtgcaactttcctaggccaacaatggcatctgttttctgcgttttgatgacaccaaccc

SEQ ID NO: 328339 - DNA, 849 bp, Artificial Sequence
  derived and/or modified sequence
atgcccacctgccgcctgggccccaagttcctgctggtgtctggagtgtctgccatggccgccctggacagcctgagcctcttcaccagcctgggcctgtctgagcagaaggcccgggagaccctgaagaacagcgccctgagcgcccagctgcgggaggccgccacccaggcccagcagaccctgggcagcaccatcgacaaggccaccggcatcctgctgtatggcctggccagccggctgcgggacacccggcggctgtccttcctggtgtcctacatcgccagcaagaagatccacacagagccccagctgtctgctgccctggagtatgtgcgcagccaccccctggaccccatcgacacagtggactttgagcgggagtgtggggtgggcgtcatcgtgaccccagagcagatcgaggaggccgtggaggccgccatcaacagacaccggccccagctgctggtggagcgctaccacttcaacatgggcctgctgatgggagaggcccgggctgtgctgaagtgggcagatggcaagatgatcaagaatgaggtggacatgcaggtgctgcacctgctgggccccaagctggaggccgacctggagaagaagttcaaggtggccaaggcccggctggaggagacagacagaagaacagccaaggatgtggtggagaatggagaaacagctgaccagaccctgagcctgatggagcagctgcggggggaggccctgaagttccacaagccaggcacctaccctgtgcctgcccggacccagtggaacccagcctactggacctgccagagccaccagttccagctgtggctgtgccaggtgtag

SEQ ID NO: 328340 - DNA, 849 bp, Artificial Sequence
  derived and/or modified sequence
atgcccacctgccggctgggccccaagttcctgctggtgagcggcgtgagtgcaatggccgcccttgactcactgagcctcttcacatcattagggctgtccgaacagaaagcccgcgagaccctaaaaaattcagcactttcagctcagcttcgtgaggccgctacacaggcccagcagacactcggcagcacgatagacaaggccaccgggattttgctttatggactcgccagccgactgcgggacacccggaggctgtccttcctggttagttatatcgcaagcaagaaaatccacaccgagccgcaactctccgccgcccttgagtacgtgcgctctcatccccttgatcccatcgacacagtggattttgagagagaatgtggagtcggagtaattgttacacccgagcaaattgaagaggccgtggaagcagcaatcaaccgacacagacctcagctgttggtcgagcgctaccatttcaacatgggtctcctgatgggagaagctagagcggtcttgaagtgggcggacgggaaaatgatcaaaaatgaggtggacatgcaggtactgcacctcctcgggcccaagctggaggctgatctagagaaaaaattcaaggtggcaaaggcccgcctggaagaaacagatcgccgaacagcaaaagacgtggtggagaacggcgaaacagctgatcagacgttatctctaatggaacagctgcgtggcgaggccctaaagttccacaagccgggaacctatcccgtcccagcccgcacccagtggaatcctgcatattggacttgccagtctcatcaattccaactctggctgtgccaggtttag

SEQ ID NO: 328341 - DNA, 849 bp, Artificial Sequence
  derived and/or modified sequence
atgcctacctgccggctgggccctaaattccttctcgtgagcggagttagcgccatggctgcgcttgactctttgagcctatttacaagtttgggattatccgagcagaaagctcgcgagaccctgaagaatagcgccctgtccgcgcagctgcgcgaagctgccactcaggcccagcagactctgggctcaaccatcgataaagcaacagggatcctgctgtacggcttggcttcgcgcctccgggacactcgaaggctatctttcctggttagctatattgcgtccaaaaagatccataccgagccccagctgagtgcagcattagagtatgtgcgtagccatcctcttgatcctattgacacagtcgacttcgagagagagtgtggtgtgggcgtgatcgttactcccgaacaaatagaggaagcagtggaagccgcaattaaccgtcatagacctcagctgctggttgaacgctatcatttcaacatgggcctcctcatgggcgaagcccgagccgtcctgaagtgggcggatggcaagatgatcaaaaatgaagtcgacatgcaggttttgcatctcctggggccaaaactggaggcagatttagagaaaaagttcaaagtagctaaggcccgactggaggagacagatcgacgcaccgccaaggatgtagtggagaacggcgagactgccgatcaaactctctcactgatggagcagttaaggggcgaagctctgaaatttcacaagccgggaacctatcccgtacctgctcgtacccagtggaatcccgcatactggacgtgccaatcccatcagtttcagttatggctgtgtcaagtgtag

SEQ ID NO: 328342 - DNA, 849 bp, Artificial Sequence
  derived and/or modified sequence
atgcccacctgcagactgggccccaagttcctgctggtgagcggcgtgagcgccatggccgccctggacagcctgagcctgttcaccagcctgggcctgagcgagcagaaggccagagagaccctgaagaacagcgccctgagcgcccagctgagagaggccgccacccaggcccagcagaccctgggcagcaccatcgacaaggccaccggcatcctgctgtacggcctggccagcagactgagagacaccagaagactgagcttcctggtgagctacatcgccagcaagaagatccacaccgagccccagctgagcgccgccctggagtacgtgagaagccaccccctggaccccatcgacaccgtggacttcgagagagagtgcggcgtgggcgtgatcgtgacccccgagcagatcgaggaggccgtggaggccgccatcaacagacacagaccccagctgctggtggagagataccacttcaacatgggcctgctgatgggcgaggccagagccgtgctgaagtgggccgacggcaagatgatcaagaacgaggtggacatgcaggtgctgcacctgctgggccccaagctggaggccgacctggagaagaagttcaaggtggccaaggccagactggaggagaccgacagaagaaccgccaaggacgtggtggagaacggcgagaccgccgaccagaccctgagcctgatggagcagctgagaggcgaggccctgaagttccacaagcccggcacctaccccgtgcccgccagaacccagtggaaccccgcctactggacctgccagagccaccagttccagctgtggctgtgccaggtgtag

SEQ ID NO: 328343 - protein, 567 aa, Artificial Sequence
  derived and/or modified sequence
MMANSQILLRQATLSVFSCRTSKEQCKKARLDWNTDAASLIGEELQVDFLDHVPLTTHNFARKTFLKLAFCDICQKFLLNGFRCQTCGYKFHEHCSTKVPTMCVDWSNIRQLLLFPNSTIGDSGVPALPSLTMRRMRESVSRMPVSSQHRYSTPHAFTFNTSSPSSEGSLSQRQRSTSTPNVHMVSTTLPVDSRMIEDAIRSHSESASPSALSSSPNNLSPTGWSQPKTPVPAQRERAPVSGTQEKNKIRPRGQRDSSYYWEIEASEVMLSTRIGSGSFGTVYKGKWHGDVAVKILKVVDPTPEQFQAFRNEVAVLRKTRHVNILLFMGYMTKDNLAIVTQWCEGSSLYKHLHVQETKFQMFQLIDIARQTAQGMDYLHAKNIIHRDMKSNNIFLHEGLTVKIGDFGLATVKSRWSGSQQVEQPTGSVLWMAPEVIRMQDNNPFSFQSDVYSYGIVLYELMTGELPYSHINNRDQIIFMVGRGYASPDLSKLYKNCPKAMKRLVADCVKKVKEERPLFPQILSSIELLQHSLPKINRSASEPSLHRAAHTEDINACTLTTSPRLPVF

SEQ ID NO: 328344 - DNA, 1704 bp, Artificial Sequence
  derived and/or modified sequence
atgatggccaacagccagatcctgctgagacaggccaccctgagcgtgttcagctgcagaaccagcaaggagcagtgcaagaaggccagactggactggaacaccgacgccgccagcctgatcggcgaggagctgcaggtggacttcctggaccacgtgcccctgaccacccacaacttcgccagaaagaccttcctgaagctggccttctgcgacatctgccagaagttcctgctgaacggcttcagatgccagacctgcggctacaagttccacgagcactgcagcaccaaggtgcccaccatgtgcgtggactggagcaacatcagacagctgctgctgttccccaacagcaccatcggcgacagcggcgtgcccgccctgcccagcctgaccatgagaagaatgagagagagcgtgagcagaatgcccgtgagcagccagcacagatacagcaccccccacgccttcaccttcaacaccagcagccccagcagcgagggcagcctgagccagagacagagaagcaccagcacccccaacgtgcacatggtgagcaccaccctgcccgtggacagcagaatgatcgaggacgccatcagaagccacagcgagagcgccagccccagcgccctgagcagcagccccaacaacctgagccccaccggctggagccagcccaagacccccgtgcccgcccagagagagagagcccccgtgagcggcacccaggagaagaacaagatcagacccagaggccagagagacagcagctactactgggagatcgaggccagcgaggtgatgctgagcaccagaatcggcagcggcagcttcggcaccgtgtacaagggcaagtggcacggcgacgtggccgtgaagatcctgaaggtggtggaccccacccccgagcagttccaggccttcagaaacgaggtggccgtgctgagaaagaccagacacgtgaacatcctgctgttcatgggctacatgaccaaggacaacctggccatcgtgacccagtggtgcgagggcagcagcctgtacaagcacctgcacgtgcaggagaccaagttccagatgttccagctgatcgacatcgccagacagaccgcccagggcatggactacctgcacgccaagaacatcatccacagagacatgaagagcaacaacatcttcctgcacgagggcctgaccgtgaagatcggcgacttcggcctggccaccgtgaagagcagatggagcggcagccagcaggtggagcagcccaccggcagcgtgctgtggatggcccccgaggtgatcagaatgcaggacaacaaccccttcagcttccagagcgacgtgtacagctacggcatcgtgctgtacgagctgatgaccggcgagctgccctacagccacatcaacaacagagaccagatcatcttcatggtgggcagaggctacgccagccccgacctgagcaagctgtacaagaactgccccaaggccatgaagagactggtggccgactgcgtgaagaaggtgaaggaggagagacccctgttcccccagatcctgagcagcatcgagctgctgcagcacagcctgcccaagatcaacagaagcgccagcgagcccagcctgcacagagccgcccacaccgaggacatcaacgcctgcaccctgaccaccagccccagactgcccgtgttctag

SEQ ID NO: 328345 - DNA, 1704 bp, Artificial Sequence
  derived and/or modified sequence
atgatggcgaatagccagatccttttgcgccaagccacgttaagcgtctttagttgtagaacctctaaggagcaatgtaaaaaagcccgcctggattggaacaccgatgctgctagtctgatcggcgaagaactgcaggtggactttctcgatcatgtgccccttacgacgcacaactttgctagaaagacttttctaaagctggccttttgtgacatctgccagaaatttcttcttaacggattcaggtgccagacgtgcggatataaattccatgaacactgttccaccaaggttccgacaatgtgtgtggattggtcaaatatccgccagttactactctttcccaattcaaccatcggggattctggtgtacccgctttgccaagcctcacaatgagaaggatgcgcgaaagcgtttcaagaatgccagtgagcagccagcaccgatactcaactccacatgcttttacattcaacacttcctccccttctagtgagggtagtctgtctcagagacagaggagcaccagtacccctaatgtacatatggtaagtacaacccttcctgtagactctagaatgatagaggatgctatcagatcccactctgagtcagccagtcccagcgctctgtcctccagcccaaacaatctaagccctacaggctggagtcagcctaaaactcccgtcccagcccagagggagcgggctcccgtgtcgggcacccaggaaaagaataaaatacgtccaagagggcaacgtgactccagctactactgggaaattgaggccagtgaggtgatgctgtccacacgaatcgggtccggatcctttggcacggtctacaagggaaagtggcacggcgatgtggctgttaagatcctgaaggtggtcgatccaactcccgagcagttccaggccttccggaatgaagtcgccgtcctccggaagacacggcatgttaacattcttctgttcatggggtacatgactaaagataatctggcaattgtgacgcagtggtgcgagggcagctctctgtataagcacctccatgtgcaggagaccaagttccagatgttccaactaattgatattgctcggcaaacagcgcagggtatggattatctccacgctaaaaacattattcacagggacatgaaatccaacaacattttccttcatgagggtttgactgtgaaaatcggagacttcgggttagccacagtaaagagcagatggagcggatcgcagcaggtagaacagccgactggtagcgtcctttggatggcacccgaggtgatcagaatgcaagataacaaccccttctcgttccagagcgatgtgtactcctacggtattgtattatatgaactgatgaccggcgagctcccttattcacatatcaacaatcgcgatcagatcatcttcatggtgggtcgtggctatgccagcccggatctgagcaagctgtacaaaaactgccctaaggctatgaaacgcttggtggccgactgtgtgaaaaaggttaaggaagagagacccctcttccctcagatcctgtctagtatcgaactgctccagcactccctccccaaaattaatagatcagctagcgaaccttccctgcatcgagctgcccatactgaagacatcaacgcttgcaccctgacaaccagtccaaggctccctgtcttttag

SEQ ID NO: 328346 - DNA, 1704 bp, Artificial Sequence
  derived and/or modified sequence
atgatggccaacagccagatcctgctgcggcaggccaccctgtctgtgttcagctgcaggaccagcaaggagcagtgcaagaaggcccggctggactggaacacagatgctgccagcctgattggagaggagctgcaggtggacttcctggaccacgtgcccctgaccacccacaactttgccaggaagaccttcctgaagctggccttctgtgacatctgccagaagttcctgctgaatggcttccgctgccagacctgtggctacaagttccacgagcactgcagcaccaaggtgcccaccatgtgtgtggactggagcaacatccggcagctgctgctcttccccaacagcaccatcggggacagcggcgtgcctgccctgcccagcctgaccatgaggaggatgagggagagcgtgtccaggatgcctgtgagcagccagcaccgctacagcacccctcatgccttcaccttcaacaccagcagccccagcagcgagggcagcctgagccagaggcagaggagcaccagcaccccaaatgtgcacatggtgtccaccaccctgcctgtggacagcaggatgattgaagatgccatccgcagccacagcgagagcgccagccccagcgccctgagcagcagccccaacaacctgagccccaccggctggagccagcccaagacccctgtgcctgcccagcgggagcgggcccctgtgtctggcacccaggagaagaacaagatccggccccggggccagagggacagcagctactactgggagattgaggccagcgaggtgatgctgagcacccgcatcggcagcggcagctttggaacagtgtacaagggcaagtggcatggagatgtggccgtgaagatcctgaaggtggtggaccccaccccagagcagttccaggccttcagaaatgaggtggccgtgctgaggaagaccaggcatgtgaacatcctgctcttcatgggctacatgaccaaggacaacctggccatcgtgacccagtggtgtgagggcagcagcctgtacaagcacctgcacgtgcaggagaccaagttccagatgttccagctgattgatattgcccggcagacagcccagggcatggactacctgcacgccaagaacatcatccaccgggacatgaagagcaacaacatcttcctgcacgagggcctgactgtgaagattggagactttggcctggccaccgtgaagagccgctggagcggcagccagcaggtggagcagcccactggatctgtgctgtggatggcccctgaggtgatccgcatgcaggacaacaaccccttctccttccagagtgatgtgtacagctatggaattgtgctgtatgagctgatgaccggggagctgccctacagccacatcaacaacagagaccagatcatcttcatggtgggccggggctacgccagcccagacctgagcaagctgtacaagaactgccccaaggccatgaagaggctggtggccgactgtgtgaagaaggtgaaggaggagcggcccctcttcccccagatcctgagcagcattgagctgctgcagcacagcctgcccaagatcaacagaagtgccagcgagcccagcctgcacagagctgcccacacagaggacatcaatgcctgcaccctgaccaccagcccccggctgcctgtgttctag

SEQ ID NO: 328347 - DNA, 1704 bp, Artificial Sequence
  derived and/or modified sequence
atgatggccaacagccagatcctgctgcggcaggccaccctgagcgtcttcagctgtcggacctccaaagaacagtgtaaaaaggctcggctggactggaacaccgacgctgcttctctgattggggaggagctgcaggtcgacttccttgaccacgtaccgttgaccactcataatttcgcgcgcaagactttccttaaacttgcattttgtgacatttgccaaaagttcctcctcaacggctttcgctgtcagacctgtgggtacaaattccacgaacactgctccacaaaggtccctaccatgtgtgtggattggagcaacattcgccagctgctactgttcccgaatagtacaattggagattctggagtgcccgccttgccctcgctgactatgcgccgcatgagggagtcagtaagtcgtatgcccgtttcatcgcagcacagatattcaacaccgcatgcttttactttcaacacctcctctccttcttctgaaggctcccttagccaacggcagcgcagcacatctacacctaatgtgcacatggtgagtaccacacttcctgtggatagtcgtatgatcgaggacgctattcgcagccacagcgagtcggcttcgccaagcgcactgtcctccagtcccaacaacttatccccgactggatggtcccaacctaaaactccagtgcctgcccaacgagagcgagcacccgtctcaggaacacaggagaagaataagatacgcccacgcggacaacgagattcctcatattactgggagatcgaggcaagcgaagttatgctgtcgacaagaattggatcaggaagttttggtaccgtgtataaaggaaaatggcatggagacgtggccgtgaagatcctgaaggtcgttgatcccaccccagagcaattccaggcctttaggaacgaggttgccgttctgaggaaaacaaggcatgtgaatattctcttgtttatgggctatatgaccaaagacaatctcgcaatcgttacccagtggtgcgaaggaagcagtttgtacaagcacttgcatgtgcaggagacaaagtttcagatgttccagctgatcgatattgcaaggcagacagcgcagggtatggattatttacatgcaaagaacataatccaccgggacatgaagagcaataatatttttctgcatgagggtttgaccgttaagattggagatttcgggttggccacggtaaaaagcaggtggagtggcagccaacaggtagaacagccaaccgggagcgttctgtggatggcccccgaagtcatcagaatgcaagacaataacccgttcagcttccaaagtgatgtgtactcttatggaattgtgttgtacgagctgatgactggcgagctcccctatagccacataaataatcgggaccaaataatcttcatggtggggaggggctatgcctccccagatctttctaaattgtacaaaaattgtccaaaagccatgaagcggctggtggcagactgcgttaagaaagtaaaagaggagcgcccccttttcccacagatcctctccagtatcgagctcctgcagcacagcctgcctaaaataaaccgcagcgctagcgaacctagcctgcatcgagccgctcacaccgaggacatcaacgcctgtaccttgaccacctctcccagactgcccgtcttctag

SEQ ID NO: 328348 - DNA, 1704 bp, Artificial Sequence
  derived and/or modified sequence
atgatggccaatagtcagattctgctgcggcaggcgacgctgagcgtgttttcgtgtagaacctcaaaggagcagtgcaagaaggccagactggactggaataccgacgccgcatctcttatcggcgaagagttgcaggtggacttcttagaccacgtacctctgactacccacaatttcgcacgtaaaaccttccttaagttagccttctgtgacatctgccagaagtttctcctgaatgggtttaggtgtcagacatgcggatacaagttccatgaacattgcagtaccaaagtcccaactatgtgcgttgattggagtaacatcaggcagttgctgttgtttcctaactcaaccatcggagactcaggagttccggctctgccctccttgactatgcggcgaatgagagaaagcgtatcacggatgcccgtgagttcccaacacagatatagcaccccgcatgccttcacattcaatacatcttcaccttcttcagaagggagccttagccaacggcagcgcagcacatcgactcctaacgtgcacatggtgagtactactctgccagtcgattcccggatgatcgaagatgcgattagaagccattccgagagcgcctctccaagtgccctgtcttcatcaccgaacaatctgagccctactggatggagtcagcccaaaactcccgtgcccgcacagagggagagagcacccgtttccgggactcaggaaaaaaacaagatccggcctcgcggtcagcgcgactcctcttactattgggaaatcgaagcatctgaggtcatgctttccaccaggatcggttcaggatcctttgggaccgtctataaggggaagtggcacggagatgtcgcagtgaagatactcaaggtggtggatcccactccggagcagttccaagcgttcaggaacgaggtggccgtgctgcgcaagacccgccacgtaaacattctgctctttatgggatacatgaccaaggataacctagcaatagtgactcagtggtgcgagggctcctctctttataagcacctgcatgtgcaggaaaccaaatttcagatgtttcaattgatcgacatagccaggcaaaccgcccaaggcatggattacctgcacgccaaaaatattattcaccgggacatgaagagcaataatatctttctgcacgagggactgacggtgaaaataggcgactttggactcgccactgtgaaaagcaggtggtccggatcccagcaggtggagcaacctaccggttccgtgttatggatggcaccagaagtcattcgcatgcaggataacaaccctttttcatttcagtccgacgtgtatagttacggcatagtcctttacgaactcatgactggtgaattgccctactcccacatcaacaacagggaccaaattatctttatggtggggagaggatacgccagccccgaccttagcaaactgtataagaactgtcccaaagccatgaagaggctcgttgcagattgcgtgaaaaaagtgaaagaagagcgtcccctctttccacagatactctcatcaattgagttacttcaacactctctgccaaagataaataggtctgcttccgagccctcattacaccgtgccgctcacaccgaagacataaacgcatgtacactaactacctcaccccgtcttcctgtattttag

SEQ ID NO: 328349 - DNA, 2346 bp, Artificial Sequence
  derived and/or modified sequence
aatcgcgggcgcttgggccgccatcttagatggcgggagtaagaggaaaacgattgtgaggcgggaacggctttctgctgccttttttgggccccgaaaagggtcagctggccgggctttggggcgcgtgccctgaggcgcggagcgcgtttgctacgatgcgggggctgctcggggctccgtcccctgggctggggacgcgccgaatgtgaccgcctcccgctccctcacccgccgcggggaggaggagcgggcgagaagctgccgccgaacgacaggacgttggggcggcctggctccctcaggtttaagaattgtttaagctgcatcaatggagcacatacagggagcttggaagacgatcagcaatggttttggattcaaagatgccgtgtttgatggctccagctgcatctctcctacaatagttcagcagtttggctatcagcgccgggcatcagatgatggcaaactcacagatccttctaagacaagcaacactatccgtgttttcttgccgaacaagcaaagaacagtgtaaaaaagcacgcttagattggaatactgatgctgcgtctttgattggagaagaacttcaagtagatttcctggatcatgttcccctcacaacacacaactttgctcggaagacgttcctgaagcttgccttctgtgacatctgtcagaaattcctgctcaatggatttcgatgtcagacttgtggctacaaatttcatgagcactgtagcaccaaagtacctactatgtgtgtggactggagtaacatcagacaactcttattgtttccaaattccactattggtgatagtggagtcccagcactaccttctttgactatgcgtcgtatgcgagagtctgtttccaggatgcctgttagttctcagcacagatattctacacctcacgccttcacctttaacacctccagtccctcatctgaaggttccctctcccagaggcagaggtcgacatccacacctaatgtccacatggtcagcaccaccctgcctgtggacagcaggatgattgaggatgcaattcgaagtcacagcgaatcagcctcaccttcagccctgtccagtagccccaacaatctgagcccaacaggctggtcacagccgaaaacccccgtgccagcacaaagagagcgggcaccagtatctgggacccaggagaaaaacaaaattaggcctcgtggacagagagattcaagctattattgggaaatagaagccagtgaagtgatgctgtccactcggattgggtcaggctcttttggaactgtttataagggtaaatggcacggagatgttgcagtaaagatcctaaaggttgtcgacccaaccccagagcaattccaggccttcaggaatgaggtggctgttctgcgcaaaacacggcatgtgaacattctgcttttcatggggtacatgacaaaggacaacctggcaattgtgacccagtggtgcgagggcagcagcctctacaaacacctgcatgtccaggagaccaagtttcagatgttccagctaattgacattgcccggcagacggctcagggaatggactatttgcatgcaaagaacatcatccatagagacatgaaatccaacaatatatttctccatgaaggcttaacagtgaaaattggagattttggtttggcaacagtaaagtcacgctggagtggttctcagcaggttgaacaacctactggctctgtcctctggatggccccagaggtgatccgaatgcaggataacaacccattcagtttccagtcggatgtctactcctatggcatcgtattgtatgaactgatgacgggggagcttccttattctcacatcaacaaccgagatcagatcatcttcatggtgggccgaggatatgcctccccagatcttagtaagctatataagaactgccccaaagcaatgaagaggctggtagctgactgtgtgaagaaagtaaaggaagagaggcctctttttccccagatcctgtcttccattgagctgctccaacactctctaccgaagatcaaccggagcgcttccgagccatccttgcatcgggcagcccacactgaggatatcaatgcttgcacgctgaccacgtccccgaggctgcctgtcttctagttgactttgcacctgtcttcaggctgccaggggaggaggagaagccagcaggcaccacttttctgctccctttctccagaggcagaacacatgttttcagagaagctgctgctaaggaccttctagactgctcacagggccttaacttcatgttgccttcttttctatccctttgggccct

SEQ ID NO: 328350 - protein, 570 aa, Artificial Sequence
  derived and/or modified sequence
MSTDEGTYMCIAENRVGKMEASATLTVRGGVIAPPQFVVRPRDQIVAQGRTVTFPCETKGNPQPAVFWQKEGSQNLLFPNQPQQPNSRCSVSPTGDLTITNIQRSDAGYYICQALTVAGSILAKAQLEVTDVLTDRPPPIILQGPANQTLAVDGTALLKCKATGDPLPVISWLKEGFTFPGRDPRATIQEQGTLQIKNLRISDTGTYTCVATSSSGETSWSAVLDVTESGATISKNYDLSDLPGPPSKPQVTDVTKNSVTLSWQPGTPGTLPASAYIIEAFSQSVSNSWQTVANHVKTTLYTVRGLRPNTIYLFMVRAINPQGLSDPSPMSDPVRTQDISPPAQGVDHRQVQKELGDVLVRLHNPVVLTPTTVQVTWTVDRQPQFIQGYRVMYRQTSGLQATSSWQNLDAKVPTERSAVLVNLKKGVTYEIKVRPYFNEFQGMDSESKTVRTTEEAPSAPPQSVTVLTVGSYNSTSISVSWDPPPPDHQNGIIQEYKIWCLGNETRFHINKTVDAAIRSVIIGGLFPGIQYRVEVAASTSAGVGVKSEPQPNNTGYPICHDTDLAFQQHT

SEQ ID NO: 328351 - protein, 204 aa, Artificial Sequence [sequence omitted]

SEQ ID NO: 328352 - protein, 175 aa, Artificial Sequence
  derived and/or modified sequence
MGAYKYIQELWRKKQSDVMRFLLRVRCWQYRQLSALHRAPRPTRPDKARRLGYKAKQGYVIYRIRVRRGGRKRPVPKGATYGKPVHHGVNQLKFARSLQSVAEVNAGRHCGALRVLNSYWVGEDSTYKFFEVILIDPFHKAIRRNPDTQWITKPVHKHREMRGLTSAGRKSRGLG

SEQ ID NO: 328353 - protein, 133 aa, Artificial Sequence
  derived and/or modified sequence
MGAYKYIQELWRKKQSDVMRFLLRVRCWQYRQLSALHRAPRPTRPDKARRLGYKAKQGYVIYRIRVRRGGRKRPVPKGATYGKPVHHGVNQLKFARSLQSVAEERAGRHCGALRVLNSYWVGEDSTYKFFEVI

SEQ ID NO: 328354 - protein, 174 aa, Artificial Sequence
  derived and/or modified sequence
MGAYKYIQELWRKKQSDVMRFLLRVRCWQYRQLSALHRAPRPTRPDKARRLGYKAKQGYVIYRIRVRRGGRKRPVPKGATYGKPVHHGVNQLKFARSLQSVAEERAGRHCGALRVLNSYWVGEDSTYKFFEVILIDPFHKAIRRNPDTQWITKPVHKHREMRGLTSAGRKSRGL

SEQ ID NO: 328355 - protein, 164 aa, Artificial Sequence
  derived and/or modified sequence
MGAYKYIQELWRKKQSDVMRFLLRVRCWQYRQLSALHRAPRPTRPDKARRLGYKAKQGYVIYRIRVRRGGRKRPVPKGATYGKPVHHGVNQLKFARSLQSVAEERAGRHCGALRVHKHREMRGLTSAGRKSRGLGKGHKFHHTIGGSRRAAWRRRNTLQLHRYR

SEQ ID NO: 328356 - DNA, 615 bp, Artificial Sequence
  derived and/or modified sequence
atgggggcatacaagtacattcaggagctttggagaaagaaacagagtgacgtgatgaggtttcttctgagggtacgttgctggcagtacagacagctgagtgcactccacagagcacccaggccaacaaggccagataaagcacgccggctggggtataaggctaagcaaggatacgtaatctaccggattcgtgtgaggcgagggggacggaaacgcccggtgccaaaaggggcaacctacggcaagcctgtgcaccacggcgtgaatcaattaaagttcgcccgaagcctgcagtctgtggcagaagagcgggccggcagacattgcggcgccttaagagtcctaaattcttattgggtgggtgaggatagcacctataaatttttcgaagtcatcctcatcgatccctttcataaagctattaggcggaaccctgacactcagtggatcaccaaacccgtgcataaacatcgtgagatgaggggcctcaccagcgctggcagaaagtctcgagggcttgggaaagggcacaaattccaccatactatcggaggcagcagaagggctgcatggcgacgcaggaacacgctacagctgcatcggtatcggtag

SEQ ID NO: 328357 - DNA, 615 bp, Artificial Sequence
  derived and/or modified sequence
atgggggcctataaatatattcaggagttgtggaggaagaagcaaagtgatgttatgcgctttctgctgcgggtcagatgctggcagtaccggcagttatccgctctgcatagggctcccaggccaacacgtccagacaaagctcggcgactggggtacaaggctaaacaagggtacgtgatttatagaattagagttcgacgagggggtcgcaaacgtccagttcctaaaggagccacttatggcaagccggttcaccacggcgtgaaccagctgaagttcgcccggtcactacagagtgtggccgaggagagagcaggtcgtcactgcggtgccctgagagtgttgaattcctattgggtgggcgaagactccacatataagttcttcgaggtgatcctcatcgacccgtttcacaaggccattagacgtaaccccgacactcagtggatcacgaagcccgtacacaagcatcgggaaatgcggggactcacttctgctggacggaaatcgcggggcctgggcaaggggcacaaattccaccacaccattggcggctctagacgcgctgcatggcggcgaaggaatactctacagttacatcggtacaggtag

SEQ ID NO: 328358 - DNA, 528 bp, Artificial Sequence
  derived and/or modified sequence
atgggggcgtacaaatatatccaggagttgtggagaaagaagcaatccgacgtgatgaggtttctgctccgcgtgaggtgttggcagtatcgccaactgagtgcgctacaccgagcaccccgacccactcgaccagacaaggcccgccgactggggtacaaagcaaaacagggatacgtgatctatagaataagagttcgcagggggggaagaaagcggcccgtgcctaagggcgcaacctacggaaaacccgtgcaccacggcgtgaaccagctgaaattcgcacgttcgctgcagtctgtggccgaagtgaacgctggccgccactgtggcgccctccgcgtgctgaacagctactgggtgggcgaggactccacttataaattcttcgaggttatcctgattgaccctttccacaaggcaatacgccgcaacccagacacgcaatggattactaaaccagtccataaacatcgggagatgcgcggcctaaccagcgcggggaggaagtcgagggggttgggatag

SEQ ID NO: 328359 - DNA, 615 bp, Artificial Sequence
  derived and/or modified sequence
atgggcgcatacaaatacatccaggaactgtggcgcaagaagcaatcagatgtaatgaggtttcttctgagggtcagatgttggcagtatcgccaactatctgctctgcacagggcaccacgacccacgcgacctgataaagcccgccggctgggctacaaagccaaacaaggctatgtaatatacagaatccgagtgagacgcggcgggcgaaagcggccggtgcccaagggggccacatatgggaaacccgtgcatcatggtgtgaaccaactgaagttcgctagaagcctgcagtctgttgcagaagaacgagccggacgccactgcggggccttgagagttctgaatagctactgggtaggcgaagactccacctataagttcttcgaagtgatcttaatagacccattccataaggcaatccggcgcaaccccgatactcagtggattacaaagcctgttcacaagcaccgcgaaatgcgggggctcactagcgctggaaggaagtctaggggcctgggcaaaggtcacaaatttcatcatactatcggcggttcaaggagagccgcctggcgcaggagaaataccctccagctccaccggtaccggtag

SEQ ID NO: 328360 - DNA, 615 bp, Artificial Sequence
  derived and/or modified sequence
atgggtgcctacaaatatatccaggaactatggaggaagaagcaatccgacgtcatgcgtttcctactccgcgtgagatgctggcaataccgccagctgtccgccttgcacagggctcctcgtccaacccgcccagataaggcccggcgcctggggtacaaggctaaacagggttatgtgatataccgtatacgagtgcggagaggcggccgcaagcgcccagtgccgaaaggcgctacctacggtaagcccgtgcaccatggggtgaaccagctgaaatttgctaggtccctgcagtctgtagcagaggaacgcgccggccggcactgcggcgcactgcgagtactgaacagctactgggttggggaagactccacctataagttttttgaagtcattttgattgatccgtttcataaggctattcgcaggaaccccgatacccagtggattacgaaacctgtccacaagcaccgtgagatgcgagggctgactagcgctggccggaaatcccgtggtctgggcaagggccacaagttccatcatacaattggggggtctagacgtgctgcatggagacgtaggaacacgctgcagttgcaccggtataggtag

SEQ ID NO: 328361 - DNA, 402 bp, Artificial Sequence
  derived and/or modified sequence
atgggggcatacaaatatatccaggagttatggagaaagaagcagtctgatgtgatgcgcttcctgctgagagtgagatgctggcagtacagacaattatctgcccttcacagagcacctcgaccgacgagaccagataaagctagaaggctaggctataaagcaaagcagggctacgtgatctaccgaattagggtcaggaggggcggtcgcaagcgacctgtgcctaaaggggcaacctatgggaaacccgttcatcacggagtaaatcagcttaagtttgctaggtctttgcagtctgtggccgaggaacgcgcgggacgtcactgcggcgctctgcgggtgctcaattcgtattgggtcggggaagatagcacatataagttctttgaagttatttag

SEQ ID NO: 328362 - DNA, 525 bp, Artificial Sequence
  derived and/or modified sequence
atgggggcctacaagtacatccaggaactttggcggaagaaacaatccgatgttatgagattcctccttcgagtgagatgttggcagtaccggcagttgagcgccctacatcgcgcccctagaccaactcgccccgacaaagcacgtcgcctcggttataaggcgaaacaggggtatgttatctacaggatcagagtccgtcgcgggggacgcaagaggccagtaccgaagggcgccacatatggcaagcccgtgcatcatggcgtgaatcagctcaagttcgccagaagcctccagagcgtggcggaagagagagccggtcgccactgcggagctctcagggtgttgaactcatactgggtgggcgaggattcaacatacaagttctttgaggttattttgattgatcctttccacaaagccataaggaggaaccctgatacacagtggatcacaaaacctgtgcataaacacagggagatgcgcggtctgacaagcgctggccgtaagtctcggggactctag

SEQ ID NO: 328363 - DNA, 615 bp, Artificial Sequence
  derived and/or modified sequence
atgggcgcttacaagtacattcaagaactgtggaggaaaaaacaaagcgacgtgatgcggttccttttacgggtccgatgttggcagtatcgccagctctctgccctccaccgggctccaaggcccactagacctgataaagctaggcgccttggatataaggctaagcaaggatacgtgatctataggattcgcgtccgaagagggggtcggaaaaggcctgtgccaaaaggagccacatacggcaaaccagtgcatcacggtgtgaaccagttaaagtttgcaaggagcctccagagtgtggctgaggagcgcgccggaaggcactgcggggcattaagggtgttgaactcctattgggtcggagaggactcaacatacaaattttttgaggtgattttgattgacccattccacaaagcgatccgacgcaaccctgatactcagtggataacaaagcccgtgcacaaacaccgagagatgagggggctgactagcgccggtcgaaaaagccgcggtcttgggaagggtcacaagttccatcataccatcggcggctctcgacgtgccgcttggcgtcggcgaaacaccctgcaactacaccgatacaggtag

SEQ ID NO: 328364 - DNA, 495 bp, Artificial Sequence
  derived and/or modified sequence
atgggagcttacaagtacattcaggaactgtggcgaaagaagcagagcgatgtgatgcggttcctgctgcgcgtccggtgctggcagtacagacagctgtctgctctgcacagggctccacgccccacaaggccggataaggctcgtaggctaggctacaaagctaaacagggctacgtcatttatagaattcgcgtgcgacgggggggacggaaacggccggtaccaaaaggggccacgtatgggaaaccagttcaccatggagtaaatcagttgaaatttgcccgtagcttacagtctgtggccgaggaacgcgctggccggcactgtggggcactgcgagtccacaagcacagggagatgaggggactcacgtcagcgggtcgaaagtctaggggattaggaaagggccacaaatttcaccataccattgggggctcgaggagagccgcctggcgtagaagaaacacactgcaattgcacaggtaccgatag

SEQ ID NO: 328365 - DNA, 615 bp, Artificial Sequence
  derived and/or modified sequence
atgggcgcctacaagtacatccaggagctgtggaggaagaagcagagtgatgtgatgaggttcctgctgcgggtgcgctgctggcagtaccggcagctgagcgccctgcaccgggccccccggcccaccaggccagacaaggcccggcggctgggctacaaggccaagcagggctacgtgatctaccgcatccgggtgagaagaggaggcaggaagaggcctgtgcccaagggggccacctacggcaagcctgtgcaccacggcgtgaaccagctgaagtttgcccggagcctgcagagcgtggccgaggagcgggccggccgccactgtggggccctgcgggtgctgaacagctactgggtgggggaggacagcacctacaagttctttgaggtgatcctgattgaccccttccacaaggccatcagaagaaatccagacacccagtggatcaccaagcctgtgcacaagcaccgggagatgaggggcctgaccagcgctggcaggaagagccggggcctgggcaagggccacaagttccaccacaccatcggcggcagccggcgggccgcctggaggagaagaaacaccctgcagctgcaccgctacagatag

SEQ ID NO: 328366 - DNA, 528 bp, Artificial Sequence
  derived and/or modified sequence
atgggcgcctacaagtacatccaggagctgtggaggaagaagcagagtgatgtgatgaggttcctgctgcgggtgcgctgctggcagtaccggcagctgagcgccctgcaccgggccccccggcccaccaggccagacaaggcccggcggctgggctacaaggccaagcagggctacgtgatctaccgcatccgggtgagaagaggaggcaggaagaggcctgtgcccaagggggccacctacggcaagcctgtgcaccacggcgtgaaccagctgaagtttgcccggagcctgcagagcgtggccgaggtgaatgccggccgccactgtggggccctgcgggtgctgaacagctactgggtgggggaggacagcacctacaagttctttgaggtgatcctgattgaccccttccacaaggccatcagaagaaatccagacacccagtggatcaccaagcctgtgcacaagcaccgggagatgaggggcctgaccagcgctggcaggaagagccggggcctgggctag

SEQ ID NO: 328367 - DNA, 402 bp, Artificial Sequence
  derived and/or modified sequence
atgggcgcctacaagtacatccaggagctgtggaggaagaagcagagtgatgtgatgaggttcctgctgcgggtgcgctgctggcagtaccggcagctgagcgccctgcaccgggccccccggcccaccaggccagacaaggcccggcggctgggctacaaggccaagcagggctacgtgatctaccgcatccgggtgagaagaggaggcaggaagaggcctgtgcccaagggggccacctacggcaagcctgtgcaccacggcgtgaaccagctgaagtttgcccggagcctgcagagcgtggccgaggagcgggccggccgccactgtggggccctgcgggtgctgaacagctactgggtgggggaggacagcacctacaagttctttgaggtgatctag

SEQ ID NO: 328368 - DNA, 525 bp, Artificial Sequence
  derived and/or modified sequence
atgggcgcctacaagtacatccaggagctgtggaggaagaagcagagtgatgtgatgaggttcctgctgcgggtgcgctgctggcagtaccggcagctgagcgccctgcaccgggccccccggcccaccaggccagacaaggcccggcggctgggctacaaggccaagcagggctacgtgatctaccgcatccgggtgagaagaggaggcaggaagaggcctgtgcccaagggggccacctacggcaagcctgtgcaccacggcgtgaaccagctgaagtttgcccggagcctgcagagcgtggccgaggagcgggccggccgccactgtggggccctgcgggtgctgaacagctactgggtgggggaggacagcacctacaagttctttgaggtgatcctgattgaccccttccacaaggccatcagaagaaatccagacacccagtggatcaccaagcctgtgcacaagcaccgggagatgaggggcctgaccagcgctggcaggaagagccggggcctgtag

SEQ ID NO: 328369 - DNA, 495 bp, Artificial Sequence
  derived and/or modified sequence
atgggcgcctacaagtacatccaggagctgtggaggaagaagcagagtgatgtgatgaggttcctgctgcgggtgcgctgctggcagtaccggcagctgagcgccctgcaccgggccccccggcccaccaggccagacaaggcccggcggctgggctacaaggccaagcagggctacgtgatctaccgcatccgggtgagaagaggaggcaggaagaggcctgtgcccaagggggccacctacggcaagcctgtgcaccacggcgtgaaccagctgaagtttgcccggagcctgcagagcgtggccgaggagcgggccggccgccactgtggggccctgcgggtgcacaagcaccgggagatgaggggcctgaccagcgctggcaggaagagccggggcctgggcaagggccacaagttccaccacaccatcggcggcagccggcgggccgcctggaggagaagaaacaccctgcagctgcaccgctacagatag

SEQ ID NO: 328370 - DNA, 615 bp, Artificial Sequence
  derived and/or modified sequence
atgggcgcctacaagtacatccaggagctgtggcggaagaagcagagtgacgtgatgcgtttcctcctcagagtcagatgttggcagtatcgacagctaagtgctctgcatagagcgcctagacctactagacctgacaaggccagaagattgggctacaaagcaaagcaagggtatgtaatctataggatccgggtccggagggggggccgcaagcgaccggtaccgaaaggtgcaacttatggtaaacccgtgcaccacggcgtgaaccagctgaaattcgctcggtcccttcaatccgttgctgaggaaagagcaggcaggcattgtggagccctgagggtgctaaatagttactgggtgggcgaggacagcacctacaagttctttgaagtcatccttattgatcctttccacaaagccatacgtcgcaatccggacacccagtggatcaccaaaccggtgcacaaacaccgcgagatgcgtgggctgacaagcgccggcaggaaaagccggggattaggtaaaggacataaatttcaccacacaatcggaggatcacggcgtgctgcctggaggcgtcgcaatacgcttcagctacataggtacagatag

SEQ ID NO: 328371 - DNA, 615 bp, Artificial Sequence
  derived and/or modified sequence
atgggcgcctacaagtacatccaggagctgtggcggaagaagcagtctgatgtgatgaggttcctactgcgggttagatgttggcagtacaggcagctgtctgccctacatcgggcccctcgtcctactcggccggacaaggccaggcgacttggctacaaggctaaacagggatacgtcatttataggattagagtgagaagagggggcaggaaacgacctgtccccaaaggcgccacctacggtaaaccagtgcatcacggtgtaaaccagctgaagttcgcaagaagcctgcagtccgtggccgaagaacgcgctgggaggcactgcggcgctctccgcgtgttaaactcgtactgggtgggagaagactccacatataaattcttcgaggtgattctcatcgacccttttcacaaggcaatcagacggaatccggatacacagtggatcaccaaacctgttcacaagcaccgcgaaatgagaggactgaccagcgccggtagaaaaagtcgtggactgggtaagggacacaagttccaccacacaattggggggagccggcgcgcggcctggaggcggaggaacactctgcagctgcacagataccgatag

SEQ ID NO: 328372 - DNA, 528 bp, Artificial Sequence
  derived and/or modified sequence
atgggcgcctacaagtacatccaggagctgtggcggaagaagcagtccgatgtgatgaggtttctcttgagagtgcgatgttggcagtaccgccagctttctgccctccaccgggctcccagacctacgaggcccgacaaagccaggagacttggatacaaagcaaaacaaggctacgttatctatcgcatcagggtgagaaggggcgggaggaaacgccccgtgccaaaaggggctacatacgggaaaccggtgcaccatggagtgaaccagttaaagttcgcacgcagcctccagtccgttgctgaagttaatgctggacgccactgtggggcactgagggttctcaacagctattgggtgggcgaggactctacgtacaagttcttcgaggtcattctgatcgacccgttccataaggccatccgccgaaatcccgatacccagtggattaccaagccagtgcataagcatcgggaaatgcgcgggcttacttccgcgggcaggaagtctcgtggcctcgggtag

SEQ ID NO: 328373 - DNA, 615 bp, Artificial Sequence
  derived and/or modified sequence
atgggcgcctacaagtacatccaggagctgtggcggaagaagcagagcgatgtcatgcgctttcttttacgtgtaagatgctggcagtaccggcagctgagcgcactccatcgcgctccccgtcccactcgaccagacaaagcgcgccgcctgggctataaggccaagcagggatatgtgatataccggatccgtgtcagaaggggcggccggaagcggccagtgcccaaaggcgcaacatatggaaagcccgtccatcacggtgtgaaccagctaaaattcgcaaggagcctccagtccgttgctgaagagagggcgggtagacactgtggagccctgagggtgctcaactcctactgggtcggcgaagattccacctataaattcttcgaggtgattctgattgatccgtttcacaaggcgattagacgcaacccagatactcagtggataaccaaacccgttcataagcacagggagatgaggggacttacttctgctgggcggaaatctcggggactgggaaagggccataaatttcatcataccattgggggatcgcgccgagcagcctggaggagacgcaacacccttcagctacataggtaccgttag

SEQ ID NO: 328374 - DNA, 615 bp, Artificial Sequence
  derived and/or modified sequence
atgggcgcctacaagtacatccaggagctgtggcggaagaagcagagcgacgttatgagattcttgctcagggttcgatgctggcagtaccggcaattgtcagcactccacagagcccctagaccgacaagaccagacaaagcccggcggttaggctataaggcaaagcaagggtatgtcatctatcgcatccgagtgcgcaggggggggaggaaaagaccagtgcccaagggcgctacctacggcaaacccgtgcatcatggagtaaaccagctgaaatttgcaaggtccctgcaaagcgtagccgaagaaagagcaggtcggcattgtggggccctaagggtgctgaattcttactgggtgggagaggacagcacgtataaattcttcgaagtcatcttaattgatccattccataaagccattaggcgtaacccggatacccagtggattaccaagcctgtccataaacatcgagaaatgagagggttgactagtgccggccgtaaaagtaggggactaggcaaggggcacaaattccatcacacaataggaggctcacgcagggcggcttggaggcgcagaaatacccttcagctccacagataccgctag

SEQ ID NO: 328375 - DNA, 402 bp, Artificial Sequence
  derived and/or modified sequence
atgggcgcctacaagtacatccaggagctgtggcggaagaagcagtccgacgtcatgaggtttctcttaagggtgaggtgttggcagtataggcagttgtccgccctccatcgggccccgcgcccgacgcgcccggacaaagcccggcgcctgggatacaaagccaaacaaggctacgtaatctatcgcatcagggttagacgaggcggtcgcaagcggccggtgcccaagggagcaacctacggcaagcccgtccatcatggagtgaatcagctgaagttcgcgcggtcattgcagagcgtcgccgaggaacgcgcaggtcggcactgtggagctctgcgtgtgctgaattcctactgggtgggcgaggactccacctataagtttttcgaagtgatttag

SEQ ID NO: 328376 - DNA, 525 bp, Artificial Sequence
  derived and/or modified sequence
atgggcgcctacaagtacatccaggagctgtggcggaagaagcagtctgatgtaatgaggttcttgctgcgcgtgaggtgttggcagtaccggcagctatccgcccttcatcgggcgccacgcccaaccaggccagataaggcacgtaggctggggtacaaagccaagcaggggtacgtgatatataggatcagagttagaagaggcggcagaaagaggcccgtccctaagggggccacttacggcaaaccagtacaccacggagtaaatcagcttaaattcgccagatccttacaatccgtcgccgaagaaagggccgggaggcactgtggagcccttagagtgcttaactcctactgggtgggagaagactccacttataagttctttgaggtcatcctcattgacccttttcacaaggctatccggcgcaatcccgacacacagtggatcactaagcctgttcataagcacagggagatgagggggctgacctctgccggacggaagagccgcgggctgtag

SEQ ID NO: 328377 - DNA, 615 bp, Artificial Sequence
  derived and/or modified sequence
atgggcgcctacaagtacatccaggagctgtggcggaagaagcagtcagatgtaatgaggtttctattgagggttcgatgctggcagtatcgccagctgagtgcactccatcgtgcaccacgcccaacacggccagacaaggcacgcaggttgggctataaagctaaacaagggtatgtgatttacaggatcagggtgaggcggggtggcagaaaacggcctgtgccaaagggagccacatatgggaaacccgttcatcacggtgtaaaccagctgaagtttgcccggtctctgcagtctgtcgcggaggaacgcgccgggcgccactgcggagctctgcgcgtcctcaactcctactgggtcggagaggacagcacatataaatttttcgaagtgattctgatagaccctttccataaggctattcgccgcaaccccgatacacagtggattacaaagcctgtacataaacatcgtgagatgagggggctcaccagtgctggaagaaaatccaggggactggggaaaggacacaaatttcaccacacaattggcggcagccgccgcgccgcttggcgcagaaggaatacactacagctccaccgctaccggtag

SEQ ID NO: 328378 - DNA, 495 bp, Artificial Sequence
  derived and/or modified sequence
atgggcgcctacaagtacatccaggagctgtggcggaagaagcagtccgacgttatgcgtttcttattgagggttcgctgctggcagtaccggcagctttctgctcttcacagggcaccaagaccaacacgtccggacaaagcccgaaggctcggctacaaggccaagcagggatatgtgatatatagaatacgcgtgcgacgcggggggcggaaacgccctgtaccaaaaggggctacatacggtaagccggtgcatcatggagttaatcagctcaaattcgcccgttctcttcaatccgtggcagaagaacgggccgggcggcattgtggagccttacgagtgcacaagcatagagaaatgagagggctcacaagtgcagggagaaaaagccgcggcctcggaaagggacacaagttccaccacactattggcgggtcccgtcgagctgcctggcgccgaagaaatacattacagcttcatcgctatagatag

SEQ ID NO: 328379 - DNA, 615 bp, Artificial Sequence
  derived and/or modified sequence
atgggtgcctataaatacatacaagaactgtggaggaagaagcagtccgacgttatgaggttcctcctgcgggttagatgctggcagtacagacagctgtcagctctacaccgggctccccgacccactcgccctgataaagccaggcggctcgggtacaaagcaaagcaaggatatgtcatctatcgaatccgagttcgtcgaggtggccgaaagcgtcctgttcccaagggagccacctatgggaaacccgttcaccatggggtaaatcaattaaaattcgcaagatcccttcagagcgtggccgaagagagggcagggaggcattgcggagcacttagagtcctgaacagctactgggtgggagaggattcaacttacaaatttttcgaagttattctgatcgatccattccataaggccattagacgcaatcccgatacacagtggatcaccaaacccgtgcacaaacaccgcgagatgagggggctgacaagtgctgggagaaagagcaggggcctcgggaagggccacaagttccaccatacaattgggggttcgaggagagctgcctggaggaggcggaacaccctccagctccatcggtataggtag

SEQ ID NO: 328380 - DNA, 615 bp, Artificial Sequence
  derived and/or modified sequence
atgggtgcctacaaatacattcaagagctgtggaggaagaaacagtctgacgtgatgaggtttctactcagagtcagatgttggcagtacaggcagctctctgccctgcatcgcgcacctaggcctaccagaccagataaggccagacgattggggtacaaggccaagcaggggtacgtcatttaccgcatcagggtcagaaggggtggtcggaagagaccagtgcctaagggcgctacatacggcaagccagtacatcacggcgtgaatcaactcaagttcgctcggagccttcaatcagtagctgaggagcgtgctggtcggcattgtggcgctctgcgagtgttgaactcatattgggtcggcgaagattcaacttacaaatttttcgaggtgatcctgatcgatccttttcataaggccattcgacgcaacccagacactcaatggatcacgaagcctgttcataaacatagagagatgagaggattgacaagtgccggaagaaagtcacgcggtctgggtaaaggccacaagttccatcatacaattggtgggtctagacgagcagcgtggcgcaggcgcaacacattacaactccaccgataccgatag

SEQ ID NO: 328381 - DNA, 528 bp, Artificial Sequence
  derived and/or modified sequence
atgggtgcatataagtatattcaggagctgtggcggaagaagcagtccgatgtgatgagatttctcctgcgagttagatgttggcagtacagacagctaagtgctctgcatcgggcaccaaggccaactcggcctgataaggcaagaagactgggttataaggccaaacagggatacgtgatctaccgcatcagagttaggaggggcggacggaaacgccctgtacccaagggtgctacatacgggaagcccgtccaccatggcgtgaatcagctgaaattcgcccgttcccttcagagtgtggcagaggtcaatgccggacgccactgcggtgccctacgagttctgaattcttactgggttggtgaagattccacctacaagttcttcgaagtcattctgatcgacccgttccacaaagctatcagacggaatcccgacactcagtggattacaaagcccgtgcacaaacaccgcgagatgcggggtctgacctcagccggacgcaagagccgtggtctcgggtag

SEQ ID NO: 328382 - DNA, 615 bp, Artificial Sequence
  derived and/or modified sequence
atgggggcatataaatatatacaggaactctggaggaagaaacagagcgatgtcatgcggttcttactacgcgttaggtgttggcagtacagacagctgtctgctctgcacagagctcccagacctaccagacccgataaggcccgtagattgggctataaggccaagcaggggtacgtaatctaccgcattagggtgcgcaggggcggacgtaagcgcccagtcccgaagggagcaacttacgggaagcctgtgcatcacggcgtgaatcagctgaagtttgcccgatcactgcagtccgtagcagaagaaagggctggtcggcactgtggagccttgagagttctgaattcctactgggtcggagaggattctacctacaagttttttgaagtgatcctcattgaccccttccacaaagccataagacgcaaccctgatactcagtggatcacaaagcccgtacataagcacagagagatgcgagggttgacttccgccggacgtaagagtagaggcctcgggaagggacacaagttccatcacaccatcggagggagcaggagagcagcctggagacggaggaataccctgcaactgcacagatacaggtag

SEQ ID NO: 328383 - DNA, 615 bp, Artificial Sequence
  derived and/or modified sequence
atgggggcttataagtatatccaggaattgtggagaaagaagcagtccgacgtgatgcgtttcctgcttcgggtacgttgctggcagtatcggcagctgtcagcgctgcacagggcaccgagacccacccggcctgacaaagccagaagactgggatacaaggcaaagcaaggatacgtcatatatcggatcagagtccggagaggaggcaggaagaggcctgtgcctaaaggcgcaacctacggcaagcccgtacaccacggggtgaaccagcttaaattcgctcggagtcttcaatccgtcgccgaagagcgtgccggacgccattgcggcgcactgagggtgctgaacagctactgggtgggcgaagactctacctataagttcttcgaggtcatcctaatcgacccctttcacaaagctatacgccgtaacccggacacacagtggattacaaagcccgtgcacaaacacagagagatgcggggattaacaagcgctggacggaagtcacgtggtctcggtaagggccataaattccaccacacaatcggagggagcagacgcgcagcctggagaaggcggaacactctacagttgcatcgatatagatag

SEQ ID NO: 328384 - DNA, 402 bp, Artificial Sequence
  derived and/or modified sequence
atgggggcttacaaatacatccaagagttatggcgcaaaaaacagtccgatgttatgcgatttttactaagggttcgatgctggcagtatcggcaactgagcgcccttcaccgcgcaccaaggcccacaagacctgataaggcaagaaggttggggtataaagccaagcaaggatatgtgatctatcggatccgcgtccggagaggtgggagaaaacggcctgtccccaaaggggctacatatggaaaacccgtgcatcacggtgtgaatcaacttaagttcgccaggagcctgcagagcgtggccgaggagcgggcaggaagacactgcggggctttgcgtgtgctcaattcctattgggtcggcgaagacagcacatataaattcttcgaggtcatctag

SEQ ID NO: 328385 - DNA, 525 bp, Artificial Sequence
  derived and/or modified sequence
atgggtgcttacaagtatatccaggaactttggagaaaaaaacaaagcgacgtgatgcgatttttgctgagggtgaggtgttggcagtatcggcagctaagtgccttgcaccgggctccgcgtcccactagacccgataaagcccgtcggttagggtacaaggcgaagcagggctatgtaatctatcgcatccgggtgcggaggggcggaaggaagaggcccgtgcccaagggggctacctacggaaaacctgtgcatcacggagttaaccaacttaagttcgcacgttccttacagtcggtcgcagaggaacgagctggaagacattgcggggcactgcgggtgctgaattcttactgggtgggcgaggattccacctataaattcttcgaggtcattctgattgacccatttcataaggccatccggaggaatcctgacacccagtggattaccaaaccagtgcataagcacagagaaatgagaggcctgacatctgccggacgaaagtccagaggattatag

SEQ ID NO: 328386 - DNA, 615 bp, Artificial Sequence
  derived and/or modified sequence
atgggtgcctacaagtacattcaagagctatggcgcaaaaaacagtccgatgtaatgagattcctgctcagggtgcgctgctggcagtatcggcagttgtcggctttgcatagggcacccaggcctacgaggccagacaaggcccgtcgcctgggatacaaggctaagcaggggtatgtgatttatcgcattagggtgagacgcggaggcaggaaacggccagtccccaaaggcgcaacttatgggaagcccgtgcaccatggtgtcaaccaactgaaatttgcccgatctcttcagtcagtcgcagaggaacgcgcagggagacactgtggagcattgcgggtgctaaattcttactgggtgggcgaggatagcacatataagttctttgaagtaatacttatcgatccatttcataaggcaataaggagaaaccccgatactcagtggatcacgaagcccgtgcataagcatcgggagatgcgtggtttgacctctgctggtcggaagtcccggggtttgggaaagggccacaaatttcatcacactatcggaggatcccgtagggccgcatggcggagacggaacacgctccagctgcaccgatacaggtag

SEQ ID NO: 328387 - DNA, 495 bp, Artificial Sequence
  derived and/or modified sequence
atgggcgcttataagtatatccaagaactctggaggaagaagcaaagtgacgtgatgcggtttctgctgcgagttagatgctggcagtaccgtcagctgagtgccctacatcgagcaccaaggcccacaagacccgataaggccaggaggctgggatataaggccaaacagggttacgtgatctacaggatcagagtgaggcgaggtgggagaaaacgcccagtacctaagggcgctacttacggtaaacctgtgcaccacggcgtcaatcagttgaaattcgcaagatccctgcagtccgttgccgaggagcgtgccggaaggcattgtggtgctcttagagtgcacaaacacagggaaatgagggggctcacatcagccggaaggaaatctagaggcttaggaaaaggccacaagttccatcacacaatcgggggttcacggagagctgcgtggcgccgacgtaacactcttcagctgcacaggtaccggtag

SEQ ID NO: 328388 - DNA, 2600 bp, Artificial Sequence
  derived and/or modified sequence
tggaggagcttcacgcagtctggagctgaagggacacagcgagcgccccgacccgcgacgccccgactccgcgaaggcctccctgggaggctggggaagcgtcgggggatctctcagcgcagctctggggcccagatttctgcgcccgtcgtgcggtggccagagagggacagcgcagcgcggagacgcggagacgcagagactccgcagggggagagcccgcggtgcgtgaaacaaacctgttctctcctcagacctcaaagacagcggctccaccgcggtacgcggccaccggctttggagcctggaccccaacttgcctcctctcgcggagagacagtcgccgacgctcgcttagccgccgagacctcgccgccaactctctcacctctcgagacgcccaggccgctcaggctcgaatcttgcggagcagggggcgggacaatagcggccgcggcgccccactcggcagaactccgccaccaggcgcgatgccggaactacatgtcccatgacgctctgggaggccgcagctttccaccggaaagagggtggctgaggtgggggaggagcccaaaaggcattgtgggagtacagctctttcctttccgtctggcggcagccatcaggtaagccaagatgggtgcatacaagtacatccaggagctatggagaaagaagcagtctgatgtcatgcgctttcttctgagggtccgctgctggcagtaccgccagctctctgctctccacagggctccccgccccacccggcctgataaagcgcgccgactgggctacaaggccaagcaaggttacgttatatataggattcgtgttcgccgtggtggccgaaaacgcccagttcctaagggtgcaacttacggcaagcctgtccatcatggtgttaaccagctaaagtttgctcgaagccttcagtccgttgcagaggagcgagctggacgccactgtggggctctgagagtcctgaattcttactgggttggtgaagattccacatacaaattttttgaggttatcctcattgatccattccataaagctatcagaagaaatcctgacacccagtggatcaccaaaccagtccacaagcacagggagatgcgtgggctgacatctgcaggccgaaagagccgtggccttggaaagggccacaagttccaccacactattggtggctctcgccgggcagcttggagaaggcgcaatactctccagctccaccgttaccgctaatataagtaaagtttgtaaaattcatacttaataaacaatttaggacagtcatgtctgcttacaggtgttatttgtctgttaaaactagtctgcagatgtttcttgaatgctttgtcaaattaagaaagttaaagtgcaataatgtttgaagacaataagtggtggtgtatcttgtttctaataagataaacttttttgtctttgctttatcttattagggagttgtatgtcagtgtataaaacatactgtgtggtataacaggcttaataaattctttaaaaggagagaactgaaactagccctgtagatttgtctggtgcatgtgatgaaacctgcagctttatcggagtgatggcaatgctctgctggtttattttcaagtggctgcgttttttttagtttggcaggtgtagactttttaagttgggctttagaaaatctgggttagcctgaagaaaattgcctcagcctccacagtaccattttaaattcacataaaaggtgaaagctcctggttcagtgccatggcttcatggcattcagtgattagtggtaatggtaaacactggtgtgttttgaagttgaatgtgcgataaaattattagccttaagattggtaagctagcaatgaatgctagggtgggaagctggtgagccagtggccattagataaatacctttcaagtgtgagcttagacgtcaaccctaaaatacttaaccgtaatgctaattgtgatcattatgaatcccttcagtcacattagggggaaagtagttggctataagtacgtcattcttagtccagtcagtcttaaaaacatcttgggttacccactctgtccactcccataggctacagaaaaagtcacaagcgcatggtttccaaccatatgtgttttctgcagttatttctcttgttctggccaaacaaccctaaaaatccttaccattccacaaagttggaccatcacttgtgcacccactttgactatgagtataccaccacattgcatttctgtttgcaccatgtcttccaggagactagactactgttgtccagggtcaatttgagtgtaaagaaaatgtagacaaggaattgcccaattttaaattctgactttgctgacttaatttaaatgctcgttctgaaccaattttctcctatcttctctaggggtttcaaaagactcagttaattgatttccaggaagtactcatagcaagttcataaaagttcttgagacctaaatttcttcacaaaaaaagaaaagatcttaagtcatacattttaattgtgtagaggttgttcaactgaaggaataaatgtctattaaactaaaacaaa

SEQ ID NO: 328389 - DNA, 820 bp, Artificial Sequence
  derived and/or modified sequence
gggctagctgtccccggcagttggtgcagagccattttcattcccggcggtttccttgtttttgttggggaactaagatggacggatacagtcgtcttattgtacttaaagcggatgatatttaatacacagtttgatttcacaggtaagccaagatgggtgcatacaagtacatccaggagctatggagaaagaagcagtctgatgtcatgcgctttcttctgagggtccgctgctggcagtaccgccagctctctgctctccacagggctccccgccccacccggcctgataaagcgcgccgactgggctacaaggccaagcaaggttacgttatatataggattcgtgttcgccgtggtggccgaaaacgcccagttcctaagggtgcaacttacggcaagcctgtccatcatggtgttaaccagctaaagtttgctcgaagccttcagtccgttgcagaggagcgagctggacgccactgtggggctctgagagtcctgaattcttactgggttggtgaagattccacatacaaattttttgaggttatcctcattgatccattccataaagctatcagaagaaatcctgacacccagtggatcaccaaaccagtccacaagcacagggagatgcgtgggctgacatctgcaggccgaaagagccgtggccttggaaagggccacaagttccaccacactattggtggctctcgccgggcagcttggagaaggcgcaatactctccagctccaccgttaccgctaatataagtaaagtttgtaaaattcatacttaataaacaatttaggacagtc

SEQ ID NO: 328390 - DNA, 562 bp, Artificial Sequence
  derived and/or modified sequence
tcctttccgtctggcggcagccatcaggtaagccaagatgggtgcatacaagtacatccaggagctatggagaaagaagcagtctgatgtcatgcgctttcttctgagggtccgctgctggcagtaccgccagctctctgctctccacagggctccccgccccacccggcctgataaagcgcgccgactgggctacaaggccaagcaaggttacgttatatataggattcgtgttcgccgtggtggccgaaaacgcccagttcctaagggtgcaacttacggcaagcctgtccatcatggtgttaaccagctaaagtttgctcgaagccttcagtccgttgcagaggtaaatgctggacgccactgtggggctctgagagtcctgaattcttactgggttggtgaagattccacatacaaattttttgaggttatcctcattgatccattccataaagctatcagaagaaatcctgacacccagtggatcaccaaaccagtccacaagcacagggagatgcgtgggctgacatctgcaggccgaaagagccgtggccttgga

SEQ ID NO: 328391 - DNA, 2053 bp, Artificial Sequence
  derived and/or modified sequence
tgggagtacagctctttcctttccgtctggcggcagccatcaggtaggctgcgttgaggatctttgctcttccatccgcctttgatcgtcttcctcttcagccatccaggtaagccaagatgggtgcatacaagtacatccaggagctatggagaaagaagcagtctgatgtcatgcgctttcttctgagggtccgctgctggcagtaccgccagctctctgctctccacagggctccccgccccacccggcctgataaagcgcgccgactgggctacaaggccaagcaaggttacgttatatataggattcgtgttcgccgtggtggccgaaaacgcccagttcctaagggtgcaacttacggcaagcctgtccatcatggtgttaaccagctaaagtttgctcgaagccttcagtccgttgcagaggagcgagctggacgccactgtggggctctgagagtcctgaattcttactgggttggtgaagattccacatacaaattttttgaggttatcctcattgatccattccataaagctatcagaagaaatcctgacacccagtggatcaccaaaccagtccacaagcacagggagatgcgtgggctgacatctgcaggccgaaagagccgtggccttggaaagggccacaagttccaccacactattggtggctctcgccgggcagcttggagaaggcgcaatactctccagctccaccgttaccgctaatataagtaaagtttgtaaaattcatacttaataaacaatttaggacagtcatgtctgcttacaggtgttatttgtctgttaaaactagtctgcagatgtttcttgaatgctttgtcaaattaagaaagttaaagtgcaataatgtttgaagacaataagtggtggtgtatcttgtttctaataagataaacttttttgtctttgctttatcttattagggagttgtatgtcagtgtataaaacatactgtgtggtataacaggcttaataaattctttaaaaggagagaactgaaactagccctgtagatttgtctggtgcatgtgatgaaacctgcagctttatcggagtgatggcaatgctctgctggtttattttcaagtggctgcgttttttttagtttggcaggtgtagactttttaagttgggctttagaaaatctgggttagcctgaagaaaattgcctcagcctccacagtaccattttaaattcacataaaaggtgaaagctcctggttcagtgccatggcttcatggcattcagtgattagtggtaatggtaaacactggtgtgttttgaagttgaatgtgcgataaaattattagccttaagattggtaagctagcaatgaatgctagggtgggaagctggtgagccagtggccattagataaatacctttcaagtgtgagcttagacgtcaaccctaaaatacttaaccgtaatgctaattgtgatcattatgaatcccttcagtcacattagggggaaagtagttggctataagtacgtcattcttagtccagtcagtcttaaaaacatcttgggttacccactctgtccactcccataggctacagaaaaagtcacaagcgcatggtttccaaccatatgtgttttctgcagttatttctcttgttctggccaaacaaccctaaaaatccttaccattccacaaagttggaccatcacttgtgcacccactttgactatgagtataccaccacattgcatttctgtttgcaccatgtcttccaggagactagactactgttgtccagggtcaatttgagtgtaaagaaaatgtagacaaggaattgcccaattttaaattctgactttgctgacttaatttaaatgctcgttctgaaccaattttctcctatcttctctaggggtttcaaaagactcagttaattgatttccaggaagtactcatagcaagttcataaaagttcttgagacctaaatttcttcacaaaaaaagaaaagatcttaagtcatacattttaattgtgtagaggttgttcaactgaagg

SEQ ID NO: 328392 - DNA, 830 bp, Artificial Sequence
  derived and/or modified sequence
cctttccgtctggcggcagccatcagcggcatctcctttcaggtcctccttggggacgccgcctgccgcagccacccgcccccttggtgctcagttctggttctgttaattcgccccaccaaaacgtgccgagcaccgctctgtgctggggttgcggaagtaagccaagatgggtgcatacaagtacatccaggagctatggagaaagaagcagtctgatgtcatgcgctttcttctgagggtccgctgctggcagtaccgccagctctctgctctccacagggctccccgccccacccggcctgataaagcgcgccgactgggctacaaggccaagcaaggttacgttatatataggattcgtgttcgccgtggtggccgaaaacgcccagttcctaagggtgcaacttacggcaagcctgtccatcatggtgttaaccagctaaagtttgctcgaagccttcagtccgttgcagaggagcgagctggacgccactgtggggctctgagagtcctgaattcttactgggttggtgaagattccacatacaaattttttgaggttatcctcattgatccattccataaagctatcagaagaaatcctgacacccagtggatcaccaaaccagtccacaagcacagggagatgcgtgggctgacatctgcaggccgaaagagccgtggccttggaaagggccacaagttccaccacactattggtggctctcgccgggcagcttggagaaggcgcaatactctccagctccaccgttaccgctaatataagtaaagtttgtaaaattcatacttaataaacaatttaggac

SEQ ID NO: 328393 - DNA, 588 bp, Artificial Sequence
  derived and/or modified sequence
cccgacccgcgacgccccgactccgcgaaggcctccctgggaggctggggaagcgtcgggggatctctcagcgcagctctggggcccagatttctgcgcccgtcgtgcggtggccagagagggacagcgcagcgcggagacgcggagacgcagagactccgcagggggagagcccgcggtaagccaagatgggtgcatacaagtacatccaggagctatggagaaagaagcagtctgatgtcatgcgctttcttctgagggtccgctgctggcagtaccgccagctctctgctctccacagggctccccgccccacccggcctgataaagcgcgccgactgggctacaaggccaagcaaggttacgttatatataggattcgtgttcgccgtggtggccgaaaacgcccagttcctaagggtgcaacttacggcaagcctgtccatcatggtgttaaccagctaaagtttgctcgaagccttcagtccgttgcagaggagcgagctggacgccactgtggggctctgagagtcctgaattcttactgggttggtgaagattccacatacaaattttttgaggttatcc

SEQ ID NO: 328394 - DNA, 650 bp, Artificial Sequence
  derived and/or modified sequence
gggcgggacaatagcggccgcggcgccccactcggcagaactccgccaccaggcgcgatgccggaactacatgtcccatgacgctctgggaggccgcagctttccaccggaaagagggtaagccaagatgggtgcatacaagtacatccaggagctatggagaaagaagcagtctgatgtcatgcgctttcttctgagggtccgctgctggcagtaccgccagctctctgctctccacagggctccccgccccacccggcctgataaagcgcgccgactgggctacaaggccaagcaaggttacgttatatataggattcgtgttcgccgtggtggccgaaaacgcccagttcctaagggtgcaacttacggcaagcctgtccatcatggtgttaaccagctaaagtttgctcgaagccttcagtccgttgcagaggagcgagctggacgccactgtggggctctgagagtcctgaattcttactgggttggtgaagattccacatacaaattttttgaggttatcctcattgatccattccataaagctatcagaagaaatcctgacacccagtggatcaccaaaccagtccacaagcacagggagatgcgtgggctgacatctgcaggccgaaagagccgtggccttg

SEQ ID NO: 328395 - DNA, 1063 bp, Artificial Sequence
  derived and/or modified sequence
cctttccgtctggcggcagccatcaggtaggctgcgttgaggatctttgctcttccatccgcctttgatcgtcttcctcttcagccatccaggtccggggaccctgcgtcctcggagataggtctccctcctgtgcggccagagtttggtaagccaagatgggtgcatacaagtacatccaggagctatggagaaagaagcagtctgatgtcatgcgctttcttctgagggtccgctgctggcagtaccgccagctctctgctctccacagggctccccgccccacccggcctgataaagcgcgccgactgggctacaaggccaagcaaggttacgttatatataggattcgtgttcgccgtggtggccgaaaacgcccagttcctaagggtgcaacttacggcaagcctgtccatcatggtgttaaccagctaaagtttgctcgaagccttcagtccgttgcagaggagcgagctggacgccactgtggggctctgagagtcctgaattcttactgggttggtgaagattccacatacaaattttttgaggttatcctcattgatccattccataaagctatcagaagaaatcctgacacccagtggatcaccaaaccagtccacaagcacagggagatgcgtgggctgacatctgcaggccgaaagagccgtggccttggaaagggccacaagttccaccacactattggtggctctcgccgggcagcttggagaaggcgcaatactctccagctccaccgttaccgctaatataagtaaagtttgtaaaattcatacttaataaacaatttaggacagtcatgtctgcttacaggtgttatttgtctgttaaaactagtctgcagatgtttcttgaatgctttgtcaaattaagaaagttaaagtgcaataatgtttgaagacaataagtggtggtgtatcttgtttctaataagataaacttttttgtctttgctttatcttattagggagttgtatgtcagtgtataaaacatactgtgtggtataacaggcttaataaattctttaaaaggagagaa

SEQ ID NO: 328396 - DNA, 1990 bp, Artificial Sequence
  derived and/or modified sequence
caggtaagccaagatgggtgcatacaagtacatccaggagctatggagaaagaagcagtctgatgtcatgcgctttcttctgagggtccgctgctggcagtaccgccagctctctgctctccacagggctccccgccccacccggcctgataaagcgcgccgactgggctacaaggccaagcaaggtacgtgatcgactgcgttacgttatatataggattcgtgttcgccgtggtggccgaaaacgcccagttcctaagggtgcaacttacggcaagcctgtccatcatggtgttaaccagctaaagtttgctcgaagccttcagtccgttgcagaggagcgagctggacgccactgtggggctctgagagtcctgaattcttactgggttggtgaagattccacatacaaattttttgaggttatcctcattgatccattccataaagctatcagaagaaatcctgacacccagtggatcaccaaaccagtccacaagcacagggagatgcgtgggctgacatctgcaggccgaaagagccgtggccttggaaagggccacaagttccaccacactattggtggctctcgccgggcagcttggagaaggcgcaatactctccagctccaccgttaccgctaatataagtaaagtttgtaaaattcatacttaataaacaatttaggacagtcatgtctgcttacaggtgttatttgtctgttaaaactagtctgcagatgtttcttgaatgctttgtcaaattaagaaagttaaagtgcaataatgtttgaagacaataagtggtggtgtatcttgtttctaataagataaacttttttgtctttgctttatcttattagggagttgtatgtcagtgtataaaacatactgtgtggtataacaggcttaataaattctttaaaaggagagaactgaaactagccctgtagatttgtctggtgcatgtgatgaaacctgcagctttatcggagtgatggcaatgctctgctggtttattttcaagtggctgcgttttttttagtttggcaggtgtagactttttaagttgggctttagaaaatctgggttagcctgaagaaaattgcctcagcctccacagtaccattttaaattcacataaaaggtgaaagctcctggttcagtgccatggcttcatggcattcagtgattagtggtaatggtaaacactggtgtgttttgaagttgaatgtgcgataaaattattagccttaagattggtaagctagcaatgaatgctagggtgggaagctggtgagccagtggccattagataaatacctttcaagtgtgagcttagacgtcaaccctaaaatacttaaccgtaatgctaattgtgatcattatgaatcccttcagtcacattagggggaaagtagttggctataagtacgtcattcttagtccagtcagtcttaaaaacatcttgggttacccactctgtccactcccataggctacagaaaaagtcacaagcgcatggtttccaaccatatgtgttttctgcagttatttctcttgttctggccaaacaaccctaaaaatccttaccattccacaaagttggaccatcacttgtgcacccactttgactatgagtataccaccacattgcatttctgtttgcaccatgtcttccaggagactagactactgttgtccagggtcaatttgagtgtaaagaaaatgtagacaaggaattgcccaattttaaattctgactttgctgacttaatttaaatgctcgttctgaaccaattttctcctatcttctctaggggtttcaaaagactcagttaattgatttccaggaagtactcatagcaagttcataaaagttcttgagacctaaatttcttcacaaaaaaagaaaagatcttaagtcatacattttaattgtgtagaggttgttcaactgaaggaataaatgtctattaaactaaaacaaa

SEQ ID NO: 328397 - DNA, 1345 bp, Artificial Sequence
  derived and/or modified sequence
cctttccgtctggcggcagccatcaggtaagccaagatgggtgcatacaagtacatccaggagctatggagaaagaagcagtctgatgtcatgcgctttcttctgagggtccgctgctggcagtaccgccagctctctgctctccacagggctccccgccccacccggcctgataaagcgcgccgactgggctacaaggccaagcaaggttacgttatatataggattcgtgttcgccgtggtggccgaaaacgcccagttcctaagggtgcaacttacggcaagcctgtccatcatggtgttaaccagctaaagtttgctcgaagccttcagtccgttgcagaggagcgagctggacgccactgtggggctctgagagtccacaagcacagggagatgcgtgggctgacatctgcaggccgaaagagccgtggccttggaaagggccacaagttccaccacactattggtggctctcgccgggcagcttggagaaggcgcaatactctccagctccaccgttaccgctaatataagtaaagtttgtaaaattcatacttaataaacaatttaggacagtcatgtctgcttacaggtgttatttgtctgttaaaactagtctgcagatgtttcttgaatgctttgtcaaattaagaaagttaaagtgcaataatgtttgaagacaataagtggtggtgtatcttgtttctaataagataaacttttttgtctttgctttatcttattagggagttgtatgtcagtgtataaaacatactgtgtggtataacaggcttaataaattctttaaaaggagagaactgaaactagccctgtagatttgtctggtgcatgtgatgaaacctgcagctttatcggagtgatggcaatgctctgctggtttattttcaagtggctgcgttttttttagtttggcaggtgtagactttttaagttgggctttagaaaatctgggttagcctgaagaaaattgcctcagcctccacagtaccattttaaattcacataaaaggtgaaagctcctggttcagtgccatggcttcatggcattcagtgattagtggtaatggtaaacactggtgtgttttgaagttgaatgtgcgataaaattattagccttaagattggtaagctagcaatgaatgctagggtgggaagctggtgagccagtggccattagataaatacctttcaagtgtgagcttagacgtcaaccctaaaatacttaaccgtaatgctaattgtgatcattatgaatcccttcagtcacattagggggaaagtagttggctataagtacgtcattcttagtccagtcagtctt

SEQ ID NO: 328398 - DNA, 615 bp, Artificial Sequence
  derived and/or modified sequence
atgggcgcctacaagtacatccaggagctgtggagaaagaagcagagcgacgtgatgagattcctgctgagagtgagatgctggcagtacagacagctgagcgccctgcacagagcccccagacccaccagacccgacaaggccagaagactgggctacaaggccaagcagggctacgtgatctacagaatcagagtgagaagaggcggcagaaagagacccgtgcccaagggcgccacctacggcaagcccgtgcaccacggcgtgaaccagctgaagttcgccagaagcctgcagagcgtggccgaggagagagccggcagacactgcggcgccctgagagtgctgaacagctactgggtgggcgaggacagcacctacaagttcttcgaggtgatcctgatcgaccccttccacaaggccatcagaagaaaccccgacacccagtggatcaccaagcccgtgcacaagcacagagagatgagaggcctgaccagcgccggcagaaagagcagaggcctgggcaagggccacaagttccaccacaccatcggcggcagcagaagagccgcctggagaagaagaaacaccctgcagctgcacagatacagatag

SEQ ID NO: 328399 - DNA, 528 bp, Artificial Sequence
  derived and/or modified sequence
atgggcgcctacaagtacatccaggagctgtggagaaagaagcagagcgacgtgatgagattcctgctgagagtgagatgctggcagtacagacagctgagcgccctgcacagagcccccagacccaccagacccgacaaggccagaagactgggctacaaggccaagcagggctacgtgatctacagaatcagagtgagaagaggcggcagaaagagacccgtgcccaagggcgccacctacggcaagcccgtgcaccacggcgtgaaccagctgaagttcgccagaagcctgcagagcgtggccgaggtgaacgccggcagacactgcggcgccctgagagtgctgaacagctactgggtgggcgaggacagcacctacaagttcttcgaggtgatcctgatcgaccccttccacaaggccatcagaagaaaccccgacacccagtggatcaccaagcccgtgcacaagcacagagagatgagaggcctgaccagcgccggcagaaagagcagaggcctgggctag

SEQ ID NO: 328400 - DNA, 402 bp, Artificial Sequence
  derived and/or modified sequence
atgggcgcctacaagtacatccaggagctgtggagaaagaagcagagcgacgtgatgagattcctgctgagagtgagatgctggcagtacagacagctgagcgccctgcacagagcccccagacccaccagacccgacaaggccagaagactgggctacaaggccaagcagggctacgtgatctacagaatcagagtgagaagaggcggcagaaagagacccgtgcccaagggcgccacctacggcaagcccgtgcaccacggcgtgaaccagctgaagttcgccagaagcctgcagagcgtggccgaggagagagccggcagacactgcggcgccctgagagtgctgaacagctactgggtgggcgaggacagcacctacaagttcttcgaggtgatctag

SEQ ID NO: 328401 - DNA, 525 bp, Artificial Sequence
  derived and/or modified sequence
atgggcgcctacaagtacatccaggagctgtggagaaagaagcagagcgacgtgatgagattcctgctgagagtgagatgctggcagtacagacagctgagcgccctgcacagagcccccagacccaccagacccgacaaggccagaagactgggctacaaggccaagcagggctacgtgatctacagaatcagagtgagaagaggcggcagaaagagacccgtgcccaagggcgccacctacggcaagcccgtgcaccacggcgtgaaccagctgaagttcgccagaagcctgcagagcgtggccgaggagagagccggcagacactgcggcgccctgagagtgctgaacagctactgggtgggcgaggacagcacctacaagttcttcgaggtgatcctgatcgaccccttccacaaggccatcagaagaaaccccgacacccagtggatcaccaagcccgtgcacaagcacagagagatgagaggcctgaccagcgccggcagaaagagcagaggcctgtag

SEQ ID NO: 328402 - DNA, 495 bp, Artificial Sequence
  derived and/or modified sequence
atgggcgcctacaagtacatccaggagctgtggagaaagaagcagagcgacgtgatgagattcctgctgagagtgagatgctggcagtacagacagctgagcgccctgcacagagcccccagacccaccagacccgacaaggccagaagactgggctacaaggccaagcagggctacgtgatctacagaatcagagtgagaagaggcggcagaaagagacccgtgcccaagggcgccacctacggcaagcccgtgcaccacggcgtgaaccagctgaagttcgccagaagcctgcagagcgtggccgaggagagagccggcagacactgcggcgccctgagagtgcacaagcacagagagatgagaggcctgaccagcgccggcagaaagagcagaggcctgggcaagggccacaagttccaccacaccatcggcggcagcagaagagccgcctggagaagaagaaacaccctgcagctgcacagatacagatag

SEQ ID NO: 328403 - DNA, 351 bp, Artificial Sequence
  derived and/or modified sequence
atggatcacctaaatgaagccacccagggtaaggaacactcagagatgtccaacaatgtgagcgaccccaaggggccacccgctaagattgcgaggcttgaacagaacggaagtcccctcgggcgggggagattggggagtacgggagcaaagatgcagggtgtgcctttgaagcactcaggacatctgatgaaaaccaatctgcgtaaaggtactatgctacccgtcttttgcgtagtagagcattatgaaaatgccatcgagtatgactgtaaagaggaacacgcagaatttgtccttgtcaggaaggacatgctgttcaaccagcttattgagatggcactcctgtag

SEQ ID NO: 328404 - DNA, 675 bp, Artificial Sequence
  derived and/or modified sequence
atggatcatttgaacgaggccacccagggaaaggaacactcggagatgagcaataacgtctccgaccccaagggcccacctgcaaagattgcccggctagaacagaatggctctcctctcgggcgaggtagactggggtcaaccggagcaaaaatgcagggcgtacccctgaaacactccggacaccttatgaaaaccaacctgcgtaaaggcacaatgctgccagtcttctgtgtagtcgaacactatgagaacgccattgagtatgactgtaaggaggaacatgctgaattcgtcctggtgcggaaagatatgttgttcaatcaactgatcgagatggccctcctgtcactgggctacagccatagctcagccgcccaggctaagggactcattcaggtaggtaaatggaaccccgtgcctctgagttacgtgaccgacgctcctgacgccaccgtggccgatatgctccaggacgtctatcacgtcgtgacattaaagattcagctgcactcttgtcccaaactcgaggatttacctccagagcagtggagccataccacggtccgcaacgcattgaaggatctcctgaaagacatgaaccaaagctcactggcaaaggagtgtccccttagccagagtatgatcagtagcatcgtgaattcaacatactag

SEQ ID NO: 328405 - DNA, 216 bp, Artificial Sequence
  derived and/or modified sequence
atggaccacctgaatgaagcaacccagggaaaggagcacagcgaaatgagcaacaacgtttctgatcctaaaggaccccccgctaagattgccagactggaacaaaacggatcgcccctgggacgcggcagactggggtctaccggggccaagatgcagggagtgcccttgaaacactccgggcacctcatgaaaacaaatctacggaaaggctag

SEQ ID NO: 328406 - DNA, 519 bp, Artificial Sequence
  derived and/or modified sequence
atggaccacttgaatgaggcaactcagggcaaggaacacagtgagatgtcaaataatgtgtcagaccctaagggcccccccgccaaaatcgcaaggctggaacagaatggtagcccactgggccgaggccggctgggatccacgggagcaaagatgcagggagtgccactgaaacactccggccacctgatgaagaccaatctgcgcaaaggaaccatgctgccagttttctgcgtggtcgagcactatgagaacgccatagaatatgattgtaaagaagagcatgcagagttcgtcctggtccgcaaagacatgctgtttaaccagctgatcgaaatggcgctgttgtcattgggatattcacacagttcggctgcgcaggccaaggggctgatccaggtggggaagtggaatccggttcctctgagctatgtgactgacgctcctgacgccaccgtagccgacatgctgcaggatgtttaccatgttgtgacgctgaagatccagttacaccggtag

SEQ ID NO: 328407 - DNA, 393 bp, Artificial Sequence
  derived and/or modified sequence
atggaccacctgaatgaggctacccaaggaaaagaacattctgaaatgtcaaacaatgtgagtgatcctaaaggcccaccagctaagatagcaaggttggagcagaacgggagtcccctgggccgcggtcgactggggtccaccggggccaagatgcaaggggtgccacttaagcattcaggccatctgatgaagaccaacctacgaaaagggaccatgctgccagtcttctgcgtggtggaacactacgaaaacgccatcgagtacgattgtaaagaggaacatgccgagttcgtcctcgtcaggaaggatatgctgttcaatcaactaattgaaatggccttgttaagcctaggatattcccattccagcgctgcacaggcaaagggttag

SEQ ID NO: 328408 - DNA, 351 bp, Artificial Sequence
  derived and/or modified sequence
atggaccacctgaatgaggccacccagggcaaggagcacagcgagatgagcaacaacgtgtctgaccccaagggccccccagccaagatcgcccggctggagcagaatggcagccccctgggccggggccgcctgggcagcactggagccaagatgcagggcgtgcccctgaagcacagcggccacctgatgaagaccaacctgaggaagggcaccatgctgcctgtgttctgtgtggtggagcactatgaaaatgccattgaatatgactgcaaggaggagcacgccgagtttgtgctggtgaggaaggacatgctgttcaaccagctgattgagatggccctgctgtag

SEQ ID NO: 328409 - DNA, 675 bp, Artificial Sequence
  derived and/or modified sequence
atggaccacctgaatgaggccacccagggcaaggagcacagcgagatgagcaacaacgtgtctgaccccaagggccccccagccaagatcgcccggctggagcagaatggcagccccctgggccggggccgcctgggcagcactggagccaagatgcagggcgtgcccctgaagcacagcggccacctgatgaagaccaacctgaggaagggcaccatgctgcctgtgttctgtgtggtggagcactatgaaaatgccattgaatatgactgcaaggaggagcacgccgagtttgtgctggtgaggaaggacatgctgttcaaccagctgattgagatggccctgctgagcctgggctacagccacagcagcgctgcccaggccaagggcctcatccaggtgggcaagtggaaccctgtgcccctgtcctatgtgacagatgccccagatgccaccgtggccgacatgctgcaggatgtgtaccacgtggtgaccctgaagatccagctgcacagctgccccaagctggaggacctgcccccagagcagtggagccacaccaccgtgagaaatgccctgaaggacctgctgaaggacatgaaccagagcagcctggccaaggagtgccccctgagccagagcatgatcagcagcatcgtgaacagcacctactag

SEQ ID NO: 328410 - DNA, 216 bp, Artificial Sequence
  derived and/or modified sequence
atggaccacctgaatgaggccacccagggcaaggagcacagcgagatgagcaacaacgtgtctgaccccaagggccccccagccaagatcgcccggctggagcagaatggcagccccctgggccggggccgcctgggcagcactggagccaagatgcagggcgtgcccctgaagcacagcggccacctgatgaagaccaacctgaggaagggctag

SEQ ID NO: 328411 - DNA, 519 bp, Artificial Sequence
  derived and/or modified sequence
atggaccacctgaatgaggccacccagggcaaggagcacagcgagatgagcaacaacgtgtctgaccccaagggccccccagccaagatcgcccggctggagcagaatggcagccccctgggccggggccgcctgggcagcactggagccaagatgcagggcgtgcccctgaagcacagcggccacctgatgaagaccaacctgaggaagggcaccatgctgcctgtgttctgtgtggtggagcactatgaaaatgccattgaatatgactgcaaggaggagcacgccgagtttgtgctggtgaggaaggacatgctgttcaaccagctgattgagatggccctgctgagcctgggctacagccacagcagcgctgcccaggccaagggcctcatccaggtgggcaagtggaaccctgtgcccctgtcctatgtgacagatgccccagatgccaccgtggccgacatgctgcaggatgtgtaccacgtggtgaccctgaagatccagctgcacaggtag

SEQ ID NO: 328412 - DNA, 393 bp, Artificial Sequence
  derived and/or modified sequence
atggaccacctgaatgaggccacccagggcaaggagcacagcgagatgagcaacaacgtgtctgaccccaagggccccccagccaagatcgcccggctggagcagaatggcagccccctgggccggggccgcctgggcagcactggagccaagatgcagggcgtgcccctgaagcacagcggccacctgatgaagaccaacctgaggaagggcaccatgctgcctgtgttctgtgtggtggagcactatgaaaatgccattgaatatgactgcaaggaggagcacgccgagtttgtgctggtgaggaaggacatgctgttcaaccagctgattgagatggccctgctgagcctgggctacagccacagcagcgctgcccaggccaagggctag

SEQ ID NO: 328413 - DNA, 351 bp, Artificial Sequence
  derived and/or modified sequence
atggaccacctgaacgaggccacccagggcaaggagcacagcgagatgtctaacaatgtgagcgatccaaagggaccaccggcaaaaatcgcacggctcgagcagaacggctcccctctgggccgcggtagactcggttctacaggcgctaaaatgcagggggtacctctcaagcacagcggacatcttatgaaaaccaatttgaggaaagggacaatgttgccagtgttctgtgtcgtggagcactacgaaaatgccatcgagtatgactgcaaggaggagcatgccgagtttgtgctggtgaggaaagacatgctgtttaaccaacttatcgaaatggcgctgctttag

SEQ ID NO: 328414 - DNA, 675 bp, Artificial Sequence
  derived and/or modified sequence
atggaccacctgaacgaggccacccagggcaaggagcacagcgagatgagtaataatgtaagtgatccaaaggggcccccagccaagatagcacggcttgagcaaaacgggtctccactgggtcgcggcagactgggttcaactggtgccaagatgcagggggtaccactgaagcattccggacatcttatgaagaccaacctccggaaagggactatgctgccggtgttctgtgtggttgagcactacgagaacgccatcgagtacgactgtaaggaggaacatgccgaatttgtgctggtgcgaaaggacatgttgttcaaccagctcatagagatggccctgctgtccctgggctactcccactctagcgctgcgcaagctaaaggcctaattcaggtcgggaaatggaaccccgtgcccctaagctacgttaccgacgcccccgatgccaccgtggccgatatgctacaggacgtataccacgtcgttactctgaagattcagctgcactcatgcccaaaactggaggatttgccccctgagcagtggtctcatacgacagtgcgtaatgccctgaaagatctgctgaaggatatgaatcagagttcccttgctaaggaatgccccctgtctcagtcaatgatctcatccatcgtgaattctacttactag

SEQ ID NO: 328415 - DNA, 216 bp, Artificial Sequence
  derived and/or modified sequence
atggaccacctgaacgaggccacccagggcaaggagcacagcgagatgagtaataatgtatcagaccctaaggggcccccagccaaaatagcccgtcttgagcagaatggaagccctctagggcgcgggcgtctcggatctaccggggctaaaatgcagggggtgcccctgaagcattctggacatctcatgaagacaaatctccgcaaggggtag

SEQ ID NO: 328416 - DNA, 519 bp, Artificial Sequence
  derived and/or modified sequence
atggaccacctgaacgaggccacccagggcaaggagcacagcgagatgagcaataatgtttcggatccgaagggtcccccggctaagatcgcgcgccttgagcagaacggtagcccgttgggcaggggacgactggggtcgaccggcgctaagatgcagggcgtgcctttgaagcactccgggcacttaatgaaaaccaatctgaggaagggtactatgctgccggtgttctgcgtagtggaacactatgagaacgccatagagtatgattgcaaagaggagcacgcagagtttgtgctcgtcaggaaggacatgttgtttaaccagctcatcgagatggctcttttgtcactgggttatagccacagttcggccgctcaagctaaagggctgatccaggttggcaagtggaaccctgttcccctgagctatgttaccgacgctcctgacgcgacagttgccgatatgttgcaggacgtgtaccacgtggtgacactcaagatacaactgcacaggtag

SEQ ID NO: 328417 - DNA, 393 bp, Artificial Sequence
  derived and/or modified sequence
atggaccacctgaacgaggccacccagggcaaggagcacagcgagatgagcaataacgtgtcggatcccaagggaccccctgcaaagattgcgaggctcgaacaaaacggatccccactggggcgaggcaggctggggagtactggagcgaagatgcagggtgttccactcaagcactctggccacctgatgaagacgaatctgagaaagggtactatgctcccggtcttctgtgtggtggaacactacgagaacgccattgaatacgactgtaaagaagagcatgcggagtttgtgctagtgcgcaaagatatgttattcaaccaactcatcgaaatggccttgcttagcctcggatactctcatagctcagcagctcaagccaagggctag

SEQ ID NO: 328418 - DNA, 351 bp, Artificial Sequence
  derived and/or modified sequence
atggatcacctgaacgaagcaactcagggcaaggaacatagtgaaatgagtaataacgtcagtgatcccaagggccctccagcgaaaattgcccgactcgagcagaatggctcccctctcgggaggggcaggctaggctctacaggtgcaaagatgcagggggtgcccttgaagcacagcggtcacctgatgaagacaaacttgcgtaagggtacaatgttgcccgtcttctgcgtggtggagcattatgagaacgccattgagtacgactgcaaagaggagcacgctgaattcgttctcgtccgaaaagacatgctgttcaaccagctcatcgagatggcacttctttag

SEQ ID NO: 328419 - DNA, 675 bp, Artificial Sequence
  derived and/or modified sequence
atggatcacttgaatgaagccacccaagggaaagaacacagcgaaatgagtaacaacgtgagtgatcccaaaggcccacccgctaagatagcgcgtctggagcagaatggcagccctctgggcaggggaaggctgggatcaactggcgctaagatgcagggggtccctctcaaacactcgggccatttgatgaaaacaaatttgaggaaggggaccatgctacccgtgttctgtgtggtggagcattatgagaacgctatcgagtacgactgcaaagaggagcatgctgagttcgtcctggtccggaaggacatgctgttcaatcagcttatcgaaatggccctcttgtcactcgggtattctcactcttccgctgcccaggctaagggcctcatccaggttgggaagtggaatcctgttccgctgtcatatgtgactgatgcccctgacgccaccgttgccgacatgctgcaggacgtctaccacgtggtgacgttaaagattcagctgcactcatgcccgaagctggaggacttacccccagagcagtggagtcacacaaccgtgcgcaacgctttgaaagacttgcttaaagacatgaaccagagttctcttgccaaagagtgccctctatcacagtcaatgattagctcaatcgttaacagcacctactag

SEQ ID NO: 328420 - DNA, 216 bp, Artificial Sequence
  derived and/or modified sequence
atggaccatctgaacgaagcaacacaggggaaggagcactctgaaatgtcaaataacgtgtcagatccaaagggcccaccagccaagattgcccgactggagcaaaatggatcaccattaggtaggggcaggctgggatctaccggcgcaaagatgcagggcgtccccctcaagcactccggccatctgatgaagacaaatctgcgcaaagggtag

SEQ ID NO: 328421 - DNA, 519 bp, Artificial Sequence
  derived and/or modified sequence
atggatcacctcaatgaagcgacccaggggaaagaacattctgagatgtcaaacaatgtctccgaccccaagggtccacctgccaagatagcgagactggagcagaatggatcgcctctaggcagaggacgtctgggctccaccggtgccaaaatgcagggagtgcctctgaagcactcgggacatctgatgaaaaccaacttgcgcaagggaactatgctgccggtgttttgcgtggtggaacactatgaaaatgccatcgagtatgattgcaaagaagagcatgccgagtttgtgctggttcggaaggacatgctgttcaatcaactgatagagatggctttgctgagcttggggtactctcactcaagtgccgcacaagcaaaaggcctgatccaggtggggaagtggaatcctgtacctctgtcctacgtcacagacgcccctgatgccaccgtcgcagatatgctccaggacgtgtatcacgttgtaacgctgaaaatccagttacacagatag

SEQ ID NO: 328422 - DNA, 393 bp, Artificial Sequence
  derived and/or modified sequence
atggaccacctgaacgaggctacccaaggcaaggaacacagcgaaatgagcaataacgtttccgatcccaaaggccctcccgctaaaatcgcacggcttgaacaaaatgggtccccactgggtcgcggaagactggggagtactggggctaagatgcaaggtgtgcccttaaagcacagtgggcatctgatgaaaactaaccttagaaaaggtacgatgttgcccgttttctgcgtagttgagcactacgagaacgctatagagtacgactgtaaggaggagcacgctgaattcgtgttagtccgaaaggatatgctgtttaatcagctaattgagatggctctactgagccttgggtactcccattcttcggccgcacaggccaaaggttag

SEQ ID NO: 328423 - DNA, 583 bp, Artificial Sequence
  derived and/or modified sequence
atttggggatgtttctgccttgctagcagtgccagagagaacttcatcattgtcacctcatcaaagactactttttcagacatctcctgtagggctagattcagagagcagcttctgatatttggaggatcttgtaacctcgtaatatggctcttaaaaacgcactagtattcccactttctgaagtttgtagaagctgctatatatttctgtgatctttagacagtgactgagtatggatcatttgaacgaggcaactcaggggaaagaacattcagaaatgtctaacaatgtgagtgatccgaagggtccaccagccaagattgcccgcctggagcagaacgggagcccgctaggaagaggaaggcttgggagtacaggtgcaaaaatgcagggagtgcctttaaaacactcgggccatctgatgaaaaccaaccttaggaaaggaaccatgctgccagttttctgtgtggtggaacattatgaaaacgccattgaatatgattgcaaggaggagcatgcagaatttgtgctggtgagaaaggatatgcttttcaaccagctgatcgaaatggcattgctg

SEQ ID NO: 328424 - DNA, 975 bp, Artificial Sequence
  derived and/or modified sequence
ctccttctcttccttcccttggccccgcgcgctcgctcgctcgctcctcgcctcgctctcccctttaaacgcccacttcgtatggggaaagaggacaacttgaagtcaagttgcaattaacttccgcggcagccgcagctccggcggcggcggcggcggcaggagaggcagaagccgccgcctcggaagtccgacgccggcgcgcccgcccggggagccgttcttggtttcaggcccgcactcgacagccaccgccgcccccaacgtccatgcctgagtgatctttagacagtgactgagtatggatcatttgaacgaggcaactcaggggaaagaacattcagaaatgtctaacaatgtgagtgatccgaagggtccaccagccaagattgcccgcctggagcagaacgggagcccgctaggaagaggaaggcttgggagtacaggtgcaaaaatgcagggagtgcctttaaaacactcgggccatctgatgaaaaccaaccttaggaaaggaaccatgctgccagttttctgtgtggtggaacattatgaaaacgccattgaatatgattgcaaggaggagcatgcagaatttgtgctggtgagaaaggatatgcttttcaaccagctgatcgaaatggcattgctgtctctaggttattcacatagctctgctgcccaggccaaagggctaatccaggttggaaagtggaatccagttccactgtcttacgtgacagatgcccctgatgctacagtagcagatatgcttcaagatgtgtatcatgtggtcacattgaaaattcagttacacagttgccccaaactagaagacttgcctcccgaacaatggtcgcacaccacagtgaggaatgctctgaaggacttactgaaagatatgaatcagagttcattggccaaggagtgccccctttcacagagtatgatttcttccattgtgaacagtacttacta

SEQ ID NO: 328425 - DNA, 579 bp, Artificial Sequence
  derived and/or modified sequence
tttttgcaccattatgcattcctacttctccctctttctttaagcatggagaagcctacttaaccttattataacaataacagaataggttattaatatttaatatgcacatgattaaaatttctctcccttaaacataggtcagctgtattattactaaccggcatgtaatttttcatttaaaatattggtattctgccccatgccgtttctgaaatgcagtctactttagtagtgatttaatacacaacgtttagaaaattgtggtcggctagtgagaaaagaatttaccagtcatggataatcaattatgcatgaattcagatgtaacagatggaatctggtgatctttagacagtgactgagtatggatcatttgaacgaggcaactcaggggaaagaacattcagaaatgtctaacaatgtgagtgatccgaagggtccaccagccaagattgcccgcctggagcagaacgggagcccgctaggaagaggaaggcttgggagtacaggtgcaaaaatgcagggagtgcctttaaaacactcgggccatctgatgaaaaccaaccttaggaaagg

SEQ ID NO: 328426 - DNA, 939 bp, Artificial Sequence
  derived and/or modified sequence
ttattaaagtgtttctgctgtattttgtaatgtgtttctaattgttaaaaattgggactacgtaaatgcaatttgctgttttctttttagctatacttgtaataattcttgttctaaaagtaagcccatttttccccacttagtttttttataggccagttatctttttattcatgtgtattggtacagtttccacagatcattttgttaatttgaataagaatgtaatgctatcatctagaaatatagtaacatctgtatcatatctagataggccattttacaaatacattatatttgtggagagatatctagagctaaaacatttacataggacacatatatacacgtaggtccccgcccaactataacgtgtcttctttttaaattctggcaggtgatctttagacagtgactgagtatggatcatttgaacgaggcaactcaggggaaagaacattcagaaatgtctaacaatgtgagtgatccgaagggtccaccagccaagattgcccgcctggagcagaacgggagcccgctaggaagaggaaggcttgggagtacaggtgcaaaaatgcagggagtgcctttaaaacactcgggccatctgatgaaaaccaaccttaggaaaggaaccatgctgccagttttctgtgtggtggaacattatgaaaacgccattgaatatgattgcaaggaggagcatgcagaatttgtgctggtgagaaaggatatgcttttcaaccagctgatcgaaatggcattgctgtctctaggttattcacatagctctgctgcccaggccaaagggctaatccaggttggaaagtggaatccagttccactgtcttacgtgacagatgcccctgatgctacagtagcagatatgcttcaagatgtgtatcatgtggtcacattgaaaattcagttacacaggtg

SEQ ID NO: 328427 - DNA, 564 bp, Artificial Sequence
  derived and/or modified sequence
aaagtcctagtgccattgtggtgctcgttgtttacctcggactctggacgagacatagaaaacatcagtcttgaacttctcttcaagaacccgggctgcaaaggaaatctcctttgtttttgttatttatgtgctgtcaagttttgaagtggtgatctttagacagtgactgagtatggatcatttgaacgaggcaactcaggggaaagaacattcagaaatgtctaacaatgtgagtgatccgaagggtccaccagccaagattgcccgcctggagcagaacgggagcccgctaggaagaggaaggcttgggagtacaggtgcaaaaatgcagggagtgcctttaaaacactcgggccatctgatgaaaaccaaccttaggaaaggaaccatgctgccagttttctgtgtggtggaacattatgaaaacgccattgaatatgattgcaaggaggagcatgcagaatttgtgctggtgagaaaggatatgcttttcaaccagctgatcgaaatggcattgctgtctctaggttattcacatagctctgctgcccaggccaaagg

SEQ ID NO: 328428 - DNA, 351 bp, Artificial Sequence
  derived and/or modified sequence
atggaccacctgaacgaggccacccagggcaaggagcacagcgagatgagcaacaacgtgagcgaccccaagggcccccccgccaagatcgccagactggagcagaacggcagccccctgggcagaggcagactgggcagcaccggcgccaagatgcagggcgtgcccctgaagcacagcggccacctgatgaagaccaacctgagaaagggcaccatgctgcccgtgttctgcgtggtggagcactacgagaacgccatcgagtacgactgcaaggaggagcacgccgagttcgtgctggtgagaaaggacatgctgttcaaccagctgatcgagatggccctgctgtag

SEQ ID NO: 328429 - DNA, 675 bp, Artificial Sequence
  derived and/or modified sequence
atggaccacctgaacgaggccacccagggcaaggagcacagcgagatgagcaacaacgtgagcgaccccaagggcccccccgccaagatcgccagactggagcagaacggcagccccctgggcagaggcagactgggcagcaccggcgccaagatgcagggcgtgcccctgaagcacagcggccacctgatgaagaccaacctgagaaagggcaccatgctgcccgtgttctgcgtggtggagcactacgagaacgccatcgagtacgactgcaaggaggagcacgccgagttcgtgctggtgagaaaggacatgctgttcaaccagctgatcgagatggccctgctgagcctgggctacagccacagcagcgccgcccaggccaagggcctgatccaggtgggcaagtggaaccccgtgcccctgagctacgtgaccgacgcccccgacgccaccgtggccgacatgctgcaggacgtgtaccacgtggtgaccctgaagatccagctgcacagctgccccaagctggaggacctgccccccgagcagtggagccacaccaccgtgagaaacgccctgaaggacctgctgaaggacatgaaccagagcagcctggccaaggagtgccccctgagccagagcatgatcagcagcatcgtgaacagcacctactag

SEQ ID NO: 328430 - DNA, 216 bp, Artificial Sequence
  derived and/or modified sequence
atggaccacctgaacgaggccacccagggcaaggagcacagcgagatgagcaacaacgtgagcgaccccaagggcccccccgccaagatcgccagactggagcagaacggcagccccctgggcagaggcagactgggcagcaccggcgccaagatgcagggcgtgcccctgaagcacagcggccacctgatgaagaccaacctgagaaagggctag

SEQ ID NO: 328431 - DNA, 519 bp, Artificial Sequence
  derived and/or modified sequence
atggaccacctgaacgaggccacccagggcaaggagcacagcgagatgagcaacaacgtgagcgaccccaagggcccccccgccaagatcgccagactggagcagaacggcagccccctgggcagaggcagactgggcagcaccggcgccaagatgcagggcgtgcccctgaagcacagcggccacctgatgaagaccaacctgagaaagggcaccatgctgcccgtgttctgcgtggtggagcactacgagaacgccatcgagtacgactgcaaggaggagcacgccgagttcgtgctggtgagaaaggacatgctgttcaaccagctgatcgagatggccctgctgagcctgggctacagccacagcagcgccgcccaggccaagggcctgatccaggtgggcaagtggaaccccgtgcccctgagctacgtgaccgacgcccccgacgccaccgtggccgacatgctgcaggacgtgtaccacgtggtgaccctgaagatccagctgcacagatag

SEQ ID NO: 328432 - DNA, 393 bp, Artificial Sequence
  derived and/or modified sequence
atggaccacctgaacgaggccacccagggcaaggagcacagcgagatgagcaacaacgtgagcgaccccaagggcccccccgccaagatcgccagactggagcagaacggcagccccctgggcagaggcagactgggcagcaccggcgccaagatgcagggcgtgcccctgaagcacagcggccacctgatgaagaccaacctgagaaagggcaccatgctgcccgtgttctgcgtggtggagcactacgagaacgccatcgagtacgactgcaaggaggagcacgccgagttcgtgctggtgagaaaggacatgctgttcaaccagctgatcgagatggccctgctgagcctgggctacagccacagcagcgccgcccaggccaagggctag

SEQ ID NO: 328433 - protein, 113 aa, Artificial Sequence
  derived and/or modified sequence
MAQHDPPPWTKYVEYVSENIKLGNLSALRTFRVLRALKTISVIPGLKTIVGALIQSVKKLADVMVLTVFCLSVFALIGLQLFMGNLRHKCVRNFTALNGTNGSVEADGLVWES

SEQ ID NO: 328434 - DNA, 342 bp, Artificial Sequence
  derived and/or modified sequence
atggcccaacacgatccccccccttggactaagtacgtggagtatgttagtgagaatattaaacttggtaacctgtccgccctgagaacgtttagggtattacgcgctctcaagactatcagcgtcatcccaggattaaaaactattgtcggggccctcatccagtcggtcaagaagcttgctgacgtaatggttttgactgtgttctgcctctcagtgttcgcgctcatcggtctgcaactctttatggggaatctgagacataaatgcgttcgcaatttcaccgcactgaacggaactaacgggtcagtggaggccgatggactagtctgggaaagctag

SEQ ID NO: 328435 - DNA, 342 bp, Artificial Sequence
  derived and/or modified sequence
atggcccagcacgaccccccaccctggaccaagtatgtggagtatgtgtctgagaacatcaagctgggcaacctgagcgccctgcggaccttccgggtgctgcgggccctgaagaccatcagcgtcatccctggcctgaagaccatcgtgggcgccctgatccagagcgtgaagaagctggctgatgtgatggtgctgactgtgttctgcctgtctgtgtttgccctgattggcctgcagctgttcatgggcaacctgcggcacaagtgtgtgaggaacttcaccgccctgaatggcaccaatggatctgtggaggctgatggcctggtgtgggagagctag

SEQ ID NO: 328436 - DNA, 342 bp, Artificial Sequence
  derived and/or modified sequence
atggcccagcacgacccccccccctggaccaagtacgtggagtacgtttccgagaacattaaactaggcaacctgtctgccctgagaacctttagggttcttagagccttaaaaaccatttccgtcataccaggtctgaagacaatagtgggtgcccttattcagagcgtgaaaaagctcgctgatgtcatggtactgaccgtgttctgtctcagcgtattcgctttgatcggccttcagctgttcatgggtaacctgcgccacaaatgcgtgcggaacttcaccgctctgaatggcaccaacggaagcgtcgaggctgacggtttggtgtgggagagctag

SEQ ID NO: 328437 - DNA, 342 bp, Artificial Sequence
  derived and/or modified sequence
atggcccaacatgaccccccaccctggaccaagtacgtggagtacgtgagcgaaaacattaaactgggcaacctgagtgccttaaggacctttcgggtgctcagggcgctcaaaactatctctgtgatccccggactaaagactatcgtcggggctctaattcagtccgtgaaaaaactggcagacgttatggttctaacagtgttttgtttgagtgtgttcgctctgatcggtctacagctcttcatggggaacttaaggcataagtgtgtccgaaactttaccgccctgaacgggactaacggttctgtggaagccgatggccttgtgtgggaaagctag

SEQ ID NO: 328438 - DNA, 341 bp, Artificial Sequence
  derived and/or modified sequence
tcatggcccagcacgaccctccaccctggaccaagtatgtcgagtatgtatcagaaaatataaaactaggcaatttgtcggctcttcgaactttcagagtcctgagagctctaaaaactatttcagttatcccagggctgaagaccatcgtgggggccctgatccagtctgtgaagaagctggctgatgtgatggtcctcacagtcttctgcctcagcgtctttgccctcatcggcctgcagctcttcatgggcaacctaaggcacaagtgcgtgcgcaacttcacagcgctcaacggcaccaacggctccgtggaggccgacggcttggtctgggaatcc

SEQ ID NO: 328439 - DNA, 342 bp, Artificial Sequence
  derived and/or modified sequence
atggcccagcacgacccccccccctggaccaagtacgtggagtacgtgagcgagaacatcaagctgggcaacctgagcgccctgagaaccttcagagtgctgagagccctgaagaccatcagcgtgatccccggcctgaagaccatcgtgggcgccctgatccagagcgtgaagaagctggccgacgtgatggtgctgaccgtgttctgcctgagcgtgttcgccctgatcggcctgcagctgttcatgggcaacctgagacacaagtgcgtgagaaacttcaccgccctgaacggcaccaacggcagcgtggaggccgacggcctggtgtgggagagctag

SEQ ID NO: 328440 - DNA, 261 bp, Artificial Sequence
  derived and/or modified sequence
atgggcaagatggtgagcgtgatcaacaccgtggacaccagccacgaggacatgatccacgacgcccagatggactactacggcaccagactggccacctgcagcagcgacagaagcgtgaagatcttcgacgtgagaaacggcggccagatcctgatcgccgacctgagaggccacgagggccccgtgtggcaggtggcctgggcccaccccatgtacggcaacatcctggccagctgcagctacgacagaaaggtgtag

SEQ ID NO: 328441 - DNA, 261 bp, Artificial Sequence
  derived and/or modified sequence
atgggaaaaatggtaagtgtgattaacactgtagataccagccatgaggatatgatccacgatgcccaaatggactactatggcacccgtcttgccacatgttcctccgacagaagtgtaaagatcttcgatgttcgcaacggcggtcaaattctgatcgctgacctgcgagggcatgagggcccagtctggcaggtggcttgggcccaccccatgtacggtaacatcttggccagctgcagctatgaccgtaaagtatag

SEQ ID NO: 328442 - DNA, 261 bp, Artificial Sequence
  derived and/or modified sequence
atgggcaagatggtgtctgtcatcaacacagtggacaccagccatgaggacatgattcatgatgcccagatggactactacggcacccggctggccacctgcagcagtgacagatctgtgaagatctttgatgtgagaaatggaggccagatcctgattgctgacctgcggggccacgagggccctgtgtggcaggtggcctgggcccaccccatgtatggcaacatcctggccagctgcagctatgacaggaaggtgtag

SEQ ID NO: 328443 - DNA, 261 bp, Artificial Sequence
  derived and/or modified sequence
atgggcaagatggtgagcgtgatcaacaccgtggacaccagccacgaggacatgatacacgacgctcaaatggattactacgggactcgcctggctacatgttcctctgatcggagcgtgaagatctttgatgttcgtaatggcgggcagattctgatcgcagacttaaggggtcacgagggccccgtttggcaggtcgcatgggctcaccctatgtatggtaacattctcgctagctgctcctacgaccgaaaagtgtag

SEQ ID NO: 328444 - DNA, 261 bp, Artificial Sequence
  derived and/or modified sequence
atgggcaaaatggtgtccgtcatcaatactgttgatactagccatgaagacatgatccatgatgcacagatggattattatggcactaggctagcaacatgtagttcagatagatctgtgaagattttcgatgtacgtaatggcggtcagattctgatcgccgatctaagaggccatgagggaccagtgtggcaggtcgcatgggcccacccgatgtacgggaacatactggccagttgctcatacgacagaaaagtttag

SEQ ID NO: 328445 - protein, 264 aa, Artificial Sequence
  derived and/or modified sequence
MLVAGLLLWASLLTGAWPSFPTQDHLPATPRVRLSFKELKATGTAHFFNFLLNTTDYRILLKDEDHDRMYVGSKDYVLSLDLHDINREPLIIHWAASPQRIEECVLSGKDVNGECGNFVRLIQPWNRTHLYVCGTGAYNPMCTYVNRGRRAQDYIFYLEPERLESGKGKCPYDPKLDTASALINEELYAGVYIDFMGTDAAIFRTLGKQTAMRTDQYNSRWLNDPSFIHAELIPDSAERNDDKLYFFFRERSAEAPQSPAVYAR

SEQ ID NO: 328446 - protein, 92 aa, Artificial Sequence
  derived and/or modified sequence
MLVAGLLLWASLLTGAWPSFPTQDHLPATPRVRLSFKELKATGTAHFFNFLLNTTDYRILLKDEDHDRMYVGSKDYVLSLDLHDINREPLIV

SEQ ID NO: 328447 - protein, 754 aa, Artificial Sequence
  derived and/or modified sequence
MLVAGLLLWASLLTGAWPSFPTQDHLPATPRVRLSFKELKATGTAHFFNFLLNTTDYRILLKDEDHDRMYVGSKDYVLSLDLHDINREPLIIHWAASPQRIEECVLSGKDVNGECGNFVRLIQPWNRTHLYVCGTGAYNPMCTYVNRGRRAQDYIFYLEPERLESGKGKCPYDPKLDTASALINEELYAGVYIDFMGTDAAIFRTLGKQTAMRTDQYNSRWLNDPSFIHAELIPDSAERNDDKLYFFFRERSAEAPQSPAVYARIGRICLNDDGGHCCLVNKWSTFLKARLVCSVPGEDGIETHFDELQDVFVQQTQDVRNPVIYAVFTSSGSVFRGSAVCVYSMADIRMVFNGPFAHKEGPNYQWMPFSGKMPYPRPGTCPGGTFTPSMKSTKDYPDEVINFMRSHPLMYQAVYPLQRRPLVVRTGAPYRLTTIAVDQVDAADGRYEVLFLGTDRGTVQKVIVLPKDDQELEELMLEEVEVFKDPAPVKTMTISSKRQQLYVASAVGVTHLSLHRCQAYGAACADCCLARDPYCAWDGQACSRYTASSKRRSRRQDVRHGNPIRQCRGFNSNANKNAVESVQYGVAGSAAFLECQPRSPQATVKWLFQRDPGDRRREIRAEDRFLRTEQGLLLRALQLSDRGLYSCTATENNFKHVVTRVQLHVLGRDAVHAALFPPLSMSAPPPPGAGPPTPPYQELAQLLAQPEVGLIHQYCQGYWRHVPPSPREAPGAPRSPEPQDQKKPRNRRHHPPDT

SEQ ID NO: 328448 - protein, 380 aa, Artificial Sequence
  derived and/or modified sequence
MLVAGLLLWASLLTGAWPSFPTQDHLPATPRVRLSFKELKATGTAHFFNFLLNTTDYRILLKDEDHDRMYVGSKDYVLSLDLHDINREPLIIHWAASPQRIEECVLSGKDVNGECGNFVRLIQPWNRTHLYVCGTGAYNPMCTYVNRGRRAQDYIFYLEPERLESGKGKCPYDPKLDTASALINEELYAGVYIDFMGTDAAIFRTLGKQTAMRTDQYNSRWLNDPSFIHAELIPDSAERNDDKLYFFFRERSAEAPQSPAVYARIGRICLNDDGGHCCLVNKWSTFLKARLVCSVPGEDGIETHFDELQDVFVQQTQDVRNPVIYAVFTSSGSVFRGSAVCVYSMADIRMVFNGPFAHKEGPNYQWMPFSGKMPYPRPGT

SEQ ID NO: 328449 - DNA, 795 bp, Artificial Sequence
  derived and/or modified sequence
atgctggtggccggcctgctgctgtgggccagcctgctgaccggcgcctggcccagcttccccacccaggaccacctgcccgccacccccagagtgagactgagcttcaaggagctgaaggccaccggcaccgcccacttcttcaacttcctgctgaacaccaccgactacagaatcctgctgaaggacgaggaccacgacagaatgtacgtgggcagcaaggactacgtgctgagcctggacctgcacgacatcaacagagagcccctgatcatccactgggccgccagcccccagagaatcgaggagtgcgtgctgagcggcaaggacgtgaacggcgagtgcggcaacttcgtgagactgatccagccctggaacagaacccacctgtacgtgtgcggcaccggcgcctacaaccccatgtgcacctacgtgaacagaggcagaagagcccaggactacatcttctacctggagcccgagagactggagagcggcaagggcaagtgcccctacgaccccaagctggacaccgccagcgccctgatcaacgaggagctgtacgccggcgtgtacatcgacttcatgggcaccgacgccgccatcttcagaaccctgggcaagcagaccgccatgagaaccgaccagtacaacagcagatggctgaacgaccccagcttcatccacgccgagctgatccccgacagcgccgagagaaacgacgacaagctgtacttcttcttcagagagagaagcgccgaggccccccagagccccgccgtgtacgccagatag

SEQ ID NO: 328450 - DNA, 2265 bp, Artificial Sequence
  derived and/or modified sequence
atgctggtggccggcctgctgctgtgggccagcctgctgaccggcgcctggcccagcttccccacccaggaccacctgcccgccacccccagagtgagactgagcttcaaggagctgaaggccaccggcaccgcccacttcttcaacttcctgctgaacaccaccgactacagaatcctgctgaaggacgaggaccacgacagaatgtacgtgggcagcaaggactacgtgctgagcctggacctgcacgacatcaacagagagcccctgatcatccactgggccgccagcccccagagaatcgaggagtgcgtgctgagcggcaaggacgtgaacggcgagtgcggcaacttcgtgagactgatccagccctggaacagaacccacctgtacgtgtgcggcaccggcgcctacaaccccatgtgcacctacgtgaacagaggcagaagagcccaggactacatcttctacctggagcccgagagactggagagcggcaagggcaagtgcccctacgaccccaagctggacaccgccagcgccctgatcaacgaggagctgtacgccggcgtgtacatcgacttcatgggcaccgacgccgccatcttcagaaccctgggcaagcagaccgccatgagaaccgaccagtacaacagcagatggctgaacgaccccagcttcatccacgccgagctgatccccgacagcgccgagagaaacgacgacaagctgtacttcttcttcagagagagaagcgccgaggccccccagagccccgccgtgtacgccagaatcggcagaatctgcctgaacgacgacggcggccactgctgcctggtgaacaagtggagcaccttcctgaaggccagactggtgtgcagcgtgcccggcgaggacggcatcgagacccacttcgacgagctgcaggacgtgttcgtgcagcagacccaggacgtgagaaaccccgtgatctacgccgtgttcaccagcagcggcagcgtgttcagaggcagcgccgtgtgcgtgtacagcatggccgacatcagaatggtgttcaacggccccttcgcccacaaggagggccccaactaccagtggatgcccttcagcggcaagatgccctaccccagacccggcacctgccccggcggcaccttcacccccagcatgaagagcaccaaggactaccccgacgaggtgatcaacttcatgagaagccaccccctgatgtaccaggccgtgtaccccctgcagagaagacccctggtggtgagaaccggcgccccctacagactgaccaccatcgccgtggaccaggtggacgccgccgacggcagatacgaggtgctgttcctgggcaccgacagaggcaccgtgcagaaggtgatcgtgctgcccaaggacgaccaggagctggaggagctgatgctggaggaggtggaggtgttcaaggaccccgcccccgtgaagaccatgaccatcagcagcaagagacagcagctgtacgtggccagcgccgtgggcgtgacccacctgagcctgcacagatgccaggcctacggcgccgcctgcgccgactgctgcctggccagagacccctactgcgcctgggacggccaggcctgcagcagatacaccgccagcagcaagagaagaagcagaagacaggacgtgagacacggcaaccccatcagacagtgcagaggcttcaacagcaacgccaacaagaacgccgtggagagcgtgcagtacggcgtggccggcagcgccgccttcctggagtgccagcccagaagcccccaggccaccgtgaagtggctgttccagagagaccccggcgacagaagaagagagatcagagccgaggacagattcctgagaaccgagcagggcctgctgctgagagccctgcagctgagcgacagaggcctgtacagctgcaccgccaccgagaacaacttcaagcacgtggtgaccagagtgcagctgcacgtgctgggcagagacgccgtgcacgccgccctgttcccccccctgagcatgagcgccccccccccccccggcgccggcccccccacccccccctaccaggagctggcccagctgctggcccagcccgaggtgggcctgatccaccagtactgccagggctactggagacacgtgccccccagccccagagaggcccccggcgcccccagaagccccgagccccaggaccagaagaagcccagaaacagaagacaccacccccccgacacctag

SEQ ID NO: 328451 - DNA, 1143 bp, Artificial Sequence
  derived and/or modified sequence
atgctggtggccggcctgctgctgtgggccagcctgctgaccggcgcctggcccagcttccccacccaggaccacctgcccgccacccccagagtgagactgagcttcaaggagctgaaggccaccggcaccgcccacttcttcaacttcctgctgaacaccaccgactacagaatcctgctgaaggacgaggaccacgacagaatgtacgtgggcagcaaggactacgtgctgagcctggacctgcacgacatcaacagagagcccctgatcatccactgggccgccagcccccagagaatcgaggagtgcgtgctgagcggcaaggacgtgaacggcgagtgcggcaacttcgtgagactgatccagccctggaacagaacccacctgtacgtgtgcggcaccggcgcctacaaccccatgtgcacctacgtgaacagaggcagaagagcccaggactacatcttctacctggagcccgagagactggagagcggcaagggcaagtgcccctacgaccccaagctggacaccgccagcgccctgatcaacgaggagctgtacgccggcgtgtacatcgacttcatgggcaccgacgccgccatcttcagaaccctgggcaagcagaccgccatgagaaccgaccagtacaacagcagatggctgaacgaccccagcttcatccacgccgagctgatccccgacagcgccgagagaaacgacgacaagctgtacttcttcttcagagagagaagcgccgaggccccccagagccccgccgtgtacgccagaatcggcagaatctgcctgaacgacgacggcggccactgctgcctggtgaacaagtggagcaccttcctgaaggccagactggtgtgcagcgtgcccggcgaggacggcatcgagacccacttcgacgagctgcaggacgtgttcgtgcagcagacccaggacgtgagaaaccccgtgatctacgccgtgttcaccagcagcggcagcgtgttcagaggcagcgccgtgtgcgtgtacagcatggccgacatcagaatggtgttcaacggccccttcgcccacaaggagggccccaactaccagtggatgcccttcagcggcaagatgccctaccccagacccggcacctag

SEQ ID NO: 328452 - DNA, 795 bp, Artificial Sequence
  derived and/or modified sequence
atgcttgtggccgggctgctgctgtgggcaagcctccttactggcgcctggccttctttccctactcaagatcatctgcctgcaaccccacgagtcagactatctttcaaagagttaaaggctacggggacagctcacttcttcaatttcctgctcaacactaccgactaccgtatcctgctgaaagatgaagaccatgacagaatgtatgtcgggagtaaagattacgtcctgagcttggatctccacgacatcaatcgtgagcctctgataatacattgggcagcctcgccgcaacgtatcgaagaatgcgtcctgagcggtaaggacgtgaatggcgaatgtggaaactttgttcgcctgatccagccctggaatagaactcacctgtatgtttgtggcaccggagcgtacaaccccatgtgtacttacgtgaataggggacgcagagcacaagactatatcttctatctggagccggaaagattggagagcggtaagggcaagtgtccctacgacccgaaactggataccgccagcgcattgatcaatgaagagctctatgcaggcgtctacattgatttcatggggacagatgccgcaatcttcagaactctggggaagcagactgccatgcgtaccgaccagtacaatagtcgatggctgaatgacccatcctttattcacgccgaattgatacctgactccgccgagagaaatgatgacaaactatacttcttcttccgcgagaggagtgccgaagctcctcagtcaccagcagtgtacgcccgctag

SEQ ID NO: 328453 - DNA, 2265 bp, Artificial Sequence
  derived and/or modified sequence
atgctggttgccggtctgctgttgtgggcctctctgctgaccggcgcttggcctagtttccccacacaggaccacctcccagctacacctcgcgttcgcttaagcttcaaagagctgaaagccactggcaccgctcatttttttaatttcctgctcaataccacggactatagaatcttgttaaaggatgaggaccacgaccgtatgtatgtgggttctaaggactacgttctgtccttagacctccatgacatcaatcgagagccactaatcattcactgggccgcaagcccccagaggatcgaagaatgtgtcctgtcagggaaggatgtgaatggagagtgtggaaactttgttcggctgattcagccttggaatcggactcacttgtacgtatgtggaaccggcgcctacaatcctatgtgcacctatgtgaacagaggccggcgtgctcaggattatatcttttacctggagcctgaaagactcgaaagcggcaagggaaaatgcccatacgatccaaagctcgatacggcttccgctttaatcaacgaggaactttacgccggagtttacatcgactttatggggactgacgccgctattttcagaaccctggggaagcagaccgccatgaggaccgatcagtacaatagcaggtggctgaatgacccctcttttatccatgctgaactgattcccgatagcgccgagcgaaatgatgacaagctgtattttttctttagggaacgaagcgcagaggccccacagtcccccgccgtctacgcccgcattggcagaatttgtctcaacgatgatggcggacattgttgcctggtcaacaaatggtctacttttttaaaagcacgattggtttgcagtgtcccaggggaggacggaatagagactcacttcgatgagttgcaggatgtcttcgtgcagcagacacaggacgtaaggaaccctgtgatttatgctgtctttacatcctcaggtagcgtgtttaggggctctgcggtctgcgtatacagcatggccgacattcgcatggtgttcaatggaccatttgcacacaaggagggtcccaattatcagtggatgcccttttccggaaaaatgccttaccccaggcctggcacctgccccggtggtacctttacgccgagtatgaagtctaccaaagattatcctgacgaagttattaacttcatgcggtcccacccactgatgtatcaggcggtgtaccctctgcaaaggaggccactcgtcgtcaggactggggccccttaccgcttgacaacgatcgcagtcgaccaggtagacgcagcggatgggcgatacgaggtgctctttttgggaacagatcgaggcacagtccaaaaggtgattgtcctgcctaaggatgaccaagaactcgaggagctcatgctagaggaggtggaggtatttaaggatcccgccccggtgaaaaccatgacgatttcctcgaaaaggcagcagctttacgtggcctccgctgttggtgtgacccatcttagtctgcaccggtgccaagcctacggagctgcatgtgcggactgctgcctggctcgggacccatactgcgcctgggatgggcaggcatgtagtcggtacacagcttcttccaaaaggcgtagtagacggcaggatgtcagacatgggaatcctattcggcagtgcaggggctttaattctaatgcgaataagaacgccgttgaatctgtgcaatacggtgtggcgggctcagcagcattcctggaatgccagccccgctctcctcaagccacggtgaaatggctattccagcgcgatccaggggaccgcaggcgggaaataagagcagaggatcgctttttgaggacggagcaagggctcctcttgcgggcgctgcagctgagcgaccgcggcctctattcgtgtactgctacagaaaataacttcaagcacgtggtgacacgagtgcagctgcacgtgcttgggagagatgccgtgcacgccgctctcttcccaccactgtcgatgtcagctcctcctccacctggcgccgggcctcccaccccaccttaccaggagctggctcagctgctcgcccagcctgaggtcgggctgatacaccaatactgtcagggttactggcggcatgtaccgccttcccctcgagaggctcccggtgctcccagatccccggagccgcaagaccaaaagaagccgaggaaccgaagacatcacccgccagatacctag

SEQ ID NO: 328454 - DNA, 1143 bp, Artificial Sequence
  derived and/or modified sequence
atgctggtcgctggcctcctcctgtgggcatctctgctgacaggcgcatggccaagcttccctacacaggaccacctcccagctaccccccgggtgcgtctgagtttcaaagagctcaaagccaccgggacggctcacttctttaattttctcctcaacacaacagactacaggatcctgttgaaggatgaggaccatgacagaatgtacgttggctccaaagactacgtcctttccctggacctgcacgacattaacagggagcccctcattattcactgggcagcgtcgcctcagcgcatcgaagaatgcgtgctaagcgggaaagatgtcaacggagaatgcggtaacttcgttcggctaatccagccgtggaacagaacccatctgtacgtgtgtgggactggagcgtataaccctatgtgcacttacgtcaatagggggcggcgggcgcaggactatatcttctatctggaaccagaaagattagagtctggcaaaggcaagtgtccttatgaccctaagctcgacactgcgtccgctttgatcaatgaggagctgtatgctggcgtgtatatagattttatggggacagacgcggcgatttttaggacgctgggcaagcagaccgcaatgcggacagaccagtacaatagccggtggctaaacgatccaagtttcatccacgccgaactgattccagactcagccgagagaaacgatgacaagctttatttcttcttcagggagagaagcgccgaggctccacagtctcctgctgtctatgccagaatcggcaggatctgcctgaacgacgacggaggacactgctgtttagtcaacaagtggtctacattcttaaaggcaagactcgtttgctcagtgccaggcgaagatggtattgagacccacttcgacgaattgcaggatgtctttgtacaacagacccaggacgtgcgcaatcctgtgatttacgccgtattcacctcttcgggcagtgtgttccggggttctgccgtgtgtgtgtactctatggccgacatccgtatggtgttcaacgggcccttcgcacacaaagaaggcccaaactatcagtggatgccattctccgggaagatgccataccccagacctgggacctag

SEQ ID NO: 328455 - DNA, 795 bp, Artificial Sequence
  derived and/or modified sequence
atgctggtggccggcctgctgctgtgggccagcctgctgaccggggcctggcccagcttccccacccaggaccacctgcctgccaccccccgggtgcggctgtccttcaaggagctgaaggccaccggcacagcccacttcttcaacttcctgctgaacaccacagactaccgcatcctgctgaaggatgaggaccatgacaggatgtatgtgggcagcaaggactatgtgctgagcctggacctgcatgacatcaaccgggagcccctcatcatccactgggccgccagcccccagagaattgaagaatgtgtgctgagcggcaaggatgtgaatggagaatgtggcaactttgtgcggctcatccagccctggaacagaacccacctgtatgtgtgtggcactggagcctacaaccccatgtgcacctacgtgaacagaggaagaagagcccaggactacatcttctacctggagcctgagcggctggagagcgggaaaggaaaatgtccctatgaccccaagctggacacagccagcgccctgatcaatgaggagctgtatgccggcgtgtacatcgacttcatgggcacagatgctgccatcttccgcaccctgggcaagcagacagccatgaggacagaccagtacaacagccgctggctgaatgaccccagcttcatccacgccgagctgatcccagacagcgctgagagaaatgatgacaagctgtacttcttcttccgggagaggtctgctgaggccccccagagccctgctgtgtatgccaggtag

SEQ ID NO: 328456 - DNA, 2265 bp, Artificial Sequence
  derived and/or modified sequence
atgctggtggccggcctgctgctgtgggccagcctgctgaccggggcctggcccagcttccccacccaggaccacctgcctgccaccccccgggtgcggctgtccttcaaggagctgaaggccaccggcacagcccacttcttcaacttcctgctgaacaccacagactaccgcatcctgctgaaggatgaggaccatgacaggatgtatgtgggcagcaaggactatgtgctgagcctggacctgcatgacatcaaccgggagcccctcatcatccactgggccgccagcccccagagaattgaagaatgtgtgctgagcggcaaggatgtgaatggagaatgtggcaactttgtgcggctcatccagccctggaacagaacccacctgtatgtgtgtggcactggagcctacaaccccatgtgcacctacgtgaacagaggaagaagagcccaggactacatcttctacctggagcctgagcggctggagagcgggaaaggaaaatgtccctatgaccccaagctggacacagccagcgccctgatcaatgaggagctgtatgccggcgtgtacatcgacttcatgggcacagatgctgccatcttccgcaccctgggcaagcagacagccatgaggacagaccagtacaacagccgctggctgaatgaccccagcttcatccacgccgagctgatcccagacagcgctgagagaaatgatgacaagctgtacttcttcttccgggagaggtctgctgaggccccccagagccctgctgtgtatgccagaattggccgcatctgcctgaatgatgatggcggccactgctgcctggtgaacaagtggagcaccttcctgaaggcccggctggtgtgcagcgtgcctggagaagatggcatcgagacccactttgatgagctgcaggatgtgtttgtgcagcagacccaggatgtgaggaaccctgtgatctatgctgtgttcaccagcagcggctctgtgttccggggcagcgctgtgtgtgtgtacagcatggctgacatccgcatggtgttcaacggcccctttgcccacaaggagggccccaactaccagtggatgcccttcagcggcaagatgccctacccccggcccggcacctgccctgggggcaccttcacccccagcatgaagagcaccaaggactacccagatgaggtgatcaacttcatgaggagccaccccctgatgtaccaggccgtgtaccccctgcagaggcggcccctggtggtgaggactggagccccctaccgcctgaccaccatcgctgtggaccaggtggatgctgctgatggccgctatgaggtgctcttcctgggcacagaccggggcaccgtgcagaaggtgattgtgctgcccaaggatgaccaggagctggaggagctgatgctggaggaggtggaggtgttcaaggaccctgcccctgtgaagaccatgaccatcagcagcaagaggcagcagctgtatgtggccagcgctgtgggcgtgacccacctgagcctgcaccgctgccaggcctacggggccgcctgtgccgactgctgcctggcccgggacccctactgtgcctgggatggccaggcctgcagccgctacacagccagcagcaagagaagaagccggcggcaggatgtgcgccacggcaaccccatccggcagtgccggggcttcaacagcaatgccaacaagaatgctgtggagagcgtgcagtatggagtggccggcagcgctgccttcctggagtgccagcccaggagcccccaggccaccgtgaagtggctgttccagagggaccccggggacagaagaagagagatccgggcagaggaccgcttcctgaggacagagcagggcctgctgctgcgggccctgcagctgagtgaccggggcctgtacagctgcacagccacagagaacaacttcaagcacgtggtgaccagggtgcagctgcacgtgctgggcagagatgctgtgcatgctgccctcttcccccccctgtccatgtctgcccctcctcctcctggagctggcccccccaccccaccctaccaggagctggcccagctgctggcccagcctgaggtgggcctcatccaccagtactgccagggctactggaggcatgtgccccccagcccccgggaggcccctggggcccccaggagccctgagccccaggaccagaagaagcccaggaacagaagacaccaccccccagacacctag

SEQ ID NO: 328457 - DNA, 1143 bp, Artificial Sequence
  derived and/or modified sequence
atgctggtggccggcctgctgctgtgggccagcctgctgaccggggcctggcccagcttccccacccaggaccacctgcctgccaccccccgggtgcggctgtccttcaaggagctgaaggccaccggcacagcccacttcttcaacttcctgctgaacaccacagactaccgcatcctgctgaaggatgaggaccatgacaggatgtatgtgggcagcaaggactatgtgctgagcctggacctgcatgacatcaaccgggagcccctcatcatccactgggccgccagcccccagagaattgaagaatgtgtgctgagcggcaaggatgtgaatggagaatgtggcaactttgtgcggctcatccagccctggaacagaacccacctgtatgtgtgtggcactggagcctacaaccccatgtgcacctacgtgaacagaggaagaagagcccaggactacatcttctacctggagcctgagcggctggagagcgggaaaggaaaatgtccctatgaccccaagctggacacagccagcgccctgatcaatgaggagctgtatgccggcgtgtacatcgacttcatgggcacagatgctgccatcttccgcaccctgggcaagcagacagccatgaggacagaccagtacaacagccgctggctgaatgaccccagcttcatccacgccgagctgatcccagacagcgctgagagaaatgatgacaagctgtacttcttcttccgggagaggtctgctgaggccccccagagccctgctgtgtatgccagaattggccgcatctgcctgaatgatgatggcggccactgctgcctggtgaacaagtggagcaccttcctgaaggcccggctggtgtgcagcgtgcctggagaagatggcatcgagacccactttgatgagctgcaggatgtgtttgtgcagcagacccaggatgtgaggaaccctgtgatctatgctgtgttcaccagcagcggctctgtgttccggggcagcgctgtgtgtgtgtacagcatggctgacatccgcatggtgttcaacggcccctttgcccacaaggagggccccaactaccagtggatgcccttcagcggcaagatgccctacccccggcccggcacctag

SEQ ID NO: 328458 - DNA, 795 bp, Artificial Sequence
  derived and/or modified sequence
atgctggtggccggcctgctgctgtgggccagcctgctgaccggcgcttggccctctttccctacacaagaccatttgcctgcaacacctagggtgcggttgagcttcaaggagctgaaggcaaccggaacagctcatttcttcaatttcttgctcaacacaacggactaccggatccttctgaaggatgaagaccacgataggatgtatgtgggctctaaagattatgtgctaagcttggacctgcacgatatcaaccgggagcccttgatcatacattgggctgcctctccacagcggatcgaggagtgcgtgctgagcggcaaagatgtgaatggcgaatgtggaaatttcgttcgtctgatacagccatggaataggacgcacctctatgtatgcggcacaggcgcctacaatccaatgtgcacatacgttaatcgtggtcgacgcgcccaggattatattttctacttagaacctgaaaggctggaaagcgggaagggcaaatgcccctatgacccaaagttagatacagcatccgccctcatcaatgaggaactgtacgcaggtgtctacattgattttatggggaccgatgctgctatcttcagaacgttggggaagcagacggcaatgaggactgaccaatataactcccgctggttaaacgatcccagtttcattcatgcggagcttatacccgattcagctgagcgcaacgacgacaaactgtacttctttttcagagaaaggtcggcagaggctccacagagtccagcggtttacgcccgctag

SEQ ID NO: 328459 - DNA, 2265 bp, Artificial Sequence
  derived and/or modified sequence
atgctggtggccggcctgctgctgtgggccagcctgctgaccggcgcctggccaagctttccgacccaagaccatctacccgctacaccccgcgtgcgattgtcttttaaagaacttaaagcaactggcacagcccattttttcaacttcctgcttaacaccactgactatcgcatactgttaaaggacgaggatcacgacagaatgtatgttggcagcaaggactacgtgctttccctggatctacacgacatcaaccgcgaacctctgattatccattgggccgcttctcctcagaggatcgaagagtgcgtccttagtggaaaagacgtgaacggagagtgcggcaattttgtgaggttaattcagccctggaacagaacacacctctacgtgtgcggaacgggggcttataacccaatgtgtacgtatgttaatcggggtagaagagcccaagattacatcttctacctggaacccgagcggctggaatccgggaaaggcaagtgcccgtacgatcccaagctggatactgcttccgccctcatcaatgaggaactgtatgcgggcgtgtatattgattttatgggtacagacgccgcaatcttccgcaccttggggaaacagaccgcaatgaggaccgatcaatataactcaagatggcttaatgacccatcattcatccacgcggagctaatccccgattccgctgagagaaacgatgacaaactctatttctttttcagagagcggtccgcggaagcgccccagtctcctgccgtatacgcccggattggcagaatttgtttaaatgatgacggtggacattgctgtttggtgaacaagtggtctaccttcctgaaggcaaggctcgtctgcagtgttcctggtgaagacggaatcgaaacacacttcgacgaactacaggatgtgtttgtgcagcagacccaggatgtacggaacccagtgatctacgccgtgttcacgtctagcggctccgtctttcggggttccgccgtatgcgtgtactcaatggcagatatccggatggtcttcaacggaccattcgctcacaaggaaggtcccaattaccagtggatgcctttttcaggcaagatgccctatccacgacctggtacttgcccagggggaacctttacccccagcatgaaatcaaccaaggattatcccgacgaagtcatcaactttatgcgatctcaccccttgatgtatcaggccgtgtacccactgcaacgtagaccactggtggtgcgcacaggggctccttatcgcctaaccaccatcgctgtggatcaggtagacgcagccgacggtcgatacgaagtcttgttcctgggcaccgaccgcgggactgtgcagaaggtcatcgttcttccaaaggacgaccaggaactagaggaacttatgttggaggaagttgaagtttttaaagatcccgcccctgtgaaaaccatgacgatcagctccaagcggcagcagctctacgtagcatctgccgtgggggtcactcacctgagtttgcatcggtgccaggcctatggtgccgcctgtgccgattgttgcttggcgagggatccatactgcgcctgggatggccaagcatgcagcagatacaccgcctctagcaagaggcgatcgcggaggcaggacgtgcgacacgggaatcctattcgacaatgtcggggttttaacagtaatgcaaacaaaaacgctgttgagtctgttcagtacggtgtagccggcagtgccgcgtttctcgagtgccagccaaggtcccctcaagccaccgttaaatggctgttccaacgcgaccctggtgaccgacggagggagatacgggctgaagatcgtttcctccgtacggaacaaggacttttgttgagggcgttacagttatctgatcgcggtctatattcgtgcacggccaccgaaaataatttcaaacatgtggtcaccagggtgcagcttcacgtgctgggcagggacgcagtgcacgcagccctattcccaccgttgtccatgtctgctccgccaccacctggcgcaggccccccgacacctccttaccaggagctcgcccagttactggcacagcctgaggtcggcttgattcatcaatattgtcaaggctattggcgacatgtgccacccagccctcgggaggcacccggcgctcctcgcagtccggagccccaggatcagaaaaagccacggaaccgacgacatcatccaccagacacatag

SEQ ID NO: 328460 - DNA, 1143 bp, Artificial Sequence
  derived and/or modified sequence
atgctggtggccggcctgctgctgtgggccagcctgctgaccggcgcatggccttcattccccacacaggaccacctgcctgctacaccccgagttcgcttgtcttttaaagagctgaaggccacgggaaccgcccacttcttcaacttcctccttaatacaactgactaccgtatccttctgaaagacgaagatcatgatcgcatgtatgtcgggtcaaaagactatgtgctaagcctggacctccatgacattaacagggaaccgttgatcattcactgggccgcctccccccaacgcattgaagagtgcgtgctcagtgggaaggacgtgaatggcgagtgcggtaatttcgttcggctgatccaaccttggaaccgaacacatctgtatgtttgcggaaccggagcatacaatcccatgtgcacttacgtgaacaggggaaggcgggcccaggactatatattctacctcgaacctgagagattagagtccgggaagggcaagtgtccatacgacccaaaactcgacaccgcctccgctttgattaatgaggagctgtacgctggcgtgtatatcgattttatgggaacagatgctgctattttccgaaccctggggaagcagaccgcgatgcgcaccgaccaatataactcaagatggctgaacgatccaagtttcatacacgctgaactgatccccgattctgcagagcgcaacgacgataagctgtatttcttcttccgtgagcgctccgctgaagccccccagagccctgccgtgtacgctcggattggccgcatctgcttaaacgacgacggcggccattgttgcctggtcaacaaatggtcaaccttcctaaaggcccgcttggtgtgcagcgtgccgggggaagacggcattgagacccacttcgacgagctgcaggatgtgtttgttcagcagacacaggatgtccggaaccctgtgatatatgccgtcttcacttctagtggtagcgtgttcagggggtcggccgtatgcgtgtatagcatggctgacatacgcatggtcttcaacgggcccttcgcacataaggagggacctaactatcagtggatgccgtttagcggaaagatgccatacccaagacccgggacctag

SEQ ID NO: 328461 - DNA, 795 bp, Artificial Sequence
  derived and/or modified sequence
atgcttgttgccggtctgctcctatgggcatcccttctcacgggagcctggccaagcttccctacccaagatcaccttccagcaactccgagggttaggctttccttcaaagagctgaaggcaactggcacggcccactttttcaatttcctgttgaacaccacagactacagaatcctcctcaaagacgaggaccacgaccggatgtacgtgggttctaaggactacgtgttatccttagatctgcatgacattaaccgggagcccttgatcatccattgggccgcatcacctcaaagaattgaggagtgtgtgctctctggcaaggacgtgaacggcgaatgcggaaactttgtgagactgatccaaccgtggaaccggacacatctctacgtgtgcgggacaggagcctacaatccaatgtgcacctatgtgaaccgcggacgcagagctcaagactatattttctatctagaacccgagcggctggagtccggaaagggcaagtgtccatacgaccctaaactggataccgcgagcgcgctgattaacgaagaactgtacgctggcgtttacatcgattttatggggacagacgccgctattttcaggacactgggcaagcagacagcaatgaggacagaccagtacaattctcggtggctaaacgacccaagctttatccacgcagagcttattcccgattctgccgaaaggaatgacgataagctttattttttttttcgcgagagaagcgccgaagcccctcagtcccctgccgtttacgcaagatag

SEQ ID NO: 328462 - DNA, 2265 bp, Artificial Sequence
  derived and/or modified sequence
atgctcgtggcgggtctgctactgtgggcgtctctgttaactggagcttggccatcttttccgacacaggaccatttaccagctacacctcgtgtgaggcttagctttaaggaactcaaagccaccggcaccgcccatttcttcaactttcttcttaacaccactgattatcgaatcttactcaaggacgaagatcacgatagaatgtacgtcggctcgaaggactacgtgctctccctcgatttgcacgatatcaacagagagcccctcattatccattgggccgctagcccacagagaattgaagagtgcgtcctgtctggaaaagacgttaacggggagtgtggaaactttgtcagactgatccagccctggaacagaacacacctttacgtgtgcggcacaggggcatataacccaatgtgtacatatgtgaatcggggacgccgagcccaggactatatcttttacctggagccggaaaggctggagtccggaaagggcaaatgtccttatgatccaaaactggacaccgctagtgctctcattaacgaagagctgtacgcaggcgtgtacattgattttatgggtactgatgcggcaatttttcgaacactcgggaagcaaacggctatgcgcacagatcaatataatagccggtggctcaacgatcctagctttatacatgcggagttgattcccgactccgctgaacgcaacgatgacaagctgtacttcttctttcgcgaacgttctgctgaggccccacagtctcctgctgtgtatgccagaatcgggagaatctgtctcaacgacgatgggggtcattgctgcctggtaaacaagtggagtacatttctgaaggcccgtcttgtttgtagtgtcccaggggaggatggaatcgagactcatttcgatgagctgcaggacgtatttgtccaacaaacccaggacgtccggaacccggtaatttatgctgttttcacaagttccggcagtgtgtttcggggatcggccgtttgtgtgtactcaatggccgatatcagaatggtttttaatgggccattcgcccacaaggagggtcccaactaccaatggatgcccttttccgggaagatgccttatcccagaccaggtacctgccccggtggaaccttcacaccctccatgaagagcacaaaggactatcctgatgaggtgatcaatttcatgcggtcccaccctcttatgtaccaagccgtgtacccacttcagcgacgacctctcgtggtgaggactggtgctccgtaccgcctgactacaattgctgtggatcaggtagatgccgcagacgggaggtatgaggtgttgttcctgggaacagataggggaacagtacaaaaggtgatcgtcttgccgaaagacgaccaggagctggaagagctaatgcttgaagaggtggaagtatttaaggaccccgctccagtgaagaccatgacgatctcctcaaagcgccagcagctttatgtcgcttcagccgtcggcgtcactcacctgagtctgcaccgctgtcaggcttacggagctgcatgcgccgactgttgcttggctagagacccgtattgcgcctgggacggacaagcctgctctcggtacaccgcaagctccaagcggaggtctcggaggcaggacgtgagacacggcaatcctatccgccaatgccgcggtttcaacagcaacgccaacaagaatgccgtcgagtcagtgcaatatggagtcgcgggaagtgctgcatttctggagtgtcaacctcgttctcctcaggcaacggtaaagtggttgttccaacgcgacccaggagatcgcagaagagaaattagggcagaggaccggtttctacgcacagagcagggactgttgctgcgagccttgcagctgtctgaccgtggtttgtactcctgcacagccaccgagaacaattttaagcatgttgtcacccgtgtgcagctgcatgtactggggcgagatgccgttcacgccgctttatttccccctcttagcatgagtgcacctccccctccaggagctggccctcctacacccccttaccaggaattggcccaactgcttgcccagccggaagtggggctcattcaccagtattgccaaggatactggcgacacgtcccaccaagtcctcgcgaagcacctggtgcgcctagatcacctgagccgcaggaccagaaaaagccccgtaacaggcgccatcacccacccgacacctag

SEQ ID NO: 328463 - DNA, 1143 bp, Artificial Sequence
  derived and/or modified sequence
atgctggttgcaggactgctcttgtgggcctctttgctcacaggtgcttggccaagcttcccaactcaggaccatctccccgctactcccagggtgcgcttatcctttaaggaactcaaggccacagggactgctcatttctttaactttttgctaaacaccacggactatcgcatcctcctgaaagatgaggatcacgatcgaatgtatgtgggcagcaaggattatgtcctatcccttgacctacatgacataaacagggagccacttatcatccactgggctgcctctcctcagcgaatagaggagtgtgttcttagtggtaaggatgtaaatggtgagtgtggcaactttgtcagactgatccagccttggaatcgaactcatttgtatgtgtgtgggactggggcatataacccaatgtgcacatatgtgaataggggacggagggcccaagattacatcttctatctggagccagagagactagagtccggcaaaggcaagtgcccctacgacccaaagttggacacggcatccgcactcattaacgaggaactgtatgcaggtgtatacatcgacttcatggggaccgacgccgctatattcagaactctgggaaaacagactgccatgaggactgaccagtacaattctcgctggctaaacgacccttcatttattcacgccgagttgattcctgatagcgctgagagaaacgacgacaaactgtacttctttttcagggagcggagtgccgaggccccacaatcaccagcagtctacgcgaggatcggcaggatttgtctcaatgacgacgggggtcactgctgcttagtgaacaaatggtccactttcctcaaggctcggctggtctgttcagtgccaggagaagatggcattgaaacacactttgatgagctgcaagatgtgtttgtccaacagactcaggatgtccggaacccggtcatctacgctgtgttcacatctagtggaagcgtattcaggggttctgcagtatgcgtttattctatggccgatatccgaatggtgttcaacggaccttttgcccataaggagggtcccaattatcaatggatgcctttttctggcaagatgccctatccacgccctggcacttag

SEQ ID NO: 328464 - DNA, 936 bp, Artificial Sequence
  derived and/or modified sequence
cccgcgcggctctgagcgccccgtcccgccggcggccgcgagaccagagcgagcgaacgaaccgcggcggtccggagagccccgagcgcagcgcaggacctggagagtggagcctgcttcctgggccctaggcccctcccacaatgcttgtcgccggtcttcttctctgggcttccctactgaccggggcctggccatccttccccacccaggaccacctcccggccacgccccgggtccggctctcattcaaagagctgaaggccacaggcaccgcccacttcttcaacttcctgctcaacacaaccgactaccgaatcttgctcaaggacgaggaccacgaccgcatgtacgtgggcagcaaggactacgtgctgtccctggacctgcacgacatcaaccgcgagcccctcattatacactgggcagcctccccacagcgcatcgaggaatgcgtgctctcaggcaaggatgtcaacggcgagtgtgggaacttcgtcaggctcatccagccctggaaccgaacacacctgtatgtgtgcgggacaggtgcctacaaccccatgtgcacctatgtgaaccgcggacgccgcgcccaggattacatcttctacctggagcctgagcgactcgagtcagggaagggcaagtgtccgtacgatcccaagctggacacagcatcggccctcatcaatgaggagctctatgctggtgtgtacatcgattttatgggcactgatgcagccatcttccgcacacttggaaagcagacagccatgcgcacggatcagtacaactcccggtggctgaacgacccgtcgttcatccatgctgagctcattcctgacagtgcggagcgcaatgatgataagctttacttcttcttccgtgagcggtcggcagaggcgccgcagagccccgcggtgtacgcccgca

SEQ ID NO: 328465 - DNA, 3541 bp, Artificial Sequence
  derived and/or modified sequence
ctgactggtgctccctctcttccatcttgggctgtctgcatgtgtctcattcccccactctctcctgtgcctcccctctaccgtaataatcaggtccaggtttctctgtactgggagaagacctgtggctggagcaggcagggatgcaccctatctgttccccattcctccaggtgggagggagaaggagtaacccactttattggccacagatgcaggggagaaaggagaaagcatgctgggagctggaaagagccctaagatcacctggtttctagagagtggagcctgcttcctgggccctaggcccctcccacaatgcttgtcgccggtcttcttctctgggcttccctactgaccggggcctggccatccttccccacccaggaccacctcccggccacgccccgggtccggctctcattcaaagagctgaaggccacaggcaccgcccacttcttcaacttcctgctcaacacaaccgactaccgaatcttgctcaaggacgaggaccacgaccgcatgtacgtgggcagcaaggactacgtgctgtccctggacctgcacgacatcaaccgcgagcccctcattatacactgggcagcctccccacagcgcatcgaggaatgcgtgctctcaggcaaggatgtcaacggcgagtgtgggaacttcgtcaggctcatccagccctggaaccgaacacacctgtatgtgtgcgggacaggtgcctacaaccccatgtgcacctatgtgaaccgcggacgccgcgcccaggattacatcttctacctggagcctgagcgactcgagtcagggaagggcaagtgtccgtacgatcccaagctggacacagcatcggccctcatcaatgaggagctctatgctggtgtgtacatcgattttatgggcactgatgcagccatcttccgcacacttggaaagcagacagccatgcgcacggatcagtacaactcccggtggctgaacgacccgtcgttcatccatgctgagctcattcctgacagtgcggagcgcaatgatgataagctttacttcttcttccgtgagcggtcggcagaggcgccgcagagccccgcggtgtacgcccgcatcgggcgcatttgcctgaacgatgacggtggtcactgttgcctggtcaacaagtggagcacattcctgaaggcgcggctcgtctgctctgtcccgggcgaggatggcattgagactcactttgatgagctccaggacgtgtttgtccagcagacccaggacgtgaggaaccctgtcatttacgctgtctttacctcctctggctccgtgttccgaggctctgccgtgtgtgtctactccatggctgatattcgcatggtcttcaacgggccctttgcccacaaagaggggcccaactaccagtggatgcccttctcagggaagatgccctacccacggccgggcacgtgccctggtggaaccttcacgccatctatgaagtccaccaaggattatcctgatgaggtgatcaacttcatgcgcagccacccactcatgtaccaggccgtgtaccctctgcagcggcggcccctggtagtccgcacaggtgctccctaccgccttaccactattgccgtggaccaggtggatgcagccgacgggcgctatgaggtgcttttcctgggcacagaccgcgggacagtgcagaaggtcattgtgctgcccaaggatgaccaggagttggaggagctcatgctggaggaggtggaggtcttcaaggatccagcacccgtcaagaccatgaccatctcttctaagaggcaacaactctacgtggcgtcagccgtgggtgtcacacacctgagcctgcaccgctgccaggcgtatggggctgcctgtgctgactgctgccttgcccgggacccttactgtgcctgggatggccaggcctgctcccgctatacagcatcctccaagaggcggagccgccggcaggacgtccggcacggaaaccccatcaggcagtgccgtgggttcaactccaatgccaacaagaatgccgtggagtctgtgcagtatggcgtggccggcagcgcagccttccttgagtgccagccccgctcgccccaagccactgttaagtggctgttccagcgagatcctggtgaccggcgccgagagattcgtgcagaggaccgcttcctgcgcacagagcagggcttgttgctccgtgcactgcagctcagcgatcgtggcctctactcctgcacagccactgagaacaactttaagcacgtcgtcacacgagtgcagctgcatgtactgggccgggacgccgtccatgctgccctcttcccaccactgtccatgagcgccccgccacccccaggcgcaggccccccaacgcctccttaccaggagttagcccagctgctggcccagccagaagtgggcctcatccaccagtactgccagggttactggcgccatgtgccccccagccccagggaggctccaggggcaccccggtctcctgagccccaggaccagaaaaagccccggaaccgccggcaccaccctccggacacatgaggccagctgcctgtgcctgccatgggccagcctagcccttgtcccttttaatataaaagatatatatatatatatatatatataaaatatctatattctatacacaccctgcccctgcaaagacagtatttattggtgggttgaatatagcctgcctcagtggcagcatcctccaaaacttagacccatgctggtcagagacggcagaaaacagagcctgcctaaccaggcccagccagttggtggggccaggccaggaccacacagtccccagactcagctggaagtctacctgctggacagcctccgccaagatctacaggacaaagggagggagcaagccctactcggatggggcacggactgtccaccttttctgatgtgtgttgtcagcctgtgctgtggcatagacatggatgcgaggaccactttggagactggggtggcctcaagagcacacagagaagggaagaaggggccatcacaggatgccagcccctgcctgggttgggggcactcagccacgaccagccccttcctgggtatttattctctatttattggggataggagaagaggcatcctgcctgggtgggacagcctcttcagccccttctcccctccccgcctggccagggcagggccaccccactctacctccttagctttccctgtgccactttgactcagaggctgggagcatagcagaggggccaggcccaggcagagctgacgggaggccccagctctgaggggagggggtccgtggtagaggcctggggccggtagaggctccccagggctcccttatgtccaccacttcaggggatgggtgtggatgtaattagctctggggggcagttgggtagatgggtgggggctcctggtggccttctgctgcccaggccacagccgcctttgggttccatcttgctaataaacactggctctgggacta

SEQ ID NO: 328466 - DNA, 1693 bp, Artificial Sequence
  derived and/or modified sequence
agcgccccgtcccgccggcggccgcgagaccagagcgagcgaacgaaccgcggcggtccggagagccccgagcgcagcgcaggacctgggtacgccgcgaggaaccgtgcagcccagcgcggccgcccggcccgggtccagcagccaggagagcgcagcgcttcgaagccgagtgcgcgccaccgcccgcgccccgcgctggggaatgcgccctcggcgcgccggccagggggcgcccgcagcccaccccaggggaggcggccccgagcgcccctgagccttcccatggcccgggctggggcccgggccctcggctgctgacgcgcccgaagcccgcggaaccggttaagccgcggccgcggcgccgatcccggctgaggcgcagcggcgagaggtcgcgggcagggccatggccccggggggccgctagcgcggaccggcccaacgggagccgctccgtgccgccgccgccgcccgggcgcccaggccccgccgctgcggaagaggtttctagagagtggagcctgcttcctgggccctaggcccctcccacaatgcttgtcgccggtcttcttctctgggcttccctactgaccggggcctggccatccttccccacccaggaccacctcccggccacgccccgggtccggctctcattcaaagagctgaaggccacaggcaccgcccacttcttcaacttcctgctcaacacaaccgactaccgaatcttgctcaaggacgaggaccacgaccgcatgtacgtgggcagcaaggactacgtgctgtccctggacctgcacgacatcaaccgcgagcccctcattatacactgggcagcctccccacagcgcatcgaggaatgcgtgctctcaggcaaggatgtcaacggcgagtgtgggaacttcgtcaggctcatccagccctggaaccgaacacacctgtatgtgtgcgggacaggtgcctacaaccccatgtgcacctatgtgaaccgcggacgccgcgcccaggattacatcttctacctggagcctgagcgactcgagtcagggaagggcaagtgtccgtacgatcccaagctggacacagcatcggccctcatcaatgaggagctctatgctggtgtgtacatcgattttatgggcactgatgcagccatcttccgcacacttggaaagcagacagccatgcgcacggatcagtacaactcccggtggctgaacgacccgtcgttcatccatgctgagctcattcctgacagtgcggagcgcaatgatgataagctttacttcttcttccgtgagcggtcggcagaggcgccgcagagccccgcggtgtacgcccgcatcgggcgcatttgcctgaacgatgacggtggtcactgttgcctggtcaacaagtggagcacattcctgaaggcgcggctcgtctgctctgtcccgggcgaggatggcattgagactcactttgatgagctccaggacgtgtttgtccagcagacccaggacgtgaggaaccctgtcatttacgctgtctttacctcctctggctccgtgttccgaggctctgccgtgtgtgtctactccatggctgatattcgcatggtcttcaacgggccctttgcccacaaagaggggcccaactaccagtggatgcccttctcagggaagatgccctacccacggccgggcac

SEQ ID NO: 328467 - protein, 145 aa, Artificial Sequence
  derived and/or modified sequence
MAASLNAGETTYSLEHASDLRVEVQKVYELIDALSKKILTLGLNQDPPPHPSNLRLQRMIRYSATLFVQEKLLGLMSLPTKEQFEELKKKRKEEMERKRAVERQAALESQRRLEERQRASHPPCLCFGSRLFPSSKQHSSQDPFT

SEQ ID NO: 328468 - DNA, 438 bp, Artificial Sequence
  derived and/or modified sequence
atggccgccagcctgaacgccggcgagaccacctacagcctggagcacgccagcgacctgagagtggaggtgcagaaggtgtacgagctgatcgacgccctgagcaagaagatcctgaccctgggcctgaaccaggacccccccccccaccccagcaacctgagactgcagagaatgatcagatacagcgccaccctgttcgtgcaggagaagctgctgggcctgatgagcctgcccaccaaggagcagttcgaggagctgaagaagaagagaaaggaggagatggagagaaagagagccgtggagagacaggccgccctggagagccagagaagactggaggagagacagagagccagccaccccccctgcctgtgcttcggcagcagactgttccccagcagcaagcagcacagcagccaggaccccttcacctag

SEQ ID NO: 328469 - DNA, 438 bp, Artificial Sequence
  derived and/or modified sequence
atggccgcctcactgaatgcaggcgagacaacctactctctcgagcacgccagtgatctgcgagtagaagtgcagaaggtatatgaactgattgacgccctaagcaagaagatattgactctgggcctgaaccaggacccacccccacaccctagtaacctaaggttgcaacgaatgatcagatattctgcaacattattcgtgcaggagaagctcctggggctaatgagcttgccaaccaaagagcagttcgaggagcttaaaaaaaaaaggaaagaggagatggaacgcaagagggcagttgaacgacaagcagcccttgaatcccagagacgcctcgaagagcgacagagggcgtcacaccctccgtgcttatgttttggctccaggctgttcccaagcagcaaacagcatagcagccaggacccttttacctag

SEQ ID NO: 328470 - DNA, 438 bp, Artificial Sequence
  derived and/or modified sequence
atggccgccagcctgaatgctggggagaccacctacagcctggagcacgccagtgacctgcgggtggaggtgcagaaggtgtatgagctgattgatgccctgagcaagaagatcctgaccctgggcctgaaccaggaccccccaccccaccccagcaacctgcggctgcagaggatgatccgctacagcgccaccctgtttgtgcaggagaagctgctgggcctgatgagcctgcccaccaaggagcagtttgaggagctgaagaagaagaggaaggaggagatggagaggaagagagctgtggagcggcaggccgccctggagagccagaggcggctggaggagcggcagagggccagccaccccccctgcctgtgcttcggcagccgcctcttccccagcagcaagcagcacagcagccaggaccccttcacctag

SEQ ID NO: 328471 - DNA, 438 bp, Artificial Sequence
  derived and/or modified sequence
atggccgccagcctgaacgccggcgagaccacctacagcctggagcacgccagcgatctgagggttgaggttcagaaggtgtatgaactcatagatgcacttagcaagaaaattctcacactcggcctgaaccaggacccaccaccccacccaagcaacctgcgcctgcagagaatgattcgatacagcgccactctgtttgttcaggaaaaacttctgggactgatgtccctgccgaccaaggaacagttcgaagagctgaaaaagaaaagaaaggaagagatggagagaaaacgggctgtcgaacggcaggcagctctggagagtcagaggagactagaagagagacagagggcctctcacccaccgtgcctgtgctttggcagcagattgtttccttcatccaaacagcatagttctcaagacccattcacatag

SEQ ID NO: 328472 - DNA, 438 bp, Artificial Sequence
  derived and/or modified sequence
atggccgcatccctgaacgcaggcgaaactacttatagcctggagcacgctagtgacctcagggtcgaggtccagaaggtctatgagctgattgatgctctgtccaaaaaaatcctcaccctcgggctcaatcaggaccctcctccgcatcctagcaatctgcggctgcagcgcatgatcaggtactccgccaccctattcgtccaggaaaagctcctggggctcatgtctttgcctacaaaagagcagttcgaggagcttaagaagaagcggaaggaagagatggagaggaagagagccgtcgaaagacaggctgcccttgagtcacagaggcggctggaggagcggcagagagcgagccaccccccttgcttatgctttgggtcaaggctgtttccttccagcaagcagcacagttcacaagacccttttacatag

SEQ ID NO: 328473 - protein, 790 aa, Artificial Sequence
  derived and/or modified sequence
MGTRKKVHAFVRVKPTDDFAHEMIRYGDDKRSIDIHLKKDIRRGVVNNQQTDWSFKLDGVLHDASQDLVYETVAKDVVSQALDGYNGTIMCYGQTGAGKTYTMMGATENYKHRGILPRALQQVFRMIEERPTHAITVRVSYLEIYNESLFDLLSTLPYVGPSVTPMTIVENPQGVFIKGLSVHLTSQEEDAFSLLFEGETNRIIASHTMNKNSSRSHCIFTIYLEAHSRTLSEEKYITSKINLVDLAGSERLGKSGSEGQVLKEATYINKSLSFLEQAIIALGDQKRDHIPFRQCKLTHALKDSLGGNCNMVLVTNIYGEAAQLEETLSSLRFASRMKLVTTEPAINEKYDAERMVKNLEKELALLKQELAIHDSLTNRTFVTYDPMDEIQIAEINSQVRRYLEGTLDEIDIISLRQIKEVFNQFRVVLSQQEQEVESTLRRKYTLIDRNDFAAISAIQKAGLVDVDGHLVGEPEGQNFGLGVAPFSTKPGKKAKSKKTFKEPLSSLARKEGASSPVNGKDLDYVSTSKTQLVPSSKDGDVKDMLSRDRETSSIEPLPSDSPKEELRPIRPDTPPSKPVAFEEFKNEQGSEINRIFKENKSILNERRKRASETTQHINAIKREIDVTKEALNFQKSLREKQGKYENKGLMIIDEEEFLLILKLKDLKKQYRSEYQDLRDLRAEIQYCQHLVDQCRHRLLMEFDIWYNESFVIPEDMQMALKPGGSIRPGMVPVNRIVSLGEDDQDKFSQLQQRVLPEGPDSISFYNAKVKIEQKHNYLKTMMGLQQAHRK

SEQ ID NO: 328474 - protein, 392 aa, Artificial Sequence
  derived and/or modified sequence
MDALVEDDICILNHEKAHKRDTVTPVSIYSGDESVASHFALVTAYEDIKKRLKDSEKENSLLKKRIRFLEEKLIARFEEETSSVGREQVNKAYHAYREVCIDRDNLKSKLDKMNKDNSESLKVLNEQLQSKEVELLQLRTEVETQQVMRNLNPPSSNWEVEKLSCDLKIHGLEQELELMRKECSDLKIELQKAKQTDPYQEDNLKSRDLQKLSISSDNMQHAYWELKREMSNLHLVTQVQAELLRKLKTSTAIKKACAPVGCSEDLGRDSTKLHLMNFTATYTRHPPLLPNGKALCHTTSSPLPGDVKVLSEKAILQSWTDNERSIPNDGTCFQEHSSYGRNSLEDNSWVFPSPPKSSETAFGETKTKTLPLPNLPPLHYLDQHNQNCLYKN

SEQ ID NO: 328475 - DNA, 4706 bp, Artificial Sequence
  derived and/or modified sequence
agtacgccgcgcgccactcctgcacttccccacccccacgaccgaacctggcttcgctaacgccctcccagctccctcgggcctgacttccggtttcctcgcgcgtccctggcgccgagcccgcggacagcggcagccccttttccggctgagagctcatccacacttccaatcactttccggagtgcttcccctccctccggcccgtgctggtcccgacggcgggcctgggtctcgcgcgcgtattgctgggtaacgggccttctctcgcgtcggcccggcccctcctgcctcggctcgtccctccttccagaacgtcccgggctcctgccgagtcagaagaaatgggactccctccgcgacgtgcccggagcagctcccttcgctgtggaagcggcggtgtcttcgaagaaaccggaagcccgtggtgacccctggcgacccggtttgttttcggtccgtttccaaacactaaggaatcgaaactcggcggccttgggggcggccctacgtagcctggcttctggttgtcatggatgcactggtagaagatgatatctgtattctgaatcatgaaaaagcccataagagagatacagtgactccagtttcaatatattcaggagatgaatctgttgcttcccattttgctcttgtcactgcatatgaagacatcaaaaaacgacttaaggattcagagaaagagaactctttgttaaagaagagaataagatttttggaagaaaagctaatagctcgatttgaagaagaaacaagttccgtgggacgagaacaagtaaataaggcctatcatgcatatcgagaggtttgcattgatagagataatttgaagagcaaactggacaaaatgaataaagacaactctgaatctttgaaagtattgaatgagcagctacaatctaaagaagtagaactcctccagctgaggacagaggtggaaactcagcaggtgatgaggaatttaaatccaccttcatcaaactgggaggtggaaaagttgagctgtgacctgaagatccatggtttggaacaagagctggaactgatgaggaaagaatgtagcgatctcaaaatagaactacagaaagccaaacaaacggatccatatcaggaagacaatctgaagagcagagatctccaaaaactaagcatttcaagtgataatatgcagcatgcatactgggaactgaagagagaaatgtctaatttacatctggtgactcaagtacaagctgaactactaagaaaactgaaaacctcaactgcaatcaagaaagcctgtgcccctgtaggatgcagtgaagaccttggaagagacagcacaaaactgcacttgatgaattttactgcaacatacacaagacatccccctctcttaccaaatggcaaagctctttgtcataccacatcttcccctttaccaggagatgtaaaggttttatcagagaaagcaatcctccaatcatggacagacaatgagagatccattcctaatgatggtacatgctttcaggaacacagttcttatggcagaaattctctggaagacaattcctgggtatttccaagtcctcctaaatcaagtgagacagcatttggggaaactaaaactaaaactttgcctttacccaaccttccaccactgcattacttggatcaacataatcagaactgcctttataagaattaatttggaagagattcacgatttcaccatgaggacacttatctctttcagtggtcctcccaagaaattatttaacaaactgaaaggagattttgattaaaattttgcagaggtcttcagtatctatatttgaacacactgtacaatagtacaaaaaccaacatagttggttttctagtatgaaagagcaccctctagctccatattctaagaatctgaaatatgctactatactaattaataagtaaacttaaggtgtttaaaaaactctgccttctatattaattgtaaaattttgcctctcagaagaatggaattggagattgtagacgtggttttacaaaatgtgaaatgtctaaatatctgttcataaaaataaaaggaaaacatgtttcttcaaattgcataatggaacaaatggcaatgtgagtaggttacatttctgttgttataatgcgtaaagatattgaaaatataatgaaataaaagcatcttaggttataccatctttatatgctattgcgtttcaatatttaagatttaaagtgattttttggtcacagtgttttgttgataaaatttttttagaattgaagtttgaattctaagacttgaaacaacctgatcactgaagccaactttgtcccagcacattccttaagtcctaattgggaaaaaaaaaaaaaaaaatgaaatagttgaaaaactctggggtgtaaacaaatgattgtaaccctacacactattcaataagtagtagaaggagcatcacacagatttcagtctaatctgcccttctgtgggccataatataaacataaatgtgtgtaatgataaaaagtcattttcttcaaagagactacagctagctgcacattgtgtagagcagcttctaaattgttagactttgtgttgaaatgtaatattctatttattgagaaagtgatttaaaattattatttttaatcatagaaatcagggtttgggctgtattgatattgtcgatcatgaaatgtccacacttattctaagtggccaattatttggaaataaagaaggaaataaagatggcttcacatggaaatttaagttctttcagggtggagatttacttggttcatacaccttttgcctgaattaaagtatttcatgtaggaggacttttatcctttttgatagacagtttcatatatcttgaactcaatatctcagatctcttctactgtattactgaatagcatacatacatagacaatgttcgccattcactagatatttttttctattatcttacacttattcaagcttgtctgtgattaatggaattggtgtcagatgctggaatttattctgaccaatgaacacagctgactcaggggagtacaatctcctgccaagtaatagaaccaaacccaatatgcataaaagaaatacaatactccaggctttagctgaaggaagcaactacctgtgtaataacaaagcagcaaaaactatttctcatgtggctgcataggctgtatattatatctgatctctaatgtagcttactggtttgccttttttaaaaccaaaattggaaattttcctttgtaaagaaaaaaagtcttatgagataattgcttgattaatgttttgaacaataccaagaaattgtttaattaaaataaatatttttgtttgaaattgaagtggatgtgaaatattgtccttgcctatagatctcaaaatctagtactaattgttggttgttaatatgattcatacaatagacatttgttaaaccagcttttgagtggagaaaattattttccatttaaacagtacagtgatgatagctatcaaacaggtatactaaaaagtcagtgactgtgacagtttaaagtgttagacaaatgatgtataaggttctttagtaaggaaagattagccaaaaattttttacccagctagaagcttttaaatctacacttgatatctctgttctaggtaaaattcaaacaaccaaaaaacagtggcccatctgtagcttatgaatctatttaaaattgaatattttatgttgacttctttcatactagctgaaacttgctctaaagagcttcctttggaatctttagatttctttttataaggttcaattcagtacatccataaatcgacagaatgaagaaaacataacaaaaagccacctattccttcctcttgctcccttattagctaaagtaaaatttacatctgtaagacttactgagttgctgccaaaatggaactgaattcttaaaagcaggaacatgcctatgtgaaacattagaaaaccaaaataaatgggaaaattcagacttgaagagctgaatcatgtgacaacaaagtactgatcttaattcagaaaggctacttggagaaggtgtatcttaaggggtaaaaaacctgtgggttaccacatattaacagggaataatatcaacagaggcacccataagcaagcaagacacaactgagacagatgtaccaggtgaaaaaaatcttcagtatggatacacatgggtattctgaaggctacaatgaatggtttagtctttgacataaggaggatgaacatattatttatactgtgtaatctaatctggcttctatggggaaagcaacatgtacataagtgaattttctacatgaagtgggctacttctgattttaatcaaagctataaaatagattgtatatttcactagcttcttaaagtaactcttccattttcatttatctctaaaaacagttaacttcctgtgctctaggaaatgcaccaataccaaaggtcaatgtggaaatatgggcatgtttgcccctatgctgtgtggtctctagatttctatatttgctttgcttttgtctgctctagtaatctccctccttttgatctgtggcctgggaaaatgtggtttctttgtatttcaaataaaagtaaaatagttttttgagtggttcactcaagagtaaa

SEQ ID NO: 328476 - protein, 95 aa, Artificial Sequence
  derived and/or modified sequence
MDALVEDDICILNHEKAHKRDTVTPVSIYSGDESVASHFALVTAYEDIKKRLKDSEKENSLLKKRIRFLEEKLIARFEEETSSVGREQVNKAYHA

SEQ ID NO: 328477 - protein, 243 aa, Artificial Sequence
  derived and/or modified sequence
MDALVEDDICILNHEKAHKRDTVTPVSIYSGDESVASHFALVTAYEDIKKRLKDSEKENSLLKKRIRFLEEKLIARFEEETSSVGREQVNKAYHAYREVCIDRDNLKSKLDKMNKDNSESLKVLNEQLQSKEVELLQLRTEVETQQVMRNLNPPSSNWEVEKLSCDLKIHGLEQELELMRKECSDLKIELQKAKQTDPYQEDNLKSRDLQKLSISRQSICSTAWSAVAQSWDSMNFEDCSLFA

SEQ ID NO: 328478 - DNA, 1366 bp, Artificial Sequence
  derived and/or modified sequence
cgggcctgacttccggtttcctcgcgcgtccctggcgccgagcccgcggacagcggcagccccttttccggctgagagctcatccacacttccaatcactttccggagtgcttcccctccctccggcccgtgctggtcccgacggcgggcctgggtctcgcgcgcgtattgctgggtaacgggccttctctcgcgtcggcccggcccctcctgcctcggctcgtccctccttccagaacgtcccgggctcctgccgagtcagaagaaatgggactccctccgcgacgtgcccggagcagctcccttcgctgtggaagcggcggtgtcttcgaagaaaccggaagcccgtggtgacccctggcgacccggtttgttttcggtccgtttccaaacactaaggaatcgaaactcggcggccttgggggcggccctacgtagcctggcttctggttgtcatggatgcactggtagaagatgatatctgtattctgaatcatgaaaaagcccataagagagatacagtgactccagtttcaatatattcaggagatgaatctgttgcttcccattttgctcttgtcactgcatatgaagacatcaaaaaacgacttaaggattcagagaaagagaactctttgttaaagaagagaataagatttttggaagaaaagctaatagctcgatttgaagaagaaacaagttccgtgggacgagaacaagtaaataaggcctatcatgcatatcgagaggtttgcattgatagagataatttgaagagcaaactggacaaaatgaataaagacaactctgaatctttgaaagtattgaatgagcagctacaatctaaagaagtagaactcctccagctgaggacagaggtggaaactcagcaggtgatgaggaatttaaatccaccttcatcaaactgggaggtggaaaagttgagctgtgacctgaagatccatggtttggaacaagagctggaactgatgaggaaagaatgtagcgatctcaaaatagaactacagaaagccaaacaaacggatccatatcaggaagacaatctgaagagcagagatctccaaaaactaagcatttcaagacagagtatctgtagcacagcctggagtgcagtggcgcaatcatgggatagcatgaattttgaggactgttccctcttcgcataagaatagaagtagccatcagagttcatatactttttcaaccctttttcctcaaatacgtatcatttttacttaagtaacttcaattctgtgttttaagctatctaataattgttgtttctactatgttaagatagcctctctacattgttaccctccatccaataaaaaatactgatctg

SEQ ID NO: 328479 - DNA, 1136 bp, Artificial Sequence
  derived and/or modified sequence
tccagaacgtcccgggctcctgccgagtcagaagaaatgggactccctccgcgacgtgcccggagcagctcccttcgctgtggaagcggcggtgtcttcgaagaaaccggaagcccgtggtgacccctggcgacccggtttgttttcggtccgtttccaaacactaaggaatcgaaactcggcggccttgggggcggccctacgtagcctggcttctgggaggtcttaaaaggttttagccacagtttctccttccatcatgtttttcaggaacctaactctcagagaagtaatgctgaacctaacagcaaaagtagatgttcagagcaagtcagtttttcgttaaacaatgaagttgtcatggatgcactggtagaagatgatatctgtattctgaatcatgaaaaagcccataagagagatacagtgactccagtttcaatatattcaggagatgaatctgttgcttcccattttgctcttgtcactgcatatgaagacatcaaaaaacgacttaaggattcagagaaagagaactctttgttaaagaagagaataagatttttggaagaaaagctaatagctcgatttgaagaagaaacaagttccgtgggacgagaacaagtaaataaggcctatcatgcatatcgagaggtttgcattgatagagataatttgaagagcaaactggacaaaatgaataaagacaactctgaatctttgaaagtattgaatgagcagctacaatctaaagaagtagaactcctccagctgaggacagaggtggaaactcagcaggtgatgaggaatttaaatccaccttcatcaaactgggaggtggaaaagttgagctgtgacctgaagatccatggtttggaacaagagctggaactgatgaggaaagaatgtagcgatctcaaaatagaactacagaaagccaaacaaacggatccatatcaggaagacaatctgaagagcagagatctccaaaaactaagcatttcaagacagagtatctgtagcacagcctggagtgcagtggcgcaatcatgggatagcatgaattttgaggactgttccctcttcgcataagaatagaagtagccatcagagttcatatactttttcaacccttt

SEQ ID NO: 328480 - protein, 232 aa, Artificial Sequence
  derived and/or modified sequence
MDALVEDDICILNHEKAHKRDTVTPVSIYSGDESVASHFALVTAYEDIKKRLKDSEKENSLLKKRIRFLEEKLIARFEEETSSVGREQVNKAYHAYREVCIDRDNLKSKLDKMNKDNSESLKVLNEQLQSKEVELLQLRTEVETQQVMRNLNPPSSNWEVEKLSCDLKIHGLEQELELMRKECSDLKIELQKAKQTDPYQEDNLKSRDLQKLSISRVSVAQPGVQWRNHGIA

SEQ ID NO: 328481 - protein, 215 aa, Artificial Sequence
  derived and/or modified sequence
MDALVEDDICILNHEKAHKRDTVTPVSIYSGDESVASHFALVTAYEDIKKRLKDSEKENSLLKKRIRFLEEKLIARFEEETSSVGREQVNKAYHAYREVCIDRDNLKSKLDKMNKDNSESLKVLNEQLQSKEVELLQLRTEVETQQVMRNLNPPSSNWEVEKLSCDLKIHGLEQELELMRKECSDLKIELQKAKQTDPYQEDNLKSRDLQKLSIS

SEQ ID NO: 328482 - DNA, 943 bp, Artificial Sequence
  derived and/or modified sequence
ggggcggccctacgtagcctggcttctggttgtcatggatgcactggtagaagatgatatctgtattctgaatcatgaaaaagcccataagagagatacagtgactccagtttcaatatattcaggagatgaatctgttgcttcccattttgctcttgtcactgcatatgaagacatcaaaaaacgacttaaggattcagagaaagagaactctttgttaaagaagagaataagatttttggaagaaaagctaatagctcgatttgaagaagaaacaagttccgtgggacgagaacaagtaaataaggcctatcatgcatatcgagaggtttgcattgatagagataatttgaagagcaaactggacaaaatgaataaagacaactctgaatctttgaaagtattgaatgagcagctacaatctaaagaagtagaactcctccagctgaggacagaggtggaaactcagcaggtgatgaggaatttaaatccaccttcatcaaactgggaggtggaaaagttgagctgtgacctgaagatccatggtttggaacaagagctggaactgatgaggaaagaatgtagcgatctcaaaatagaactacagaaagccaaacaaacggatccatatcaggaagacaatctgaagagcagagatctccaaaaactaagcatttcaagagtatctgtagcacagcctggagtgcagtggcgcaatcatgggatagcatgaattttgaggactgttccctcttcgcataagaatagaagtagccatcagagttcatatactttttcaaccctttttcctcaaatacgtatcatttttacttaagtaacttcaattctgtgttttaagctatctaataattgttgtttctactatgttaagatagcctctctacattgttaccctccatccaataaaaaatactgatctgac

SEQ ID NO: 328483 - DNA, 1061 bp, Artificial Sequence
  derived and/or modified sequence
cccgtgctggtcccgacggcgggcctgggtctcgcgcgcgtattgctgggtaacgggccttctctcgcgtcggcccggcccctcctgcctcggctcgtccctccttccagaacgtcccgggctcctgccgagtcagaagaaatgggactccctccgcgacgtgcccggagcagctcccttcgctgtggaagcggcggtgtcttcgaagaaaccggaagcccgtggtgacccctggcgacccggtttgttttcggtccgtttccaaacactaaggaatcgaaactcggcggccttgggggcggccctacgtagcctggcttctgggaacctaactctcagagaagtaatgctgaacctaacagcaaaagtagatgttcagagcaagtcagtttttcgttaaacaatgaagttgtcatggatgcactggtagaagatgatatctgtattctgaatcatgaaaaagcccataagagagatacagtgactccagtttcaatatattcaggagatgaatctgttgcttcccattttgctcttgtcactgcatatgaagacatcaaaaaacgacttaaggattcagagaaagagaactctttgttaaagaagagaataagatttttggaagaaaagctaatagctcgatttgaagaagaaacaagttccgtgggacgagaacaagtaaataaggcctatcatgcatatcgagaggtttgcattgatagagataatttgaagagcaaactggacaaaatgaataaagacaactctgaatctttgaaagtattgaatgagcagctacaatctaaagaagtagaactcctccagctgaggacagaggtggaaactcagcaggtgatgaggaatttaaatccaccttcatcaaactgggaggtggaaaagttgagctgtgacctgaagatccatggtttggaacaagagctggaactgatgaggaaagaatgtagcgatctcaaaatagaactacagaaagccaaacaaacggatccatatcaggaagacaatctgaagagcagagatctccaaaaactaagcatttcaag

SEQ ID NO: 328484 - DNA, 608 bp, Artificial Sequence
  derived and/or modified sequence
ctttgactagggagcggcccactcctgggcatccctttccccagtcacccccacacccagctgtccacaccctttcccctgtcaccctcacccccagctgtccaggcccttcttggtcattcacttctctaattactccttttcttttcgtactcttactggggcgccttcagttttttttcattcattgagactgctaaatgcttctttccgatacaaattatcggaaagaaaagagggacattggctaggacggtactccctggggcatctgagtggtgaatatcgaccccctgcacttgatcgagggctaacagttgtcatggatgcactggtagaagatgatatctgtattctgaatcatgaaaaagcccataagagagatacagtgactccagtttcaatatattcaggagatgaatctgttgcttcccattttgctcttgtcactgcatatgaagacatcaaaaaacgacttaaggattcagagaaagagaactctttgttaaagaagagaataagatttttggaagaaaagctaatagctcgatttgaagaagaaacaagttccgtgggacgagaacaagtaaataaggcctatcatgcat

SEQ ID NO: 328485 - DNA, 372 bp, Artificial Sequence
  derived and/or modified sequence
atgtgtggccagtgccagagcagcagcggccacatggaggaggaggcccaccctgagctgtgcccccactggcccctgcagttcagcccccagagccactgccggcaggcctacggccgggacacccacgccggcggccctggggcccgggtggacagcggccaccacctgggcctcttccctggcctgctgagcacctgcccagatggcctgtgtgtgtttcctgtgcccagccccaccttcagcaccagcctgcacgtgctgatggagtgcaaggtgcaccagcccggccccctgcccggccggggcagcgcagatgctggcctgcggggcctgccccagggccgcaccctgtgtgtgctgacagcctag

SEQ ID NO: 328486 - DNA, 450 bp, Artificial Sequence
  derived and/or modified sequence
atgaggctgctgcccaggaccagcatcccccggcggcagcccttcagccgctggaggaagcagaacctgaagacccctgtgtccctgaactgcagccgcagctgcaagctgctggagggccggggcatgcctgccatcttcatcatcgccctgcccccacccaacaccatcggcggccctgccctgatcatcagcctgcaggtgtacccagctgcccctgagcggcagaggcctgcccggcggggccatgatgatggcggcggctttgtgaagaccaagatgggcatctgccgggagaagaaggagaggagtgactgctactgtgtgtacatcgagcgggaggacatccgggacagcatcctgaagaagacctgcaccctgaacaactgctttgctgagatgctgctgatctgcagctttgccccagccaccctgccccagcccctgtag

SEQ ID NO: 328487 - DNA, 372 bp, Artificial Sequence
  derived and/or modified sequence
atgtgcggccagtgccagagcagcagcggccacatggaggaggaggctcaccctgagctgtgtccccactggcccttacagtttagccctcagtcccattgtcggcaagcctatgggagagacactcacgccgggggtccgggtgcacgcgtagactccggtcatcacttgggtctcttcccaggactgctgagtacatgccccgatggcctgtgcgtgttccctgtaccttcccctactttcagcacctctctccacgttttaatggagtgcaaggtccatcaacccgggcctcttcccggacgaggctcagcagacgctggcctccgcggactgccacagggccggaccctgtgtgtgcttacagcgtag

SEQ ID NO: 328488 - DNA, 279 bp, Artificial Sequence
  derived and/or modified sequence
atgagctgtcagcagaatcaacagcagtgccagccaccaccgaagtgtcctagccctaaatgccctccaaaatccccagtgcagtgcctgccacccgcttcttctggatgtgccccatcaagcggtggatgtggaccgagctccgaaggcggctgctttctgaaccatcataggagacaccacagatgcagacgccagagacctaactcgtgcgataggggatctggccaacaaggcggtgggtctgggtgcgggcacggtagcggcggctgctgttag

SEQ ID NO: 328489 - DNA, 1005 bp, Artificial Sequence
  derived and/or modified sequence
atgaaacttcaggcacacatggtcgcggaaattagcccatcaagttccccacttcccgctccaggctctctgacaagcaccccggcccgggcgggactgcaccctggcgggaaggcccacgcctttcaggaatatatatttaaaaaacctactttttgtgatgtttgtaaccatatgattgtaggaactaacgccaagcatggcctccgatgcaaggcgtgcaagatgtccatccatcacaaatgcacggatggactagcccctcagagatgtatgggaaagctaccaaaagggtttcggaggtattatagtagccccttattaatccatgagcagtttggatgtattaaggaggtgatgcccatagcatgcgggaacaaagtcgatcccgtgtatgaaacactccgcttcgggacgtcgctcgcacagcgtactaagaagggaagttcaggtagtggctcggattcaccccatcgcacttccacaagtgacctagttgaagtgcccgaagaggcaaatggacccggtggggggtacgacctccgaaaacggtccaactctgtatttacctatccagagaacgggactgatgactttagggacccagccaaaaatataaatcaccagggttcgctgtccaaagaccctcttcaaatgaatacctacgtggccttatacaagttcgtcccgcaggagaatgaggacctggagatgcggccaggggacatcattacgctgctcgaggattctaacgaagattggtggaagggaaaaattcaggatcggataggcttctttcccgccaattttgtacagagattgcagcaaaatgagaagatttttcgctgcgtcagaaccttcattgggtgtaaggagcagggccagatcactttaaaggagaatcagatctgtgtgagttcagaagaggagcaagacgggttcatcagagttttgagcggaaagaagaaagggttgatccctctcgacgtgcttgagaatatttag

SEQ ID NO: 328490 - DNA, 1005 bp, Artificial Sequence
  derived and/or modified sequence
atgaagctgcaggcccacatggtggccgagatcagccccagcagcagccccctgcctgcccctggcagcctgaccagcaccccagcccgggccggcctgcaccctgggggcaaggcccacgccttccaggagtacatcttcaagaagcccaccttctgtgatgtgtgcaaccacatgattgtgggcaccaatgccaagcacggcctgcgctgcaaggcctgcaagatgagcatccaccacaagtgcacagatggcctggccccccagcgctgcatgggcaagctgcccaagggcttccgccgctactacagcagccccctgctgatccacgagcagtttggctgcatcaaggaggtgatgcccatcgcctgtggcaacaaggtggaccctgtgtatgagaccctgcgcttcggcaccagcctggcccagaggaccaagaagggcagcagcggcagcggcagtgacagcccccacaggaccagcaccagtgacctggtggaggtgcctgaggaggccaatggacctgggggcggctatgacctgaggaagaggagcaacagcgtcttcacctacccagaaaatggaacagatgacttccgggaccctgccaagaacatcaaccaccagggcagcctgagcaaggaccccctgcagatgaacacctacgtggccctgtacaagtttgtgccccaggagaatgaagacctggagatgaggcctggggacatcatcaccctgctggaggacagcaatgaagactggtggaagggcaagatccaggacagaattggcttcttccctgccaactttgtgcagaggctgcagcagaatgagaagatcttccgctgtgtgaggaccttcatcggctgcaaggagcagggccagatcaccctgaaggagaaccagatctgtgtgtcctctgaggaggagcaggacggcttcatccgggtgctgagcggcaagaagaagggcctcatccccctggatgtgctggagaacatctag

SEQ ID NO: 328491 - DNA, 1005 bp, Artificial Sequence
  derived and/or modified sequence
atgaagctgcaggcccacatggtggccgagatcagccccagcagctcacctttgccagcacccggtagcctgacatctacgcccgcacgcgcggggctgcaccctggtggaaaagcccacgccttccaggagtacatctttaagaagcccactttttgcgatgtgtgtaaccacatgatcgtaggcaccaacgcaaaacatggattgcggtgtaaggcctgcaaaatgagtatccaccacaaatgcacagacgggctggccccacagcgctgtatgggcaaactgccgaagggttttcgtcgctactactcctctccgctgctaatccatgagcagttcggatgtatcaaggaagtgatgcccatagcctgcggcaacaaggtcgatcccgtctacgagactctgcgcttcggtacctccttggcacaacgaaccaagaaaggaagtagtggctctggtagtgactcaccccatagaacctccacttcagacctggtcgaggtgcccgaggaagctaacgggcctggcggtggctatgaccttcgaaaacgcagcaattccgtctttacgtatcccgaaaacggcactgatgattttcgggatccagccaagaacatcaaccatcaggggtctctgtccaaagacccgctgcaaatgaatacgtatgtggcattatacaaattcgtgccccaggagaacgaggacctggagatgaggcccggggacattatcaccctccttgaggactctaacgaggattggtggaagggaaagatccaggacaggattggattttttccagcaaattttgttcaacggctacagcagaatgagaagatcttccgatgtgtgaggactttcattgggtgtaaagaacaaggccagatcaccttaaaagagaaccagatctgtgtatcaagcgaggaggaacaagatggctttattcgagtcctaagcggtaagaaaaaaggtttaataccactggacgtgctggagaatatttag

SEQ ID NO: 328492 - DNA, 1005 bp, Artificial Sequence
  derived and/or modified sequence
atgaaacttcaggcgcatatggttgctgagattagccctagtagtagcccgctccctgcccctggatccctgacgagcactccagctagggctggtctgcaccctgggggaaaagcccacgcttttcaagagtacatttttaaaaagccaacattctgcgacgtgtgcaatcacatgattgtaggaaccaatgcaaagcacggcctgagatgcaaagcatgcaagatgtccatacaccacaaatgcacagatgggcttgcgccacagcggtgtatgggaaagctgcccaagggatttcgtcgctactattcatcacctctcttgatacacgagcaattcgggtgcatcaaagaggtgatgccaattgcgtgcggaaataaggtcgacccggtatacgagacgctgcgatttgggacatcccttgcacagcggacaaaaaagggatcaagtggtagcggatcggattcgccgcacaggacaagcacgtctgatctggtggaagtgcccgaagaagccaacggtcctggagggggttacgacttgcggaagcgatctaattccgtcttcacataccccgagaatgggactgacgattttcgggaccccgcaaagaatattaaccaccaggggtccctctccaaagatccgctccaaatgaacacctatgtggctctgtacaagttcgtgcctcaggaaaatgaagatctggagatgagaccgggtgacatcattactcttttggaggacagtaatgaggactggtggaagggaaagatacaggacaggataggatttttccctgccaacttcgttcagagactccagcagaatgagaagatattccggtgtgtgaggaccttcatcggttgtaaggagcagggccagataacactcaaggagaaccagatttgcgtcagctctgaagaggaacaggacggtttcattagagtgttgagcggcaaaaaaaagggcttaattcctctcgatgtgctagaaaacatttag

SEQ ID NO: 328493 - DNA, 1005 bp, Artificial Sequence
  derived and/or modified sequence
atgaagctgcaggcccacatggtggccgagatcagccccagcagcagccccctgcccgcccccggcagcctgaccagcacccccgccagagccggcctgcaccccggcggcaaggcccacgccttccaggagtacatcttcaagaagcccaccttctgcgacgtgtgcaaccacatgatcgtgggcaccaacgccaagcacggcctgagatgcaaggcctgcaagatgagcatccaccacaagtgcaccgacggcctggccccccagagatgcatgggcaagctgcccaagggcttcagaagatactacagcagccccctgctgatccacgagcagttcggctgcatcaaggaggtgatgcccatcgcctgcggcaacaaggtggaccccgtgtacgagaccctgagattcggcaccagcctggcccagagaaccaagaagggcagcagcggcagcggcagcgacagcccccacagaaccagcaccagcgacctggtggaggtgcccgaggaggccaacggccccggcggcggctacgacctgagaaagagaagcaacagcgtgttcacctaccccgagaacggcaccgacgacttcagagaccccgccaagaacatcaaccaccagggcagcctgagcaaggaccccctgcagatgaacacctacgtggccctgtacaagttcgtgccccaggagaacgaggacctggagatgagacccggcgacatcatcaccctgctggaggacagcaacgaggactggtggaagggcaagatccaggacagaatcggcttcttccccgccaacttcgtgcagagactgcagcagaacgagaagatcttcagatgcgtgagaaccttcatcggctgcaaggagcagggccagatcaccctgaaggagaaccagatctgcgtgagcagcgaggaggagcaggacggcttcatcagagtgctgagcggcaagaagaagggcctgatccccctggacgtgctggagaacatctag

SEQ ID NO: 328494 - DNA, 504 bp, Artificial Sequence
  derived and/or modified sequence
atgcccagccagagcgcctgccccgtgctgagcaccgcccccggcaccccctgcgacctgagaaagcacctgctgaacatggtgagcgaggagaagagaagcccccagctgagcgccaagacctggagaagaggcctgagactgcagaagagaagaaacgccctgttcctgcccgagggcgacatctgcgtggtgggcagcaccagcggcgccagagccctgatccccgagaccagcaagctggagagaagcggcaccgtgatcgcctactgcaacctggagctgctggccagcagcgacccccccgtgtgggccagccagagcaccggcatgaccggcatgagctacagaagccagccccagctgggcttcaagagcaccccccccgcccacagcagcgtgttccaccacagcgtgaaggcccccaaggaggaccaggcccaggaggccgccagcagacccctgaccagccaggacggctggaaccccaacatcaagaagtag

SEQ ID NO: 328495 - DNA, 504 bp, Artificial Sequence
  derived and/or modified sequence
atgcctagccagagcgcgtgtcccgttctctccacagcgcccggaacgccatgcgacctgaggaagcatctactgaatatggtgagtgaggagaaacgttctccacagctgagcgcgaaaacatggaggaggggcctaagactgcagaaaagacgcaatgcactctttctccccgaaggagacatttgcgtggtcggtagtactagcggagctagggcactgatcccagaaacttccaaattagagaggtcgggcactgtcatcgcctattgcaatctggaattattggccagctccgacccaccagtttgggcttcacagtctaccgggatgacaggcatgtcttaccgaagtcaaccacagctgggttttaaatcaactccacctgcacattcgtctgtcttccaccatagcgtgaaggcgcccaaagaggatcaagctcaggaggccgcttcacgaccattaactagccaggatggttggaaccccaacatcaaaaaatag

SEQ ID NO: 328496 - DNA, 504 bp, Artificial Sequence
  derived and/or modified sequence
atgcccagccagagcgcctgccctgtgctgagcacagcccctggcaccccctgtgacctgaggaagcacctgctgaacatggtgtctgaggagaagaggagcccccagctgagcgccaagacctggaggcggggcctgcggctgcagaagagaagaaatgccctcttcctgcctgagggggacatctgtgtggtgggcagcaccagcggggcccgggccctgatccctgagaccagcaagctggagaggagcggcaccgtcatcgcctactgcaacctggagctgctggccagcagtgacccccctgtgtgggccagccagagcacaggcatgacaggcatgagctaccgcagccagccccagctgggcttcaagagcaccccaccagcccacagctctgtgttccaccacagcgtgaaggcccccaaggaggaccaggcccaggaggccgccagccggcccctgaccagccaggacggctggaaccccaacatcaagaagtag

SEQ ID NO: 328497 - DNA, 504 bp, Artificial Sequence
  derived and/or modified sequence
atgcccagccagagcgcctgccccgtgctgagcaccgcccccggcacaccgtgcgacttgagaaagcacctgcttaacatggtgtctgaggagaagcgaagcccgcaactcagcgcaaaaacttggcgcaggggcctacgtctccagaaacggcgtaatgccctgtttctcccagaaggagacatctgcgtggtgggcagtaccagcggggcccgggctttgatccccgagacgtcaaaactggagaggagcggaaccgtaattgcctactgcaatctggaattgttggcttcatccgatccccctgtgtgggcaagccagtccactggaatgacagggatgagctaccgatctcagccccagctggggttcaaatcaactcctccagcccacagttctgtatttcaccattctgtgaaagccccaaaagaggatcaggcacaggaggctgcttcgcgcccacttacctcccaggacgggtggaatcctaatattaagaagtag

SEQ ID NO: 328498 - DNA, 504 bp, Artificial Sequence
  derived and/or modified sequence
atgccttcacagagcgcctgccctgtgttgtctactgcaccgggaaccccgtgtgatttaagaaagcacctgttgaacatggtaagcgaggagaagagatcaccccagctgtcagctaagacatggaggcgcggactgagactccagaagagacgtaacgccctcttcctgcccgagggggacatttgcgtagttggaagtacttcaggcgctagggccctgattcccgagacctctaaactagagcgtagtgggaccgtgatcgcatactgtaatttggagctccttgctagcagtgatccacccgtgtgggcctcacaatcaactggaatgacgggcatgtcttataggtctcaaccccagctcggctttaagtctaccccgccagcgcactcaagcgtcttccaccactcggtgaaggctcccaaagaagaccaggcccaggaggccgctagccgaccgctgacttcacaggacggatggaatccgaatatcaaaaaatag

SEQ ID NO: 328499 - protein, 112 aa, Artificial Sequence
  derived and/or modified sequence
MCSCSSDECNDNIIFSEGRCKIRHIGSNNRLQRSTCQNTGWESAHVMKTPGFREYNTSNPDLLLVIFQVTGISLLPPLGVAISVIIIFYCYRVNRQQKLSSTWETGKTRKLM

SEQ ID NO: 328500 - DNA, 2013 bp, Artificial Sequence
  derived and/or modified sequence
ttatttcccctgtagcttttctcaagagacttcatggactaatttcccaataatcatagtagctaccacttattgaggtcttgctactgcacggatcatgctgagtacttcaggtgtattaaccctcaaaacaactttagaagatgtggaaatggaggcccagaaagatgaaatcatctgccccagctgtaataggactgcccatccactgagacatattaataacgacatgatagtcactgacaacaacggtgcagtcaagtttccacaactgtgtaaattttgtgatgtgagattttccacctgtgacaaccagaaatcctgcatgagcaactgcagcatcacctccatctgtgagaagccacaggaagtctgtgtggctgtatggagaaagaatgacgagaacataacactagagacagtttgccatgaccccaagctcccctaccatgactttattctggaagatgctgcttctccaaagtgcattatgaaggaaaaaaaaaagcctggtgagactttcttcatgtgttcctgtagctctgatgagtgcaatgacaacatcatcttctcagaagaatataacaccagcaatcctgacttgttgctagtcatatttcaagtgacaggcatcagcctcctgccaccactgggagttgccatatctgtcatcatcatcttctactgctaccgcgttaaccggcagcagaagctgagttcaacctgggaaaccggcaagacgcggaagctcatggagttcagcgagcactgtgccatcatcctggaagatgaccgctctgacatcagctccacgtgtgccaacaacatcaaccacaacacagagctgctgcccattgagctggacaccctggtggggaaaggtcgctttgctgaggtctataaggccaagctgaagcatgagaacatactccagttcctgacggctgaggagcggaagacggagttggggaaacaatactggctgatcaccgccttccacgccaagggcaacctacaggagtacctgacgcggcatgtcatcagctgggaggacctgcgcaagctgggcagctccctcgcccgggggattgctcacctccacagtgatcacactccatgtgggaggcccaagatgcccatcgtgcacagggacctcaagagctccaatatcctcgtgaagaacgacctaacctgctgcctgtgtgactttgggctttccctgcgtctggaccctactctgtctgtggatgacctggctaacagtgggcaggtgggaactgcaagatacatggctccagaagtcctagaatccaggatgaatttggagaatgttgagtccttcaagcagaccgatgtctactccatggctctggtgctctgggaaatgacatctcgctgtaatgcagtgggagaagtaaaagattatgagcctccatttggttccaaggtgcgggagcacccctgtgtcgaaagcatgaaggacaacgtgttgagagatcgagggcgaccagaaattcccagcttctggctcaaccaccagggcatccagatggtgtgtgagacgttgactgagtgctgggaccacgacccagaggcccgtctcacagcccagtgtgtggcagaacgcttcagtgagctggagcatctggacaggctctcggggaggagctgctcggaggagaagattcctgaagacggctccctaaacactaccaaatagctcttctggggcaggctgggccatgtccaaagaggctgcccctctcaccaaagaacagaggcagcaggaagctgcccctgaactgatgcttcctggaaaaccaagggggtcactcccctccctgtaagctgtggggataagcagaaacaacagcagcagggagtgggtgacatagagcattctatgcctttgacattgtcataggataagctgtgttagcacttcctcaggaaatgagattgatttttacaatagccaataacatttgcactttattaatgcctgtatataaa

SEQ ID NO: 328501 - protein, 397 aa, Artificial Sequence
  derived and/or modified sequence
MCSCSSDECNDNIIFSEEYNTSNPDLLLVIFQVTGISLLPPLGVAISVIIIFYCYRVNRQQKLSSTWETGKTRKLMEFSEHCAIILEDDRSDISSTCANNINHNTELLPIELDTLVGKGRFAEVYKAKLKHENILQFLTAEERKTELGKQYWLITAFHAKGNLQEYLTRHVISWEDLRKLGSSLARGIAHLHSDHTPCGRPKMPIVHRDLKSSNILVKNDLTCCLCDFGLSLRLDPTLSVDDLANSGQVGTARYMAPEVLESRMNLENVESFKQTDVYSMALVLWEMTSRCNAVGEVKDYEPPFGSKVREHPCVESMKDNVLRDRGRPEIPSFWLNHQGIQMVCETLTECWDHDPEARLTAQCVAERFSELEHLDRLSGRSCSEEKIPEDGSLNTTK

SEQ ID NO: 328502 - DNA, 339 bp, Artificial Sequence
  derived and/or modified sequence
atgtgcagctgcagcagcgacgagtgcaacgacaacatcatcttcagcgagggcagatgcaagatcagacacatcggcagcaacaacagactgcagagaagcacctgccagaacaccggctgggagagcgcccacgtgatgaagacccccggcttcagagagtacaacaccagcaaccccgacctgctgctggtgatcttccaggtgaccggcatcagcctgctgccccccctgggcgtggccatcagcgtgatcatcatcttctactgctacagagtgaacagacagcagaagctgagcagcacctgggagaccggcaagaccagaaagctgatgtag

SEQ ID NO: 328503 - DNA, 1194 bp, Artificial Sequence
  derived and/or modified sequence
atgtgcagctgcagcagcgacgagtgcaacgacaacatcatcttcagcgaggagtacaacaccagcaaccccgacctgctgctggtgatcttccaggtgaccggcatcagcctgctgccccccctgggcgtggccatcagcgtgatcatcatcttctactgctacagagtgaacagacagcagaagctgagcagcacctgggagaccggcaagaccagaaagctgatggagttcagcgagcactgcgccatcatcctggaggacgacagaagcgacatcagcagcacctgcgccaacaacatcaaccacaacaccgagctgctgcccatcgagctggacaccctggtgggcaagggcagattcgccgaggtgtacaaggccaagctgaagcacgagaacatcctgcagttcctgaccgccgaggagagaaagaccgagctgggcaagcagtactggctgatcaccgccttccacgccaagggcaacctgcaggagtacctgaccagacacgtgatcagctgggaggacctgagaaagctgggcagcagcctggccagaggcatcgcccacctgcacagcgaccacaccccctgcggcagacccaagatgcccatcgtgcacagagacctgaagagcagcaacatcctggtgaagaacgacctgacctgctgcctgtgcgacttcggcctgagcctgagactggaccccaccctgagcgtggacgacctggccaacagcggccaggtgggcaccgccagatacatggcccccgaggtgctggagagcagaatgaacctggagaacgtggagagcttcaagcagaccgacgtgtacagcatggccctggtgctgtgggagatgaccagcagatgcaacgccgtgggcgaggtgaaggactacgagccccccttcggcagcaaggtgagagagcacccctgcgtggagagcatgaaggacaacgtgctgagagacagaggcagacccgagatccccagcttctggctgaaccaccagggcatccagatggtgtgcgagaccctgaccgagtgctgggaccacgaccccgaggccagactgaccgcccagtgcgtggccgagagattcagcgagctggagcacctggacagactgagcggcagaagctgcagcgaggagaagatccccgaggacggcagcctgaacaccaccaagtag

SEQ ID NO: 328504 - DNA, 339 bp, Artificial Sequence
  derived and/or modified sequence
atgtgctcatgctctagtgacgaatgcaacgataatatcattttcagtgagggacgatgtaaaattcgacacattggaagtaataatcgattgcagcggtccacatgtcagaataccggttgggaaagcgctcacgttatgaagacccctggctttagagaatacaatacaagcaatcccgacctgctactagtcatattccaagtcaccggaataagtctcctgcctcctcttggcgtggctatttcagtcataatcatcttctactgttacagagtcaatagacagcagaaattatcatcgacatgggagacaggcaagacgagaaaattaatgtag

SEQ ID NO: 328505 - DNA, 1194 bp, Artificial Sequence
  derived and/or modified sequence
atgtgcagctgttcctctgacgagtgtaatgataacatcattttttctgaagagtataacacatccaacccggacctgctgcttgtcatctttcaggttacgggcatcagcttgctgcctcccctgggagttgctataagtgtgatcattatattttactgctatcgggtgaatagacaacagaaactatcttctacgtgggagaccggcaagacgagaaagctgatggaattctccgagcactgtgctatcatactcgaggatgaccgatccgatattagttcaacatgtgcaaataatattaatcataatacagaattactgcctatcgagttggatacactagtgggcaaaggaagattcgcagaggtgtacaaagctaagttgaagcatgaaaatatcctgcagttcctcacagctgaggagaggaagaccgaactcggaaaacagtattggcttattaccgccttccacgctaaaggtaacctgcaagagtacttgactcggcatgttatctcgtgggaggatctccgcaaactgggctcttctctggcacgcggcatagcccatctgcacagcgatcataccccgtgcggtcgccctaagatgccgattgttcaccgggacttaaagagctccaacatcctggtgaagaatgacttaacctgttgcttatgcgacttcggcctctcactgaggctggaccccacgttgagcgtggatgacctcgccaacagtggacaggtggggactgcgagatatatggctcccgaagttttggaatcgaggatgaatctggaaaatgtagagtctttcaaacagacagatgtgtattcaatggccctggtactgtgggagatgacctcacggtgtaatgccgtgggggaggtgaaggattatgaaccaccctttggctccaaggttcgggagcacccatgcgtggaatcaatgaaggataatgtattaagggatagaggtcgtccagagatcccgtcattctggttaaatcatcaggggatccagatggtgtgtgagacactgacggagtgctgggaccatgatccggaagctagactcacggcccaatgcgtggctgagagattctctgaattagagcacctagaccgcctatccggccgctcttgctccgaggagaagatccccgaggatgggtcactgaacacaaccaaatag

SEQ ID NO: 328506 - DNA, 339 bp, Artificial Sequence
  derived and/or modified sequence
atgtgcagctgcagcagtgatgagtgcaatgacaacatcatcttcagcgagggccgctgcaagatccgccacatcggcagcaacaaccggctgcagaggagcacctgccagaacacaggctgggagagcgcccacgtgatgaagaccccaggcttccgggagtacaacaccagcaacccagacctgctgctggtgatcttccaggtgacaggcatcagcctgctgccccccctgggcgtggccatcagcgtcatcatcatcttctactgctacagagtgaaccggcagcagaagctgagcagcacctgggagaccgggaagaccaggaagctgatgtag

SEQ ID NO: 328507 - DNA, 1194 bp, Artificial Sequence
  derived and/or modified sequence
atgtgcagctgcagcagtgatgagtgcaatgacaacatcatcttcagcgaggagtacaacaccagcaacccagacctgctgctggtgatcttccaggtgacaggcatcagcctgctgccccccctgggcgtggccatcagcgtcatcatcatcttctactgctacagagtgaaccggcagcagaagctgagcagcacctgggagaccgggaagaccaggaagctgatggagttcagcgagcactgtgccatcatcctggaggatgacagaagtgacatcagcagcacctgtgccaacaacatcaaccacaacacagagctgctgcccatcgagctggacaccctggtgggcaagggccgctttgctgaggtgtacaaggccaagctgaagcatgagaacatcctgcagttcctgacagctgaggagaggaagacagagctgggcaagcagtactggctgatcacagccttccacgccaagggcaacctgcaggagtacctgaccaggcatgtgatctcctgggaggacctgaggaagctgggcagcagcctggcccggggcatcgcccacctgcacagcgaccacaccccctgtggccggcccaagatgcccatcgtgcaccgggacctgaagagcagcaacatcctggtgaagaatgacctgacctgctgcctgtgtgactttggcctgagcctgcggctggaccccaccctgtctgtggatgacctggccaacagcggccaggtgggcacagcccgctacatggcccctgaggtgctggagagcaggatgaacctggagaatgtggagagcttcaagcagacagatgtgtacagcatggccctggtgctgtgggagatgaccagccgctgcaatgctgtgggggaggtgaaggactatgagccccccttcggcagcaaggtgcgggagcacccctgtgtggagagcatgaaggacaacgtgctgcgggaccggggccggcctgagatccccagcttctggctgaaccaccagggcatccagatggtgtgtgagaccctgacagagtgctgggaccatgaccctgaggcccggctgacagcccagtgtgtggccgagcgcttcagcgagctggagcacctggaccggctgagcggccgcagctgcagcgaggagaagatcccagaagatggcagcctgaacaccaccaagtag

SEQ ID NO: 328508 - DNA, 339 bp, Artificial Sequence
  derived and/or modified sequence
atgtgcagctgcagcagcgacgagtgcaacgacaacatcatcttctccgagggcagatgtaagattagacatataggaagcaacaatcggctgcaacggagtacctgccagaacaccggatgggagtccgcgcatgttatgaagaccccaggatttagagagtacaacacttccaaccccgacttgctcttagtcatctttcaggtgaccgggatcagtctccttccccctctgggagtggcaatctcagttattatcatattttattgctaccgtgtcaacagacagcaaaaactctcttcgacctgggaaacagggaagactcgcaaactgatgtag

SEQ ID NO: 328509 - DNA, 1194 bp, Artificial Sequence
  derived and/or modified sequence
atgtgcagctgcagcagcgacgagtgcaacgacaacatcatcttctctgaagaatataatacgtctaacccagatctgttgctggtgatattccaggtgaccgggatcagcctgctgccccccctcggggtggcaatatccgttattatcatcttctactgttaccgagtgaatcgccaacaaaagttgtcctcaacctgggaaacagggaaaacaagaaaactcatggaattttcagagcactgtgccattatccttgaggacgacagatccgatatctcctcaacttgcgccaacaatatcaaccacaacacagagcttttacctattgagctggatactcttgtgggtaaagggcggttcgctgaagtatataaagctaagctgaagcatgagaacattctccagtttcttaccgccgaagagcgcaagacagaactcgggaagcagtactggcttatcacagctttccacgcaaaaggaaacctgcaagagtatttgacccggcacgtgatttcgtgggaagacctgagaaagcttggtagttcgcttgcccggggcattgcacacttacactcggatcataccccctgtgggagaccaaaaatgccaatcgtgcatcgggacttgaaatccagtaacatattggtgaaaaatgacctcacctgttgcttatgcgatttcggcctctcacttaggctcgacccgacactgtccgtggatgatcttgctaacagtggacaagttggtaccgcgagatacatggcaccagaggtgctggagagcagaatgaacttggagaatgtggagtcctttaaacagactgacgtgtatagcatggcgctcgtcctttgggaaatgacttcgcgctgcaatgccgtgggggaggtgaaagactatgagcccccgttcggtagcaaggtgagagagcacccctgcgtggaaagcatgaaagataatgtcctcagagacagaggcaggcccgagattccaagtttttggctgaaccatcagggaatccagatggtctgcgaaacgctcacggagtgctgggaccacgatcccgaagcccggctgaccgcccagtgcgtagctgagagatttagcgaattggaacacctcgataggctgtccggacgtagctgttctgaagaaaaaataccggaagacgggagcctgaataccactaaatag

SEQ ID NO: 328510 - DNA, 339 bp, Artificial Sequence
  derived and/or modified sequence
atgtgctcttgctcaagcgacgagtgtaatgacaatattattttttccgagggtcgatgcaagattcgccacattggctcgaacaaccgtctccaacggagcacgtgtcagaacacagggtgggaaagtgcacacgtgatgaagactcccggtttccgcgagtacaataccagtaatccagatttattgttagtcatcttccaagttacaggcatttctctactccccccactgggcgtagctatctccgttataattatcttttattgttaccgggtcaaccgccagcagaagctctcctcgacatgggaaacagggaaaacaaggaagttgatgtag

SEQ ID NO: 328511 - DNA, 1194 bp, Artificial Sequence
  derived and/or modified sequence
atgtgtagttgctcctctgatgagtgtaacgataacataattttttctgaagagtataacacctctaaccctgatctgctgctggtgatattccaggtcacaggcatttcccttcttccccctctgggcgtggctatcagtgtcataatcatcttctactgctaccgggtaaatcggcagcagaagctgtcttccacctgggagacgggcaagactcgtaaactcatggagttttccgaacactgcgccattatccttgaggatgataggtctgacattagttctacttgtgccaataacattaatcataatactgaactcttaccaattgagctagacactctcgtgggcaaaggccgattcgccgaggtgtacaaggccaagctgaagcacgagaatatcctgcaattcttaacagctgaggagcgcaagacagagctgggaaagcagtattggctaatcaccgcgtttcacgccaaggggaacctgcaggaatacctgacacgacatgtcatctcttgggaggacctcaggaagttgggctcttcgctggcgagaggaatcgcacacttacatagcgatcacaccccatgcggcagacctaagatgcccatcgtgcatcgagacctgaaatcttctaatattctggtgaagaacgacctgacatgttgcttgtgtgatttcgggctatctctgcgccttgatcccactctgtccgtggacgatttggcaaacagcgggcaagtgggtacagcgagatacatggccccagaagtgctggagagtagaatgaacctggaaaatgtcgaaagtttcaaacagaccgatgtgtattcaatggcacttgtcctttgggagatgacgtctaggtgcaacgccgttggagaagtgaaggattacgagcccccttttgggtctaaggtgcgtgagcatccatgcgtagagtcgatgaaagataacgtgttgagagacaggggacggcctgaaattccaagcttttggctgaaccaccagggaatccaaatggtttgtgagactttaacggaatgctgggatcacgatcccgaggccagactcacggcccaatgcgtggcggagcgcttttcggaactcgagcacttggatcgattgtcaggacgctcctgttcagaggaaaaaattccggaggacggctccctcaatacgactaaatag

SEQ ID NO: 328512 - protein, 457 aa, Artificial Sequence
  derived and/or modified sequence
MAFASIYKLDNLVAILDINRLGQSDPAPLQHQMDIYQKRCEAFGWHAIIVDGHSVEELCKAFGQAKHQPTAIIAKTFKGRGITGVEDKESWHGKPLPKNMAEQIIQEIYSQIQSKKKILATPPQEDAPSVDIANIRMPSLPSYKVGDKIATRKAYGQALAKLGHASDRIIALDGDTKNSTFSEIFKKEHPDRFIECYIAEQNMVSIAVGCATRNRTVPFCSTFAAFFTRAFDQIRMAAISESNINLCGSHCGVSIGEDGPSQMALEDLAMFRSVPTSTVFYPSDGVATEKAVELAANTKGICFIRTSRPENAIIYNNNEDFQVGQAKVVLKSKDDQVTVIGAGVTLHEALAAAELLKKEKINIRVLDPFTIKPLDRKLILDSARATKGRILTVEDHYYEGGIGEAVSSAVVGEPGITVTHLAVNRVPRSGKPAELLKMFGIDRDAIAQAVRGLITKA

SEQ ID NO: 328513 - DNA, 1374 bp, Artificial Sequence
  derived and/or modified sequence
atggccttcgccagcatctacaagctggacaacctggtggccatcctggacatcaacagactgggccagagcgaccccgcccccctgcagcaccagatggacatctaccagaagagatgcgaggccttcggctggcacgccatcatcgtggacggccacagcgtggaggagctgtgcaaggccttcggccaggccaagcaccagcccaccgccatcatcgccaagaccttcaagggcagaggcatcaccggcgtggaggacaaggagagctggcacggcaagcccctgcccaagaacatggccgagcagatcatccaggagatctacagccagatccagagcaagaagaagatcctggccacccccccccaggaggacgcccccagcgtggacatcgccaacatcagaatgcccagcctgcccagctacaaggtgggcgacaagatcgccaccagaaaggcctacggccaggccctggccaagctgggccacgccagcgacagaatcatcgccctggacggcgacaccaagaacagcaccttcagcgagatcttcaagaaggagcaccccgacagattcatcgagtgctacatcgccgagcagaacatggtgagcatcgccgtgggctgcgccaccagaaacagaaccgtgcccttctgcagcaccttcgccgccttcttcaccagagccttcgaccagatcagaatggccgccatcagcgagagcaacatcaacctgtgcggcagccactgcggcgtgagcatcggcgaggacggccccagccagatggccctggaggacctggccatgttcagaagcgtgcccaccagcaccgtgttctaccccagcgacggcgtggccaccgagaaggccgtggagctggccgccaacaccaagggcatctgcttcatcagaaccagcagacccgagaacgccatcatctacaacaacaacgaggacttccaggtgggccaggccaaggtggtgctgaagagcaaggacgaccaggtgaccgtgatcggcgccggcgtgaccctgcacgaggccctggccgccgccgagctgctgaagaaggagaagatcaacatcagagtgctggaccccttcaccatcaagcccctggacagaaagctgatcctggacagcgccagagccaccaagggcagaatcctgaccgtggaggaccactactacgagggcggcatcggcgaggccgtgagcagcgccgtggtgggcgagcccggcatcaccgtgacccacctggccgtgaacagagtgcccagaagcggcaagcccgccgagctgctgaagatgttcggcatcgacagagacgccatcgcccaggccgtgagaggcctgatcaccaaggcctag

SEQ ID NO: 328514 - DNA, 1374 bp, Artificial Sequence
  derived and/or modified sequence
atggcttttgccagcatctacaagctcgacaacctcgtggccatcctggatattaataggctgggccaatcagaccccgcccctctccagcaccagatggacatctaccagaaaaggtgcgaagcctttgggtggcacgcaatcatcgtcgacggtcactccgtggaagagttgtgtaaggcttttggccaggccaaacaccagcctaccgctattattgccaagacctttaaaggcaggggtattacgggcgtcgaggataaggaaagctggcacggcaagcccctgccgaaaaatatggctgaacagataatccaagagatttactcccagattcagtccaaaaagaagatacttgccacgcctcctcaagaagacgctccctcagtagatattgctaacatcaggatgccctcactgccgtcatacaaggtgggcgataaaattgctacacgaaaggcctacggccaagcacttgccaaactcggccacgctagtgatcggattattgcactcgatggtgacacaaagaattctaccttcagtgagatctttaagaaagagcaccctgatcgctttatcgaatgctatattgccgagcaaaacatggtgagcatcgccgtcggatgtgcgaccaggaaccggacagtaccgttttgctcaacttttgctgcgttcttcacccgcgccttcgaccagatcaggatggcagccattagcgagtccaatataaatttatgcggctctcactgtggagtctccattggcgaagacggaccctcacagatggcactcgaggatctcgcaatgtttcgatcggttcccacaagcacggtgttttaccccagtgatggcgtggccacagagaaggctgtagaactcgccgccaacacaaagggcatatgctttattaggacctccaggcctgaaaacgccataatctataacaataacgaggacttccaagtggggcaggctaaagtggtgttgaagagcaaagatgatcaggttactgtgatcggtgctggagtaaccctccacgaagccctcgccgccgccgagttgttgaaaaaggaaaaaattaatattagggtcctggacccattcaccatcaagccgctggataggaagctcatacttgattccgcaagagctacaaagggccgaattctgacggtcgaggaccattactacgagggaggcattggcgaggccgtgtcctctgctgtggtcggggaaccaggaataacagtgacccatctggctgtgaatagagttcctcggtcaggtaagcctgctgaactgctcaaaatgttcggcatcgatcgggatgctattgcgcaggcggtgcgtggactgattacaaaagcctag

SEQ ID NO: 328515 - DNA, 1374 bp, Artificial Sequence
  derived and/or modified sequence
atggcctttgccagcatctacaagctggacaacctggtggccatcctggacatcaaccggctgggccagagcgaccctgcccccctgcagcaccagatggacatctaccagaagagatgtgaggccttcggctggcacgccatcatcgtggatggccacagcgtggaggagctgtgcaaggccttcggccaggccaagcaccagcccacagccatcatcgccaagaccttcaagggccggggcatcactggagtggaggacaaggagagctggcacggcaagcccctgcccaagaacatggccgagcagatcatccaggagatctacagccagatccagagcaagaagaagatcctggccaccccaccccaggaggatgcccccagcgtggacatcgccaacatccgcatgcccagcctgcccagctacaaggtgggggacaagatcgccaccaggaaggcctacggccaggccctggccaagctgggccacgccagtgaccgcatcatcgccctggatggagacaccaagaacagcaccttcagcgagatcttcaagaaggagcacccagaccgcttcatcgagtgctacatcgccgagcagaacatggtgtccattgctgtgggctgtgccaccaggaacagaacagtgcccttctgcagcacctttgctgccttcttcacccgggcctttgaccagatccgcatggccgccatcagcgagagcaacatcaacctgtgtggcagccactgcggcgtgtccattggagaagatggccccagccagatggccctggaggacctggccatgttccgctctgtgcccaccagcaccgtcttctaccccagtgatggagtggccacagagaaggctgtggagctggccgccaacaccaagggcatctgcttcatccgcaccagcaggccagaaaatgccatcatctacaacaacaatgaagacttccaggtgggccaggccaaggtggtgctgaagagcaaggatgaccaggtgaccgtcatcggggccggcgtgaccctgcacgaggccctggccgctgctgagctgctgaagaaggagaagatcaacatccgggtgctggaccccttcaccatcaagcccctggacaggaagctgatcctggacagcgcccgggccaccaagggccgcatcctgactgtggaggaccactactatgagggcggcatcggggaggccgtgagcagcgctgtggtgggggagcccggcatcaccgtgacccacctggccgtgaacagagtgcccaggtctgggaagccagctgagctgctgaagatgtttggaattgacagagatgccatcgcccaggccgtgcggggcctcatcaccaaggcctag

SEQ ID NO: 328516 - DNA, 1374 bp, Artificial Sequence
  derived and/or modified sequence
atggccttcgccagcatctacaagctggacaacctggtggccatcctcgatatcaacagactcggccagagcgatcccgcccccctgcagcaccagatggatatctatcagaagagatgcgaagccttcggatggcatgctatcatcgtggacggtcactccgtggaggagttgtgtaaggcattcggccaagctaagcaccagccaacggccattatagctaagacgtttaagggtagaggtattacaggcgtcgaggacaaagaatcgtggcatgggaaacctctgccaaaaaacatggccgagcagatcatccaagaaatttactctcagattcaatctaagaagaagatactggctacacctccccaagaagatgcccctagcgtagacattgccaatatcagaatgcccagcctgcctagctataaggtgggcgacaaaatcgctactcggaaagcttacggccaggccttagctaagctgggtcatgcttcggatcgaattatcgcactagatggcgataccaaaaattcaacctttagcgagatctttaaaaaggaacaccctgataggtttatcgagtgttatattgcggagcagaatatggtgagcattgctgttggctgcgcaaccaggaatagaaccgtacctttctgcagcaccttcgccgcctttttcactcgagcctttgaccagattagaatggcggccatcagcgaaagcaacattaatctgtgtgggtctcattgcggtgtatctataggcgaggacggaccaagtcagatggccctggaagacctggccatgtttcggtcagtgcccacaagcaccgttttttacccttccgacggggtggccaccgagaaggccgtcgagctcgccgccaacaccaaggggatatgctttatcaggacttctcgaccggagaacgcgataatctacaacaataacgaggattttcaggtgggacaggccaaagtggtgttgaagagtaaggatgaccaagtcacagtgattggcgcaggggttacactacacgaggcactggctgccgcggagcttttgaaaaaggagaagattaatatacgcgtgctggacccattcactatcaagcccctggatcgtaagctgattttggactctgctcgcgccacgaagggacggatattaaccgtcgaggaccactactacgagggaggaatcggcgaggccgtaagttctgcagtggttggggaacccggtattacggtcacccatttagccgttaacagagtgccccgtagtggaaaacctgcagaactactgaaaatgttcggtattgatcgcgacgctatagcccaggctgtgcgcggtttaattacgaaagcatag

SEQ ID NO: 328517 - DNA, 1374 bp, Artificial Sequence
  derived and/or modified sequence
atggcttttgcaagcatctacaaactcgataatcttgttgccatcttggatatcaacagactcggtcaaagcgaccctgctcccctgcaacaccagatggacatttaccagaaaaggtgtgaagcattcgggtggcacgccatcatcgtggacggacattcggtcgaagagctttgtaaggccttcggacaagccaagcaccaacctaccgccatcattgcaaagacctttaagggcaggggaataactggggtggaagacaaggaatcctggcatgggaaacctttgcccaagaacatggcggagcagatcatccaagagatttactctcagatccagtccaaaaaaaaaatcctggcgacaccaccacaggaggacgcccctagcgttgatatcgccaacatacggatgcctagcctcccctcatataaggtaggagacaagatcgcaactaggaaggcctacgggcaggcgctggcaaaactaggccatgcatccgatagaatcatcgccttggatggcgacacaaagaacagcacttttagcgagatatttaagaaggaacacccagataggttcattgagtgttacattgctgaacagaatatggtatccatagcagtcggctgcgccacaagaaaccgaactgtcccattctgctccactttcgccgctttcttcacacgggcttttgatcagattcgaatggcagctatttccgaatccaacatcaacctttgtggttcccactgtggagtttccatcggcgaggacggaccatcccagatggcgctcgaagacctagccatgttcaggtcagttcccacctcaacagtgttttaccctagcgacggcgtcgccacagagaaggccgtggagttggccgcaaacacaaaaggaatatgcttcattagaacttctaggccggagaacgccattatttataataataatgaggactttcaggtcgggcaggcgaaagttgtgctgaagtctaaagatgatcaagtgactgtgatcggtgccggagttaccctccacgaagctttagcggctgctgagctgctaaagaaggagaagatcaatatacgggtcctggatccgttcaccattaagcctttagatagaaaattgattctcgacagcgcgcgagctacgaagggcaggatccttaccgttgaggaccactattacgaagggggaatcggagaggcggtgtcctctgctgtggttggcgagccaggcatcacggttacacaccttgcagttaatcgggtcccaagatccggaaaaccagccgaattactcaagatgtttggaattgaccgggacgccatcgcacaggctgtgaggggcctgatcaccaaggcgtag

SEQ ID NO: 328518 - protein, 1009 aa, Artificial Sequence
  derived and/or modified sequence
MSWFNASQLSSFAKQALSQAQKSIDRVLDIQEEEPSIWAETIPYGEPGISSPVSGGWDTSTWGLKSNTEPQSPPIASPKAITKPVRRTVVDESENFFSAFLSPTVSLKVSESVIDVKTTMESISNTSTQSLTAETKDIALEPKEQKHEDRQSNTPSPPVSTFSSGTSTTSDIEVLDHESVISESSASSRQETTDSKSSLHLMQTSFQLLSASACPEYNRLDDFQKLTESCCSSDAFERIDSFSVQSLDSRSVSEINSDDELSGKGYALVPIIVNSSTPKSKTVESAEGKSEEVNETLVIPTEEAEMEESGRSATPVNCEQPDILVSSTPINEGQTVLDKVAEQCEPAESQPEALSEKEDVCKVTLTVEFLNEKLEKREAQLLSLSKEKALLEEAFDNLKDEMFRVKEESSSISSLKDEFTQRIAEAEKKVQLACKERDAAKKEIKNIKEELATRLNSSETADLLKEKDEQIRGLMEEGEKLSKQQLHNSNIIKKLRAKDKENENMVAKLNKKVKELEEELQHLKQVLDGKEEVEKQHRENIKKLNSMVERQEKDLGRLQVDMDELEEKNRSIQAALDSAYKELTDLHKANAAKDSEAQEAALSREMKAKEELSAALEKAQEEARQQQETLAIQVGDLRLALQRTEQAAARKEDYLRHEIGELQQRLQEAENRNQELSQSVSSTTRPLLRQIENLQATLGSQTSSWEKLEKNLSDRLGESQTLLAAAVERERAATEELLANKIQMSSMESQNSLLRQENSRFQAQLESEKNRLCKLEDENNRYQVELENLKDEYVRTLEETRKEKTLLNSQLEMERMKVEQERKKAIFTQETIKEKERKPFSVSSTPTMSRSSSISGVDMAGLQTSFLSQDESHDHSFGPMPISANGSNLYDAVRMGAGSSIIENLQSQLKLREGEITHLQLEIGNLEKTRSIMAEELVKLTNQNDELEEKVKEIPKLRTQLRDLDQRYNTILQMYGEKAEEAEELRLDLEDVKNMYKTQIDELLRQSLS

SEQ ID NO: 328519 - protein, 1096 aa, Artificial Sequence
  derived and/or modified sequence
MSWFNASQLSSFAKQALSQAQKSIDRVLDIQEEEPSIWAETIPYGEPGISSPVSGGWDTSTWGLKSNTEPQSPPIASPKAITKPVRRTVVDESENFFSAFLSPTDVQTIQKSPVVSKPPAKSQRPEEEVKSSLHESLHIGQSRTPETTESQVKDSSLCVSGETLAAGTSSPKTEGKHEETVNKESDMKVPTVSLKVSESVIDVKTTMESISNTSTQSLTAETKDIALEPKEQKHEDRQSNTPSPPVSTFSSGTSTTSDIEVLDHESVISESSASSRQETTDSKSSLHLMQTSFQLLSASACPEYNRLDDFQKLTESCCSSDAFERIDSFSVQSLDSRSVSEINSDDELSGKGYALVPIIVNSSTPKSKTVESAEGKSEEVNETLVIPTEEAEMEESGRSATPVNCEQPDILVSSTPINEGQTVLDKVAEQCEPAESQPEALSEKEDVCKVTLTVEFLNEKLEKREAQLLSLSKEKALLEEAFDNLKDEMFRVKEESSSISSLKDEFTQRIAEAEKKVQLACKERDAAKKEIKNIKEELATRLNSSETADLLKEKDEQIRGLMEEGEKLSKQQLHNSNIIKKLRAKDKENENMVAKLNKKVKELEEELQHLKQVLDGKEEVEKQHRENIKKLNSMVERQEKDLGRLQVDMDELEEKNRSIQAALDSAYKELTDLHKANAAKDSEAQEAALSREMKAKEELSAALEKAQEEARQQQETLAIQVGDLRLALQRTEQAAARKEDYLRHEIGELQQRLQEAENRNQELSQSVSSTTRPLLRQIENLQATLGSQTSSWEKLEKNLSDRLGESQTLLAAAVERERAATEELLANKIQMSSMESQNSLLRQENSRFQAQLESEKNRLCKLEDENNRYQVELENLKDEYVRTLEETRKEKTLLNSQLEMERMKVEQERKKAIFTQETIKEKERKPFSVSSTPTMSRSSSISGVDMAGLQTSFLSQDESHDHSFGPMPISANGSNLYDAVRMGAGSSIIENLQSQLKLREGEITHLQLEIGNLEKTRSIMAEELVKLTNQNDELEEKVKEIPKLRTQLRDLDQRYNTILQMYGEKAEEAEELRLDLEDVKNMYKTQIDELLRQSLS

SEQ ID NO: 328520 - DNA, 3030 bp, Artificial Sequence
  derived and/or modified sequence
atgagctggttcaacgccagccagctgagcagcttcgccaagcaggccctgagccaggcccagaagagcatcgacagagtgctggacatccaggaggaggagcccagcatctgggccgagaccatcccctacggcgagcccggcatcagcagccccgtgagcggcggctgggacaccagcacctggggcctgaagagcaacaccgagccccagagcccccccatcgccagccccaaggccatcaccaagcccgtgagaagaaccgtggtggacgagagcgagaacttcttcagcgccttcctgagccccaccgtgagcctgaaggtgagcgagagcgtgatcgacgtgaagaccaccatggagagcatcagcaacaccagcacccagagcctgaccgccgagaccaaggacatcgccctggagcccaaggagcagaagcacgaggacagacagagcaacacccccagcccccccgtgagcaccttcagcagcggcaccagcaccaccagcgacatcgaggtgctggaccacgagagcgtgatcagcgagagcagcgccagcagcagacaggagaccaccgacagcaagagcagcctgcacctgatgcagaccagcttccagctgctgagcgccagcgcctgccccgagtacaacagactggacgacttccagaagctgaccgagagctgctgcagcagcgacgccttcgagagaatcgacagcttcagcgtgcagagcctggacagcagaagcgtgagcgagatcaacagcgacgacgagctgagcggcaagggctacgccctggtgcccatcatcgtgaacagcagcacccccaagagcaagaccgtggagagcgccgagggcaagagcgaggaggtgaacgagaccctggtgatccccaccgaggaggccgagatggaggagagcggcagaagcgccacccccgtgaactgcgagcagcccgacatcctggtgagcagcacccccatcaacgagggccagaccgtgctggacaaggtggccgagcagtgcgagcccgccgagagccagcccgaggccctgagcgagaaggaggacgtgtgcaaggtgaccctgaccgtggagttcctgaacgagaagctggagaagagagaggcccagctgctgagcctgagcaaggagaaggccctgctggaggaggccttcgacaacctgaaggacgagatgttcagagtgaaggaggagagcagcagcatcagcagcctgaaggacgagttcacccagagaatcgccgaggccgagaagaaggtgcagctggcctgcaaggagagagacgccgccaagaaggagatcaagaacatcaaggaggagctggccaccagactgaacagcagcgagaccgccgacctgctgaaggagaaggacgagcagatcagaggcctgatggaggagggcgagaagctgagcaagcagcagctgcacaacagcaacatcatcaagaagctgagagccaaggacaaggagaacgagaacatggtggccaagctgaacaagaaggtgaaggagctggaggaggagctgcagcacctgaagcaggtgctggacggcaaggaggaggtggagaagcagcacagagagaacatcaagaagctgaacagcatggtggagagacaggagaaggacctgggcagactgcaggtggacatggacgagctggaggagaagaacagaagcatccaggccgccctggacagcgcctacaaggagctgaccgacctgcacaaggccaacgccgccaaggacagcgaggcccaggaggccgccctgagcagagagatgaaggccaaggaggagctgagcgccgccctggagaaggcccaggaggaggccagacagcagcaggagaccctggccatccaggtgggcgacctgagactggccctgcagagaaccgagcaggccgccgccagaaaggaggactacctgagacacgagatcggcgagctgcagcagagactgcaggaggccgagaacagaaaccaggagctgagccagagcgtgagcagcaccaccagacccctgctgagacagatcgagaacctgcaggccaccctgggcagccagaccagcagctgggagaagctggagaagaacctgagcgacagactgggcgagagccagaccctgctggccgccgccgtggagagagagagagccgccaccgaggagctgctggccaacaagatccagatgagcagcatggagagccagaacagcctgctgagacaggagaacagcagattccaggcccagctggagagcgagaagaacagactgtgcaagctggaggacgagaacaacagataccaggtggagctggagaacctgaaggacgagtacgtgagaaccctggaggagaccagaaaggagaagaccctgctgaacagccagctggagatggagagaatgaaggtggagcaggagagaaagaaggccatcttcacccaggagaccatcaaggagaaggagagaaagcccttcagcgtgagcagcacccccaccatgagcagaagcagcagcatcagcggcgtggacatggccggcctgcagaccagcttcctgagccaggacgagagccacgaccacagcttcggccccatgcccatcagcgccaacggcagcaacctgtacgacgccgtgagaatgggcgccggcagcagcatcatcgagaacctgcagagccagctgaagctgagagagggcgagatcacccacctgcagctggagatcggcaacctggagaagaccagaagcatcatggccgaggagctggtgaagctgaccaaccagaacgacgagctggaggagaaggtgaaggagatccccaagctgagaacccagctgagagacctggaccagagatacaacaccatcctgcagatgtacggcgagaaggccgaggaggccgaggagctgagactggacctggaggacgtgaagaacatgtacaagacccagatcgacgagctgctgagacagagcctgagctag

SEQ ID NO: 328521 - DNA, 3291 bp, Artificial Sequence
  derived and/or modified sequence
atgagctggttcaacgccagccagctgagcagcttcgccaagcaggccctgagccaggcccagaagagcatcgacagagtgctggacatccaggaggaggagcccagcatctgggccgagaccatcccctacggcgagcccggcatcagcagccccgtgagcggcggctgggacaccagcacctggggcctgaagagcaacaccgagccccagagcccccccatcgccagccccaaggccatcaccaagcccgtgagaagaaccgtggtggacgagagcgagaacttcttcagcgccttcctgagccccaccgacgtgcagaccatccagaagagccccgtggtgagcaagccccccgccaagagccagagacccgaggaggaggtgaagagcagcctgcacgagagcctgcacatcggccagagcagaacccccgagaccaccgagagccaggtgaaggacagcagcctgtgcgtgagcggcgagaccctggccgccggcaccagcagccccaagaccgagggcaagcacgaggagaccgtgaacaaggagagcgacatgaaggtgcccaccgtgagcctgaaggtgagcgagagcgtgatcgacgtgaagaccaccatggagagcatcagcaacaccagcacccagagcctgaccgccgagaccaaggacatcgccctggagcccaaggagcagaagcacgaggacagacagagcaacacccccagcccccccgtgagcaccttcagcagcggcaccagcaccaccagcgacatcgaggtgctggaccacgagagcgtgatcagcgagagcagcgccagcagcagacaggagaccaccgacagcaagagcagcctgcacctgatgcagaccagcttccagctgctgagcgccagcgcctgccccgagtacaacagactggacgacttccagaagctgaccgagagctgctgcagcagcgacgccttcgagagaatcgacagcttcagcgtgcagagcctggacagcagaagcgtgagcgagatcaacagcgacgacgagctgagcggcaagggctacgccctggtgcccatcatcgtgaacagcagcacccccaagagcaagaccgtggagagcgccgagggcaagagcgaggaggtgaacgagaccctggtgatccccaccgaggaggccgagatggaggagagcggcagaagcgccacccccgtgaactgcgagcagcccgacatcctggtgagcagcacccccatcaacgagggccagaccgtgctggacaaggtggccgagcagtgcgagcccgccgagagccagcccgaggccctgagcgagaaggaggacgtgtgcaaggtgaccctgaccgtggagttcctgaacgagaagctggagaagagagaggcccagctgctgagcctgagcaaggagaaggccctgctggaggaggccttcgacaacctgaaggacgagatgttcagagtgaaggaggagagcagcagcatcagcagcctgaaggacgagttcacccagagaatcgccgaggccgagaagaaggtgcagctggcctgcaaggagagagacgccgccaagaaggagatcaagaacatcaaggaggagctggccaccagactgaacagcagcgagaccgccgacctgctgaaggagaaggacgagcagatcagaggcctgatggaggagggcgagaagctgagcaagcagcagctgcacaacagcaacatcatcaagaagctgagagccaaggacaaggagaacgagaacatggtggccaagctgaacaagaaggtgaaggagctggaggaggagctgcagcacctgaagcaggtgctggacggcaaggaggaggtggagaagcagcacagagagaacatcaagaagctgaacagcatggtggagagacaggagaaggacctgggcagactgcaggtggacatggacgagctggaggagaagaacagaagcatccaggccgccctggacagcgcctacaaggagctgaccgacctgcacaaggccaacgccgccaaggacagcgaggcccaggaggccgccctgagcagagagatgaaggccaaggaggagctgagcgccgccctggagaaggcccaggaggaggccagacagcagcaggagaccctggccatccaggtgggcgacctgagactggccctgcagagaaccgagcaggccgccgccagaaaggaggactacctgagacacgagatcggcgagctgcagcagagactgcaggaggccgagaacagaaaccaggagctgagccagagcgtgagcagcaccaccagacccctgctgagacagatcgagaacctgcaggccaccctgggcagccagaccagcagctgggagaagctggagaagaacctgagcgacagactgggcgagagccagaccctgctggccgccgccgtggagagagagagagccgccaccgaggagctgctggccaacaagatccagatgagcagcatggagagccagaacagcctgctgagacaggagaacagcagattccaggcccagctggagagcgagaagaacagactgtgcaagctggaggacgagaacaacagataccaggtggagctggagaacctgaaggacgagtacgtgagaaccctggaggagaccagaaaggagaagaccctgctgaacagccagctggagatggagagaatgaaggtggagcaggagagaaagaaggccatcttcacccaggagaccatcaaggagaaggagagaaagcccttcagcgtgagcagcacccccaccatgagcagaagcagcagcatcagcggcgtggacatggccggcctgcagaccagcttcctgagccaggacgagagccacgaccacagcttcggccccatgcccatcagcgccaacggcagcaacctgtacgacgccgtgagaatgggcgccggcagcagcatcatcgagaacctgcagagccagctgaagctgagagagggcgagatcacccacctgcagctggagatcggcaacctggagaagaccagaagcatcatggccgaggagctggtgaagctgaccaaccagaacgacgagctggaggagaaggtgaaggagatccccaagctgagaacccagctgagagacctggaccagagatacaacaccatcctgcagatgtacggcgagaaggccgaggaggccgaggagctgagactggacctggaggacgtgaagaacatgtacaagacccagatcgacgagctgctgagacagagcctgagctag

SEQ ID NO: 328522 - DNA, 3030 bp, Artificial Sequence
  derived and/or modified sequence
atgtcatggtttaacgcctctcaactgagctccttcgccaaacaggctctgagtcaggctcagaagagcatagaccgcgttttggacatccaggaggaagaaccttctatctgggcggagaccatcccctacggagaaccgggaatttcatccccggtgagtgggggatgggacacgtcaacttggggtttaaaatcaaatactgagccgcagtctccccctattgcctctccgaaggctattaccaagcctgtgcgccgaacagttgtagacgagagcgaaaatttcttttctgcctttctgtctccaacagtgtccctgaaggtcagcgaatccgtcattgacgtgaagactactatggaatcaattagcaataccagcacccaaagccttactgcagagactaaggatatcgcactggagccaaaggaacagaaacacgaggacaggcaaagcaacacgcccagcccgcccgtgagcacattctctagtggaacttcaacaacatcagacatcgaggtgctggaccatgagagtgtgatctctgagtccagcgctagcagtcgacaggaaactactgatagcaaatctagcttacatctgatgcagacatcatttcagttgttgagcgctagcgcctgccccgagtataataggttggacgacttccaaaaactcaccgaatcttgctgtagcagcgatgccttcgaacggattgacagcttcagcgtgcaatccctggattcgagaagcgtgtcagaaattaactcagacgacgagctgtctggaaaggggtacgccctggtgccaattatcgttaatagctctacgcccaagagcaagactgtggaatccgctgagggcaagtccgaagaagtgaacgagactctggtcatacctaccgaggaagctgaaatggaggaatccgggcggtccgctactcctgtgaactgcgaacagccagacattctagtgagctcgacaccaattaatgagggtcaaacggtgcttgataaggtggctgagcaatgtgaacctgccgaatcacagccggaggcgctgtcagagaaggaagatgtctgcaaggtgactcttaccgtcgaattcttaaacgaaaagctagaaaaaagagaggcccagctgcttagcctatctaaagagaaagcccttctggaagaggcatttgacaacctcaaggatgaaatgttcagggtgaaagaagaaagttcctccatctcatcccttaaagatgagtttacacagaggattgcagaggccgagaaaaaagtacagctggcctgcaaggaacgcgacgccgcgaagaaggaaattaagaacatcaaagaggagcttgccacaagattgaacagttccgagactgccgatctgctgaaggagaaggacgaacagatcagggggctcatggaggagggcgagaagttgagcaaacagcagctgcacaactctaacatcattaaaaagctgagagcaaaggacaaggaaaacgagaacatggtggctaagcttaataagaaggtgaaggagctggaagaggaactgcaacatctgaaacaagtcctagacggaaaggaagaagtcgaaaagcagcacagggagaatataaaaaaactgaacagcatggttgagagacaggagaaagacctgggtcgacttcaggtcgatatggatgagctggaggagaaaaacagatccatccaggcagcgcttgacagcgcctacaaggaacttaccgacctgcacaaggctaatgctgcgaaggatagcgaagctcaggaagccgctctttccagagagatgaaggcgaaagaagaactttctgcagcacttgagaaggcccaagaggaagccaggcagcagcaggaaactttggctatccaggtgggagacttgaggctggcattacagcggactgagcaagctgccgcccgcaaggaagactacctgcgacatgaaatcggagagttgcagcaacggctccaggaggctgagaatcggaaccaggaattgtcacagtccgtgtcctcaaccaccaggccactgttacgccagatcgaaaacttacaagcaactttggggtctcagacaagtagttgggaaaaactggaaaaaaatctctccgaccggttgggcgagagccagaccctgctggccgccgcagtggagcgggaaagggccgctaccgaggagctgctcgctaacaaaatccagatgtcctccatggaatcacagaatagcctgttgaggcaagagaatagccgtttccaagcccagctcgagtctgaaaagaacaggctgtgtaagcttgaagacgaaaataatcgttaccaggtggaattggagaatctgaaggacgagtatgtgagaacactagaggagacacggaaggagaagactctgctgaattctcagcttgaaatggagcgaatgaaggtcgagcaggagaggaagaaagccatattcacccaggaaacgattaaggaaaaggagagaaaacccttcagcgtctccagtacgccaactatgagcagatcctcatccatatctggtgtggacatggcgggtcttcaaacctcctttctctcccaagacgaatcacacgatcactcattcggaccaatgcctatttctgctaacgggtccaatctgtacgatgcagtgcgaatgggtgcgggaagttccataattgaaaacctgcagagccagttaaagctgcgggagggggaaataacccacttgcagctcgagataggaaatctggagaagactcggtctatcatggccgaggagctcgttaaactgactaatcaaaacgacgagcttgaagagaaggtgaaagaaattccaaaactacggacacagctgagggaccttgatcaaaggtacaacactatcctgcagatgtacggcgagaaagccgaggaggccgaggaactgcgtctggacttggaggatgtaaagaatatgtataagacgcagatcgacgaactcttgcgacagagcctctcctag

SEQ ID NO: 328523 - DNA, 3291 bp, Artificial Sequence
  derived and/or modified sequence
atgtcttggtttaacgcatcccagctgagctcgttcgcgaaacaggccctgtcacaggcacagaagtcaatcgatcgggtgctggatattcaagaggaagaaccctcgatatgggcagaaacaatcccttatggagaaccagggattagttcccctgtctcaggcgggtgggatacaagcacatggggactgaagtccaatactgaaccacagagccccccaattgccagcccaaaagccataaccaagcctgttcggaggactgtcgtggacgagtccgagaacttcttctcagcatttcttagccctactgacgtacagaccattcagaaatcgccagtggtatctaaaccgcccgctaaatcccaacgacccgaggaggaggtgaagtcttccctgcatgaaagcctacacattggtcagtcccggacccccgaaacaactgaatcccaagtgaaggatagtagtctgtgcgtgagcggggagactctcgcagccggtacatctagccccaagacggagggcaaacacgaggaaacggtgaacaaggagtctgatatgaaagtgcccaccgtcagtttaaaggtatctgaatctgtgattgacgttaagacaacaatggaaagcatttcgaacacgagtacacagtcactgactgcggagacgaaggatatcgcccttgaacctaaagagcagaagcacgaagacaggcaatctaatacaccttccccaccagtgtcaactttctcaagcgggacttcaacaaccagtgacatcgaggttctggatcacgagtccgttatatccgagtcttctgcgagttctcggcaggaaacaaccgatagcaaaagcagcctacatcttatgcaaacgtcttttcagctcctctcagctagcgcctgccccgaatacaataggctggatgatttccagaagttaactgaaagctgctgctcttccgacgcctttgaaaggattgattccttcagtgtccagtccctggattctaggtccgtgagtgagatcaattccgatgacgaattaagcgggaagggctatgctttggtgccaattattgtaaactcgtcaacccccaaatcaaagacagtcgagtcagccgagggcaagtccgaggaggtaaacgaaactctggtaatccccacagaggaagccgagatggaggaatccggaaggtccgcaacacctgtcaactgcgaacaaccggatatactcgtaagctccacccctataaacgagggccagacggtactggataaggttgcagagcaatgtgaacctgccgagtcccaacccgaggctctgtctgagaaagaggatgtgtgcaaagtgacacttacagtggagttcttgaacgagaaactggaaaagagagaagcccagctcctgtccctgtcgaaggaaaaggccctattagaggaggccttcgacaacctgaaagacgaaatgttccgcgtgaaagaggagagttcaagcataagcagcctgaaagatgaatttactcagcgaatcgccgaggcggaaaaaaaggttcaactggcttgcaaagagcgggacgccgcaaaaaaggaaataaaaaatataaaagaggaactagctacacggttaaattcctctgagactgcggatcttttgaaagagaaggacgagcagattagggggcttatggaagaaggggagaaactctctaagcagcaactgcacaactccaacatcataaagaagctcagggcgaaagataaggagaacgaaaacatggtcgctaagctcaacaagaaagtgaaggagttagaggaagagctgcaacacttgaaacaggtgctagatggcaaggaagaagtggaaaagcaacaccgcgagaacatcaaaaagctgaatagcatggtcgaaaggcaggagaaggacctgggtcgtctgcaggtggatatggacgaattagaagagaaaaataggagcatccaagcagcactggatagcgcctacaaggaattgactgatcttcacaaggccaacgccgcgaaagatagtgaggctcaggaggcagcactttcgcgggaaatgaaggccaaggaggaactcagcgctgccctcgagaaggcccaggaagaggcaagacagcagcaagagacactagccattcaggtgggcgacctaagattagcgctccagcgcacagagcaggcggcagcaaggaaggaggactatctgcgccacgaaattggtgagctgcaacagaggctgcaggaggcggagaacagaaaccaggagttatcccaaagtgtgtcaagcacaacgagaccactgttgaggcagatcgagaatttacaagccacattgggatctcaaaccagttcgtgggagaagctagagaaaaacctttctgatagacttggcgaaagccaaacccttctggccgctgcagtggagagagagcgagccgccactgaagagctgctcgccaacaagatccagatgagtagcatggagtcacaaaacagcctcctcagacaggagaattcacggttccaagctcagttggaaagcgaaaagaaccgcctttgcaaactggaggatgagaacaataggtaccaggtggaattagaaaacctgaaagacgagtacgtacggacattagaagagaccagaaaagagaaaactctgctgaattctcaattggaaatggagaggatgaaggtcgaacaggagagaaaaaaggctatcttcacacaagagactattaaagagaaggaacgcaagcctttcagcgtgtccagcacccccaccatgtcacgcagctcttctatttccggcgtcgatatggctggactccagacatccttcctgagccaggatgaatcccacgaccatagcttcggacctatgccgatttctgccaatggtagtaatctttatgatgccgtgaggatgggcgccggtagctctattatcgaaaatctgcaatcccagctcaagcttcgggaaggagaaattacacaccttcagctggaaataggaaatctggagaagaccagaagtattatggcagaagagttggtcaaactcacaaaccaaaatgacgagctggaagagaaggtcaaggagattcccaagctgcggactcaattacgcgacctggatcaacggtacaacaccatactgcagatgtacggtgaaaaagccgaggaggcagaggagttgcgcttagaccttgaggacgttaaaaacatgtacaagacccaaatagatgagctgctgagacagtcactatcttag

SEQ ID NO: 328524 - DNA, 3030 bp, Artificial Sequence
  derived and/or modified sequence
atgtcctggttcaatgccagccagctgagcagctttgccaagcaggccctgagccaggcccagaagagcattgacagagtgctggacatccaggaggaggagcccagcatctgggccgagaccatcccctacggggagcccggcatcagcagccctgtgtctgggggctgggacaccagcacctggggcctgaagagcaacacagagccccagagcccccccatcgccagccccaaggccatcaccaagcctgtgcggaggacagtggtggatgaaagtgagaacttcttcagcgccttcctgagccccaccgtgtccctgaaggtgtctgagagcgtgattgatgtgaagaccaccatggagagcatcagcaacaccagcacccagagcctgacagctgagaccaaggacatcgccctggagcccaaggagcagaagcatgaggaccggcagagcaacacccccagcccccctgtgtccaccttcagcagcggcaccagcaccaccagtgacatcgaggtgctggaccatgaatctgtcatcagcgagagcagcgccagcagccggcaggagaccacagacagcaagagcagcctgcacctgatgcagaccagcttccagctgctgagcgccagcgcctgcccagagtacaaccggctggatgacttccagaagctgacagagagctgctgcagcagtgatgcctttgaaagaattgacagcttctctgtgcagagcctggacagccgctctgtgtctgagatcaacagtgatgatgagctgagcggcaagggctacgccctggtgcccatcatcgtgaacagcagcacccccaagagcaagacagtggagagcgctgagggcaagtctgaggaggtgaatgagaccctggtgatccccacagaggaggccgagatggaggagagcggccgcagcgccacccctgtgaactgtgagcagcctgacatcctggtgagcagcacccccatcaatgaaggccagacagtgctggacaaggtggccgagcagtgtgagcctgctgagagccagcctgaggccctgtctgagaaggaggatgtgtgcaaggtgaccctgactgtggagttcctgaatgagaagctggagaagcgggaggcccagctgctgagcctgagcaaggagaaggccctgctggaggaggcctttgacaacctgaaggatgagatgttccgggtgaaggaggagagcagcagcatcagcagcctgaaggatgagttcacccagagaattgctgaggccgagaagaaggtgcagctggcctgcaaggagagagatgctgccaagaaggagatcaagaacatcaaggaggagctggccacccggctgaacagcagcgagacagctgacctgctgaaggagaaggatgagcagatccggggcctgatggaggagggggagaagctgagcaagcagcagctgcacaacagcaacatcatcaagaagctgcgggccaaggacaaggaaaatgaaaacatggtggccaagctgaacaagaaggtgaaggagctggaggaggagctgcagcacctgaagcaggtgctggatggcaaggaggaggtggagaagcagcaccgggagaacatcaagaagctgaacagcatggtggagcggcaggagaaggacctgggccgcctgcaggtggacatggatgagctggaggagaagaacagaagcatccaggccgccctggacagcgcctacaaggagctgacagacctgcacaaggccaatgctgccaaggacagcgaggcccaggaggccgccctgagccgggagatgaaggccaaggaggagctgtctgctgccctggagaaggcccaggaggaggcccggcagcagcaggagaccctggccatccaggtgggggacctgcggctggccctgcagaggacagagcaggccgccgccaggaaggaggactacctgcggcatgaaattggagagctgcagcagaggctgcaggaggccgagaacagaaaccaggagctgagccagagcgtgagcagcaccacccggcccctgctgcggcagatcgagaacctgcaggccaccctgggcagccagaccagctcctgggagaagctggagaagaacctgagtgaccggctgggggagagccagaccctgctggccgctgctgtggagcgggagcgggccgccacagaggagctgctggccaacaagatccagatgagctccatggagagccagaacagcctgctgcggcaggagaacagccgcttccaggcccagctggagagcgagaagaaccggctgtgcaagctggaggatgagaacaaccgctaccaggtggagctggagaacctgaaggatgaatatgtgaggaccctggaggagaccaggaaggagaagaccctgctgaacagccagctggagatggagaggatgaaggtggagcaggagaggaagaaggccatcttcacccaggagaccatcaaggagaaggagaggaagcccttctctgtgagcagcacccccaccatgagccgcagcagcagcatctctggagtggacatggccggcctgcagaccagcttcctgagccaggatgagagccatgaccacagctttggccccatgcccatcagcgccaacggcagcaacctgtatgatgctgtgaggatgggcgccggcagcagcatcatcgagaacctgcagagccagctgaagctgcgggagggggagatcacccacctgcagctggagatcggcaacctggagaagaccaggagcatcatggccgaggagctggtgaagctgaccaaccagaatgatgagctggaggagaaggtgaaggagatccccaagctgcggacccagctgcgggacctggaccagcgctacaacaccatcctgcagatgtatggagagaaggccgaggaggccgaggagctgcggctggacctggaggatgtgaagaacatgtacaagacccagattgatgagctgctgcggcagagcctgtcctag

SEQ ID NO: 328525 - DNA, 3291 bp, Artificial Sequence
  derived and/or modified sequence
atgtcctggttcaatgccagccagctgagcagctttgccaagcaggccctgagccaggcccagaagagcattgacagagtgctggacatccaggaggaggagcccagcatctgggccgagaccatcccctacggggagcccggcatcagcagccctgtgtctgggggctgggacaccagcacctggggcctgaagagcaacacagagccccagagcccccccatcgccagccccaaggccatcaccaagcctgtgcggaggacagtggtggatgaaagtgagaacttcttcagcgccttcctgagccccacagatgtgcagaccatccagaagagccctgtggtgtccaagcccccagccaagagccagaggcctgaggaggaggtgaagagcagcctgcacgagagcctgcacatcggccagagcaggaccccagagaccacagagagccaggtgaaggacagcagcctgtgtgtgtctggagagaccctggccgccggcaccagcagccccaagacagagggcaagcatgaggagaccgtgaacaaggagagtgacatgaaggtgcccaccgtgtccctgaaggtgtctgagagcgtgattgatgtgaagaccaccatggagagcatcagcaacaccagcacccagagcctgacagctgagaccaaggacatcgccctggagcccaaggagcagaagcatgaagatcggcagagcaacacccccagcccccctgtgtccaccttcagcagcggcaccagcaccaccagtgacatcgaggtgctggaccacgagagcgtcatcagcgagagcagcgccagcagccggcaggagaccacagacagcaagagcagcctgcacctgatgcagaccagcttccagctgctgagcgccagcgcctgcccagagtacaaccggctggatgacttccagaagctgacagagagctgctgcagcagtgatgcctttgaaagaattgacagcttctctgtgcagagcctggacagccgctctgtgtctgagatcaacagtgatgatgagctgagcggcaagggctacgccctggtgcccatcatcgtgaacagcagcacccccaagagcaagacagtggagagcgctgagggcaagtctgaggaggtgaatgagaccctggtgatccccacagaggaggccgagatggaggagagcggccgcagcgccacccctgtgaactgtgagcagcctgacatcctggtgagcagcacccccatcaatgaaggccagacagtgctggacaaggtggccgagcagtgtgagcctgctgagagccagcctgaggccctgtctgagaaggaggatgtgtgcaaggtgaccctgactgtggagttcctgaatgagaagctggagaagcgggaggcccagctgctgagcctgagcaaggagaaggccctgctggaggaggcctttgacaacctgaaggatgagatgttccgggtgaaggaggagagcagcagcatcagcagcctgaaggatgagttcacccagagaattgctgaggccgagaagaaggtgcagctggcctgcaaggagagagatgctgccaagaaggagatcaagaacatcaaggaggagctggccacccggctgaacagcagcgagacagctgacctgctgaaggagaaggatgagcagatccggggcctgatggaggagggggagaagctgagcaagcagcagctgcacaacagcaacatcatcaagaagctgcgggccaaggacaaggaaaatgaaaacatggtggccaagctgaacaagaaggtgaaggagctggaggaggagctgcagcacctgaagcaggtgctggatggcaaggaggaggtggagaagcagcaccgggagaacatcaagaagctgaacagcatggtggagcggcaggagaaggacctgggccgcctgcaggtggacatggatgagctggaggagaagaacagaagcatccaggccgccctggacagcgcctacaaggagctgacagacctgcacaaggccaatgctgccaaggacagcgaggcccaggaggccgccctgagccgggagatgaaggccaaggaggagctgtctgctgccctggagaaggcccaggaggaggcccggcagcagcaggagaccctggccatccaggtgggggacctgcggctggccctgcagaggacagagcaggccgccgccaggaaagaagactacctgcggcatgagatcggggagctgcagcagaggctgcaggaggctgaaaatagaaaccaggagctgagccagagcgtgagcagcaccacccggcccctgctgcggcagatcgagaacctgcaggccaccctgggcagccagaccagctcctgggagaagctggagaagaacctgagtgaccggctgggggagagccagaccctgctggccgctgctgtggagcgggagagagctgccacagaggagctgctggccaacaagatccagatgagctccatggagagccagaacagcctgctgcggcaggagaacagccgcttccaggcccagctggagagcgagaagaaccggctgtgcaagctggaggatgagaacaaccgctaccaggtggagctggagaacctgaaggatgaatatgtgaggaccctggaggagaccaggaaggagaagaccctgctgaacagccagctggagatggagaggatgaaggtggagcaggagaggaagaaggccatcttcacccaggagaccatcaaggagaaggagaggaagcccttctctgtgagcagcacccccaccatgagccgcagcagcagcatcagcggcgtggacatggccggcctgcagaccagcttcctgagccaggatgagagccatgaccacagctttggccccatgcccatcagcgccaacggcagcaacctgtatgatgctgtgaggatgggcgccggcagcagcatcatcgagaacctgcagagccagctgaagctgcgggagggggagatcacccacctgcagctggagatcggcaacctggagaagaccaggagcatcatggccgaggagctggtgaagctgaccaaccagaatgatgagctggaggagaaggtgaaggagatccccaagctgcggacccagctgcgggacctggaccagcgctacaacaccatcctgcagatgtacggggagaaggccgaggaggccgaggagctgcggctggacctggaggatgtgaagaacatgtacaagacccagattgatgagctgctgcggcagagcctgtcctag

SEQ ID NO: 328526 - DNA, 3030 bp, Artificial Sequence
  derived and/or modified sequence
atgagctggttcaacgccagccagctgagcagcttcgccaagcaggctttgtctcaggcccaaaaatccatcgaccgcgttctggatattcaggaggaagagcctagcatctgggcagagaccatcccatatggcgaaccaggaatatcctctcccgtttccggtggatgggacacctccacctgggggttgaagagtaatactgaaccacagtctcctcccattgcgagccctaaggccattaccaagcccgtgagaaggaccgtggtggacgagtccgagaatttcttctctgcttttctatcccccaccgtgtccctcaaggtttccgaatcagtgattgatgtgaaaacaacgatggagtcaatctctaataccagtactcagtctctgactgccgagaccaaggacatagcgctcgaaccaaaggaacaaaaacatgaggaccgtcaaagcaacacaccctcaccgcctgtgtccaccttctcgtcaggcacgtctaccacaagcgatatcgaggttctggatcacgaatctgtcatcagcgagtcctccgcgagcagccggcaggaaacaacggattcaaaaagttcactgcatctgatgcagaccagtttccaacttctgtctgcatctgcctgccccgagtataaccggctcgacgattttcagaaactgactgagtcttgttgttcctcagacgccttcgagcggattgattcctttagcgtgcagagcttggatagccgctccgtgtctgagattaactcagacgacgagctatcaggtaaagggtacgccctggtgcctattattgttaacagcagcaccccgaaatccaagactgtggagtccgcagagggtaagagcgaggaagtaaacgaaacccttgtgattcccacagaggaggcagaaatggaagaatctggacggtccgccacaccagttaattgcgaacagccggatatcttagtttcatcgactccaatcaatgagggtcagaccgtgttagacaaggtggcggagcagtgtgaacccgccgagagccagcctgaagccctctccgaaaaagaggatgtgtgtaaggttactctgacagtcgagtttctgaacgagaagctagaaaaacgggaagcgcagctgctctctctgtccaaggagaaggcattgctggaggaggctttcgacaatttgaaagatgagatgtttcgagtcaaggaagaaagtagtagcatttcctcgctgaaggacgaattcacacagcgcatcgctgaggccgagaaaaaggtccagcttgcctgtaaggagagggatgctgccaagaaggaaatcaaaaacattaaagaggagctggctacccgtctgaactcatccgagaccgcagatcttttaaaagaaaaagacgaacagatccgtggtttgatggaggaaggcgagaaattgtccaaacagcagcttcacaactcaaacatcatcaaaaaactgcgggccaaggataaggaaaatgagaacatggtggccaagttaaataagaaagtcaaagaacttgaagaggagttacagcatctgaagcaggtgctggatggcaaagaggaagtagagaagcagcaccgggagaacatcaagaagcttaattcaatggtcgaacgccaggaaaaggatttgggacgcttgcaggtagacatggacgaattggaggaaaaaaaccggtcaatccaggcggccctggactctgcctacaaggaactaacagacctacataaagcaaatgccgcaaaggactctgaagcacaggaagccgcactctcgcgggagatgaaggccaaggaagagctgtctgccgcacttgaaaaggcacaggaggaagcccgccagcagcaggagaccttagccattcaggtgggggacctgaggctcgccttacagcgcacagaacaggccgcagcaagaaaagaggattacctacgtcacgagattggagagcttcagcagcgccttcaagaggcggaaaacaggaaccaggagctttctcagagcgtgagttctaccacacgccctcttctgcgccagatcgagaacctgcaggccaccctgggaagccaaacttcaagttgggaaaagttggaaaagaacctctctgaccggctgggtgagtcccagacattgttagctgccgccgtggagcgagaaagggcagccacggaggagctgctggccaataagatccagatgagctcgatggaatcccagaattctctcttacgtcaggagaacagtcgcttccaagctcaattggaatccgagaaaaataggttgtgcaaactcgaggatgagaataaccgctaccaggtcgagctcgagaatcttaaagatgaatatgtcagaacgctagaggaaacgcggaaagagaaaacattactgaactctcagctcgaaatggagcgaatgaaggtggagcaggaaaggaaaaaagccatattcacccaggaaacaatcaaggagaaggagagaaagcctttctccgtgagcagtacccctacaatgtcccgcagctcctccatctctggtgttgatatggcaggcctgcaaacttcgtttctaagccaggatgagtctcacgaccattcattcgggcctatgcccattagcgccaacggcagtaatctttacgatgccgtgagaatgggcgctggctcaagcataatcgagaatttgcagtctcaactaaaactgcgcgagggagaaatcacccaccttcagctggaaatcgggaacctcgagaaaacaaggagcatcatggcggaagagctggtcaagcttacaaaccaaaacgacgaactggaagagaaagtcaaagaaattccgaaacttcggacccagctccgtgaccttgatcagcgatacaacactattctgcaaatgtatggagaaaaggccgaggaggccgaggagcttcggttagatctagaggatgtgaagaatatgtataagacacagatcgatgagcttctgcgccagtccctgtcttag

SEQ ID NO: 328527 - DNA, 3291 bp, Artificial Sequence
  derived and/or modified sequence
atgagctggttcaacgccagccagctgagcagcttcgccaagcaggccttgtcacaggctcagaaatccattgatagggtgctcgatattcaggaagaggaaccctctatatgggctgaaacaatcccttacggcgagcctggcatttcctctccggtgagtggggggtgggacactagcacttggggtctgaagtccaacacggaaccccagtccccaccaattgcatcccctaaagcgatcaccaaacccgttcggaggacggtggtggacgagtctgagaacttttttagcgcatttttgagccctactgacgtgcaaaccatacagaagagccccgtggtcagtaaaccccccgccaaaagccaacggcccgaagaggaagtgaaatcatcactccatgagagcctgcacattggccagtctaggactcccgagactactgaaagccaggtgaaagattcttctctgtgcgtgtccggagagaccttggccgccggtacatcaagccccaagactgagggcaagcacgaagaaacagtgaataaggaaagcgatatgaaagtgccaactgtttcacttaaagtatccgaatctgtcatcgatgttaagaccaccatggaatccatctcaaatacctccactcaatctctgacagctgaaactaaagatatcgccctggaacctaaagagcagaagcacgaggacaggcagtcaaacactccctcgcctccggtgtccacattctcttccggcacgtctacaacatcagatattgaggttctagatcatgaatcagttattagcgagtcatcagcttctagccggcaggagacaaccgatagtaaaagtagtctccacctgatgcaaacgagttttcaattactgagcgcatcggcgtgcccggagtataaccgcctggacgatttccagaaactgaccgaaagctgctgtagttctgatgcgttcgaacggatcgacagtttttcggtgcagagtctggatagcaggtctgtgtctgagattaactcagatgacgaactgtctggtaagggctacgcattggtcccaatcatcgtaaattctagcactcctaagtcaaagacagtggaaagtgccgagggcaaaagtgaagaagtgaatgaaacccttgtgatcccaacagaagaggctgagatggaagagagcggacgcagtgcgactcctgtaaattgcgagcagcccgatatcttggtgtcttcgacacccatcaatgaaggtcagacagtgttggacaaggtggccgagcaatgcgaaccggccgagagccagcccgaggcactgagcgagaaagaggatgtgtgcaaggtcactctgaccgtggaattcctgaacgagaagctggagaagcgcgaagcccagctcctgtctctaagtaaggagaaggctctgcttgaggaggcatttgataacctcaaggatgagatgtttcgcgtaaaagaggagagtagctcaattagttctctgaaggacgaattcacgcaacgcatcgctgaggccgagaagaaggtccagcttgcttgcaaagagcgagatgctgcaaaaaaagagattaaaaatataaaagaggagctggctactaggctcaactcaagcgaaacagctgaccttctcaaagagaaggatgagcagattaggggcctgatggaggagggggagaaattaagcaagcagcaactacataattccaacatcataaagaaactgcgggccaaggataaagaaaatgagaacatggttgccaaactgaataaaaaagtcaaagaattagaggaggagcttcagcacttaaagcaggtgctggatggcaaggaggaggttgagaaacaacatagagagaatatcaaaaagttgaacagtatggttgaaagacaggagaaagacctgggacgactgcaggttgacatggatgaactggaggagaaaaatcgatcaatccaggctgccctggactccgcctacaaggagctaaccgacttacacaaggctaacgctgccaaagattctgaggcacaagaagcagcactgagcagggagatgaaagcaaaagaggaactgtccgccgcactggaaaaagcccaagaagaggctaggcagcaacaagaaaccttagcgatacaggtgggagacctaaggctggcattgcagcgaacagagcaggcagcagccagaaaggaggactacctaaggcatgaaattggcgagctgcagcagcgactgcaagaagccgaaaataggaaccaggaactgtcccagagcgttagctctactactcgacctcttctgagacagatcgaaaacctgcaggccaccctgggaagccagacaagctcctgggaaaaactggaaaagaatctcagcgacagacttggagaaagccaaaccttactggcagcagctgtggagagagagagggcggcaactgaagaactgctggccaataagatccagatgtcaagtatggaatcccagaatagcttgcttcggcaggaaaatagtcgcttccaggcccagttggaaagcgagaaaaacagactgtgtaagctagaggatgagaataaccggtaccaggtggaactcgagaacttgaaggacgaatatgtgagaacactggaggagacaagaaaagaaaagactctgctgaacagtcagctggaaatggagcgcatgaaggtggaacaggagaggaagaaggcaattttcacccaggaaacaattaaagagaaggaaagaaaacctttctccgtgagctcaacgccgactatgtcaaggtcatcctcgatctccggcgttgatatggctggtctgcagacatcctttttgagccaggacgagtcgcatgatcattcatttgggccaatgcccatatccgctaatgggagcaacctatatgacgcagtccggatgggcgccggcagttccatcattgagaatctgcaatcacagctgaagctgcgggaaggagaaatcacccatctgcagcttgaaatcggcaatctcgagaaaaccaggagcatcatggccgaggagctggtcaagttaacgaaccaaaacgacgaactcgaggagaaggtaaaggagattccaaaactgcgaactcaactgcgagacttggatcaacgctacaacacaattctgcagatgtatggcgaaaaggctgaagaagcggaagaactgaggctcgatttggaagatgtaaaaaacatgtataagacccaaatcgacgaactcctgcgacaatccctaagctag

SEQ ID NO: 328528 - DNA, 3030 bp, Artificial Sequence
  derived and/or modified sequence
atgagctggtttaatgccagccagctcagctcattcgcaaagcaggcactaagccaggcccagaaatccatcgatagagttcttgatatccaggaggaggagccatccatctgggccgagaccatcccctacggtgagcccggaatctctagccccgtgtctggaggttgggatacatcaacctgggggttgaaatctaacactgaaccacagtctcccccaattgcctcacctaaagccattacaaaacccgtgcgtcgtactgtcgtagacgaatccgagaactttttcagtgctttcttgagccccaccgtctccctgaaggtgagcgagagcgttatcgatgtaaagaccactatggaatctatatcaaacacatctactcaaagtttgaccgcggagacaaaggatatagctctcgaaccaaaagagcagaaacacgaagacagacagtccaacacaccaagtcccccagtaagcacattttcaagcggaacatcgacaacaagtgatatagaagtgcttgatcacgagtccgttattagtgagtcctccgccagctctcgccaggagactacagattctaagtcttccctccatctcatgcaaacctcatttcagcttttaagcgcctccgcctgtccagagtacaaccggctggacgatttccagaaactgacggaaagctgctgttccagcgacgctttcgagcgcatagattccttttctgtacaaagcctcgattcgagaagtgtgtccgagatcaacagcgacgatgaattgtccggtaaagggtatgcgctcgtgccaatcatcgtgaacagtagcacaccgaagagtaagaccgtggaaagcgccgaagggaagtctgaggaggtgaacgaaactcttgtcatccctacggaagaagctgaaatggaagagtcaggaaggtcagccactccagtgaactgtgaacagcccgacatactggtgagcagcacccccattaatgaaggacaaacagttcttgataaggtggcagagcagtgtgagcccgctgagtctcaacccgaggccctttctgaaaaggaggatgtctgtaaagtgactctaaccgtcgaatttctgaatgaaaaattagagaagcgggaagctcagttgttatccctttccaaagagaaagcattactcgaagaggctttcgataatctaaaagacgaaatgttcagagtgaaagaggaatcttcaagcatcagcagtttgaaggacgaattcacacagcgcattgccgaggcagagaagaaggtacagcttgcatgtaaggaaagggacgcagcaaagaaggaaatcaaaaacattaaggaagaattggctacccgtctgaactcatcagagactgccgacctgctgaaagaaaaggacgaacaaattagaggcttaatggaggaaggagagaaactgtcaaagcagcagctgcataattcaaatatcatcaagaaattgcgggctaaggacaaggaaaacgaaaacatggtggccaaattgaataagaaggttaaggaattggaggaagaattgcagcatctgaagcaggtgctggatggcaaagaggaggtcgaaaagcaacacagagagaatattaaaaagctgaactctatggtagaacggcaggagaaggacctgggacgattgcaagttgacatggatgagcttgaagaaaagaatcgatccattcaggccgcactcgactcagcatacaaagagcttactgatcttcacaaggccaacgctgccaaagacagcgaggcacaggaagcagcactcagccgggagatgaaggcaaaagaggaattgtccgccgcactggagaaggcccaagaagaggctcggcagcagcaggaaacactggccatccaggtcggagacctgcgcttggccctgcaacggaccgaacaggcggcagcccgaaaggaggattatctccggcacgaaattggcgaattacagcagcgactgcaggaagcggagaaccgaaaccaagaactgagccagtctgtctctagcactaccaggcccctgctccggcagattgaaaatctgcaggccactctggggagccagacgagctcttgggaaaaactggagaaaaatttgtcagataggctgggtgagtcccagactctattggctgctgctgtggagcgcgaacgcgctgcaacagaggagctcctcgcgaataaaatccagatgtccagtatggaaagccagaactccctcctgaggcaggagaacagcagattccaagcccagctcgagtctgaaaagaatcgcctctgcaaactggaggacgagaataatcgctatcaagtggaactggagaacctgaaggatgagtatgtgagaacactggaggaaactcggaaggagaaaacactgctaaactcacagctggagatggaaagaatgaaggtggagcaggaacggaagaaagccatcttcactcaggaaacgatcaaagaaaaagagcggaaaccattctctgttagttctactccaacaatgtctagatctagctcgatcagtggggtggatatggctggactgcaaacctcatttttgtctcaggacgaatcccatgatcatagctttgggcctatgcctatctccgctaacggcagcaacctctacgacgccgtgcggatgggggctggctcgagtatcatcgaaaatctccaaagtcagttaaaactgcgcgaaggtgagatcacccacttgcagctggagattggaaacctcgaaaagactcggtcaataatggccgaggagctggtgaaactcacgaaccagaacgatgaactcgaagagaaagtgaaagagattcctaagttacggacccagttgagagatctagatcagagatataacacgatcctacagatgtatggagagaaggcggaggaggctgaagaactgcgactagatttggaggatgtgaagaacatgtacaagacccagatcgacgagctcctgcggcagagtctctcatag

SEQ ID NO: 328529 - DNA, 3291 bp, Artificial Sequence
  derived and/or modified sequence
atgtcctggttcaacgcgagtcagttgtcctctttcgccaagcaggccctgtcccaggcccagaagtctatcgatagggttctcgacattcaggaggaggaacctagtatttgggcagaaactattccgtatggcgagccaggcatctccagccccgtcagtgggggatgggatacatctacatggggtctgaaaagcaatacagagccacagtctccacccatcgctagtccaaaagctatcaccaaacctgttcggagaaccgttgtggacgagagcgagaactttttctccgcgttcttaagcccaacagatgttcaaaccatccagaaaagccctgtagtatccaagccaccagcgaagagccagaggcccgaagaagaagttaagtctagcctgcacgaatctcttcacatcggacagagccgcacacctgagactactgagtctcaggtaaaagattcctctctctgcgtgtccggagaaactttggcagctggcacatccagccctaagaccgagggcaagcacgaagaaactgttaacaaggaaagcgatatgaaagtaccaaccgtgtctctaaaagtgagcgagtcagtaatcgatgtgaaaacaacaatggaaagcatcagtaatacaagtacgcaatcactgactgccgaaaccaaggacatagctttggagcctaaagaacagaagcatgaagataggcaaagtaacacgccatcacctcccgtgtctacattcagttctggcacttccacaacatcagatatcgaggtgctggatcacgagtctgtgatctcagaaagctccgcatcaagcagacaggaaaccaccgacagtaagagttccctccacctaatgcagacatcctttcagctgctctccgccagtgcatgccccgagtacaaccggctggatgattttcaaaagctgacggaaagctgctgttcgtctgatgcatttgagaggatagatagcttttctgtgcagtcacttgacagccgcagcgtgtccgagatcaacagtgacgatgaactcagcggaaaggggtacgcgttagtgccaattattgtgaactcgtctaccccaaagtctaaaactgtcgagtctgctgaaggcaagtccgaggaggtgaatgagaccttagtgattcccacggaggaagccgagatggaggagtccggtaggtcagccacaccagtaaactgcgagcagccagacatactggtgtcctcaaccccgatcaacgaaggccagactgtattagacaaagtggcagaacaatgcgagcctgcagagtcacagcctgaggcgttatccgagaaagaagacgtctgcaaagttactctaaccgtagagttcctgaacgagaaactcgagaagagagaggctcagctcctcagcctgtcgaaggagaaggcgctactggaggaggctttcgacaacctcaaggatgagatgttcagagtgaaggaagagtcgtcatctatttcttcgctcaaagacgaatttacacagagaatcgctgaggcagagaagaaggtgcagcttgcttgcaaggaacgcgacgccgctaagaaggagattaagaacatcaaagaagagctggctactcgactcaactcttccgaaacagcggatctgctcaaagagaaggatgaacagatacgcggattgatggaggagggcgaaaaactctccaaacagcaactgcacaacagcaatattatcaagaagctgagagccaaagataaagaaaatgaaaacatggtcgcaaagctgaataagaaggtgaaggaattagaggaggaattgcaacatctcaagcaggtcctggatggaaaagaggaagtagagaaacagcatcgcgaaaacattaagaagctcaactccatggtggagagacaagaaaaggatcttggaagactgcaggtggatatggatgaactagaggagaaaaaccgcagcatacaggcggcactggattccgcatataaggaactgaccgacctgcacaaggctaatgcagctaaagattccgaggctcaagaagccgctctatctcgggaaatgaaggccaaggaggaattgagtgctgcgttggaaaaggctcaggaggaggccagacaacaacaagaaacgctcgccatccaggtgggagatctaagattggccctgcagcgaactgagcaggccgcagctcggaaagaggactacctgcggcatgaaatcggcgaactccagcaaagactccaggaagctgagaacagaaatcaggagctgtcacaaagcgtgtcgtccacaacgaggcccctgctgaggcagattgaaaatttacaggccaccctcggttcccagacatccagctgggagaagctggaaaaaaacctgagcgataggctgggtgaatcacagacgctacttgccgcagccgtcgagcgagagcgggctgccaccgaagaacttctggccaacaaaatccaaatgtctagtatggaatcccagaatagcctgttgcgtcaggaaaacagcaggtttcaggcccagttagagagcgagaagaatcgactgtgcaagttggaggacgagaacaatcgatatcaggtggagttggagaatttgaaagatgagtatgttcggaccttggaggaaacacgaaaggagaagacactgctgaattcgcagctggaaatggaacgaatgaaggtagaacaggagcgtaaaaaggcaattttcacacaggagacaattaaagagaaggagcggaaaccgttctcggtctccagtaccccaaccatgagcagaagctccagtatttccggcgtggacatggccggtctgcagaccagtttcctgagccaagacgagtcccatgatcactcttttggcccaatgcctatttcggccaatggcagtaacttgtacgacgccgtccgcatgggtgccggaagctccattatcgagaacctccaatctcagttgaagctgagggaaggcgaaattacccacttgcagctcgaaattggtaacctggaaaaaacacgaagcattatggccgaggaactcgtgaagctcacaaaccagaatgacgagttagaggagaaggtgaaagaaattccaaagcttaggacacagctgagggacttggatcagaggtataacaccatcttgcagatgtatggcgaaaaagccgaagaggcagaagagctgcggttggacttggaagatgtaaagaacatgtacaagactcagattgacgagctcctgcggcagtcccttagctag

SEQ ID NO: 328530 - DNA, 6625 bp, Artificial Sequence
  derived and/or modified sequence
gtagatttggttgctgtgtacgtggaagaagcaagcgcatgcgcacatgggcccccttcgtctcagctgtgcgggaacggccgagggtaacatcccgggctcgcgggaggctgtcggggtaatggccacacgctgacagaaccagccgagtggaaaaggggagcgaagccgttcctctgcacccttccccaggcctgaggccttcccgcttggtgctgccgccgccactgccggctgaggaggggcgatgagttggttcaacgcctcccagctctccagcttcgctaagcaggccctgtcccaggcccagaagtctattgacagggttctggacatccaggaagaggagccgagcatctgggccgagaccattccgtatggagagccgggaataagttcccctgtcagtggaggatgggatacttcaacctgggggttgaaatcaaacactgaacctcagagtccaccaatagcctctcctaaagcaatcacaaagccagttcggaggactgtggtcgatgaatctgaaaatttcttcagtgcctttctctcgccaactgtaagtttgaaagtatctgaaagtgtaattgatgtgaaaacaactatggaaagtatatctaatacgtctacgcagtctctcacagcagaaacaaaggacatagctttggaacctaaggaacaaaaacatgaagacaggcagagcaatacaccttctcctcctgttagtaccttttcatcaggtacttctaccaccagtgatattgaagttttagatcatgaaagtgtaataagtgagagctcagcgagctcgagacaagagactacagattcaaaatcaagtcttcacttgatgcagacatcttttcagcttctctctgcatctgcttgtcctgaatataatcgtttagatgatttccaaaaactcactgagagttgctgttcatctgatgcttttgaaagaatagactcatttagtgtacagtcattagatagccggagtgtaagtgaaatcaattcagatgatgaattgtcaggcaagggatatgctttagtgcctattatagttaattcttcaactccaaagtctaaaacagttgaatctgctgaaggaaaatctgaagaagtaaatgaaacattagttatacccactgaggaagcagaaatggaagaaagtggacgaagtgcaactcctgttaactgtgaacagcctgatatcttggtttcttccacaccaataaatgaaggacagactgtgttagacaaggtggctgagcagtgtgaacctgctgaaagtcagccagaagcactttctgagaaggaagatgtttgcaaggtaactctaacagttgaatttctgaatgaaaagctggaaaaaagggaggctcagttattatctcttagtaaggaaaaagcacttctagaagaagcttttgataacctgaaagatgaaatgttcagagtgaaagaagaaagcagtagcatttcttccttgaaagatgagtttactcaaagaattgcagaagcagaaaagaaagttcaactagcctgcaaagagagagatgctgctaaaaaggaaatcaaaaacataaaagaagaacttgccactagattaaatagtagtgaaactgcagaccttttgaaagagaaagatgagcagatccgagggttaatggaagaaggagaaaaactttcaaaacagcagctgcacaattctaacatcatcaagaaattaagagctaaagacaaggagaatgaaaatatggttgcaaagctgaacaaaaaagttaaagagctagaagaggagttgcagcatttgaaacaggtccttgatggcaaagaagaggttgagaaacaacatagagaaaatattaaaaaactaaattccatggtagaacgccaagagaaagatcttggccgtcttcaggtagacatggatgaacttgaagaaaagaaccgaagtattcaggctgccctggatagtgcatacaaagaacttactgatcttcacaaagccaatgctgcaaaggatagtgaggcacaggaagctgctctgagccgtgaaatgaaagctaaagaagaactttctgcagcattagagaaggcccaagaagaagcccgtcagcagcaagaaacattagccattcaagtgggggaccttaggcttgcattgcagcgtacagaacaagcggctgccagaaaggaggattatttacgccatgagatcggtgaacttcagcagagactccaggaagcagagaatcgaaaccaggaactgagtcaaagtgtttcatcaacaacaagaccattgcttcgacaaatagaaaatttgcaagcaaccctgggatcccagacatcgtcgtgggagaaattagagaagaatctttctgataggcttggtgaatcccagaccttgctggcagcagcagttgagagagaacgtgcagctacagaagaactccttgctaacaaaattcagatgtcttccatggagtcacagaattctcttttaagacaggaaaacagtagatttcaagcccagctagaatcagagaaaaataggctgtgtaaactggaggatgagaacaataggtaccaggttgaattggaaaacctaaaagatgaatatgtaagaacacttgaagagacgaggaaagaaaagacattgttgaatagtcagttagaaatggaaagaatgaaagttgaacaagaaaggaagaaagccatttttactcaagaaacaataaaagaaaaggaacgcaagccattttctgtttctagcactcccaccatgtcacgctcaagttcaataagtggtgttgatatggcaggactacagacatcttttctgtctcaggatgagtctcatgatcactcatttggaccaatgcctatatcagcaaatggaagcaatctttatgatgctgtaaggatgggagcaggatcaagcataattgaaaacctacagtctcagctaaagctaagggaaggggaaatcactcatttacagctagaaattggcaatctagaaaaaactcgatcaataatggctgaagaactagttaaattaacaaatcaaaatgatgaacttgaagagaaggtgaaggagatacccaaacttagaactcagctaagagatttggatcaaaggtacaacactattctgcagatgtatggagaaaaagcagaagaggcagaagaacttcgattagatctcgaagatgtaaaaaatatgtacaaaactcaaatagatgaacttttaagacaaagtctcagttaacttgtgaaaattgaattcccatcaaactgaatgtaagcatttaatatctaaacatttaatgtggacttccaataaattcttttatagaattagaaagtgggatttactgtagagtgtaaaaatttttttaaaattgttttacactatgtagtaatatttacagttaaattattttgtgcaatatttgaactttatttttgaaactattctttaaagatttattttttaaagcattcattttttttccttgaatagcacagagatttattactttatcctcatataaatatggctagagaagaagaatggtgttcatatatgtattgtagatatacaactagttgtatctataatttgtaagtgtttatatatatattaagaacatttgaagagtaatgttaacatactgaaactttgaaatctttcacatttaaaatttcaacatatcttaattactgctcatgaaaatgtacattaagtgttaaagtaaaaaattattaaatctgtggctattaaattttaaactaatttttttcctttaaaagtaagagtcacactgacactgtctgaaatttaaagagtgaatgatttaaacttaaaaaaaattttgatctgaaaatttatttcacccagctttcacaattaagtctgtataaaatgtggtaccttttggtacctatccagagaaacctgtacatattcaatgttatctagatgtgattggataatggagaaaatttatttataatgattttgcaatggcatcaataacatttaaatgattttgaagaagtattattttactaccctataaaatgaatcgaaaataataaagttcttaacataatttactctttaaaaattacctgttcatattttgtaaacccatatttttagcacattaaaaatgaatgtttgatattacagaatattcataacaaaatggaagaattataggaattaacttgaatttggcatttttaattttgtgatttatcattttattttttcttgaaatttcaaacacaaggaaagcatagaatagcttttaaaagtagctatgccttcttccaaatgttattttattcaaaaaggtaaccaggttgtgttttaaacctgtgaaatattgtgatgcattttattactgaaagttatttaactgcctttacttgcacataaaaactctcatttacggccaggtgctgtggctcatgcctgtaatcccagcactttgggaggccaaggcgggcatatcacctgatgtcaggagttcaagaccagcatggccagcagtttggtgaaaccccatctctactaaaaatacaaaaattagcctggcgtggtggtgtgcgcctgtaatcctagctactcgggaggctgaggcaggagcattgcttgaacctgggaggtggaggttacaatgagccaagattgtgccactgcactccagcatgggtgacagagaaagactccgtctcaaaaaaaaaaaaacaaactcttatttaatttttagttaaaattaaaacactagtacttcagaatatagatacaagtacaccatcttgaagaatttggagtttttcagggcaattcaaatgacctcattttttgttctttttgtattccagacagtgtttctgtcattggatctctgattggtagtgttaataaatattctttcagtgtgagccagattcataaaattaattttcttcattttagtagtaaaaagtagtctaatagctttttgtcagcttgatttttttgtgtgtgtaatattcaagggcagaatgacaggacagataagcaataagaaatgtatagaattagaaaatatagtagttccctcttacccatgggacatacgttccaagacccccagtgaacgtctgaaaccatggatagtatagacacctctatacactgttttttcctatacatatatacctatgataaagttctatttataaatcagggacagcaagagataaacaataactgcaaatagaacaattataacagtgcactgtaataaaagtgatgtaaatgtgatatgtctgtctctttctctcaaaatatcttattgtactgtactcacctgtaatcagactgtggttgaccgtgagtaaccgaaaccacagaaagcaaaatcgtggataaggggagactactctatatgaaacttaagttacaaaattctctgaagcatttgaaactagacgttttggaattataaaatagtccctttaaaatatccactagtagaaaaaaacttcatttgcagagaaaagattgcaataaaactcattcctaaacttttcaattttataaaattaaacattctttttttatccgtattaacaatttctagttacatagtttctagttacatattaccatatattactctttatctacaaataaatagctgatactcaaactgatcatattttgattgttaaacacttggatctctcaatacttctgtaagttaaagtgaacttaaacagtttcttgaaaaactccagtaggtggcagaatacctattgaatattcgttgctatactttgctgtttgtcattaaaacatctctacccatattcttgcaaaataatatttatattttaatggataggaaaatgatttgcaattagatgtttccattcttgaaagaaaaaagctgcaaataacattttcaagaatataaaaaaatgagtaaacaaagggaaggttgtttggtcatttatagacaattaagcacagactgtagatgtccttccaattcttgggaggctaaactgagtctaccatttcttacatttcttttacctattttttgagaattgccagttgtacagtgtttagcatgtggaatgtaccaaatatatctatgttgtgacttaagatattctaaatgtggataacttctgacctaggaaacatgaagtttgtagtgaagtaagtgaaaagaatgttcaggaaattttttttctccatctcttcagttggcatttattgagagttttatttgaatgcttattaaaagtatatgatttataatatttagaaaatagaagaaaaaagaaaactgtagatgttttatcttgttttaatactgtatgtttagtacgtatacatttatgttctagtgtatcaaaatttttcattttcattaaagtgaatccaattttccatattctaggtccattttaaaccatgaaaactttaatcacatattttgtaaagggctgaaagtatgatttaaactacagattgatatattttaattctaaatgaaaggtaatgtaaataagcatggatctgattgaataaagattttaaaatagt

SEQ ID NO: 328531 - DNA, 6886 bp, Artificial Sequence
  derived and/or modified sequence
gtagatttggttgctgtgtacgtggaagaagcaagcgcatgcgcacatgggcccccttcgtctcagctgtgcgggaacggccgagggtaacatcccgggctcgcgggaggctgtcggggtaatggccacacgctgacagaaccagccgagtggaaaaggggagcgaagccgttcctctgcacccttccccaggcctgaggccttcccgcttggtgctgccgccgccactgccggctgaggaggggcgatgagttggttcaacgcctcccagctctccagcttcgctaagcaggccctgtcccaggcccagaagtctattgacagggttctggacatccaggaagaggagccgagcatctgggccgagaccattccgtatggagagccgggaataagttcccctgtcagtggaggatgggatacttcaacctgggggttgaaatcaaacactgaacctcagagtccaccaatagcctctcctaaagcaatcacaaagccagttcggaggactgtggtcgatgaatctgaaaatttcttcagtgcctttctctcgccaactgatgtccagaccattcagaagagtccagtggtatcaaaacctccagcaaaatcacaacgaccagaagaagaagtgaaaagcagcttacatgaatccttgcacattggccagtcaagaactcctgaaacaactgaatcacaagtaaaagactcttctttgtgtgtttcaggggaaactctggcagcaggtacttcatcacctaaaactgaaggcaagcacgaagaaactgttaataaagaatcggatatgaaggtgccaactgtaagtttgaaagtatctgaaagtgtaattgatgtgaaaacaactatggaaagtatatctaatacgtctacgcagtctctcacagcagaaacaaaggacatagctttggaacctaaggaacaaaaacatgaagacaggcagagcaatacaccttctcctcctgttagtaccttttcatcaggtacttctaccaccagtgatattgaagttttagatcatgaaagtgtaataagtgagagctcagcgagctcgagacaagagactacagattcaaaatcaagtcttcacttgatgcagacatcttttcagcttctctctgcatctgcttgtcctgaatataatcgtttagatgatttccaaaaactcactgagagttgctgttcatctgatgcttttgaaagaatagactcatttagtgtacagtcattagatagccggagtgtaagtgaaatcaattcagatgatgaattgtcaggcaagggatatgctttagtgcctattatagttaattcttcaactccaaagtctaaaacagttgaatctgctgaaggaaaatctgaagaagtaaatgaaacattagttatacccactgaggaagcagaaatggaagaaagtggacgaagtgcaactcctgttaactgtgaacagcctgatatcttggtttcttccacaccaataaatgaaggacagactgtgttagacaaggtggctgagcagtgtgaacctgctgaaagtcagccagaagcactttctgagaaggaagatgtttgcaaggtaactctaacagttgaatttctgaatgaaaagctggaaaaaagggaggctcagttattatctcttagtaaggaaaaagcacttctagaagaagcttttgataacctgaaagatgaaatgttcagagtgaaagaagaaagcagtagcatttcttccttgaaagatgagtttactcaaagaattgcagaagcagaaaagaaagttcaactagcctgcaaagagagagatgctgctaaaaaggaaatcaaaaacataaaagaagaacttgccactagattaaatagtagtgaaactgcagaccttttgaaagagaaagatgagcagatccgagggttaatggaagaaggagaaaaactttcaaaacagcagctgcacaattctaacatcatcaagaaattaagagctaaagacaaggagaatgaaaatatggttgcaaagctgaacaaaaaagttaaagagctagaagaggagttgcagcatttgaaacaggtccttgatggcaaagaagaggttgagaaacaacatagagaaaatattaaaaaactaaattccatggtagaacgccaagagaaagatcttggccgtcttcaggtagacatggatgaacttgaagaaaagaaccgaagtattcaggctgccctggatagtgcatacaaagaacttactgatcttcacaaagccaatgctgcaaaggatagtgaggcacaggaagctgctctgagccgtgaaatgaaagctaaagaagaactttctgcagcattagagaaggcccaagaagaagcccgtcagcagcaagaaacattagccattcaagtgggggaccttaggcttgcattgcagcgtacagaacaagcggctgccagaaaggaggattatttacgccatgagatcggtgaacttcagcagagactccaggaagcagagaatcgaaaccaggaactgagtcaaagtgtttcatcaacaacaagaccattgcttcgacaaatagaaaatttgcaagcaaccctgggatcccagacatcgtcgtgggagaaattagagaagaatctttctgataggcttggtgaatcccagaccttgctggcagcagcagttgagagagaacgtgcagctacagaagaactccttgctaacaaaattcagatgtcttccatggagtcacagaattctcttttaagacaggaaaacagtagatttcaagcccagctagaatcagagaaaaataggctgtgtaaactggaggatgagaacaataggtaccaggttgaattggaaaacctaaaagatgaatatgtaagaacacttgaagagacgaggaaagaaaagacattgttgaatagtcagttagaaatggaaagaatgaaagttgaacaagaaaggaagaaagccatttttactcaagaaacaataaaagaaaaggaacgcaagccattttctgtttctagcactcccaccatgtcacgctcaagttcaataagtggtgttgatatggcaggactacagacatcttttctgtctcaggatgagtctcatgatcactcatttggaccaatgcctatatcagcaaatggaagcaatctttatgatgctgtaaggatgggagcaggatcaagcataattgaaaacctacagtctcagctaaagctaagggaaggggaaatcactcatttacagctagaaattggcaatctagaaaaaactcgatcaataatggctgaagaactagttaaattaacaaatcaaaatgatgaacttgaagagaaggtgaaggagatacccaaacttagaactcagctaagagatttggatcaaaggtacaacactattctgcagatgtatggagaaaaagcagaagaggcagaagaacttcgattagatctcgaagatgtaaaaaatatgtacaaaactcaaatagatgaacttttaagacaaagtctcagttaacttgtgaaaattgaattcccatcaaactgaatgtaagcatttaatatctaaacatttaatgtggacttccaataaattcttttatagaattagaaagtgggatttactgtagagtgtaaaaatttttttaaaattgttttacactatgtagtaatatttacagttaaattattttgtgcaatatttgaactttatttttgaaactattctttaaagatttattttttaaagcattcattttttttccttgaatagcacagagatttattactttatcctcatataaatatggctagagaagaagaatggtgttcatatatgtattgtagatatacaactagttgtatctataatttgtaagtgtttatatatatattaagaacatttgaagagtaatgttaacatactgaaactttgaaatctttcacatttaaaatttcaacatatcttaattactgctcatgaaaatgtacattaagtgttaaagtaaaaaattattaaatctgtggctattaaattttaaactaatttttttcctttaaaagtaagagtcacactgacactgtctgaaatttaaagagtgaatgatttaaacttaaaaaaaattttgatctgaaaatttatttcacccagctttcacaattaagtctgtataaaatgtggtaccttttggtacctatccagagaaacctgtacatattcaatgttatctagatgtgattggataatggagaaaatttatttataatgattttgcaatggcatcaataacatttaaatgattttgaagaagtattattttactaccctataaaatgaatcgaaaataataaagttcttaacataatttactctttaaaaattacctgttcatattttgtaaacccatatttttagcacattaaaaatgaatgtttgatattacagaatattcataacaaaatggaagaattataggaattaacttgaatttggcatttttaattttgtgatttatcattttattttttcttgaaatttcaaacacaaggaaagcatagaatagcttttaaaagtagctatgccttcttccaaatgttattttattcaaaaaggtaaccaggttgtgttttaaacctgtgaaatattgtgatgcattttattactgaaagttatttaactgcctttacttgcacataaaaactctcatttacggccaggtgctgtggctcatgcctgtaatcccagcactttgggaggccaaggcgggcatatcacctgatgtcaggagttcaagaccagcatggccagcagtttggtgaaaccccatctctactaaaaatacaaaaattagcctggcgtggtggtgtgcgcctgtaatcctagctactcgggaggctgaggcaggagcattgcttgaacctgggaggtggaggttacaatgagccaagattgtgccactgcactccagcatgggtgacagagaaagactccgtctcaaaaaaaaaaaaacaaactcttatttaatttttagttaaaattaaaacactagtacttcagaatatagatacaagtacaccatcttgaagaatttggagtttttcagggcaattcaaatgacctcattttttgttctttttgtattccagacagtgtttctgtcattggatctctgattggtagtgttaataaatattctttcagtgtgagccagattcataaaattaattttcttcattttagtagtaaaaagtagtctaatagctttttgtcagcttgatttttttgtgtgtgtaatattcaagggcagaatgacaggacagataagcaataagaaatgtatagaattagaaaatatagtagttccctcttacccatgggacatacgttccaagacccccagtgaacgtctgaaaccatggatagtatagacacctctatacactgttttttcctatacatatatacctatgataaagttctatttataaatcagggacagcaagagataaacaataactgcaaatagaacaattataacagtgcactgtaataaaagtgatgtaaatgtgatatgtctgtctctttctctcaaaatatcttattgtactgtactcacctgtaatcagactgtggttgaccgtgagtaaccgaaaccacagaaagcaaaatcgtggataaggggagactactctatatgaaacttaagttacaaaattctctgaagcatttgaaactagacgttttggaattataaaatagtccctttaaaatatccactagtagaaaaaaacttcatttgcagagaaaagattgcaataaaactcattcctaaacttttcaattttataaaattaaacattctttttttatccgtattaacaatttctagttacatagtttctagttacatattaccatatattactctttatctacaaataaatagctgatactcaaactgatcatattttgattgttaaacacttggatctctcaatacttctgtaagttaaagtgaacttaaacagtttcttgaaaaactccagtaggtggcagaatacctattgaatattcgttgctatactttgctgtttgtcattaaaacatctctacccatattcttgcaaaataatatttatattttaatggataggaaaatgatttgcaattagatgtttccattcttgaaagaaaaaagctgcaaataacattttcaagaatataaaaaaatgagtaaacaaagggaaggttgtttggtcatttatagacaattaagcacagactgtagatgtccttccaattcttgggaggctaaactgagtctaccatttcttacatttcttttacctattttttgagaattgccagttgtacagtgtttagcatgtggaatgtaccaaatatatctatgttgtgacttaagatattctaaatgtggataacttctgacctaggaaacatgaagtttgtagtgaagtaagtgaaaagaatgttcaggaaattttttttctccatctcttcagttggcatttattgagagttttatttgaatgcttattaaaagtatatgatttataatatttagaaaatagaagaaaaaagaaaactgtagatgttttatcttgttttaatactgtatgtttagtacgtatacatttatgttctagtgtatcaaaatttttcattttcattaaagtgaatccaattttccatattctaggtccattttaaaccatgaaaactttaatcacatattttgtaaagggctgaaagtatgatttaaactacagattgatatattttaattctaaatgaaaggtaatgtaaataagcatggatctgattgaataaagattttaaaatagt

SEQ ID NO: 328532 - DNA, 174 bp, Artificial Sequence
  derived and/or modified sequence
accctgttcgaccagaacaacgccgccaagaaggaggagagcgagaccgccaacaagaacgacagcagcaagaagctgagcgtggagagagtgtaccagaagaagacccagctggagcacatcctgctgagacccgacacctacatcggcagcgtggagcccctgacccagtag

SEQ ID NO: 328533 - DNA, 174 bp, Artificial Sequence
  derived and/or modified sequence
accttgtttgaccagaacaacgccgctaagaaggaagaatctgagactgctaacaagaacgattcttcaaaaaagttaagcgtggagcgtgtgtaccaaaaaaaaacacagctcgagcacatactactccgacctgacacctacattggttcggtcgaacccctcactcagtag

SEQ ID NO: 328534 - DNA, 174 bp, Artificial Sequence
  derived and/or modified sequence
accctgtttgaccagaacaatgctgccaagaaggaggagagcgagacagccaacaagaatgacagcagcaagaagctgtctgtggagcgggtgtaccagaagaagacccagctggagcacatcctgctgcggccagacacctacatcggctctgtggagcccctgacccagtag

SEQ ID NO: 328535 - DNA, 174 bp, Artificial Sequence
  derived and/or modified sequence
accctgttcgaccagaacaacgccgccaagaaggaggagagcgagacggcaaacaaaaacgattcctcaaagaagttgagtgtggaacgggtctatcagaaaaaaacacaactggagcatattctgctgagacccgacacctatatcggcagcgtggagccactcacgcagtag

SEQ ID NO: 328536 - DNA, 174 bp, Artificial Sequence
  derived and/or modified sequence
actctctttgatcagaataatgccgcaaagaaagaagagtccgagaccgctaacaagaatgactctagcaaaaaactgtccgtggagagagtataccagaagaagacccagctagagcacattctgcttcgtcccgacacatacattggatccgtcgagcccctgacacagtag

SEQ ID NO: 328537 - protein, 615 aa, Artificial Sequence
  derived and/or modified sequence
MTSPSPRIQIISTDSAVASPQRIQGSEPASGPLSVFTSLNKEKIVTDQQTGQKIQIVTAVDASGSPKQQFILTSPDGAGTGKVILASPETSSAKQLIFTTSDNLVPGRIQIVTDSASVERLLGKTDVQRPQVVEYCVVCGDKASGRHYGAVSCEGCKGFFKRSVRKNLTYSCRSNQDCIINKHHRNRCQFCRLKKCLEMGMKMESVQSERKPFDVQREKPSNCAASTEKIYIRKDLRSPLIATPTFVADKDGARQTGLLDPGMLVNIQQPLIREDGTVLLATDSKAETSQGALGTLANVVTSLANLSESLNNGDTSEIQPEDQSASEITRAFDTLAKALNTTDSSSSPSLADGIDTSGGGSIHVISRDQSTPIIEVEGPLLSDTHVTFKLTMPSPMPEYLNVHYICESASRLLFLSMHWARSIPAFQALGQDCNTSLVRACWNELFTLGLAQCAQVMSLSTILAAIVNHLQNSIQEDKLSGDRIKQVMEHIWKLQEFCNSMAKLDIDGYEYAYLKAIVLFSPDHPGLTSTSQIEKFQEKAQMELQDYVQKTYSEDTYRLARILVRLPALRLMSSNITEELFFTGLIGNVSIDSIIPYILKMETAEYNGQITGASL

SEQ ID NO: 328538 - protein, 205 aa, Artificial Sequence
  derived and/or modified sequence
MTSPSPRIQIISTDSAVASPQRIQGSEPASGPLSVFTSLNKEKIVTDQQTGQKIQIVTAVDASGSPKQQFILTSPDGAGTGKVILASPETSSAKQLIFTTSDNLVPGRIQIVTDSASVERLLGKTDVQRPQVVEYCVVCGDKASGRHYGAVSCEGCKGFFKRSVRKNLTYSCRSNQDCIINKHHRNRCQFCRLKKCLEMGMKMEC

SEQ ID NO: 328539 - DNA, 8330 bp, Artificial Sequence
  derived and/or modified sequence
ccgctcccacctcggcgtctcgtctctcgcccgctgccccgcgagcccgcggcccccgggctcccgccatccgccgacaccgggagcccgggctccccgcgccctgccctccgcgccgggggccgcccgccgcagacacgggacccgcttcgaggccgctttggcgccaaatcctgaggtaacacgtacacagacctctcggccggaatctccagggatgaccagcccctccccacgcatccagataatctccaccgactctgctgtagcctcacctcagcgcattcagggctctgaacctgcctctggcccattgagtgttttcacatctttgaacaaagagaagattgtcacagaccagcagacaggacagaaaatccagatagtcaccgcagtggacgcctccggatcccccaaacagcagttcatcctgaccagcccagatggagctggaactgggaaggtgatcctggcttccccagagacatccagcgccaagcaactcatattcaccacctcagacaacctcgtccctggcaggatccagattgtcacggattctgcctctgtggagcgtttactggggaagacggacgtccagcggccccaggtggtagagtactgtgtggtctgtggcgacaaagcctccggccgtcactatggggctgtcagttgtgaaggttgcaaaggtttcttcaaaaggagtgtgaggaaaaatttgacctacagctgccggagcaaccaagactgcatcatcaataaacatcaccggaaccgctgtcagttttgccggctgaaaaaatgcttagagatgggcatgaaaatggaatctgtgcagagtgaacggaagcccttcgatgtgcaacgggagaaaccaagcaattgtgctgcttcaactgagaaaatctatatccggaaagacctgagaagtcccctgatagctactcccacgtttgtggcagacaaagatggagcaagacaaacaggtcttcttgatccagggatgcttgtgaacatccagcagcctttgatacgtgaggatggtacagttctcctggccacggattctaaggctgaaacaagccagggagctctgggcacactggcaaatgtagtgacctcccttgccaacctaagtgaatctttgaacaacggtgacacttcagaaatccagccagaggaccagtctgcaagtgagataactcgggcatttgataccttagctaaagcacttaataccacagacagctcctcttctccaagcttggcagatgggatagacaccagtggaggagggagcatccacgtcatcagcagagaccagtcgacacccatcattgaggttgaaggccccctcctttcagacacacacgtcacatttaagctaacaatgcccagtccaatgccagagtacctcaacgtgcactacatctgtgagtctgcatcccgtctgcttttcctctcaatgcactgggctcggtcaatcccagcctttcaggcacttgggcaggactgcaacaccagccttgtgcgggcctgctggaatgagctcttcaccctcggcctggcccagtgtgcccaggtcatgagtctctccaccatcctggctgccattgtcaaccacctgcagaacagcatccaggaagataaactttctggtgaccggataaagcaagtcatggagcacatctggaagctgcaggagttctgtaacagcatggcgaagctggatatagatggctatgagtatgcataccttaaagctatagttctctttagccccgatcatccaggtttgaccagcacaagccagattgaaaaattccaagaaaaggcacagatggagttgcaggactatgttcagaaaacctactcagaagacacctaccgattggcccggatcctcgttcgcctgccggcactcaggctgatgagctccaacataacagaagaacttttttttactggtctcattggcaatgtttcgatagacagcataatcccctacatcctcaagatggagacagcagagtataatggccagatcaccggagccagtctatagcgcaaaccacacacctgccaaggagcaacagaatccttccaggaccgttcacatacaaagaaaagtagtggtattttggtatgtgcaaatatttccatatgttagccatttcctgtctggtttctccttatctgttaatcccagacaatagcaattaaaagactagtaggatcctttcctgacataagaaatgttttaatgccttttgatgaagcagcagattttggaacaatcttttaactcaatttgtatttagaaattctcaaagggcaaaaaacaaaaaaaaaggttttataatgtcagagactagtattaaagaaaactgaaagaacctgagagaatagtatgtgtgtatatatatatataaaaaagtccttggaattatagatactaattaccagggtaataatattagcactttctaagcacttatcaatgtgtaacgttagcaacatcttgcctgtgggcagggcaaatggaaaactgtgtatgtcttttgccgaaatgctaatgatttctgtgaaaactcactagggtacaggagacaatcatttatgtttaagaaaagaaggcatcattcctaattgtgtgcacatgttgtggagttgagctgaattctgtgaatggaaacgtggctcatttgcatcatgcagtaagtgggagtgtggtagcacagtcggtggtgacccagttcagaagcttctagccatagagcagacacttgtcaggttccctgactacttggtcctggtctctgatgggcatctgcagactcctctagaacctggggttctcctttgatgactggttatctgaattggattgcaactagtcagacattaactgccaaatgagatgtacagttcctccagcaagtgaaaacatccccaagtcacatccgccgctcgtggcagatggagccttgtgaccaaaaagtgcaaggtgggcattttgagctcttgacagtacttccaatacaattgggggtgcttgtgtgtttgtccagatggaggagtgtggccttggagtgtgagcgttaccttcccagggctttccactccaaatgcccccttgaaaagggctcgtgtttctgcagctccatcataactgtgaggctggattggggctgggcaggagcctgctgccgcctggcgagagtggttagggcctggtaaagctggatggaaggtttcaggacaatttcttcctgttgaccttaaataccagagattttaaaaatgtgtatagactcagcatctctgttggcaagtctgttaatgttaccagcacactgtgcactttggttcccccaggtgtgtgccagccgaccaccccggagcattttaaatgcaggctgcttgctccttaaaaacaaccctcaatttccagggtgatagtctttctcctcataaattgtagcaaccagagtttacagcaagaacagtatgcgcttaaaaggaagttatgtctaacttcaaacacccgtaaattcccacggatgtgaatatatagcaagcttttcctgtttgagaacagtggcatgtggaagacccggtcaattgctttgtcttttgctttttaaatagtccagattaagaaaatacaccctgttgggttaaatttgcctctcttgatttgttaatcagatgatatccaaaaagatccctggacactcccctgactcacaggtgctctgatctggctcaggctggcgccacatgtgctccacaggggtgcagtctggccagctacagacgcccctgtggtgccacattggacagaatggaagctgctgcaggctcaaggcagaacaggatgcttgatcctgaagggttagcagcactttacgcaagtcagtgttagtagggtaagtgggaacagtgtttccaacttctaaattcttgtttggatttaattatatcattttataattcttgccttggcagcaaattttggagagtagtgggagtggccattataaaatgatggaaaggatttaattttgccagcttaaagtaatttttacttttctaaccctgatgtgttttcagtttcaaaattaagacaaaaaaccagctgagacaatggaattagggcaggtttgtttcatttctgcttgtgaaggcttttagtagcaggcatcctgcagctcagtggtgcctctaacacagattgttgcctgccttccgtcgttttgatccttgagagtgaccatgagggccatgttgcagttccctgggaatacaagcataacagctttcagatcccagttcttggtgttggtgaaaaggtctccaccagcccctcctctcattcccaggtcattcagtggcagccagtaggctgcttagactcaggctggataaggaagtgttgggctgtggtgaaacaaccttgcagaaaacgtgattttgcttggaaaggtgctgattctaacctggtcctgctctttaagtccccttgctggtgatggctgattccagggactgttttgggctttgaacacctcttggttggtttctgagatcctcttggccttactttgaagtggccttttctttaaggatcatgtccacgtaacctgtattcttgctgctttaactcatttcaagcctctgactgcaggtccatttcatctcctgtcaggttggttaagtaaagtcagcccaaagtcaagaattacttaaagagatgcaaaccaaatatttgggctccaactttcacagggcttatagcccttattagcagtttgtgaaactttgggtttcatgaagtgagacctgtcctctggctactgaactccatggagccacgttcatgctccctcttctactggcctggctgctcctccctcaatgaggagaggcagctggctcagagaggtgggacagacacatgctgtcatcagttaagtgagctcttttccagaagtatctcagataatgttgggttaagacagatagatgttgaaaatggtggagatcattacacattagcataaaacaggacaggaagagattttttgaaagaccaaattagttgagcaagtaatacttttcaagttactcctggaaggtgtttttaaggaagtgtgttacctaccatactctcctaatttgacatttctgtgtcctgaggagttacatttattgtctaacccttgccataaggctgtggtttgaggttcttttgctgttctgggctttatatttaatttcaggtgtagtcacttctaagatgtgtaattgccctcaagagggactgatttttagcttgtcattgtcagtattgaatgtggactcttctgaggcagttaggacaccagccatggtgttaacagtggatgcgttaggctccttaatctcaaggcaatatccacgctacacacatacttattagctgtcttacttgtttgggggatagttacggcaaggagcaaaaaattctaaggactctagctgtttctagtgcttttactttcatagtcctttgaggacatttcctgcagagcactcttgctcacagcccgccctctgcagggcttccagcccctggccgcaatcagcagttcatgccacatgtgtacatccatgttctgggacctgatctcattggagtccagaagcttgttgcccactttccagtgtaaatgactttatgtgcaatggggtcataggtaacattttaactcttttcttagtccaggtcataggaagtctcatcatctgacagccacttttctcccagggaaggcggtgcccactgggccctgggaatgcctgagccagcagagcagatgccccacgtgcttcctttatccagcttccattctctcagttatgaggctctttgaaaatgtcttaactttgatgtaaatttttaaagccaacccctcatcaagacagggttggtttgggtcttttgtacacagggtctggaccttctcattgtgtgcctcccaccagcgtgcacttcgtatgtccagccctgggtcccttcagcagcattgtgcgtgtacaggtttctaggctgtaagactgaatgaatgtacatgtgtttatatcctctccatatgtacagtgtatatagtgtgtgtatgtgtacatagatgtatattatgtatacagacatgtatccaaactttcctttaaagagagtttttcataaagttgctaatgtaaactgatatgggtgttccaaggtccctcggcagggaagatttgctggtgattttcttcactccattttcctttgggtgagcctgcctgggaagggccatgaagtcagaatctccactctgcaaaaggaagaattccaggcagaagaggttctgacagggtgacatttccgtatattctctaggttcggacaagagccaggaagctggaagacagtttatcttaatatccaaaactaagtgggaatttttaaccttttcatgcacctattcatggccctacctggaaggaacttggcagttgggttgagccatcagccttcccagctattcagctctgttgagtagcccagagacaggcgtcacggtcagagattcagaacggtctgtgtcagtgaggcctgactcccaaagatggtagcaatttcccaggcttgcgctgtgctcagtcagcaagatgtggggcactgtcctatgactgaataaatagtaattcccatctttctatcgccagttaaaaataaacaacctaccaagtattattctttaaaactaagcatggatgttgatggctaacttctgcggcatataagctacagatctcaagttacttctctaactgtaagcatgtaaatgactttaactcctttctataagttatgattttaaattttcagataagaattgcattttaatatggatatgtgtgcccttaaaagctacagataccaaattttcctcgtccaggtctactcggacgaattttcccccttaatctggccttaaactgagactcggcccttgagagccagggcctggcccagcagtagttgctcatagacctgggaagcaggggcctgctggaaggaatcactagattgctgcaaaaactcacataatccacagtttcctctttttctttttaaaataagttatcaaaatgttttaaaaacactttatgagaccatagtactcagtgccttttgtgagacagtgggtcatttagccttcagcttccctgtttttgatgtagagaaagcttctatttcactggcctcatcccacaagattgtgcgacctttccccgtcatagcctgtcgtgacaatcacgctattgaaagtggctttctagttaaaatgcaattggaaacttgacagtctctaaatgaattaaaagtttcctttggggctatttagcttaacagcagtctacaaataattaaagtgtgagcttaagaaaagtatctttgcggggagaaaaatgtcagatatttttaatgcccagctataaataattttggtgtcttgatatttatacatgcaaaatagaaaaaaaatgttcaacatttattgattgatagactgttaaaatttaatgtttggaataacatttggaagtagtagactttgcattaaaaaatggcttttctttaggaaagtataatcaattattttaatgaccatagcattcatggactcaaatgctgctgccacacacaactcaagtgctggaatatttttctacagtctctctgttctacggattatcttgtaaaccagtgttcaactagttttataactgaaaagctgcacatttttcacagtacaagccgtagtttttacctgtagtttggacttctctgttagaatgtaactgcattaccagcccttttaaaggcatctatctatcaaaggaaaatttgggtgttagattttcttgggaccgtttctgtaacctttgcccttcacaatatagaaaatattggttttgccattacattttaatgccaggtttaaaacctgttgaaagctgcagctttatacagctttcttctccctgtgaaatcactttgtttatgtgatggcatttaaaaaatagcatgttctttttaaactgaattttatatctaatcaatgtcttcagtcttgaagaagaatttgcattgttgtgtttgtatatagagtattgcagtgcatgaattagctttatgcattttattaaatgctgtttcaatgtggcattattgttgtggcttaatactactacctaaatgaggtttatactattaaaagtgaattaaagactaa

SEQ ID NO: 328540 - DNA, 111 bp, Artificial Sequence
  derived and/or modified sequence
atgacatctccctcacctaggattcagatcatcagcaccgatagcgctgtagcctccccgcagaggattcagggctctgagcccgcttcgggcccactgagtgtattctag

SEQ ID NO: 328541 - DNA, 111 bp, Artificial Sequence
  derived and/or modified sequence
atgaccagccccagcccccgcatccagatcatcagcacagattctgctgtggccagcccccagaggatccagggcagcgagcccgccagcggccccctgagcgtcttctag

SEQ ID NO: 328542 - DNA, 111 bp, Artificial Sequence
  derived and/or modified sequence
atgaccagccccagcccccggatccagatcatcagcaccgacagcgcagtcgcctccccacagagaatccagggctcggagccggcctccgggcctctcagcgtgttttag

SEQ ID NO: 328543 - DNA, 2406 bp, Artificial Sequence
  derived and/or modified sequence
ccgctcccacctcggcgtctcgtctctcgcccgctgccccgcgagcccgcggcccccgggctcccgccatccgccgacaccgggagcccgggctccccgcgccctgccctccgcgccgggggccgcccgccgcagacacgggacccgcttcgaggccgctttggcgccaaatcctgaggtaacacgtacacagacctctcggccggaatctccagggatgaccagcccctccccacgcatccagataatctccaccgactctgctgtagcctcacctcagcgcattcagggctctgaacctgcctctggcccattgagtgttttcacatctttgaacaaagagaagattgtcacagaccagcagacaggacagaaaatccagatagtcaccgcagtggacgcctccggatcccccaaacagcagttcatcctgaccagcccagatggagctggaactgggaaggtgatcctggcttccccagagacatccagcgccaagcaactcatattcaccacctcagacaacctcgtccctggcaggatccagattgtcacggattctgcctctgtggagcgtttactggggaagacggacgtccagcggccccaggtggtagagtactgtgtggtctgtggcgacaaagcctccggccgtcactatggggctgtcagttgtgaaggttgcaaaggtttcttcaaaaggagtgtgaggaaaaatttgacctacagctgccggagcaaccaagactgcatcatcaataaacatcaccggaaccgctgtcagttttgccggctgaaaaaatgcttagagatgggcatgaaaatggaatctgtgcagagtgaacggaagcccttcgatgtgcaacgggagaaaccaagcaattgtgctgcttcaactgagaaaatctatatccggaaagacctgagaagtcccctgatagctactcccacgtttgtggcagacaaagatggagcaagacaaacaggtcttcttgatccagggatgcttgtgaacatccagcagcctttgatacgtgaggatggtacagttctcctggccacggattctaaggctgaaacaagccagggagctctgggcacactggcaaatgtagtgacctcccttgccaacctaagtgaatctttgaacaacggtgacacttcagaaatccagccagaggaccagtctgcaagtgagataactcgggcatttgataccttagctaaagcacttaataccacagacagctcctcttctccaagcttggcagatgggatagacaccagtggaggagggagcatccacgtcatcagcagagaccagtcgacacccatcattgaggttgaaggccccctcctttcagacacacacgtcacatttaagctaacaatgcccagtccaatgccagagtacctcaacgtgcactacatctgtgagtctgcatcccgtctgcttttcctctcaatgcactgggctcggtcaatcccagcctttcaggcacttgggcaggactgcaacaccagccttgtgcgggcctgctggaatgagctcttcaccctcggcctggcccagtgtgcccaggtcatgagtctctccaccatcctggctgccattgtcaaccacctgcagaacagcatccaggaagataaactttctggtgaccggataaagcaagtcatggagcacatctggaagctgcaggagttctgtaacagcatggcgaagctggatatagatggctatgagtatgcataccttaaagctatagttctctttagccccgatcatccaggtttgaccagcacaagccagattgaaaaattccaagaaaaggcacagatggagttgcaggactatgttcagaaaacctactcagaagacacctaccgattggcccggatcctcgttcgcctgccggcactcaggctgatgagctccaacataacagaagaacttttttttactggtctcattggcaatgtttcgatagacagcataatcccctacatcctcaagatggagacagcagagtataatggccagatcaccggagccagtctatagcgcaaaccacacacctgccaaggagcaacagaatccttccaggaccgttcacatacaaagaaaagtagtggtattttggtatgtgcaaatatttccatatgttagccatttcctgtctggtttctccttatctgttaatcccagacaatagcaattaaaagactagtaggatcctttcctgacataagaaatgttttaatgccttttgatgaagcagcagattttggaacaatcttttaactcaatttgtatttagaaattctcaaagggcaaaaaacaaaaaaaaaggttttataatgtcagagactagtattaaagaaaactgaaagaacctgagagaa

SEQ ID NO: 328544 - DNA, 111 bp, Artificial Sequence
  derived and/or modified sequence
atgactagcccttcacccagaatccaaattatttcgaccgacagtgctgtggcatcaccacaaagaatccagggatcagagcccgcatccggacctctcagcgttttttag

SEQ ID NO: 328545 - DNA, 111 bp, Artificial Sequence
  derived and/or modified sequence
atgaccagccccagccccagaatccagatcatcagcaccgacagcgccgtggccagcccccagagaatccagggcagcgagcccgccagcggccccctgagcgtgttctag

SEQ ID NO: 328546 - DNA, 495 bp, Artificial Sequence
  derived and/or modified sequence
gcccccgggcccgtccccgccaccccgctcccacctcggcgtctcgtctctcgcccgctgccccgcgagcccgcggcccccgggctcccgccatccgccgacaccgggagcccgggctccccgcgccctgccctccgcgccgggggccgcccgccgcagacacgggacccgcttcgaggccgctttggcgccaaatcctgaggaccgcctatggctgcggtagcagtgagagaagctctcagaaggtgcacattcctccttgttcatttttaagcagcttccaaagctgctgttgatgatgcctgatgctgctttgaaggcagaaaaccaacagtgagatcaagaattgtaacacgtacacagacctctcggccggaatctccagggatgaccagcccctccccacgcatccagataatctccaccgactctgctgtagcctcacctcagcgcattcagggctctgaacctgcctctggcccattgagtgttttc

SEQ ID NO: 328547 - DNA, 739 bp, Artificial Sequence
  derived and/or modified sequence
gttctctaatgatcttggttcaccatggctacaaatatggaggggctggttcagcacagagtggggacccagcaggtggctgaggtaacacgtacacagacctctcggccggaatctccagggatgaccagcccctccccacgcatccagataatctccaccgactctgctgtagcctcacctcagcgcattcagggctctgaacctgcctctggcccattgagtgttttcacatctttgaacaaagagaagattgtcacagaccagcagacaggacagaaaatccagatagtcaccgcagtggacgcctccggatcccccaaacagcagttcatcctgaccagcccagatggagctggaactgggaaggtgatcctggcttccccagagacatccagcgccaagcaactcatattcaccacctcagacaacctcgtccctggcaggatccagattgtcacggattctgcctctgtggagcgtttactggggaagacggacgtccagcggccccaggtggtagagtactgtgtggtctgtggcgacaaagcctccggccgtcactatggggctgtcagttgtgaaggttgcaaaggtttcttcaaaaggagtgtgaggaaaaatttgacctacagctgccggagcaaccaagactgcatcatcaataaacatcaccggaaccgctgtcagttttgccggctgaaaaaatgcttagagatgggcatgaaaatggaatgtg

SEQ ID NO: 328548 - protein, 596 aa, Artificial Sequence
  derived and/or modified sequence
MTSPSPRIQIISTDSAVASPQRIQIVTDQQTGQKIQIVTAVDASGSPKQQFILTSPDGAGTGKVILASPETSSAKQLIFTTSDNLVPGRIQIVTDSASVERLLGKTDVQRPQVVEYCVVCGDKASGRHYGAVSCEGCKGFFKRSVRKNLTYSCRSNQDCIINKHHRNRCQFCRLKKCLEMGMKMESVQSERKPFDVQREKPSNCAASTEKIYIRKDLRSPLIATPTFVADKDGARQTGLLDPGMLVNIQQPLIREDGTVLLATDSKAETSQGALGTLANVVTSLANLSESLNNGDTSEIQPEDQSASEITRAFDTLAKALNTTDSSSSPSLADGIDTSGGGSIHVISRDQSTPIIEVEGPLLSDTHVTFKLTMPSPMPEYLNVHYICESASRLLFLSMHWARSIPAFQALGQDCNTSLVRACWNELFTLGLAQCAQVMSLSTILAAIVNHLQNSIQEDKLSGDRIKQVMEHIWKLQEFCNSMAKLDIDGYEYAYLKAIVLFSPDHPGLTSTSQIEKFQEKAQMELQDYVQKTYSEDTYRLARILVRLPALRLMSSNITEELFFTGLIGNVSIDSIIPYILKMETAEYNGQITGASL

SEQ ID NO: 328549 - DNA, 1937 bp, Artificial Sequence
  derived and/or modified sequence
aggttctctaatgatcttggttcaccatggctacaaatatggaggggctggttcagcacagagtggggacccagcaggtggctgaggtaacacgtacacagacctctcggccggaatctccagggatgaccagcccctccccacgcatccagataatctccaccgactctgctgtagcctcacctcagcgcattcagattgtcacagaccagcagacaggacagaaaatccagatagtcaccgcagtggacgcctccggatcccccaaacagcagttcatcctgaccagcccagatggagctggaactgggaaggtgatcctggcttccccagagacatccagcgccaagcaactcatattcaccacctcagacaacctcgtccctggcaggatccagattgtcacggattctgcctctgtggagcgtttactggggaagacggacgtccagcggccccaggtggtagagtactgtgtggtctgtggcgacaaagcctccggccgtcactatggggctgtcagttgtgaaggttgcaaaggtttcttcaaaaggagtgtgaggaaaaatttgacctacagctgccggagcaaccaagactgcatcatcaataaacatcaccggaaccgctgtcagttttgccggctgaaaaaatgcttagagatgggcatgaaaatggaatctgtgcagagtgaacggaagcccttcgatgtgcaacgggagaaaccaagcaattgtgctgcttcaactgagaaaatctatatccggaaagacctgagaagtcccctgatagctactcccacgtttgtggcagacaaagatggagcaagacaaacaggtcttcttgatccagggatgcttgtgaacatccagcagcctttgatacgtgaggatggtacagttctcctggccacggattctaaggctgaaacaagccagggagctctgggcacactggcaaatgtagtgacctcccttgccaacctaagtgaatctttgaacaacggtgacacttcagaaatccagccagaggaccagtctgcaagtgagataactcgggcatttgataccttagctaaagcacttaataccacagacagctcctcttctccaagcttggcagatgggatagacaccagtggaggagggagcatccacgtcatcagcagagaccagtcgacacccatcattgaggttgaaggccccctcctttcagacacacacgtcacatttaagctaacaatgcccagtccaatgccagagtacctcaacgtgcactacatctgtgagtctgcatcccgtctgcttttcctctcaatgcactgggctcggtcaatcccagcctttcaggcacttgggcaggactgcaacaccagccttgtgcgggcctgctggaatgagctcttcaccctcggcctggcccagtgtgcccaggtcatgagtctctccaccatcctggctgccattgtcaaccacctgcagaacagcatccaggaagataaactttctggtgaccggataaagcaagtcatggagcacatctggaagctgcaggagttctgtaacagcatggcgaagctggatatagatggctatgagtatgcataccttaaagctatagttctctttagccccgatcatccaggtttgaccagcacaagccagattgaaaaattccaagaaaaggcacagatggagttgcaggactatgttcagaaaacctactcagaagacacctaccgattggcccggatcctcgttcgcctgccggcactcaggctgatgagctccaacataacagaagaacttttttttactggtctcattggcaatgtttcgatagacagcataatcccctacatcctcaagatggagacagcagagtataatggccagatcaccggagccagtctatagcgcaaaccacacacctgccaa

SEQ ID NO: 328550 - DNA, 2494 bp, Artificial Sequence
  derived and/or modified sequence
aacattcgccctcctcctaccagcgcgcgggcggcggcggcggcggcaccggggtcacgaactctgacctttcactgacaaaaacaataacaaacccccccttctccgcgaccccggcggcgcccccgggcccgtccccgccaccccgctcccacctcggcgtctcgtctctcgcccgctgccccgcgagcccgcggcccccgggctcccgccatccgccgacaccgggagcccgggctccccgcgccctgccctccgcgccgggggccgcccgccgcagacacgggacccgcttcgaggccgctttggcgccaaatcctgaggtaacacgtacacagacctctcggccggaatctccagggatgaccagcccctccccacgcatccagataatctccaccgactctgctgtagcctcacctcagcgcattcagattgtcacagaccagcagacaggacagaaaatccagatagtcaccgcagtggacgcctccggatcccccaaacagcagttcatcctgaccagcccagatggagctggaactgggaaggtgatcctggcttccccagagacatccagcgccaagcaactcatattcaccacctcagacaacctcgtccctggcaggatccagattgtcacggattctgcctctgtggagcgtttactggggaagacggacgtccagcggccccaggtggtagagtactgtgtggtctgtggcgacaaagcctccggccgtcactatggggctgtcagttgtgaaggttgcaaaggtttcttcaaaaggagtgtgaggaaaaatttgacctacagctgccggagcaaccaagactgcatcatcaataaacatcaccggaaccgctgtcagttttgccggctgaaaaaatgcttagagatgggcatgaaaatggaatctgtgcagagtgaacggaagcccttcgatgtgcaacgggagaaaccaagcaattgtgctgcttcaactgagaaaatctatatccggaaagacctgagaagtcccctgatagctactcccacgtttgtggcagacaaagatggagcaagacaaacaggtcttcttgatccagggatgcttgtgaacatccagcagcctttgatacgtgaggatggtacagttctcctggccacggattctaaggctgaaacaagccagggagctctgggcacactggcaaatgtagtgacctcccttgccaacctaagtgaatctttgaacaacggtgacacttcagaaatccagccagaggaccagtctgcaagtgagataactcgggcatttgataccttagctaaagcacttaataccacagacagctcctcttctccaagcttggcagatgggatagacaccagtggaggagggagcatccacgtcatcagcagagaccagtcgacacccatcattgaggttgaaggccccctcctttcagacacacacgtcacatttaagctaacaatgcccagtccaatgccagagtacctcaacgtgcactacatctgtgagtctgcatcccgtctgcttttcctctcaatgcactgggctcggtcaatcccagcctttcaggcacttgggcaggactgcaacaccagccttgtgcgggcctgctggaatgagctcttcaccctcggcctggcccagtgtgcccaggtcatgagtctctccaccatcctggctgccattgtcaaccacctgcagaacagcatccaggaagataaactttctggtgaccggataaagcaagtcatggagcacatctggaagctgcaggagttctgtaacagcatggcgaagctggatatagatggctatgagtatgcataccttaaagctatagttctctttagccccgatcatccaggtttgaccagcacaagccagattgaaaaattccaagaaaaggcacagatggagttgcaggactatgttcagaaaacctactcagaagacacctaccgattggcccggatcctcgttcgcctgccggcactcaggctgatgagctccaacataacagaagaacttttttttactggtctcattggcaatgtttcgatagacagcataatcccctacatcctcaagatggagacagcagagtataatggccagatcaccggagccagtctatagcgcaaaccacacacctgccaaggagcaacagaatccttccaggaccgttcacatacaaagaaaagtagtggtattttggtatgtgcaaatatttccatatgttagccatttcctgtctggtttctccttatctgttaatcccagacaatagcaattaaaagactagtaggatcctttcctgacataagaaatgttttaatgccttttgatgaagcagcagattttggaacaatcttttaactcaatttgtatttagaaattctcaaagggcaaaaaacaaaaaaaaaggttttataatgtcagagactagtattaaagaaaactgaaagaacctgagagaa

SEQ ID NO: 328551 - protein, 140 aa, Artificial Sequence
  derived and/or modified sequence
MARKRAAGGEPRGRELRSQKSKAKSKARREEEEEDAFEDEKPPKKSLLSKVSQGKRKRGCSHPGGSADGPAKKKVAKVTVKSENLKVIKDEALSDGDDLRDFPSDLKKAHHLKRGATMNEDSNEEEEESENDWEEVEVKR

SEQ ID NO: 328552 - protein, 76 aa, Artificial Sequence
  derived and/or modified sequence
KATQRRPHGRERRVASRVSYKEESGSDEAGSGSDFELSSGEASDPSDEDSEPGPPKQRKAPAPQRTKAGSKSASRT

SEQ ID NO: 328553 - protein, 168 aa, Artificial Sequence
  derived and/or modified sequence
MARKRAAGGEPRGRELRSQKSKAKSKARHAFEDEKPPKKSLLSKVSQGKRKRGCSHPGGSADGPAKKKVAKVTVKSENLKVIKDEALSDGDDLRDFPSDLKKAHHLKRGATMNEDSNEEEEESENDWEEVEELSEPVLGDVRESTAFSRSLLPVKPVEIEIETPEQAK

SEQ ID NO: 328554 - protein, 153 aa, Artificial Sequence
  derived and/or modified sequence
SSSKRGKKMCSDGEKAEKRSIAGIDQWLEVFCEQEEKWVCVDCVHGVVGQPLTCYKYATKPMTYVVGIDSDGWVRDVTQRYDPVWMTVTRKCRVDAEWWAETLRPYQSPFMDREKKEDLEGLCAHSAFQGHVAEESKSGEAWRSTLQDGERLF

SEQ ID NO: 328555 - DNA, 423 bp, Artificial Sequence
  derived and/or modified sequence
atggccagaaagagagccgccggcggcgagcccagaggcagagagctgagaagccagaagagcaaggccaagagcaaggccagaagagaggaggaggaggaggacgccttcgaggacgagaagccccccaagaagagcctgctgagcaaggtgagccagggcaagagaaagagaggctgcagccaccccggcggcagcgccgacggccccgccaagaagaaggtggccaaggtgaccgtgaagagcgagaacctgaaggtgatcaaggacgaggccctgagcgacggcgacgacctgagagacttccccagcgacctgaagaaggcccaccacctgaagagaggcgccaccatgaacgaggacagcaacgaggaggaggaggagagcgagaacgactgggaggaggtggaggtgaagagatag

SEQ ID NO: 328556 - DNA, 507 bp, Artificial Sequence
  derived and/or modified sequence
atggccagaaagagagccgccggcggcgagcccagaggcagagagctgagaagccagaagagcaaggccaagagcaaggccagacacgccttcgaggacgagaagccccccaagaagagcctgctgagcaaggtgagccagggcaagagaaagagaggctgcagccaccccggcggcagcgccgacggccccgccaagaagaaggtggccaaggtgaccgtgaagagcgagaacctgaaggtgatcaaggacgaggccctgagcgacggcgacgacctgagagacttccccagcgacctgaagaaggcccaccacctgaagagaggcgccaccatgaacgaggacagcaacgaggaggaggaggagagcgagaacgactgggaggaggtggaggagctgagcgagcccgtgctgggcgacgtgagagagagcaccgccttcagcagaagcctgctgcccgtgaagcccgtggagatcgagatcgagacccccgagcaggccaagtag

SEQ ID NO: 328557 - DNA, 462 bp, Artificial Sequence
  derived and/or modified sequence
agcagcagcaagagaggcaagaagatgtgcagcgacggcgagaaggccgagaagagaagcatcgccggcatcgaccagtggctggaggtgttctgcgagcaggaggagaagtgggtgtgcgtggactgcgtgcacggcgtggtgggccagcccctgacctgctacaagtacgccaccaagcccatgacctacgtggtgggcatcgacagcgacggctgggtgagagacgtgacccagagatacgaccccgtgtggatgaccgtgaccagaaagtgcagagtggacgccgagtggtgggccgagaccctgagaccctaccagagccccttcatggacagagagaagaaggaggacctggagggcctgtgcgcccacagcgccttccagggccacgtggccgaggagagcaagagcggcgaggcctggagaagcaccctgcaggacggcgagagactgttctag

SEQ ID NO: 328558 - DNA, 177 bp, Artificial Sequence
  derived and/or modified sequence
atgtgcagcgacggcgagaaggccgagaagagaagcatcgccggcatcgaccagtggctggaggtgttctgcgagcaggaggagaagtgggtgtgcgtggactgcagatgcggcggccccgccagcgacctgctgcaggtgagacaccaggcccacgacctgtgcggcggccactag

SEQ ID NO: 328559 - DNA, 231 bp, Artificial Sequence
  derived and/or modified sequence
aaggccacccagagaagaccccacggcagagagagaagagtggccagcagagtgagctacaaggaggagagcggcagcgacgaggccggcagcggcagcgacttcgagctgagcagcggcgaggccagcgaccccagcgacgaggacagcgagcccggcccccccaagcagagaaaggcccccgccccccagagaaccaaggccggcagcaagagcgccagcagaacctag

SEQ ID NO: 328560 - DNA, 423 bp, Artificial Sequence
  derived and/or modified sequence
atggccaggaaacgagcagccggtggcgagcctcgcggtcgagagttacgcagtcagaagtcgaaggccaaatcaaaagctagacgagaagaggaggaagaggatgcattcgaagatgagaaaccaccaaagaagtctctcctgtcgaaggttagccagggcaagcgtaaacgcggctgctcacatccagggggctcagcagacggtccagctaagaaaaaagttgccaaggtcacagtgaagagcgagaacctgaaggttattaaagatgaggctctgtcagatggagatgatctaagagatttccccagcgaccttaaaaaggcccaccatcttaagaggggggctactatgaatgaggacagtaacgaagaggaagaagaaagcgagaacgactgggaggaggtcgaggtgaagaggtag

SEQ ID NO: 328561 - DNA, 507 bp, Artificial Sequence
  derived and/or modified sequence
atggcgaggaaacgtgcggcaggaggagaaccgaggggtcgggaactgagaagtcagaaaagcaaggcgaagtcaaaggccagacatgctttcgaagatgagaagcccccaaagaaatcattactgtccaaagtaagtcagggcaaacgcaagcgtggctgttcccaccctggcggctctgcagacggaccagccaaaaaaaaggtggccaaggtcacggtgaaaagcgagaacctcaaggtcattaaggatgaggctctttccgacggggatgacctgcgagactttccatctgaccttaagaaagctcaccacctgaagcgcggagcaactatgaatgaagatagcaacgaggaggaagaggagtcagagaatgactgggaggaggttgaagagctctcagagcctgtgcttggagacgttcgggaatcgaccgctttcagccggagcctactaccagtaaaaccggtcgagatcgagattgaaacaccagagcaggccaagtag

SEQ ID NO: 328562 - DNA, 462 bp, Artificial Sequence
  derived and/or modified sequence
agcagcagtaaacgtggcaagaagatgtgttcagatggcgaaaaggccgagaaacggtctatagctggtattgaccaatggctggaagtcttttgcgaacaggaggagaagtgggtgtgcgtcgactgtgtccatggcgtggtaggacaaccgttaacttgctacaagtacgcgactaaacccatgacatacgtggtgggcattgacagcgatggatgggtgcgtgatgtgacccagcggtatgaccccgtgtggatgacagttacccgcaagtgcagggtggatgccgaatggtgggctgaaacactgcggccataccagagccccttcatggatcgcgaaaaaaaggaggacctggagggcttgtgtgcccactccgcgtttcaggggcacgttgccgaagaatctaaatctggtgaggcctggcggtccactctgcaagacggcgagaggctgttctag

SEQ ID NO: 328563 - DNA, 177 bp, Artificial Sequence
  derived and/or modified sequence
atgtgctccgatggcgagaaagccgagaagagaagtattgcgggcatcgaccagtggctggaagtgttctgcgagcaggaggagaaatgggtgtgtgttgattgcaggtgcggaggacccgcttcagacctactgcaggtgcgccaccaggctcacgacctttgcggcggacattag

SEQ ID NO: 328564 - DNA, 231 bp, Artificial Sequence
  derived and/or modified sequence
aaagccacccagagaaggccccatggccgtgaacggcgagtcgctagccgagtgtcttacaaggaggagtccggttccgatgaagctggcagcggaagcgatttcgagttaagctcaggtgaggcatcagaccccagcgacgaggactctgagccagggccccccaagcagagaaaagcccccgccccgcagcgcaccaaggcggggtcaaagagtgcatctagaacctag

SEQ ID NO: 328565 - DNA, 423 bp, Artificial Sequence
  derived and/or modified sequence
atggccaggaagagagctgctggaggagagccccggggccgggagctgcggagccagaagagcaaggccaagagcaaggcccggcgggaggaggaggaggaggatgcctttgaagatgagaagccacccaagaagagcctgctgagcaaggtgtcccagggcaagaggaagaggggctgcagccaccctgggggcagcgcagatggccctgccaagaagaaggtggccaaggtgacagtgaagtctgagaacctgaaggtgatcaaggatgaggccctgagtgatggagatgacctgcgggacttccccagcgacctgaagaaggcccaccacctgaagagaggagccaccatgaatgaagacagcaatgaggaggaggaggagagtgaaaatgactgggaggaggtggaggtgaagaggtag

SEQ ID NO: 328566 - DNA, 507 bp, Artificial Sequence
  derived and/or modified sequence
atggccaggaagagagctgctggaggagagccccggggccgggagctgcggagccagaagagcaaggccaagagcaaggcccggcatgcctttgaagatgagaagccacccaagaagagcctgctgagcaaggtgtcccagggcaagaggaagaggggctgcagccaccctgggggcagcgcagatggccctgccaagaagaaggtggccaaggtgacagtgaagtctgagaacctgaaggtgatcaaggatgaggccctgagtgatggagatgacctgcgggacttccccagcgacctgaagaaggcccaccacctgaagagaggagccaccatgaatgaagacagcaatgaggaggaggaggagagtgaaaatgactgggaggaggtggaggagctgtctgagcctgtgctgggagatgtgcgggagagcacagccttcagccgcagcctgctgcctgtgaagcctgtggagattgaaattgagaccccagagcaggccaagtag

SEQ ID NO: 328567 - DNA, 462 bp, Artificial Sequence
  derived and/or modified sequence
agcagcagcaagaggggcaagaagatgtgcagtgatggagagaaggccgagaagaggagcattgctggcatcgaccagtggctggaggtgttctgtgagcaggaggagaagtgggtgtgtgtggactgtgtgcatggagtggtgggccagcccctgacctgctacaagtatgccaccaagcccatgacctacgtggtgggcatcgacagtgatggctgggtgagagatgtgacccagagatatgaccctgtgtggatgacagtgaccaggaaatgtcgggtggatgctgagtggtgggccgagaccctgcggccctaccagagccccttcatggaccgggagaagaaggaggacctggagggcctgtgtgcccacagcgccttccagggccacgtggccgaggagagcaagagcggggaggcctggaggagcaccctgcaggatggagagcggctcttctag

SEQ ID NO: 328568 - DNA, 177 bp, Artificial Sequence
  derived and/or modified sequence
atgtgcagtgatggagagaaggccgagaagaggagcattgctggcatcgaccagtggctggaggtgttctgtgagcaggaggagaagtgggtgtgtgtggactgccgctgtggcggccctgccagtgacctgctgcaggtgcgccaccaggcccatgacctgtgtggcggccactag

SEQ ID NO: 328569 - DNA, 231 bp, Artificial Sequence
  derived and/or modified sequence
aaggccacccagaggcggccccacggccgggagcggcgggtggccagccgggtgtcctacaaggaggagagcggcagtgatgaagctggcagcggcagtgactttgagctgagcagtggagaggccagtgaccccagtgatgaggacagcgagcccggcccccccaagcagaggaaggccccagccccccagaggaccaaggccggcagcaagagcgccagcaggacatag

SEQ ID NO: 328570 - DNA, 423 bp, Artificial Sequence
  derived and/or modified sequence
atggcccggaagcgggccgccggcggcgagccccggggccgggagttgaggtctcaaaagagcaaggccaaatctaaagccaggagagaggaagaggaagaggacgcgtttgaggacgaaaagccgccaaaaaagagccttctgtctaaggtcagccagggcaaaaggaagcggggctgtagccatcctggcggctccgctgacggtccggctaaaaagaaggttgcgaaagtgactgttaaaagtgagaacctgaaggtgattaaggacgaggctctttcagacggcgacgatctgcgcgactttccctctgacctgaaaaaggcccatcacctgaaacgcggcgccactatgaatgaggactctaacgaagaagaggaggaaagcgagaatgattgggaggaagtcgaggtgaaaagatag

SEQ ID NO: 328571 - DNA, 507 bp, Artificial Sequence
  derived and/or modified sequence
atggcccggaagcgggccgccggcggcgagccccggggccgggagctgagaagtcaaaaatccaaagctaaatcgaaagccagacacgcatttgaggatgagaagccacccaaaaagagcttacttagtaaagtgtcccagggtaagcgaaagagaggatgcagtcatcccggcgggtcggctgacggacctgccaaaaagaaagtggccaaggtgacggtcaaaagcgagaatctgaaggtgattaaagacgaggctctttctgacggggatgaccttcgagacttccccagtgaccttaaaaaagctcaccatctcaaacggggagctaccatgaacgaggactcaaacgaggaagaagaagagtctgagaatgattgggaggaagtagaggaattatcggaacccgttttgggcgacgtgagagagagtactgccttctctagatcactgctcccagtcaaaccagtggagattgaaatcgagactcctgagcaagcgaagtag

SEQ ID NO: 328572 - DNA, 462 bp, Artificial Sequence
  derived and/or modified sequence
agcagcagcaagcggggcaagaagatgtgcagcgacggcgagaaggccgaaaagcgctcaattgctggtatcgaccagtggctggaggtcttctgtgaacaagaggagaagtgggtctgcgttgactgcgtccacggagttgtgggccagccactcacctgctataagtacgccaccaaacccatgacctacgtggtgggcattgatagcgatgggtgggttagggatgtgacccaaagatatgaccctgtgtggatgacggtgactcgaaaatgccgggttgatgccgaatggtgggcagagactctcaggccttaccagagcccattcatggaccgagaaaaaaaagaggacctggaggggttgtgtgcccacagtgcctttcagggccacgtggctgaggaaagcaagagtggagaggcgtggcgatcgacactccaggacggagagagactcttttag

SEQ ID NO: 328573 - DNA, 177 bp, Artificial Sequence
  derived and/or modified sequence
atgtgcagcgacggcgagaaggccgagaagcggagcatcgccggcatcgatcagtggctcgaagtcttctgtgaacaggaagagaagtgggtgtgcgtggattgcaggtgtggcggtcccgcaagcgacttgctgcaggttagacaccaggcccatgacctgtgcggcggtcactag

SEQ ID NO: 328574 - DNA, 231 bp, Artificial Sequence
  derived and/or modified sequence
aaggccacccagcggcggccccacggccgggagcggcgggtggccagccgggtgagttacaaggaagagagcggctcagatgaggcaggttctggttccgatttcgaacttagctcaggagaggcatctgatccatcggatgaggactccgaaccaggcccacctaagcaacgaaaggcacctgctccccagcggaccaaagccgggtctaagagcgcctcccgcacctag

SEQ ID NO: 328575 - DNA, 423 bp, Artificial Sequence
  derived and/or modified sequence
atggcccgtaagagggctgcaggtggagaacccaggggccgagaactccgatcccagaagagcaaagccaagagcaaagcacgaagagaggaagaagaagaggatgctttcgaggacgagaagccaccaaagaaaagcctgttgtcaaaagtctctcaggggaagaggaagcgtggatgcagtcatcccggtggtagcgccgatggccctgcaaagaagaaggtagccaaagtgacagtgaagtcagaaaacctgaaggttatcaaggacgaagccctttcagatggggatgaccttcgagattttcccagcgatctgaagaaagcccaccacctgaaacgcggagcaactatgaatgaggatagcaatgaagaggaggaagagagcgaaaatgactgggaggaagtggaggtgaagagatag

SEQ ID NO: 328576 - DNA, 507 bp, Artificial Sequence
  derived and/or modified sequence
atggccaggaagcgcgctgccggtggcgagcctcgtggacgcgagctgcgctcacagaagtcaaaggccaagtctaaagctagacacgctttcgaagacgaaaaaccccctaagaagtccctgctctccaaggtgtcacaaggtaaaaggaaacgaggctgcagccaccccggtggcagtgccgatggtccagctaagaaaaaagtggcgaaagtgactgtgaagtcagagaacttaaaggtcattaaggacgaggcattgtcggacggtgacgatctgcgggatttcccctcggaccttaaaaaggcacaccacctgaagagaggcgctaccatgaacgaggacagtaatgaggaggaggaggagtccgagaacgactgggaggaggtggaggaattaagtgaacccgtgcttggcgatgtccgggagtctactgctttctcccggtcgttgcttccggtgaagcctgtggaaatcgagatagaaactccagaacaggcgaagtag

SEQ ID NO: 328577 - DNA, 462 bp, Artificial Sequence
  derived and/or modified sequence
tccagtagtaaacggggtaaaaagatgtgttctgacggtgaaaaggcagagaagagatctatcgccggtattgaccaatggctggaggtgttttgcgagcaggaggagaaatgggtgtgcgtggactgtgtccacggtgtggtgggccagcccttgacatgctataaatacgccactaagccaatgacctacgttgtcgggattgactccgacggctgggtgcgagacgtgactcaaagatacgaccccgtgtggatgacggtcacccgaaaatgcagggttgatgctgagtggtgggcggagactctgagaccttaccagtcgccattcatggatcgcgagaagaaggaagacctggaggggttatgtgcccatagcgccttccagggacacgtggccgaagaaagcaaatcgggcgaggcctggagatcaacattgcaggacggagaaaggctattttag

SEQ ID NO: 328578 - DNA, 177 bp, Artificial Sequence
  derived and/or modified sequence
atgtgctcagacggggagaaagctgaaaaaaggagcatcgcaggcatcgatcagtggctggaggttttctgcgagcaggaggagaaatgggtctgcgttgattgccggtgcggtggaccagcctcagacctcctacaggtgcgccatcaggcgcatgatctctgtggtggtcattag

SEQ ID NO: 328579 - DNA, 231 bp, Artificial Sequence
  derived and/or modified sequence
aaagccacgcagagacgacctcatgggcgagaaagaagggtggcttccagagtatcctacaaagaggagagtgggtcagatgaagccggatccggatccgatttcgaactcagttccggcgaagcatccgatcccagcgacgaggatagtgagcctggacctccgaagcagagaaaagccccagccccacaacgtactaaggccggatccaagagtgccagccgcacctag

SEQ ID NO: 328580 - DNA, 557 bp, Artificial Sequence
  derived and/or modified sequence
gcatcgcggccgggtgcgtcactcgcgaagtggaatttgcccagacaagcaacatggctcggaaacgcgcggccggcggggagccgcggggacgcgaactgcgcagccagaaatccaaggccaagagcaaggcccggcatgcctttgaagatgagaaacccccaaagaagagccttctctccaaagtttcacaaggaaagaggaaaagaggctgcagtcatcctgggggttcagcagatggtccagcaaaaaagaaagtggccaaggtgactgttaaatctgaaaacctcaaggttataaaggatgaagccctcagcgatggggatgacctcagggactttccaagtgacctcaagaaggcacaccatctgaagagaggggctaccatgaatgaagacagcaatgaagaagaggaagaaagtgaaaatgattgggaagaggttgaagaacttagtgagcctgtgctgggtgacgtgagagaaagtacagccttctctcgatctcttctgcctgtgaagccagtggagatagagattgaaacgccagagcaggcgaag

SEQ ID NO: 328581 - protein, 1854 aa, Artificial Sequence
  derived and/or modified sequence
ANGTECRSGWVGPNGGITNFDNFAFAMLTVFQCITMEGWTDVLYWMNDAMGFELPWVYFVSLVIFGSFFVLNLVLGVLSGEFSKEREKAKARGDFQKLREKQQLEEDLKGYLDWITQAEDIDPENEEEGGEEGKRNTSMPTSETESVNTENVSGEGENRGCCGSLWCWWRRRGAAKAGPSGCRRWGQAISKSKLSRRWRRWNRFNRRRCRAAVKSVTFYWLVIVLVFLNTLTISSEHYNQPDWLTQIQDIANKVLLALFTCEMLVKMYSLGLQAYFVSLFNRFDCFVVCGGITETILVELEIMSPLGISVFRCVRLLRIFKVTRHWTSLSNLVASLLNSMKSIASLLLLLFLFIIIFSLLGMQLFGGKFNFDETQTKRSTFDNFPQALLTVFQILTGEDWNAVMYDGIMAYGGPSSSGMIVCIYFIILFICGNYILLNVFLAIAVDNLADAESLNTAQKEEAEEKERKKIARKESLENKKNNKPEVNQIANSDNKVTIDDYREEDEDKDPYPPCDVPVGEEEEEEEEDEPEVPAGPRPRRISELNMKEKIAPIPEGSAFFILSKTNPIRVGCHKLINHHIFTNLILVFIMLSSAALAAEDPIRSHSFRNTILGYFDYAFTAIFTVEILLKMTTFGAFLHKGAFCRNYFNLLDMLVVGVSLVSFGIQSSAISVVKILRVLRVLRPLRAINRAKGLKHVVQCVFVAIRTIGNIMIVTTLLQFMFACIGVQLFKGKFYRCTDEAKSNPEECRGLFILYKDGDVDSPVVRERIWQNSDFNFDNVLSAMMALFTVSTFEGWPALLYKAIDSNGENIGPIYNHRVEISIFFIIYIIIVAFFMMNIFVGFVIVTFQEQGEKEYKNCELDKNQRQCVEYALKARPLRRYIPKNPYQYKFWYVVNSSPFEYMMFVLIMLNTLCLAMQHYEQSKMFNDAMDILNMVFTGVFTVEMVLKVIAFKPKHYFTDAWNTFDALIVVGSVVDIAITEVNPTESENVPVPTATPGNSEESNRISITFFRLFRVMRLVKLLSRGEGIRTLLWTFIKSFQALPYVALLIAMLFFIYAVIGMQMFGKVAMRDNNQINRNNNFQTFPQAVLLLFRCATGEAWQEIMLACLPGKLCDPESDYNPGEEYTCGSNFAIVYFISFYMLCAFLIINLFVAVIMDNFDYLTRDWSILGPHHLDEFKRIWSEYDPEAKGRIKHLDVVTLLRRIQPPLGFGKLCPHRVACKRLVAMNMPLNSDGTVMFNATLFALVRTALKIKTEGNLEQANEELRAVIKKIWKKTSMKLLDQVVPPAGDDEVTVGKFYATFLIQDYFRKFKKRKEQGLVGKYPAKNTTIALQAGLRTLHDIGPEIRRAISCDLQDDEPEETKREEEDDVFKRNGALLGNHVNHVNSDRRDSLQQTNTTHRPLHVQRPSIPPASDTEKPLFPPAGNSVCHNHHNHNSIGKQVPTSTNANLNNANMSKAAHGKRPSIGNLEHVSENGHHSSHKHDREPQRRSSVKRTRYYETYIRSDSGDEQLPTICREDPEIHGYFRDPHCLGEQEYFSSEECYEDDSSPTWSRQNYGYYSRYPGRNIDSERPRGYHHPQGFLEDDDSPVCYDSRRSPRRRLLPPTPASHRRSSFNFECLRRQSSQEEVPSSPIFPHRTALPLHLMQQQIMAVAGLDSSKAQKYSPSHSTRSWATPPATPPYRDWTPCYTPLIQVEQSEALDQVNGSLPSLHRSSWYTDEPDISYRTFTPASLTVPSSFRNKNSDKQRSADSLVEAVLISEGLGRYARDPKFVSATKHEIADACDLTIDEMESAASTLLNGNVRPRANGDVGPLSHRQDYELQDFGPGYSDEEPDPGRDEEDLADEMICITTL

SEQ ID NO: 328582 - DNA, 96 bp, Artificial Sequence
  derived and/or modified sequence
atgagaccgggatggtctcacctgccgctatgtcctactctccaggacgcagtgctcgggcatttcttgtcccaccttggacgacgccacctatag

SEQ ID NO: 328583 - DNA, 5565 bp, Artificial Sequence
  derived and/or modified sequence
gctaatgggacagagtgtcgctcaggttgggtgggcccaaatggcgggatcacgaatttcgataactttgcattcgccatgttgactgtatttcagtgtataaccatggaagggtggactgatgtgctgtactggatgaacgatgcaatgggctttgagctcccttgggtctacttcgtgtcactcgttatctttgggagcttcttcgtgctcaacttggtgcttggcgtacttagcggcgaattctctaaagaaagggagaaggcgaaagctcgtggcgacttccagaagttacgagagaaacagcagttggaggaggacctgaagggttatctcgattggattactcaggccgaagacattgaccccgaaaatgaagaagaggggggcgaagagggtaagcgtaacacaagtatgcctacgtccgaaaccgagagcgtgaataccgagaacgttagtggagagggggagaatagaggatgctgcggatctctgtggtgctggtggaggcggcgcggcgctgcaaaggctggtccttcgggatgtcgcagatggggacaagcaattagtaagtccaaactgagccgaagatggcggcgctggaatcgcttcaatcgacggaggtgccgagcagccgtcaagagtgtaaccttctactggctcgttatcgtactggtgtttctgaatactctcaccatatcttctgagcactacaatcaacccgattggttgacacagatccaagacatcgcaaacaaggttctattggctctatttacttgcgagatgctggtcaagatgtattctttaggcctccaggcctattttgtatcattattcaaccgctttgattgcttcgtggtatgtggaggcatcaccgaaaccatattagtggaactagagattatgtcacctctgggaattagtgtctttcgctgcgtccgtctgctccggatatttaaagtgacccggcattggactagcttaagtaacctggtcgcatcccttctaaattcaatgaagagcatagcctcacttcttctcctgttattcctgttcatcatcatcttttctctgttgggtatgcagttatttggaggaaaatttaactttgacgaaactcagacaaaacggtccacctttgacaatttccctcaagccctgctgactgtcttccagattttgacgggagaggactggaacgctgtcatgtacgatgggataatggcctacggcggcccatctagtagcgggatgattgtgtgtatctattttatcatcctgttcatctgcgggaactacatcctcctgaatgtttttctcgccatcgctgtagataacctggcagatgcagaaagcctgaacaccgctcagaaggaggaggcagaagagaaggagaggaagaagattgcacgcaaagagtctttggaaaacaagaaaaataacaaaccagaggtgaaccagattgccaactctgacaataaggtgactattgacgactaccgggaagaagatgaggataaggatccctatcccccatgcgatgtgcctgtgggggaagaggaggaggaagaagaggaagacgaacccgaggtgcccgctggtccacggcccaggcgaattagcgagctcaatatgaaggagaagatagctcccatccccgagggcagcgccttttttattttgtccaaaaccaacccaattcgagtcggctgccataagcttattaatcatcacatctttacgaacctgatcctggtatttatcatgctgtcttcagctgcactggcggccgaggatcccatcagatctcacagctttcgtaataccattctgggctactttgattacgcctttacagcaattttcaccgtcgaaatcctactcaagatgaccacctttggcgcatttttacacaagggcgcattctgcaggaactattttaatctactagatatgctcgtggtgggtgtgtcgttggtaagttttgggatccagtcttccgcaatatctgtggtcaaaatcctgcgagtcctgagggtcttaagacccctacgggccatcaaccgagccaagggcctgaaacacgttgtccagtgcgtcttcgtggcaatccgtacgattggaaacatcatgatcgtgacgacactgctgcagttcatgttcgcctgtataggcgttcagctttttaaaggcaagttttacaggtgcacagacgaagctaagtcaaatccggaagagtgtagggggctgtttatcttgtacaaggacggcgatgtcgatagcccagttgttagagaacgaatatggcagaatagtgactttaacttcgacaacgttctgtccgccatgatggccctctttacagtctctacattcgaggggtggccagcgctgctgtataaggctatcgacagcaatggtgagaatattgggcccatctacaaccatagggtggagatctctatcttctttatcatctacatcattatcgtggccttttttatgatgaatatcttcgtaggattcgtcattgtaacatttcaggaacagggagagaaagagtataagaactgcgagcttgacaagaaccaacgccagtgcgtcgaatacgccttaaaggctcgcccactgcgtaggtacatccccaagaacccataccagtataagttttggtacgtggtaaattctagcccgttcgagtatatgatgttcgttttaataatgctcaacacactttgtctggctatgcagcattatgaacaaagcaagatgtttaacgatgccatggacatccttaacatggtttttacaggggtgtttacagtcgaaatggtcctgaaagtcatcgcttttaaacccaaacattattttacagacgcatggaatacctttgatgcactgatcgtagtgggctccgtagtggatatcgcaatcacagaggtgaacccaaccgagtccgaaaacgtccctgtgccaactgccacccccggcaattccgaggagagtaaccgcatttccatcaccttttttaggttatttcgagtcatgcgacttgtcaagctcctcagcagaggggagggaattcggacccttctttggaccttcatcaaatccttccaggcactgccatatgtggcgctattgatagcaatgttgtttttcatctatgcagtgatcggaatgcagatgttcggcaaagttgctatgcgcgataataaccagatcaaccggaataataatttccagaccttcccacaagccgtgctgctcctgtttagatgtgctaccggggaggcctggcaggagattatgctcgcatgcctcccgggcaaactgtgcgatcccgaatccgattacaatcccggcgaggagtatacatgtggctcaaatttcgcaattgtgtattttatttccttttatatgctatgtgcatttttgataatcaacttattcgttgctgttattatggacaattttgactatctgaccagggactggtcaatcctgggacctcaccacctcgacgaattcaaacggatatggagcgagtacgatccagaggccaaagggcggattaagcacttggacgttgttacactactgcgcaggattcagcctcccttgggatttggtaagctgtgtccacatcgtgtggcatgcaagcgcctggtcgcgatgaatatgcccttgaactcagacgggacagttatgttcaatgcgaccttgtttgccctggtgaggaccgcattgaagatcaaaacagaagggaacctcgagcaagccaacgaggaattacgggccgtgattaagaagatttggaagaaaacttcaatgaaactgctcgaccaggtggtgcctccagcaggagatgatgaggtcacggttggtaaattttatgctacgttcttgatccaggactattttcgaaaattcaaaaaaagaaaggaacagggactcgtgggaaagtaccctgcgaaaaacacaacgattgcacttcaggcaggacttcggaccctgcacgacatcggtcctgagatccgccgagccattagctgtgatctgcaggatgacgagccggaggagactaagcgagaagaggaggatgacgtctttaaacggaacggagccttgttaggaaatcacgtgaatcacgttaatagtgatagaagagactccctgcaacaaaccaacactacacaccgcccactgcacgtgcaaaggccatcaatacccccggccagtgacacagagaagcccctgttcccaccagcagggaattctgtttgccacaaccaccacaaccacaatagcattgggaagcaggtgccaaccagcacgaatgcgaatttgaacaacgccaacatgagcaaggccgctcatggcaagaggccctctattggtaacctggagcatgtgtctgaaaatggccatcacagctcgcataaacacgatagggaaccacagagaagaagctctgtgaagaggacccgttactacgagacgtacattcgctccgatagcggggatgaacaacttcccacaatttgtagagaagacccagaaattcacggctactttagggatccccattgtctgggcgagcaggaatatttctctagtgaggaatgttacgaggacgacagctcccctacctggtctaggcaaaactatggctactattcgagatatccaggaaggaatattgacagtgagagaccccggggatatcatcatccccagggcttcctagaggatgacgattcacctgtgtgctatgactctagacgaagtccacgcagaaggctgctgccacctacccccgctagtcacagaaggagctctttcaattttgaatgtctgcgtaggcaaagttcccaggaggaggtccccagcagtcctatttttccacacagaacagcactgcccttacatctgatgcagcaacagatcatggcggtggccgggctggatagtagcaaggctcagaaatatagcccgagccacagcaccagatcatgggccaccccgccggcgactccaccataccgagactggaccccatgttacacaccccttatccaggtggagcaatccgaggcccttgaccaggtcaacggctcgctgccttccctccatagaagctcttggtatactgacgaaccagacattagctatcgtacgttcacacccgcgagtcttaccgtaccatccagttttagaaacaagaattctgataagcagcggtctgccgattccctggtggaggccgtcctgattagtgagggcctgggtagatacgccagggatcctaagtttgtcagtgctaccaaacacgaaatcgccgacgcttgcgaccttactatagatgaaatggaaagtgccgcaagtactttgctgaacggcaatgttcgacccagggccaacggtgatgtaggacctctgtcccatagacaggactacgagttacaggacttcggccccggctacagcgacgaggaaccagatcctggacgggatgaggaggatctagccgatgaaatgatctgtataacgacgctgtag

SEQ ID NO: 328584 - DNA, 5565 bp, Artificial Sequence
  derived and/or modified sequence
gccaacggcacagaatgtcgcagcggctgggtgggccccaacggcggcatcaccaactttgacaactttgcctttgccatgctgactgtgttccagtgcatcaccatggagggctggacagatgtgctgtactggatgaatgatgccatgggctttgagctgccctgggtgtactttgtgtccctggtgatcttcggcagcttctttgtgctgaacctggtgctgggcgtgctgtctggagagttcagcaaggagcgggagaaggccaaggcccggggggacttccagaagctgcgggagaagcagcagctggaggaggacctgaagggctacctggactggatcacccaggctgaagatattgatcctgaaaatgaggaggagggcggggaggagggcaagaggaacacctccatgcccaccagcgagacagagagcgtgaacacagaaaatgtgtctggagaaggagaaaatagaggctgctgcggcagcctgtggtgctggtggaggagaagaggagctgccaaggccggccccagcggctgccgccgctggggccaggccatcagcaagagcaagctgagccgccgctggaggcgctggaaccgcttcaacagaagacgctgcagagctgctgtgaagtctgtgaccttctactggctggtgattgtgctggtgttcctgaacaccctgaccatcagcagcgagcactacaaccagcctgactggctgacccagatccaggacatcgccaacaaggtgctgctggccctcttcacctgtgagatgctggtgaagatgtacagcctgggcctgcaggcctactttgtgtccctcttcaacagatttgactgctttgtggtgtgtggcggcatcacagagaccatcctggtggagctggagatcatgagccccctgggcatctctgtgttccgctgtgtgcggctgctgcgcatcttcaaggtgaccaggcactggaccagcctgagcaacctggtggccagcctgctgaacagcatgaagagcatcgccagcctgctgctgctgctcttcctgttcatcatcatcttcagcctgctgggcatgcagctgtttggaggcaagttcaactttgatgagacccagaccaagaggagcacctttgacaacttcccccaggccctgctgaccgtcttccagatcctgaccggggaggactggaatgctgtgatgtatgatggcatcatggcctatggaggccccagcagcagcggcatgattgtgtgcatctacttcatcatcctcttcatctgtggcaactacatcctgctgaatgtgttcctggccatcgctgtggacaacctggctgatgctgagagcctgaacacagcccagaaggaggaggccgaggagaaggagaggaagaagatcgccaggaaggagagcctggagaacaagaagaacaacaagccagaggtgaaccagatcgccaacagcgacaacaaggtgaccattgatgactaccgggaggaggatgaggacaaggacccctacccaccctgtgatgtgcctgtgggggaggaggaggaggaggaggaggaggatgagcctgaggtgcctgctggcccccggccccggcgcatcagcgagctgaacatgaaggagaagatcgcccccatccctgagggcagcgccttcttcatcctgagcaagaccaaccccatccgggtgggctgccacaagctgatcaaccaccacatcttcaccaacctgatcctggtgttcatcatgctgagcagcgctgccctggccgctgaggaccccatccgcagccacagcttcaggaacaccatcctgggctactttgattatgccttcaccgccatcttcaccgtggagatcctgctgaagatgaccaccttcggggccttcctgcacaagggggccttctgcaggaactacttcaacctgctggacatgctggtggtgggcgtgtccctggtgtcctttggcatccagagcagcgccatctctgtggtgaagatcctgcgggtgctgcgggtgctgcggcccctgcgggccatcaacagagccaagggcctgaagcacgtggtgcagtgtgtgtttgtggccatccgcaccatcggcaacatcatgattgtgaccaccctgctgcagttcatgtttgcctgcattggagtgcagctgttcaagggcaagttctaccgctgcacagatgaggccaagagcaacccagaagaatgtcggggcctcttcatcctgtacaaggatggagatgtggacagccctgtggtgcgggagcgcatctggcagaacagcgacttcaactttgacaacgtgctgagcgccatgatggccctcttcaccgtgtccacctttgagggctggccagccctgctgtacaaggccatcgacagcaatggagaaaatattggccccatctacaaccaccgggtggagatcagcatcttcttcatcatctacatcatcatcgtggccttcttcatgatgaacatctttgtgggctttgtgattgtgaccttccaggagcagggcgagaaggagtacaagaactgtgagctggacaagaaccagaggcagtgtgtggagtatgccctgaaggcccggcccctgcggcgctacatccccaagaacccctaccagtacaagttctggtacgtggtgaacagcagcccctttgagtacatgatgtttgtgctgatcatgctgaacaccctgtgcctggccatgcagcactatgagcagagcaagatgtttaatgatgccatggacatcctgaacatggtgttcaccggggtcttcaccgtggagatggtgctgaaggtgattgccttcaagcccaagcactacttcacagatgcctggaacacctttgatgccctgattgtggtgggctctgtggtggacatcgccatcacagaggtgaaccccacagaaagtgaaaatgtgcctgtgcccacagccaccccaggcaacagcgaggagagcaaccgcatcagcatcaccttcttccgcctcttccgggtgatgaggctggtgaagctgctgagcagaggagagggcatccgcaccctgctgtggaccttcatcaagagcttccaggccctgccctacgtggccctgctgattgccatgctgttcttcatctatgctgtgattggcatgcagatgtttgggaaggtggccatgagggacaacaaccagatcaacagaaacaacaacttccagaccttcccccaggccgtgctgctgctcttccgctgtgccactggagaggcctggcaggagatcatgctggcctgcctgcccgggaagctgtgtgaccctgagagtgactacaaccctggagaggagtacacctgtggcagcaactttgccatcgtgtacttcatctccttctacatgctgtgtgccttcctgatcatcaacctgtttgtggccgtcatcatggacaactttgactacctgacccgggactggagcatcctgggcccccaccacctggatgagttcaagaggatctggagcgaatatgaccctgaggccaagggccgcatcaagcacctggatgtggtgaccctgctgcggcgcatccagccccccctgggctttgggaagctgtgcccccaccgggtggcctgcaagaggctggtggccatgaacatgcccctgaacagtgatggcaccgtgatgtttaatgccaccctgtttgccctggtgaggacagccctgaagatcaagacagagggcaacctggagcaggccaatgaggagctgcgggccgtcatcaagaagatctggaagaagacctccatgaagctgctggaccaggtggtgcccccagctggagatgatgaggtgacagtgggcaagttctacgccaccttcctgatccaggactacttcaggaagttcaagaagaggaaggagcagggcctggtgggcaagtacccagccaagaacaccaccatcgccctgcaggccggcctgcggaccctgcatgacatcggccctgagatccggcgggccatcagctgtgacctgcaggatgatgagcctgaggagaccaagcgggaggaggaggatgatgtgttcaagagaaatggagccctgctgggcaaccacgtgaaccacgtgaacagcgaccggcgggacagcctgcagcagaccaacaccacccaccggcccctgcacgtgcagaggcccagcatccccccagccagtgacacagagaagcccctcttccccccagctggcaacagcgtgtgccacaaccaccacaaccacaacagcatcggcaagcaggtgcccaccagcaccaatgccaacctgaacaatgccaacatgagcaaggccgcccacggcaagaggcccagcatcggcaacctggagcacgtgtctgaaaatggccaccacagcagccacaagcatgaccgggagccccagaggaggagctctgtgaagaggacccgctactatgagacctacatccgcagtgacagcggagatgagcagctgcccaccatctgcagagaagatcctgagatccacggctacttccgggacccccactgcctgggggagcaggagtacttcagcagtgaagaatgttatgaagatgacagcagccccacctggagccggcagaactacggctactacagccgctacccaggaagaaatattgattctgagcggccccggggctaccaccacccccagggcttcctggaggatgatgacagccctgtgtgctatgacagccgccgcagcccccggcggcggctgctgccccccaccccagccagccaccggcgcagcagcttcaactttgaatgtctgcggcggcagagcagccaggaggaggtgcccagcagccccatcttcccccacaggacagccctgcccctgcacctgatgcagcagcagatcatggctgtggccggcctggacagcagcaaggcccagaagtacagccccagccacagcaccaggtcctgggccaccccaccagccaccccaccctacagagactggaccccctgctacacccccctcatccaggtggagcagagcgaggccctggaccaggtgaatggcagcctgcccagcctgcacaggagctcctggtacacagatgagccagacatctcctaccgcaccttcaccccagccagcctgactgtgcccagcagcttcaggaacaagaacagcgacaagcagaggtctgctgacagcctggtggaggccgtgctgatcagcgagggcctgggccgctatgcccgggaccccaagtttgtgtctgccaccaagcatgaaattgctgatgcctgtgacctgaccattgatgagatggagagcgctgccagcaccctgctgaatggaaatgtgcggccccgggccaatggagatgtgggccccctgagccaccggcaggactatgagctgcaggactttggacctggctacagtgatgaggagccagaccccggcagagatgaggaggacctggctgatgagatgatctgcatcaccaccctgtag

SEQ ID NO: 328585 - DNA, 5565 bp, Artificial Sequence
  derived and/or modified sequence
gccaacggcaccgagtgccggagcggctgggtgggccccaacggcggcattacaaatttcgacaattttgctttcgcgatgttgacagtcttccagtgtatcactatggagggctggacggacgtgctatactggatgaacgacgccatgggcttcgaattgccatgggtctacttcgtttcgctggtcatttttggctccttctttgtgctgaatctggttctcggtgttctttcgggcgagtttagtaaggagcgagagaaggcgaaagcccgtggcgatttccaaaagctgagagagaaacaacagctggaagaggatcttaaaggctaccttgactggattacccaggccgaggacattgaccctgaaaacgaggaagaaggaggggaggaaggtaagaggaacaccagcatgccgacgtctgaaaccgaatcggtaaatacagagaatgtttccggagagggcgagaataggggttgttgtggatccctgtggtgctggtggcgcagaaggggagctgcgaaggcgggaccctcaggttgccggcggtggggacaagcgatttctaaatccaagctctctaggagatggcgacggtggaatcgattcaaccgtaggcgatgtcgagccgcggtgaaaagcgtcacgttttattggttggttattgtcctcgtgttcctgaacacgctcaccatctcctcagagcattataatcaacctgactggctgacacagatccaggacatagccaataaagtcctcctggccctctttacctgtgaaatgctcgtgaaaatgtatagtcttgggcttcaggcctactttgtctcccttttcaatcgcttcgactgcttcgtcgtatgtggaggtatcacagaaactatcctagtggaactagaaattatgagccctctggggatttcagtgttccggtgtgtgcgactgctgcgtatcttcaaggtcacacgacactggacttccctgtctaatctggtagccagcttgcttaatagcatgaagagtattgcctccctcttgctactgctctttctattcattataattttcagcttactgggcatgcaattgttcgggggcaaatttaactttgatgagacacaaaccaaaagaagtacgtttgacaactttccccaagccctgctgactgtctttcagatactgaccggcgaagattggaacgctgttatgtatgatggcattatggcttacggggggccctcctcttcgggcatgatagtatgcatctatttcattatactctttatttgtggcaattacattttactcaacgtctttttagccattgcagttgataatcttgcggacgcagaatcgctcaataccgcccaaaaggaggaagccgaggaaaaagagcggaaaaaaatagccagaaaagagtccctcgagaacaagaaaaacaataaaccggaggtcaaccagatagcgaatagtgataacaaggttacaatcgacgattacagggaggaggatgaggacaaggatccataccctccctgcgacgtccctgtcggggaagaggaagaggaggaagaagaggatgaaccggaggtgcccgccggtccaagaccaagaaggatcagtgagctgaacatgaaagagaagattgctccaatccctgaaggttcagcctttttcatcttatccaaaaccaatcctatccgggtgggctgccacaaactcatcaatcaccacattttcaccaaccttatccttgtgttcattatgctttcatccgccgctctcgccgccgaggatcccattcgtagccacagttttagaaacacaatactcggctacttcgactacgcgtttacagctatttttaccgtcgagattctgctaaaaatgactaccttcggggcttttctccacaaaggcgccttttgccgcaattatttcaatctgctggacatgctcgtagtcggtgtctccctcgtctcattcggaatccagagctccgcaattagtgtggtaaagatattgcgggtccttcgagtcctccggcccctgagggcaattaacagagccaaaggactcaaacacgtggtgcagtgcgttttcgttgctatacgcaccattggcaacattatgatcgttacaacacttctgcagtttatgtttgcctgtatcggcgttcagctcttcaagggaaagttttacaggtgtactgacgaggctaagagcaatccagaggagtgccggggactctttattctctataaagatggcgacgtcgactcccccgtcgtccgcgaacggatctggcagaattccgactttaactttgataacgtactgtccgcgatgatggcactgtttaccgtgagcacctttgaaggttggcccgctctgctttataaggctatcgattctaacggggaaaatatagggccaatttataatcacagggtggagattagtattttctttataatctacataatcatcgtcgcattcttcatgatgaacatatttgtggggtttgtaattgtgacttttcaagaacagggagagaaggaatataagaattgcgagctggataagaatcagagacagtgcgtcgagtatgctcttaaagcccggcctcttagacggtacataccgaagaatccatatcagtacaagttctggtacgttgtaaattccagtccatttgaatacatgatgtttgtactcatcatgctgaataccctgtgcttggcaatgcaacactacgagcagagtaagatgttcaacgacgcgatggatatcctgaacatggtctttacaggagtgttcactgtggaaatggtgctgaaggtcattgccttcaagccaaaacattattttacagatgcttggaacacctttgacgcactgattgtggtgggatctgtggtggacattgccatcactgaggtgaatcctactgaatcggagaatgttccagtgccgaccgcaactccaggtaactcagaagaaagtaatagaatatcaatcacattctttagactctttcgggtaatgagattagtgaaactcctttccagaggtgaaggtatccgaactctattgtggacatttatcaagagcttccaggccttaccctacgtagctctgcttatcgcaatgttgttctttatctacgctgtcatcgggatgcagatgttcgggaaagttgctatgcgggacaacaatcaaatcaacaggaacaacaacttccagacgttcccacaggccgttcttctactgttccgttgcgccacaggagaggcttggcaggagatcatgctggcatgcctgccaggcaaactctgcgatcctgagtcagactacaaccctggcgaggaatatacctgtggaagcaatttcgcaattgtgtacttcattagcttctacatgctctgcgcattcttgattattaacttatttgtcgctgtcatcatggacaattttgattatctgacccgggactggagtatcctcgggccgcatcacctggatgaatttaagaggatttggtcggaatacgaccctgaggccaaagggcgcatcaagcatctggacgttgtgacactgttgcgacgaatccagcctccactaggctttggaaaactgtgtccacacagggtggcctgcaaacgtttggtggcaatgaatatgcccctgaatagcgacggtacagtgatgttcaatgcaaccctgtttgcactagttcgtactgctttgaagattaagaccgagggaaacttggaacaagcaaacgaagagctgcgggcggtgattaagaagatttggaaaaagacctccatgaagcttctggaccaggttgttccgccagccggcgatgatgaagtgacagtcgggaaattctacgccactttccttattcaggattactttagaaaattcaaaaaaagaaaggaacaggggttagtcggtaagtatcccgccaagaatacgaccattgcattgcaagccggactgcgcactcttcatgacatcggccctgagattagacgtgccattagctgtgacttacaggatgatgagcccgaggaaacgaaaagggaggaagaggacgacgtgttcaagaggaatggcgctctgctggggaaccacgtgaatcacgtgaattccgacaggagggattcattgcagcagaccaacaccacccacaggccccttcatgtgcagcgcccctcaattcccccagcatcagataccgaaaagcccctgttcccacccgctggaaacagtgtgtgccataatcatcataatcacaattcaatagggaagcaggttcccacttctaccaatgccaacttgaacaacgccaatatgtcaaaagctgcacacggaaagcgtccatctataggtaatctcgaacatgtgagcgagaacggccaccatagtagccataagcatgacagagagccccagcgcaggtcatccgttaaacggacccggtactatgaaacttacattcgcagcgatagtggcgacgagcagctcccaacaatatgtcgcgaggatcctgagattcatgggtactttagggacccccactgcctcggtgagcaggaatacttctccagtgaggagtgctacgaggacgattccagtccaacttggtctaggcagaattatggctactattccaggtaccctggtaggaatatcgactccgagcgcccccggggctatcatcacccccagggatttcttgaagatgacgactcgccagtctgctatgatagcaggcgctccccacgacggaggttgctgcccccaacgcctgcctctcacaggaggtcctccttcaacttcgaatgtctgcgccgacagtcaagccaggaggaggtgccgagctcgccgatattccctcacaggaccgctctgccattgcacttaatgcagcagcagattatggcggtagcggggcttgactcttccaaagcccagaaatatagcccgagccattcaacgcgttcatgggctacacccccagctaccccaccctacagagattggactccgtgttacactcccctaatccaagtggagcagtccgaggctcttgatcaggtaaatggaagtctgccctccctccacagatcatcatggtatacggatgaaccggacatcagctacaggacgtttactcctgcaagtctcacagtcccctccagcttccgcaataagaactccgataaacagcgatcggcagactctctcgttgaggccgtgctcatctccgaagggctagggcggtatgcacgggaccctaaattcgtgtccgccacaaaacacgagatcgctgatgcttgtgatttgacaatcgacgaaatggaatcagccgcgtccaccctgctgaatggaaacgttaggccccgagcaaacggcgacgtggggccactcagtcaccgccaggactacgagttacaagattttggccctgggtatagtgacgaagagcccgatcctgggagagacgaggaggacctcgccgatgagatgatttgcattaccacactgtag

SEQ ID NO: 328586 - DNA, 5564 bp, Artificial Sequence
  derived and/or modified sequence
gccaacggcaccgaatgtcggagcggctgggttggacctaatgggggaatcactaacttcgacaactttgcctttgcaatgctgaccgtgtttcaatgcattacaatggaggggtggaccgacgtgctttactggatgaacgatgcgatggggttcgaactcccttgggtctactttgtctcgctggtgatttttggctcatttttcgtgctgaacctcgtgcttggcgtcctgtcaggcgagtttagcaaagagcgggaaaaggccaaagctagaggtgatttccagaagttaagggagaagcagcagttagaagaggacttgaagggctatttagactggatcacgcaggccgaggacatcgaccccgagaatgaggaggagggcggagaagaggggaaaaggaacacctcaatgccaacaagcgagaccgagtccgtgaacacagagaacgtgtccggggaaggggagaaccggggatgctgtgggagcctctggtgttggtggcggaggagaggagctgcgaaggctggccctagcggatgtcgaaggtggggccaagccatctccaaatcaaaactatcgcgcagatggcgaaggtggaatcggttcaaccgtcgaagatgccgggcagcagtgaaatccgttacattttactggttagtgatcgtgcttgtgttcctgaatactcttactatctcaagcgaacactataatcagccagattggcttacccaaattcaggacatcgctaacaaggtattgcttgcactcttcacctgtgaaatgctggttaaaatgtatagtctcggattacaggcctatttcgtgtcactgtttaatcgcttcgattgcttcgtcgtatgcggtggaatcacagagacaattctagttgagcttgagattatgtcccccctgggcataagcgtattcagatgtgtcaggctgttgcggatttttaaggtgacacgccactggactagcctatccaaccttgtggcctctcttctgaactccatgaagtcgatcgctagcctgctacttctgctcttcttattcatcatcatttttagtttgctgggcatgcaactgttcgggggtaagtttaatttcgatgagacccaaaccaaacgctccaccttcgataatttcccccaggctctactgacagtgttccagattttaactggcgaggattggaacgctgttatgtatgacggtattatggcttacggcggacctagcagtagcggcatgatcgtgtgcatctacttcattattctcttcatctgcggtaactatatattgctgaatgtgttcctggcaattgctgtcgacaacctggccgatgctgagagcctgaatactgcccaaaaggaagaagcagaagagaaagagcgaaagaaaattgcccgtaaggaatccttggagaacaagaagaacaataagccagaagtcaaccagatcgccaattctgacaacaaagtcactatcgatgattatcgcgaagaggacgaggacaaggacccatatccaccttgcgacgttcccgtgggagaggaagaagaggaagaagaggaagatgagcccgaagtgcccgcaggccctaggcctaggcgcattagtgaactcaacatgaaggaaaagatcgctcccattcctgagggcagtgccttcttcattctctccaagactaacccaattagggtgggatgtcataagcttatcaatcatcacatattcactaacctaattctcgtgttcattatgctgagtagcgctgcactggcggcagaagacccgattaggtcacatagctttaggaataccattctgggctacttcgattacgcctttacagccatttttaccgtggagatcctgctgaagatgaccacatttggcgcatttttgcataaaggcgcattctgccggaattattttaacctgctggatatgctggtcgttggagtttcactggtgtctttcggcattcaatccagcgcgatttccgtagtgaagatcttaagggtcctcagggtcctgagacctctcagagccatcaaccgcgctaaggggctgaaacatgtcgtgcagtgtgtgttcgtggccataagaactataggcaacatcatgatcgtaactactctgctgcagttcatgtttgcatgtatcggggttcagttatttaagggaaagttttaccgctgcacagatgaggccaaatcaaaccccgaggagtgcaggggactctttatcctctacaaagatggggatgtggactcaccagtcgtgagagagcgcatttggcagaatagcgacttcaacttcgataatgtcttgagcgcaatgatggctctgttcactgtgagtactttcgagggttggcccgctctcctttataaggccatcgacagtaacggcgagaacattggacccatctacaatcacagggtggagatcagcattttcttcatcatatatattattattgttgcgtttttcatgatgaatatctttgtgggcttcgttatcgtcacattccaggagcagggcgagaaggagtataagaattgcgaactggacaagaatcagcgccagtgcgttgaatacgcccttaaagctcggccactgagacgctacattcctaagaatccctatcaatataaattctggtatgtggttaactccagtcccttcgagtatatgatgtttgtgttgatcatgctgaataccttgtgtcttgccatgcaacattatgaacagagcaaaatgttcaatgacgccatggatatactcaatatggtgtttaccggcgtgtttacggtcgaaatggtgctgaaggtcattgcttttaaaccaaaacattattttactgacgcttggaatacgtttgatgcccttatagtggtaggatctgtggtagacatcgcgattacggaggtaaaccctaccgagagtgaaaatgtgcctgtgccaacggcgacccctggaaacagtgaagagagtaacaggatcagtatcaccttcttcaggctctttcgggttatgcgtctggttaaacttctcagtcgtggcgaaggcataaggacgctgctgtggacgttcatcaaaagttttcaggcactgccgtacgtagccttgctgattgccatgctcttttttatctatgccgtcattggaatgcagatgttcgggaaagtggcaatgcgcgacaacaatcaaatcaaccgtaacaacaactttcagacttttccgcaggccgttctcctgctattccggtgtgccacgggcgaggcctggcaagaaattatgcttgcatgcctcccaggcaagctgtgtgacccagaatcagactataaccccggagaagagtacacctgcggttcgaatttcgcgattgtctatttcatttcattttacatgctgtgtgcctttctaatcattaatcttttcgttgccgtcattatggacaacttcgactacctcacacgtgattggagtattctgggcccacaccatctggacgagttcaaaagaatttggtccgaatacgatccagaggcaaaaggccgaatcaaacacctggatgttgtgacacttctgcggaggatccagccgcctctcggctttgggaagctctgtccacacagagtagcgtgtaaacgtcttgttgccatgaatatgcctctcaactcagacggtacagtgatgttcaacgccacgctctttgcactggtcagaactgcgctgaagatcaaaacagaaggaaaccttgagcaggctaatgaagagttacgagctgtgatcaaaaagatttggaagaagaccagtatgaagctactggaccaagtcgttccccctgctggggatgatgaagttacagtcggcaagttttatgcaacattcctgatccaggactatttccggaagtttaaaaaaaggaaggaacaagggctggtagggaaatacccagccaagaacactactatcgcgctgcaagccggtcttcgcactctgcatgacattgggcctgagatcaggagagccataagttgcgacttacaagacgatgaacctgaggagactaagcgggaagaagaagatgacgttttcaagcggaatggtgctctgctgggaaaccacgtaaatcacgtaaactccgacaggcgggactcactgcagcagacgaacaccacacacaggcctctgcatgtacagagaccgtccatcccaccagccagtgacacagaaaagcctctgtttcctccagccggtaatagcgtgtgtcacaaccatcacaaccacaacagtatcggtaagcaggtgcctacctcgaccaacgccaacctcaataacgctaatatgtctaaggccgctcacgggaagcgaccctcaattggaaaccttgagcatgtgtctgaaaatggtcatcactcttcacataagcacgatcgggaacctcagagacgaagctcagtcaagcggacccgctattatgaaacttacataaggagcgacagtggagacgagcagctgcctactatttgtcgcgaggatcccgagattcatggctatttccgagaccctcattgcctgggagaacaggagtatttctcgtccgaagagtgctacgaggatgattcctcgcccacatggagccggcagaattatggctactacagtcggtacccagggaggaacattgattccgagcggccacggggataccaccatcctcaggggttcctggaggacgatgattctccagtgtgttatgacagtcgtagaagtccccgaagacgacttctgcctcccactccagcatctcaccgtcgctcgagtttcaatttcgagtgtcttagaaggcagtcctcccaggaagaagtcccatcaagccccatttttccccaccgcaccgcactgcctctgcacctgatgcagcagcaaatcatggccgtggccggtcttgactcgtctaaggcgcagaagtactctccctcgcattccacccggagttgggctactccacccgcaacccctccctatagggactggactccttgttacacacctctgattcaggtggaacagtcagaggctctggatcaagtaaatggatctctccccagtcttcaccggagctcttggtacactgacgaacctgatatatcgtatcgcaccttcactcctgcatcccttacagtgccctcgtctttcagaaataaaaattctgacaaacagaggagtgcagactctctggtcgaagcagtccttatatcagagggcttgggcagatatgctcgggaccccaaatttgtaagcgccactaaacatgagattgctgatgcctgcgacctgacgattgacgaaatggaatccgctgcatctactcttttgaatggaaatgtgcgccctcgggcaaatggagacgtaggacctttgagccaccgtcaagactacgaacttcaggactttggtcccggttacagtgatgaggaaccagaccccggacgtgacgaggaggatctcgctgacgaaatgatttgtattaccacacttta

SEQ ID NO: 328587 - DNA, 5667 bp, Artificial Sequence
  derived and/or modified sequence
gccaatggcacggaatgtaggagtggctgggttggcccgaacggaggcatcaccaactttgataactttgcctttgccatgcttactgtgtttcagtgcatcaccatggagggctggacagatgtgctctactggatgaatgatgctatgggatttgaattgccctgggtgtattttgtcagtctcgtcatctttgggtcatttttcgtactaaatcttgtacttggtgtattgagcggagaattctcaaaggaaagagagaaggcaaaagcacggggagatttccagaagctccgggagaagcagcagctggaggaggatctaaagggctacttggattggatcacccaagctgaggacatcgatccggagaatgaggaagaaggaggagaggaaggcaaacgaaatactagcatgcccaccagcgagactgagtctgtgaacacagagaacgtcagcggtgaaggcgagaaccgaggctgctgtggaagtctctggtgctggtggagacggagaggcgcggccaaggcggggccctctgggtgtcggcggtggggtcaagccatctcaaaatccaaactcagccgacgctggcgtcgctggaaccgattcaatcgcagaagatgtagggccgccgtgaagtctgtcacgttttactggctggttatcgtcctggtgtttctgaacaccttaaccatttcctctgagcactacaatcagccagattggttgacacagattcaagatattgccaacaaagtcctcttggctctgttcacctgcgagatgctggtaaaaatgtacagcttgggcctccaagcatatttcgtctctcttttcaaccggtttgattgcttcgtggtgtgtggtggaatcactgagacgatcttggtggaactggaaatcatgtctcccctggggatctctgtgtttcggtgtgtgcgcctcttaagaatcttcaaagtgaccaggcactggacttccctgagcaacttagtggcatccttattaaactccatgaagtccatcgcttcgctgttgcttctgctttttctcttcattatcatcttttccttgcttgggatgcagctgtttggcggcaagtttaattttgatgaaacgcaaaccaagcggagcacctttgacaatttccctcaagcacttctcacagtgttccagatcctgacaggcgaagactggaatgctgtgatgtacgatggcatcatggcttacgggggcccatcctcttcaggaatgatcgtctgcatctacttcatcatcctcttcatttgtggtaactatattctactgaatgtcttcttggccatcgctgtagacaatttggctgatgctgaaagtctgaacactgctcagaaagaagaagcggaagaaaaggagaggaaaaagattgccagaaaagagagcctagaaaataaaaagaacaacaaaccagaagtcaaccagatagccaacagtgacaacaaggttacaattgatgactatagagaagaggatgaagacaaggacccctatccgccttgcgatgtgccagtaggggaagaggaagaggaagaggaggaggatgaacctgaggttcctgccggaccccgtcctcgaaggatctcggagttgaacatgaaggaaaaaattgcccccatccctgaagggagcgctttcttcattcttagcaagaccaacccgatccgcgtaggctgccacaagctcatcaaccaccacatcttcaccaacctcatccttgtcttcatcatgctgagcagcgctgccctggccgcagaggaccccatccgcagccactccttccggaacacgatactgggttactttgactatgccttcacagccatctttactgttgagatcctgttgaagatgacaacttttggagctttcctccacaaaggggccttctgcaggaactacttcaatttgctggatatgctggtggttggggtgtctctggtgtcatttgggattcaatccagtgccatctccgttgtgaagattctgagggtcttaagggtcctgcgtcccctcagggccatcaacagagcaaaaggacttaagcacgtggtccagtgcgtcttcgtggccatccggaccatcggcaacatcatgatcgtcaccaccctcctgcagttcatgtttgcctgtatcggggtccagttgttcaaggggaagttctatcgctgtacggatgaagccaaaagtaaccctgaagaatgcaggggacttttcatcctctacaaggatggggatgttgacagtcctgtggtccgtgaacggatctggcaaaacagtgatttcaacttcgacaacgtcctctctgctatgatggcgctcttcacagtctccacgtttgagggctggcctgcgttgctgtataaagccatcgactcgaatggagagaacatcggcccaatctacaaccaccgcgtggagatctccatcttcttcatcatctacatcatcattgtagctttcttcatgatgaacatctttgtgggctttgtcatcgttacatttcaggaacaaggagaaaaagagtataagaactgtgagctggacaaaaatcagcgtcagtgtgttgaatacgccttgaaagcacgtcccttgcggagatacatccccaaaaacccctaccagtacaagttctggtacgtggtgaactcttcgcctttcgaatacatgatgtttgtcctcatcatgctcaacacactctgcttggccatgcagcactacgagcagtccaagatgttcaatgatgccatggacattctgaacatggtcttcaccggggtgttcaccgtcgagatggttttgaaagtcatcgcatttaagcctaagcactatttcactgatgcatggaacacttttgatgccttaattgttgttggtagcgtcgttgatattgctataactgaagtgaatccaactgaaagtgaaaatgtccctgtcccaactgctacacctgggaactctgaagagagcaatagaatctccatcacctttttccgtcttttccgagtgatgcgattggtgaagcttctcagcaggggggaaggcatccggacattgctgtggacttttattaagtcctttcaggcgctcccgtatgtggccctcctcatagccatgctgttcttcatctatgcggtcattggcatgcagatgtttgggaaagttgccatgagagataacaaccagatcaataggaacaataacttccagacgtttccccaggcggtgctgctgctcttcaggtgtgcaacaggtgaggcctggcaggagatcatgctggcctgtctcccagggaagctctgtgaccctgagtcagattacaaccccggggaggagtatacatgtgggagcaactttgccattgtctatttcatcagtttttacatgctctgtgcatttctgatcatcaatctgtttgtggctgtcatcatggataatttcgactatctgacccgggactggtctattttggggcctcaccatttagatgaattcaaaagaatatggtcagaatatgaccctgaggcaaagggaaggataaaacaccttgatgtggtcactctgcttcgacgcatccagcctcccctggggtttgggaagttatgtccacacagggtagcgtgcaagagattagttgccatgaacatgcctctcaacagtgacgggacagtcatgtttaatgcaaccctgtttgctttggttcgaacggctcttaagatcaagaccgaagggaacctggagcaagctaatgaagaacttcgggctgtgataaagaaaatttggaagaaaaccagcatgaaattacttgaccaagttgtccctccagctggtgatgatgaggtaaccgtggggaagttctatgccactttcctgatacaggactactttaggaaattcaagaaacggaaagaacaaggactggtgggaaagtaccctgcgaagaacaccacaattgccctacaggcgggattaaggacactgcatgacattgggccagaaatccggcgtgctatatcgtgtgatttgcaagatgacgagcctgaggaaacaaaacgagaagaagaagatgatgtgttcaaaagaaatggtgccctgcttggaaaccatgtcaatcatgttaatagtgataggagagattcccttcagcagaccaataccacccaccgtcccctgcatgtccaaaggccttcaattccacctgcaagtgatactgagaaaccgctgtttcctccagcaggaaattcggtgtgtcataaccatcataaccataattccataggaaagcaagttcccacctcaacaaatgccaatctcaataatgccaatatgtccaaagctgcccatggaaagcggcccagcattgggaaccttgagcatgtgtctgaaaatgggcatcattcttcccacaagcatgaccgggagcctcagagaaggtccagtgtgaaaagaacccgctattatgaaacttacattaggtccgactcaggagatgaacagctcccaactatttgccgggaagacccagagatacatggctatttcagggacccccactgcttgggggagcaggagtatttcagtagtgaggaatgctacgaggatgacagctcgcccacctggagcaggcaaaactatggctactacagcagatacccaggcagaaacatcgactctgagaggccccgaggctaccatcatccccaaggattcttggaggacgatgactcgcccgtttgctatgattcacggagatctccaaggagacgcctactacctcccaccccagcatcccaccggagatcctccttcaactttgagtgcctgcgccggcagagcagccaggaagaggtcccgtcgtctcccatcttcccccatcgcacggccctgcctctgcatctaatgcagcaacagatcatggcagttgccggcctagattcaagtaaagcccagaagtactcaccgagtcactcgacccggtcgtgggccacccctccagcaacccctccctaccgggactggacaccgtgctacacccccctgatccaagtggagcagtcagaggccctggaccaggtgaacggcagcctgccgtccctgcaccgcagctcctggtacacagacgagcccgacatctcctaccggactttcacaccagccagcctgactgtccccagcagcttccggaacaaaaacagcgacaagcagaggagtgcggacagcttggtggaggcagtcctgatatccgaaggcttgggacgctatgcaagggacccaaaatttgtgtcagcaacaaaacacgaaatcgctgatgcctgtgacctcaccatcgacgagatggagagtgcagccagcaccctgcttaatgggaacgtgcgtccccgagccaacggggatgtgggccccctctcacaccggcaggactatgagctacaggactttggtcctggctacagcgacgaagagccagaccctgggagggatgaggaggacctggcggatgaaatgatatgcatcaccaccttgtagcccccagcgaggggcagactggctctggcctcaggtggggcgcaggagagccaggggaaaagtgcctcatagttaggaaagtttaggcactagttgggagta

SEQ ID NO: 328588 - DNA, 5565 bp, Artificial Sequence
  derived and/or modified sequence
gccaacggcaccgagtgcagaagcggctgggtgggccccaacggcggcatcaccaacttcgacaacttcgccttcgccatgctgaccgtgttccagtgcatcaccatggagggctggaccgacgtgctgtactggatgaacgacgccatgggcttcgagctgccctgggtgtacttcgtgagcctggtgatcttcggcagcttcttcgtgctgaacctggtgctgggcgtgctgagcggcgagttcagcaaggagagagagaaggccaaggccagaggcgacttccagaagctgagagagaagcagcagctggaggaggacctgaagggctacctggactggatcacccaggccgaggacatcgaccccgagaacgaggaggagggcggcgaggagggcaagagaaacaccagcatgcccaccagcgagaccgagagcgtgaacaccgagaacgtgagcggcgagggcgagaacagaggctgctgcggcagcctgtggtgctggtggagaagaagaggcgccgccaaggccggccccagcggctgcagaagatggggccaggccatcagcaagagcaagctgagcagaagatggagaagatggaacagattcaacagaagaagatgcagagccgccgtgaagagcgtgaccttctactggctggtgatcgtgctggtgttcctgaacaccctgaccatcagcagcgagcactacaaccagcccgactggctgacccagatccaggacatcgccaacaaggtgctgctggccctgttcacctgcgagatgctggtgaagatgtacagcctgggcctgcaggcctacttcgtgagcctgttcaacagattcgactgcttcgtggtgtgcggcggcatcaccgagaccatcctggtggagctggagatcatgagccccctgggcatcagcgtgttcagatgcgtgagactgctgagaatcttcaaggtgaccagacactggaccagcctgagcaacctggtggccagcctgctgaacagcatgaagagcatcgccagcctgctgctgctgctgttcctgttcatcatcatcttcagcctgctgggcatgcagctgttcggcggcaagttcaacttcgacgagacccagaccaagagaagcaccttcgacaacttcccccaggccctgctgaccgtgttccagatcctgaccggcgaggactggaacgccgtgatgtacgacggcatcatggcctacggcggccccagcagcagcggcatgatcgtgtgcatctacttcatcatcctgttcatctgcggcaactacatcctgctgaacgtgttcctggccatcgccgtggacaacctggccgacgccgagagcctgaacaccgcccagaaggaggaggccgaggagaaggagagaaagaagatcgccagaaaggagagcctggagaacaagaagaacaacaagcccgaggtgaaccagatcgccaacagcgacaacaaggtgaccatcgacgactacagagaggaggacgaggacaaggacccctaccccccctgcgacgtgcccgtgggcgaggaggaggaggaggaggaggaggacgagcccgaggtgcccgccggccccagacccagaagaatcagcgagctgaacatgaaggagaagatcgcccccatccccgagggcagcgccttcttcatcctgagcaagaccaaccccatcagagtgggctgccacaagctgatcaaccaccacatcttcaccaacctgatcctggtgttcatcatgctgagcagcgccgccctggccgccgaggaccccatcagaagccacagcttcagaaacaccatcctgggctacttcgactacgccttcaccgccatcttcaccgtggagatcctgctgaagatgaccaccttcggcgccttcctgcacaagggcgccttctgcagaaactacttcaacctgctggacatgctggtggtgggcgtgagcctggtgagcttcggcatccagagcagcgccatcagcgtggtgaagatcctgagagtgctgagagtgctgagacccctgagagccatcaacagagccaagggcctgaagcacgtggtgcagtgcgtgttcgtggccatcagaaccatcggcaacatcatgatcgtgaccaccctgctgcagttcatgttcgcctgcatcggcgtgcagctgttcaagggcaagttctacagatgcaccgacgaggccaagagcaaccccgaggagtgcagaggcctgttcatcctgtacaaggacggcgacgtggacagccccgtggtgagagagagaatctggcagaacagcgacttcaacttcgacaacgtgctgagcgccatgatggccctgttcaccgtgagcaccttcgagggctggcccgccctgctgtacaaggccatcgacagcaacggcgagaacatcggccccatctacaaccacagagtggagatcagcatcttcttcatcatctacatcatcatcgtggccttcttcatgatgaacatcttcgtgggcttcgtgatcgtgaccttccaggagcagggcgagaaggagtacaagaactgcgagctggacaagaaccagagacagtgcgtggagtacgccctgaaggccagacccctgagaagatacatccccaagaacccctaccagtacaagttctggtacgtggtgaacagcagccccttcgagtacatgatgttcgtgctgatcatgctgaacaccctgtgcctggccatgcagcactacgagcagagcaagatgttcaacgacgccatggacatcctgaacatggtgttcaccggcgtgttcaccgtggagatggtgctgaaggtgatcgccttcaagcccaagcactacttcaccgacgcctggaacaccttcgacgccctgatcgtggtgggcagcgtggtggacatcgccatcaccgaggtgaaccccaccgagagcgagaacgtgcccgtgcccaccgccacccccggcaacagcgaggagagcaacagaatcagcatcaccttcttcagactgttcagagtgatgagactggtgaagctgctgagcagaggcgagggcatcagaaccctgctgtggaccttcatcaagagcttccaggccctgccctacgtggccctgctgatcgccatgctgttcttcatctacgccgtgatcggcatgcagatgttcggcaaggtggccatgagagacaacaaccagatcaacagaaacaacaacttccagaccttcccccaggccgtgctgctgctgttcagatgcgccaccggcgaggcctggcaggagatcatgctggcctgcctgcccggcaagctgtgcgaccccgagagcgactacaaccccggcgaggagtacacctgcggcagcaacttcgccatcgtgtacttcatcagcttctacatgctgtgcgccttcctgatcatcaacctgttcgtggccgtgatcatggacaacttcgactacctgaccagagactggagcatcctgggcccccaccacctggacgagttcaagagaatctggagcgagtacgaccccgaggccaagggcagaatcaagcacctggacgtggtgaccctgctgagaagaatccagccccccctgggcttcggcaagctgtgcccccacagagtggcctgcaagagactggtggccatgaacatgcccctgaacagcgacggcaccgtgatgttcaacgccaccctgttcgccctggtgagaaccgccctgaagatcaagaccgagggcaacctggagcaggccaacgaggagctgagagccgtgatcaagaagatctggaagaagaccagcatgaagctgctggaccaggtggtgccccccgccggcgacgacgaggtgaccgtgggcaagttctacgccaccttcctgatccaggactacttcagaaagttcaagaagagaaaggagcagggcctggtgggcaagtaccccgccaagaacaccaccatcgccctgcaggccggcctgagaaccctgcacgacatcggccccgagatcagaagagccatcagctgcgacctgcaggacgacgagcccgaggagaccaagagagaggaggaggacgacgtgttcaagagaaacggcgccctgctgggcaaccacgtgaaccacgtgaacagcgacagaagagacagcctgcagcagaccaacaccacccacagacccctgcacgtgcagagacccagcatcccccccgccagcgacaccgagaagcccctgttcccccccgccggcaacagcgtgtgccacaaccaccacaaccacaacagcatcggcaagcaggtgcccaccagcaccaacgccaacctgaacaacgccaacatgagcaaggccgcccacggcaagagacccagcatcggcaacctggagcacgtgagcgagaacggccaccacagcagccacaagcacgacagagagccccagagaagaagcagcgtgaagagaaccagatactacgagacctacatcagaagcgacagcggcgacgagcagctgcccaccatctgcagagaggaccccgagatccacggctacttcagagacccccactgcctgggcgagcaggagtacttcagcagcgaggagtgctacgaggacgacagcagccccacctggagcagacagaactacggctactacagcagataccccggcagaaacatcgacagcgagagacccagaggctaccaccacccccagggcttcctggaggacgacgacagccccgtgtgctacgacagcagaagaagccccagaagaagactgctgccccccacccccgccagccacagaagaagcagcttcaacttcgagtgcctgagaagacagagcagccaggaggaggtgcccagcagccccatcttcccccacagaaccgccctgcccctgcacctgatgcagcagcagatcatggccgtggccggcctggacagcagcaaggcccagaagtacagccccagccacagcaccagaagctgggccaccccccccgccacccccccctacagagactggaccccctgctacacccccctgatccaggtggagcagagcgaggccctggaccaggtgaacggcagcctgcccagcctgcacagaagcagctggtacaccgacgagcccgacatcagctacagaaccttcacccccgccagcctgaccgtgcccagcagcttcagaaacaagaacagcgacaagcagagaagcgccgacagcctggtggaggccgtgctgatcagcgagggcctgggcagatacgccagagaccccaagttcgtgagcgccaccaagcacgagatcgccgacgcctgcgacctgaccatcgacgagatggagagcgccgccagcaccctgctgaacggcaacgtgagacccagagccaacggcgacgtgggccccctgagccacagacaggactacgagctgcaggacttcggccccggctacagcgacgaggagcccgaccccggcagagacgaggaggacctggccgacgagatgatctgcatcaccaccctgtag

SEQ ID NO: 328589 - DNA, 1056 bp, Artificial Sequence
  derived and/or modified sequence
atgaacgggctggctcaatctcgcttggagacttgtattagttaccttcactgctacagcgctgggctgaggaccttgcacgatatcggccctgaaatccgtcgagccatctcttgcgacctgcaagatgacgaaccggaagagaccaagagagaggaggaagatgacgtatttaaacgcaacggagcacttctgggtaaccacgtcaatcacgtgaattctgacagacgtgactctctgcaacaaaccaataccacccaccggcccctccatgttcagaggccctctatcccccccgccagcgacacagagaaaccattgttcccacctgctggaaattcagtctgtcacaatcaccacaatcacaattccatcggaaagcaggtccccacgtccactaatgccaatctgaataacgcgaacatgtctaaggccgcccacggtaagcgaccctcaattgggaatctggagcacgtttcagagaatggacatcactcgagtcataaacacgacagggaaccacagaggaggagtagcgtgaagaggactagatactacgaaacctacattcgctcagattctggcgacgaacagttaccaacaatttgcagagaggatccagagattcatggctactttagggatccccattgtctaggggagcaagaatacttttcctccgaagagtgttatgaagacgactcaagtcctacatggtctagacagaattacggatattacagtagatatccgggccgcaatatcgatagcgaacgtccaagaggatatcaccatccccaaggcttccttgaagatgacgacagccccgtctgttacgactcgaggcggagcccccgtagacggctgctgcctccaacgccggcctcacatagacggtccagctttaattttgagtgccttcgtaggcaatctagtcaagaggaggttccatcaagcccaatttttccccacaggacggccttgcctctccaccttatgcaacagcagagcccattgtcctcagatcatggttcctgtaggcccaggttcaaatag

SEQ ID NO: 328590 - DNA, 1056 bp, Artificial Sequence
  derived and/or modified sequence
atgaatggcctggcccagagccggctggagacctgcatctcctacctgcactgctacagcgctggcctgcggaccctgcatgacatcggccctgagatccggcgggccatcagctgtgacctgcaggatgatgagcctgaggagaccaagcgggaggaggaggatgatgtgttcaagagaaatggagccctgctgggcaaccacgtgaaccacgtgaacagcgaccggcgggacagcctgcagcagaccaacaccacccaccggcccctgcacgtgcagaggcccagcatccccccagccagtgacacagagaagcccctcttccccccagctggcaacagcgtgtgccacaaccaccacaaccacaacagcatcggcaagcaggtgcccaccagcaccaatgccaacctgaacaatgccaacatgagcaaggccgcccacggcaagaggcccagcatcggcaacctggagcacgtgtctgaaaatggccaccacagcagccacaagcatgaccgggagccccagaggaggagctctgtgaagaggacccgctactatgagacctacatccgcagtgacagcggagatgagcagctgcccaccatctgcagagaagatcctgagatccacggctacttccgggacccccactgcctgggggagcaggagtacttcagcagtgaagaatgttatgaagatgacagcagccccacctggagccggcagaactacggctactacagccgctacccaggaagaaatattgattctgagcggccccggggctaccaccacccccagggcttcctggaggatgatgacagccctgtgtgctatgacagccgccgcagcccccggcggcggctgctgccccccaccccagccagccaccggcgcagcagcttcaactttgaatgtctgcggcggcagagcagccaggaggaggtgcccagcagccccatcttcccccacaggacagccctgcccctgcacctgatgcagcagcagagccccctgagcagtgaccacggcagctgccggccccgcttcaagtag

SEQ ID NO: 328591 - DNA, 1056 bp, Artificial Sequence
  derived and/or modified sequence
atgaacggcctggcccagagccggctggagacctgcatcagctacctccactgttatagcgctggacttaggaccctacacgacattggtccagagattcggcgggcgatatcctgtgatctgcaggatgacgagcctgaagaaactaagcgcgaagaggaagatgatgtgtttaagcgaaacggggccctcctggggaatcatgttaaccacgtgaactccgacagacgcgatagtctgcagcagactaatactacgcacagacccttgcatgtccagcgcccatccattccccccgcatcggatactgaaaagcctctgttccctccggcgggcaattccgtgtgccataatcaccacaatcacaactccatcggcaagcaggtgcctacgtccacaaacgctaacctcaacaacgccaatatgtccaaggccgctcacggaaagcgaccaagtatcggcaacctcgagcacgtttccgagaacggccaccattcatcccataaacatgatagagagcctcagcgaaggtccagtgtgaaaaggacacggtattatgaaacctatatccggtcggattccggcgacgagcagctgccaaccatttgcagagaggacccggagatccacgggtatttccgggatcctcactgtctgggcgagcaggagtacttcagcagcgaagagtgttatgaggatgattctagccccacctggtcacgccagaattacggttattactcacggtaccccggaagaaatatcgattccgaaaggcctcgcgggtaccatcaccctcagggctttctcgaggatgatgactccccggtctgctacgactcccggaggtcaccacgtcgacggttactcccacccacacccgcgtcccaccggaggagtagtttcaactttgagtgcctacgcagacaaagttcccaggaagaagtaccaagtagccccatatttccacacagaaccgctctgcccctgcacttaatgcaacagcagtcccccctgtcaagtgaccatggaagttgcagaccccgctttaaatag

SEQ ID NO: 328592 - DNA, 1056 bp, Artificial Sequence
  derived and/or modified sequence
atgaacgggcttgctcagtctagattagagacttgcatctcatacctgcactgttactctgccggactgcggactctgcacgatatcggacccgaaatccgtagagctatctcttgcgacttacaggatgatgaacccgaggaaactaagagagaggaagaggacgatgtattcaagcggaacggcgctctgctgggtaatcacgtcaatcatgtaaactctgaccgccgtgactctctgcaacagaccaatactacacatagacctttgcacgtgcaaaggccctccatccctcccgctagcgacaccgagaagcccctattccctcccgctggcaactcagtgtgccacaaccaccacaaccataactccattgggaagcaggtgcccaccagcacgaacgctaatctcaacaatgcgaacatgtctaaagctgcccacggaaagcgcccatccataggcaatctcgagcacgtgtccgaaaacgggcatcattcctctcacaagcatgatcgtgagcctcagagacggagctccgttaaaagaactaggtattatgaaacctacattcgctcagattccggggatgagcaactgcctacaatatgcagggaagacccagagatccacggctactttcgggatccccactgtctcggcgagcaggaatatttttcctccgaagaatgctacgaggacgactcctcccccacctggagtcggcagaactatggttactactccagatacccagggaggaacattgacagtgagcgtccaagaggatatcaccaccctcaaggcttcctggaagacgatgactcccccgtttgttacgacagtaggaggagcccccgtagaagactgctgcctccaacaccagcttctcatagacgttccagctttaactttgagtgtcttcgtcgtcagtcttcccaagaggaggtgccgtcctcccccatcttcccacacaggacagcgctgccgctgcatctgatgcaacagcagtcaccactgtctagtgatcatggtagttgtcgccctcgtttcaaatag

SEQ ID NO: 328593 - DNA, 1749 bp, Artificial Sequence
  derived and/or modified sequence
aatctcattctgttttctaatggaactagtctaaaaaggtcccctctcattgggtatagactgaatcctgctaaagggttaaccagaacttgtcaccagcgagacgactgtgtgcagggccagcctaggctgagtgcagcctgcctgtgatggggaacaggctctgccaggcagggttctttggctggagtctcaaagcctggcgcttgtatcctgaagatgaatggcctggcccagtcccgactagagacatgcatctcttatctccactgctacagcgcgggattaaggacactgcatgacattgggccagaaatccggcgtgctatatcgtgtgatttgcaagatgacgagcctgaggaaacaaaacgagaagaagaagatgatgtgttcaaaagaaatggtgccctgcttggaaaccatgtcaatcatgttaatagtgataggagagattcccttcagcagaccaataccacccaccgtcccctgcatgtccaaaggccttcaattccacctgcaagtgatactgagaaaccgctgtttcctccagcaggaaattcggtgtgtcataaccatcataaccataattccataggaaagcaagttcccacctcaacaaatgccaatctcaataatgccaatatgtccaaagctgcccatggaaagcggcccagcattgggaaccttgagcatgtgtctgaaaatgggcatcattcttcccacaagcatgaccgggagcctcagagaaggtccagtgtgaaaagaacccgctattatgaaacttacattaggtccgactcaggagatgaacagctcccaactatttgccgggaagacccagagatacatggctatttcagggacccccactgcttgggggagcaggagtatttcagtagtgaggaatgctacgaggatgacagctcgcccacctggagcaggcaaaactatggctactacagcagatacccaggcagaaacatcgactctgagaggccccgaggctaccatcatccccaaggattcttggaggacgatgactcgcccgtttgctatgattcacggagatctccaaggagacgcctactacctcccaccccagcatcccaccggagatcctccttcaactttgagtgcctgcgccggcagagcagccaggaagaggtcccgtcgtctcccatcttcccccatcgcacggccctgcctctgcatctaatgcagcaacagtcccctctttcctcagatcatggcagttgccggcctagattcaagtaaagcccagaagtactcaccgagtcactcgacccggtcgtgggccacccctccagcaacccctccctaccgggactggacaccgtgctacacccccctgatccaagtggagcagtcagaggccctggaccaggtgaacggcagcctgccgtccctgcaccgcagctcctggtacacagacgagcccgacatctcctaccggactttcacaccagccagcctgactgtccccagcagcttccggaacaaaaacagcgacaagcagaggagtgcggacagcttggtggaggcagtcctgatatccgaaggcttgggacgctatgcaagggacccaaaatttgtgtcagcaacaaaacacgaaatcgctgatgcctgtgacctcaccatcgacgagatggagagtgcagccagcaccctgcttaatgggaacgtgcgtccccgagccaacggggatgtgggccccctctcacaccggca

SEQ ID NO: 328594 - DNA, 1056 bp, Artificial Sequence
  derived and/or modified sequence
atgaacggcctggcccagagcagactggagacctgcatcagctacctgcactgctacagcgccggcctgagaaccctgcacgacatcggccccgagatcagaagagccatcagctgcgacctgcaggacgacgagcccgaggagaccaagagagaggaggaggacgacgtgttcaagagaaacggcgccctgctgggcaaccacgtgaaccacgtgaacagcgacagaagagacagcctgcagcagaccaacaccacccacagacccctgcacgtgcagagacccagcatcccccccgccagcgacaccgagaagcccctgttcccccccgccggcaacagcgtgtgccacaaccaccacaaccacaacagcatcggcaagcaggtgcccaccagcaccaacgccaacctgaacaacgccaacatgagcaaggccgcccacggcaagagacccagcatcggcaacctggagcacgtgagcgagaacggccaccacagcagccacaagcacgacagagagccccagagaagaagcagcgtgaagagaaccagatactacgagacctacatcagaagcgacagcggcgacgagcagctgcccaccatctgcagagaggaccccgagatccacggctacttcagagacccccactgcctgggcgagcaggagtacttcagcagcgaggagtgctacgaggacgacagcagccccacctggagcagacagaactacggctactacagcagataccccggcagaaacatcgacagcgagagacccagaggctaccaccacccccagggcttcctggaggacgacgacagccccgtgtgctacgacagcagaagaagccccagaagaagactgctgccccccacccccgccagccacagaagaagcagcttcaacttcgagtgcctgagaagacagagcagccaggaggaggtgcccagcagccccatcttcccccacagaaccgccctgcccctgcacctgatgcagcagcagagccccctgagcagcgaccacggcagctgcagacccagattcaagtag

SEQ ID NO: 328595 - DNA, 951 bp, Artificial Sequence
  derived and/or modified sequence
tgaggccacctgaccaaggccgtggaggagaccaagctgagcaaggagaaccagaccagagccaaggagagcgacttcagcgacaccctgagccccagcaaggagaagagcagcgacgacaccaccgacgcccagatggacgagcaggacctgaacgagcccctggccaaggtgagcctgctgaaggccctgctggaggaggagagaaaggcctacagaaaccaggtggaggagagcaccaagcagatccaggtgctgcaggcccagctgcagagactgcacatcgacaccgagaacctgagagaggagaaggacagcgagatcaccagcaccagagacgagctgctgagcgccagagacgagatcctgctgctgcaccaggccgccgccaaggtggccagcgagagagacaccgacatcgccagcctgcaggaggagctgaagaaggtgagagccgagctggagagatggagaaaggccgccagcgagtacgagaaggagatcaccagcctgcagaacagcttccagctgagatgccagcagtgcgaggaccagcagagagaggaggccaccagactgcagggcgagctggagaagctgagaaaggagtggaacgccctggagaccgagtgccacagcctgaagagagagaacgtgctgctgagcagcgagctgcagagacaggagaaggagctgcacaacagccagaagcagagcctggagctgaccagcgacctgagcatcctgcagatgagcagaaaggagctggagaaccaggtgggcagcctgaaggagcagcacctgagagacagcgccgacctgaagaccctgctgagcaaggccgagaaccaggccaaggacgtgcagaaggaggtgaagagaaaggacatcatgagccccatcatggtgggcctgaaggccaagagcaagagcgacatccacgccagctag

SEQ ID NO: 328596 - DNA, 951 bp, Artificial Sequence
  derived and/or modified sequence
tgaggacacttgactaaagccgtggaggagaccaagctgtccaaagaaaaccagacaagagctaaagaatcggatttctcagatacattgtctccctccaaagagaaatcaagcgatgatactacggacgctcagatggacgagcaagacctgaacgaacccctggccaaggtttccctccttaaagctcttttggaggaagagcgcaaagcttatcggaatcaggtcgaggagagcactaaacaaatccaggtgctgcaggcccagctgcagagactgcatattgatacagaaaatctccgagaggagaaggacagcgagattacctcaactagagatgaacttctgtcagcccgtgacgagattttgctgttgcaccaggcagctgcaaaggtcgcctcagagcgggacactgatattgcttccctccaggaagaacttaaaaaggtacgcgccgagttggaacggtggcgaaaggccgcctcagagtatgagaaggaaatcaccagtctccagaatagcttccagctgagatgtcagcaatgcgaggaccaacaacgcgaagaggccacccgattacaaggcgagctggaaaaacttcggaaagagtggaacgcgcttgaaaccgaatgtcactcactcaaacgggagaacgtgttgctctccagtgaactccaaagacaggaaaaagagctccacaacagccagaagcagtctctagagttgacttcagatctcagcatcttacaaatgtcgcgtaaggaactcgagaaccaagtgggcagcctcaaggagcaacacttgcgcgactccgcggatttgaagactctcttatccaaagccgaaaaccaagctaaggatgtgcagaaagaagtgaaacggaaggatatcatgtcaccaatcatggtaggactgaaggcgaaaagtaagtcggacatccatgcctcttag

SEQ ID NO: 328597 - DNA, 951 bp, Artificial Sequence
  derived and/or modified sequence
tgaggccacctgaccaaggctgtggaggagaccaagctgagcaaggagaaccagacccgggccaaggagagtgacttcagtgacaccctgagccccagcaaggagaagagcagtgatgacaccacagatgcccagatggatgagcaggacctgaatgagcccctggccaaggtgtccctgctgaaggccctgctggaggaggagaggaaggcctacagaaaccaggtggaggagagcaccaagcagatccaggtgctgcaggcccagctgcagaggctgcacatcgacacagagaacctgcgggaggagaaggacagcgagatcaccagcaccagagatgagctgctgagcgccagagatgagatcctgctgctgcaccaggccgccgccaaggtggccagcgagcgggacacagacatcgccagcctgcaggaggagctgaagaaggtgcgggcagagctggagcgctggaggaaggccgcctctgaatatgagaaggagatcaccagcctgcagaacagcttccagctgcgctgccagcagtgtgaggaccagcagcgggaggaggccacccggctgcagggcgagctggagaagctgaggaaggagtggaatgccctggagacagagtgccacagcctgaagagagaaaatgtgctgctgagcagcgagctgcagaggcaggagaaggagctgcacaacagccagaagcagagcctggagctgaccagtgacctgagcatcctgcagatgagcaggaaggagctggagaaccaggtgggcagcctgaaggagcagcacctgcgggacagcgctgacctgaagaccctgctgagcaaggccgagaaccaggccaaggatgtgcagaaggaggtgaagaggaaggacatcatgagccccatcatggtgggcctgaaggccaagagcaagagtgacatccacgccagctag

SEQ ID NO: 328598 - DNA, 951 bp, Artificial Sequence
  derived and/or modified sequence
tgaggccacctgaccaaggccgtggaggagaccaagctgagcaaggaaaaccagacccgagcaaaagagtccgacttctcggacacgctctccccgtccaaggagaagagtagcgatgacacgactgatgcccagatggatgaacaagatctgaatgagcctctggccaaggtttctctgcttaaggccctgctggaggaggaacggaaggcttataggaatcaggtagaagaatccactaaacaaatccaggtgttgcaggcgcagctgcaaagactccacatcgacactgaaaatctgagagaggagaaggactccgaaattacttccaccagggacgagctacttagtgctagagatgagatcctcctactgcaccaggccgcagctaaggtggccagtgaaagagacaccgacatcgcctccctgcaggaggagctcaagaaggttcgcgctgaactcgaacgttggcggaaagccgcatctgaatacgaaaaggaaatcacatctctgcaaaactccttccagctcagatgtcagcagtgcgaagaccagcagagggaggaggcgaccaggttgcagggtgagctggagaaactgcggaaggagtggaacgcccttgagacagagtgccactctctgaagcgggaaaacgtcctactgtcctccgagctgcaaaggcaggagaaggagctgcacaacagccagaaacagtctctggagctcaccagcgatctgagtatcctccaaatgtcgcggaaggaattggaaaatcaggtcgggagcttaaaggaacagcaccttcgagacagcgctgatctgaagacgctgctcagcaaggccgaaaaccaggcgaaagacgtccagaaagaggtcaagcgcaaagacatcatgagtccgattatggtggggcttaaggccaagtctaagtccgacattcatgcctcctag

SEQ ID NO: 328599 - DNA, 951 bp, Artificial Sequence
  derived and/or modified sequence
tagggccatttgacgaaggcggtagaggagactaaattatcaaaggagaaccaaacaagggcaaaggaaagcgatttctccgatacattaagcccctccaaagagaagtcctccgacgatactaccgacgcgcagatggatgagcaggatctcaatgagccgctagcaaaagtcagtctactgaaggcactgcttgaagaggagcggaaggcgtacagaaatcaagtggaggagtcaaccaaacagattcaggttctccaggctcagttgcagaggcttcatatcgatacggagaatctgcgggaggaaaaggactcagagataacatccactcgcgacgaacttctgtccgccagagatgagattttactccttcaccaggctgcggcaaaagtcgcatccgagcgagacacagatatagcttctctacaggaagaactgaaaaaagtgagagccgagctcgaacgttggcgcaaggctgcctcagagtacgaaaaggagatcacaagtttgcaaaattcatttcagctgcgctgtcaacaatgtgaggaccagcagcgcgaggaagccacacgcttacaaggcgagctcgagaagctgagaaaggaatggaatgctctggagactgagtgccattctctgaagagggaaaacgttctgctgtctagcgagctgcaaaggcaggagaaagagctgcataacagccagaagcaatcgctggagctgaccagcgacctgtctatcctgcagatgagcagaaaggaactagagaaccaggtggggtccctcaaagagcagcacttgcgcgatagcgctgacctgaagactctgctcagtaaggccgagaatcaggccaaggacgtgcagaaggaggtgaaacggaaggacattatgtcgcctatcatggtgggtctgaaagcaaaatctaaatctgacattcatgcgtcttag

SEQ ID NO: 328600 - DNA, 2274 bp, Artificial Sequence
  derived and/or modified sequence
agggcatctaaccaaagcggtagaagaaacaaagctttcaaaagaaaatcagacaagagcaaaagaatctgatttttcagatactctgagtccaagcaaggaaaaaagcagtgacgacactacagacgcccaaatggatgagcaagacctaaatgagcctcttgccaaagtgtcccttttaaaagctcttttggaagaagaaagaaaagcctatcgaaatcaagttgaggaatccactaaacaaatacaggttcttcaagcccaattgcagaggttacacatcgatactgagaatctccgggaggagaaggacagtgaaatcacaagtactagagatgaattgcttagtgcccgagatgaaattttgctccttcatcaagcagcagcaaaggttgcctctgagcgggacactgacattgcttctttacaagaagagcttaagaaggtgagagctgagcttgagcggtggcggaaagcagcgtctgaatatgagaaagaaatcacaagtctgcaaaacagttttcagcttagatgtcaacagtgtgaggaccagcagagagaagaagcaacaaggttgcaaggtgaactagagaagttgagaaaggaatggaatgcattggaaaccgaatgccattctctaaaaagggaaaatgttttgctatcatcagaactgcaacggcaagaaaaagaattgcacaattctcagaagcagagtttagagcttaccagtgatctcagcatccttcaaatgtctaggaaagaacttgagaatcaagtgggatccttgaaagaacagcatcttcgggattcagctgatttaaaaactcttctcagtaaggcagaaaaccaagcaaaggatgtgcagaaagaggtaaagcgaaaagacattatgagcccaattatggttggacttaaagccaaaagcaaatcggatatccatgctagttagaaataaagggaagcagaagtcacattacctgtcacaaaattgatacttggaacatctctgcttggtgatttctagctgcatatcatggtccatatgtagagaattcttcagtagggttggtctcaaaaatataatatacaaaactacattttaatttttctctaccagttacttatatgagaaatcctttgtaccaggtctcttgatctattgtttaactttcaaagagagtatcgtatgtaacttagcatacttttggaaagcaaactgaggccatactctaatgctgtctgaacccctcaggtaaatatggcctgaaaagttacttaaaattcacctcatagccaggcagccagccaaacacatgttctgtggccttttactttcttcctcccacccccttttcaccttattcataaatgtgcatgctcacttttcatgtcattctgcttaaaaccttgagttgagtggctttttaaaaatttgtgttgaagtcataacagttgattttggaacagaaaccctacccagtttcttcctgagcaagagaggtgcatttcacttcccaaagccttgaagttgacagcagggcagtaagagctgtcttcagtcctgctggcctcataccactccctgcattgactcctggccagctcggggaatggagaagcctgatacaacttgatctacagattagggaccaccccagttgtagactttcttaaaaggattctttatgaattagaaggaagttgaagacaactctttgtctttaataatgaactttcccaaagttgtttctagaagatctgcttaatcaatgcagtttttctttgcacttttctttccttgtagtgtcctgaatttggcaatgattgttcttctgtcttcatgtttgttcctaatgaaaaaatactgtaacattttttattttcttgcggacatactgattttgtgatgtgttcgtttttaccttactaaagatatgtgttttagaagaaatctcattttatttggttggaacacaaattttgtgccaaagtaaatatcttagtatttaatactgtaagcactttgtgtccttccagtccatatgccataattctttcaaactctgggaagaatgctgtggttggaagattattctgttgtatgttactatgaacgcattagtcattttgttgcattacttgtttgcctgtttttggtcactgagtaatcggtgcaagatgctttaactgtttccacaaatggcagtggcatgttgtcacagcatctaaattgttgatagtcttggattgcattaaatgcagcacatttaaaaa

SEQ ID NO: 328601 - DNA, 1367 bp, Artificial Sequence
  derived and/or modified sequence
aaatgctgctcagtttgggcttggatggtaacgtttattttccttggcagagaagctgatcgtcgaagggcatctaaccaaagcggtagaagaaacaaagctttcaaaagaaaatcagacaagagcaaaagaatctgatttttcagatactctgagtccaagcaaggaaaaaagcagtgacgacactacagacgcccaaatggatgagcaagacctaaatgagcctcttgccaaagtgtcccttttaaaagcccaattgcagaggttacacatcgatactgagaatctccgggaggagaaggacagtgaaatcacaagtactagagatgaattgcttagtgcccgagatgaaattttgctccttcatcaagcagcagcaaaggttgcctctgagcgggacactgacattgcttctttacaagaagagcttaagaaggtgagagctgagcttgagcggtggcggaaagcagcgtctgaatatgagaaagaaatcacaagtctgcaaaacagttttcagcttagatgtcaacagtgtgaggaccagcagagagaagaagcaacaaggttgcaaggtgaactagagaagttgagaaaggaatggaatgcattggaaaccgaatgccattctctaaaaagggaaaatgttttgctatcatcagaactgcaacggcaagaaaaagaattgcacaattctcagaagcagagtttagagcttaccagtgatctcagcatccttcaaatgtctaggaaagaacttgagaatcaagtgggatccttgaaagaacagcatcttcgggattcagctgatttaaaaactcttctcagtaaggcagaaaaccaagcaaaggatgtgcagaaagagtatgaaaagacacagactgtactctcagaactgaagttgaagtttgaaatgactgagcaggaaaagcagtcaatcacagatgagctcaaacagtgtaaaaacaacctgaagctgctccgagagaaaggaaataataaaccctggccctggatgcccatgttggctgccctggttgcagtaacagccatcgtgctgtacgtgccaggtctggccagagcttctccatgagagcgttccttgagtccgtacaccgtcctccctctagaagctggcatcacactcatgctggggacaaacagaaccattttcttcctctttacctcttaaaacagcagaagtacaagaatacagctgtagggtcattgctttaaattatataaaatgtatctgtctataaagaagatataaaattgtgactttattctactgtaagcaataatttgcttgcaatttttcatgtaatttttaaattagtatgttaagattctgaatattatggtggcct

SEQ ID NO: 328602 - DNA, 492 bp, Artificial Sequence
  derived and/or modified sequence
atgagcagctgccccgtgcacgactgccccagctgggaccccgagagactggagcccgtggagaccggcagcagaggcgccctgagactgagaggcggcgcccccggcagcgccgccggcttcagagccagcatctggggccccgccggctaccccagccccgtgggcctgggccaccccgccagcctgcccagacccgcctacagccccagatgccccgagcccgacgccagacacggctggggcagcggcagcaacgccggctacagaggccccgacagagccggcaccccctgccccgcccaggacagagagggcagaagcagcagccccgtgcccccccccagactgaaggccatgaccagccaggccagaaagcagaacggcggcgccctgatcgacaccgtggactggaccagagaggcccccgacagcgaccccgtgatgagcatgcagaagacccagaagccccagaccaccgtgggccagtag

SEQ ID NO: 328603 - DNA, 492 bp, Artificial Sequence
  derived and/or modified sequence
atgagttcctgccctgtccatgattgcccttcttgggatcctgagcgattagagcctgttgagactggcagcaggggggctctcagactcaggggcggggcccccggcagtgccgcgggttttcgggcctccatctgggggccagctggttacccatctccagtcggactgggtcaccctgcctctctcccaagacccgcttactcaccccgttgtcctgagcccgacgccagacacgggtggggctcgggctcgaacgccggctacagggggcccgatcgggccggcacaccttgtcctgcccaggatagggaaggaagatctagctctccagtgccccctccccggctgaaagctatgaccagtcaggcccgtaagcagaacggtggagccctgattgacactgtagattggactcgggaggcccccgatagcgacccggtcatgagtatgcagaaaacccagaagcctcagacaacagtaggccaatag

SEQ ID NO: 328604 - DNA, 492 bp, Artificial Sequence
  derived and/or modified sequence
atgagcagctgccctgtgcatgactgccccagctgggaccctgagcggctggagcctgtggagaccggcagcagaggagccctgcggctgcggggcggggcccctggcagcgctgctggcttccgggccagcatctggggccctgctggctaccccagccctgtgggcctgggccacccagccagcctgcccaggcctgcctacagcccccgctgcccagagccagatgcccggcacggctggggcagcggcagcaatgccggctaccggggccctgacagagctggcaccccctgcccagcccaggaccgggagggccgcagcagcagccctgtgcccccaccccggctgaaggccatgaccagccaggccaggaagcagaatggaggagccctgattgacacagtggactggacccgggaggccccagacagcgaccctgtgatgtccatgcagaagacccagaagccccagaccaccgtgggccagtag

SEQ ID NO: 328605 - DNA, 492 bp, Artificial Sequence
  derived and/or modified sequence
atgagttcctgtcctgtccatgactgcccttcgtgggatcccgagcgccttgagcccgtcgaaacaggctcccgcggtgcacttagactaagggggggtgcacctggctcagctgccggatttcgagcttctatctggggcccagctggatacccaagtcctgtggggctgggccatccagcgagcctcccgagaccagcatatagcccccgttgccccgagccagacgctcgtcacggttggggttcaggcagtaacgccggttatcggggaccagatcgcgcaggaacaccttgccctgctcaggaccgcgagggacggtcaagcagtcctgtgcctcctcccagacttaaggctatgacatcacaggccaggaagcaaaacggcggtgccctcattgacacagtggactggacccgcgaagcaccagatagtgacccggtcatgagcatgcagaagactcaaaaaccccagactactgtgggccagtag

SEQ ID NO: 328606 - DNA, 2043 bp, Artificial Sequence
  derived and/or modified sequence
gcaggctctgagagcctacatgtcttcgccgggagtgcttgtcccggagctgctcgcagactgggccgggggtgggctcgggtcggagaggtcacggggctccttaggtcacaggcggcagggccagagaaactcccccgcccctacgtttaactcgcggaaacaagggcccagagagcccagacgccagcccaaggtcacacagcgaagccccggcacagcccgccgggaacctgtcgtttctaacccccagcctctcgccgtttctacccagcttgggaagcgcaggaacaggacatacggtggtcgcgccccttccgcgaggccggggtgaaacccgcttggccctcccgccagggggcggagcttccgaaccaggcgggattccaccgggctacacacaacccagctgtaccagcatgtgccagagacacgctggccaatcgtgtactcgccgcgctacaacatcaccttcatgggcctggagaagctgcatccctttgatgccggaaaatggggcaaagtgatcaatttcctaaaagaagagaagcttctgtctgacagcatgctggtggaggcgcgggaggcctcggaggaggacctgctggtggtgcacacgaggcgctatcttaatgagctcaagtggtcctttgctgttgctaccatcacagaaatcccccccgttatcttcctccccaacttccttgtgcagaggaaggtgctgaggccccttcggacccagacaggaggaaccataatgggggtggcttccaccactgctccagcgaccgtggcgggggcttctgtgcctatgcggacatcacgctcgccatcaagtttctgtttgagcgtgtggagggcatctccagggctaccatcattgatcttgatgcccatcagggcaatgggcatgagcgagacttcatggacgacaagcgtgtgtacatcatggatgtctacaaccgccacatctacccaggggaccgctttgccaagcaggccatcaggcggaaggtggagctggagtggggcacagaggatgatgagtacctggataaggtggagaggaacatcaagaaatccctccaggagcacctgcccgacgtggtggtatacaatgcaggcaccgacatcctcgagggggaccgccttggggggctgtccatcagcccagcgggcatcgtgaagcgggatgagctggtgttccggatggtccgtggccgccgggtgcccatccttatggtgacctcaggcgggtaccagaagcgcacagcccgcatcattgctgactccatacttaatctgtttggcctggggctcattgggcctgagtcacccagcgtctccgcacagaactcagacacaccgctgcttccccctgcagtgccctgacccttgctgccctgcctgtcacgtggccctgcctatccgccccttagtgctttttgttttctaacctcatggggtggtggaggcagccttcagtgagcatggaggggcagggccatccctggctggggcctggagctggcccttcctctacttttccctgctggaagccagaagggcttgaggcctctatgggtgggggcagaaggcagagcctgtgtcccagggggacccacacgaagtcaccagcccataggtccagggaggcaggcagttaactgagaattggagaggacaggctaggtcccaggcacagcgagggccctgggcttggggtgttctggttttgagaacggcagacccaggtcggagtgaggaagcttccacctccatcctgactaggcctgcatcctaactgggcctccctccctccccttggtcatgggatttgctgccctctttgccccagagctgaagagctataggcactggtgtggatggcccaggaggtgctggagctaggtctccaggtgggcctggttcccaggcagcaggtgggaaccctgggcctggatgtgaggggcggtcaggaaggggtacaggtgggttccctcatctggagttccccctcaataaagcaaggtctggacctgc

SEQ ID NO: 328607 - protein, 319 aa, Artificial Sequence
  derived and/or modified sequence
MGLEKLHPFDAGKWGKVINFLKEEKLLSDSMLVEAREASEEDLLVVHTRRYLNELKWSFAVATITEIPPVIFLPNFLVQRKVLRPLRTQTGGTIMAGKLAVERGWAINVGGGFHHCSSDRGGGFCAYADITLAIKFLFERVEGISRATIIDLDAHQGNGHERDFMDDKRVYIMDVYNRHIYPGDRFAKQAIRRKVELEWGTEDDEYLDKVERNIKKSLQEHLPDVVVYNAGTDILEGDRLGGLSISPAGIVKRDELVFRMVRGRRVPILMVTSGGYQKRTARIIADSILNLFGLGLIGPESPSVSAQNSDTPLLPPAVP

SEQ ID NO: 328608 - DNA, 960 bp, Artificial Sequence
  derived and/or modified sequence
atgggcctggagaagctgcaccccttcgacgccggcaagtggggcaaggtgatcaacttcctgaaggaggagaagctgctgagcgacagcatgctggtggaggccagagaggccagcgaggaggacctgctggtggtgcacaccagaagatacctgaacgagctgaagtggagcttcgccgtggccaccatcaccgagatcccccccgtgatcttcctgcccaacttcctggtgcagagaaaggtgctgagacccctgagaacccagaccggcggcaccatcatggccggcaagctggccgtggagagaggctgggccatcaacgtgggcggcggcttccaccactgcagcagcgacagaggcggcggcttctgcgcctacgccgacatcaccctggccatcaagttcctgttcgagagagtggagggcatcagcagagccaccatcatcgacctggacgcccaccagggcaacggccacgagagagacttcatggacgacaagagagtgtacatcatggacgtgtacaacagacacatctaccccggcgacagattcgccaagcaggccatcagaagaaaggtggagctggagtggggcaccgaggacgacgagtacctggacaaggtggagagaaacatcaagaagagcctgcaggagcacctgcccgacgtggtggtgtacaacgccggcaccgacatcctggagggcgacagactgggcggcctgagcatcagccccgccggcatcgtgaagagagacgagctggtgttcagaatggtgagaggcagaagagtgcccatcctgatggtgaccagcggcggctaccagaagagaaccgccagaatcatcgccgacagcatcctgaacctgttcggcctgggcctgatcggccccgagagccccagcgtgagcgcccagaacagcgacacccccctgctgccccccgccgtgccctag

SEQ ID NO: 328609 - DNA, 960 bp, Artificial Sequence
  derived and/or modified sequence
atggggctggaaaagctacaccctttcgacgccggcaaatggggaaaggttataaattttctcaaagaagaaaaactattgagcgattctatgcttgtagaggccagggaggctagcgaggaggacctgctggtggtacataccaggagatatcttaatgagctgaaatggtcttttgcagtggcaaccatcaccgagatacctcctgttatctttctgcctaactttctcgttcagcggaaggtgctgaggccactgcggacacagacaggcgggacgattatggcaggtaagctggccgtggagcgcggctgggcgatcaacgtcggcggtggcttccatcactgctcgagcgacagaggaggaggattttgcgcctacgccgatataactctcgccatcaagttcctcttcgaacgcgtagaaggcattagcagggctaccataatcgatctagacgcccatcaggggaatgggcacgaaagggacttcatggacgacaagcgcgtgtatatcatggatgtatacaatagacacatctaccctggcgataggtttgcaaagcaagctatacgacggaaagttgagctcgagtggggaacggaggatgatgaatacctggataaagtcgagcgcaatattaagaaatccctccaggagcacctgcctgatgtggtggtgtacaacgccggcacagatatcttagagggagaccggttaggcggattatccattagtcccgctggaattgtgaagcgtgacgagctggtatttcgaatggttaggggcaggcgggtgcccatcctcatggttacctctgggggctatcagaaaaggaccgcaagaattatcgcggatagcatactgaatctcttcggactggggctaattggcccggaatccccctcagtgagcgcacaaaatagcgacacccccttactgcctccagccgtgccatag

SEQ ID NO: 328610 - DNA, 960 bp, Artificial Sequence
  derived and/or modified sequence
atgggcctggagaagctgcacccctttgatgctgggaagtggggcaaggtgatcaacttcctgaaggaggagaagctgctgagtgacagcatgctggtggaggcccgggaggccagcgaggaggacctgctggtggtgcacacccggcgctacctgaatgagctgaagtggagctttgctgtggccaccatcacagagatcccccctgtgatcttcctgcccaacttcctggtgcagaggaaggtgctgcggcccctgcggacccagacaggaggcaccatcatggccggcaagctggccgtggagcggggctgggccatcaacgtgggcggcggcttccaccactgcagcagtgacagaggaggcggcttctgtgcctatgctgacatcaccctggccatcaagttcctgtttgagcgggtggagggcatcagccgggccaccatcatcgacctggatgcccaccagggcaatggccacgagcgggacttcatggatgacaagagggtgtacatcatggatgtgtacaacagacacatctacccaggggacagatttgccaagcaggccatccggaggaaggtggagctggagtggggcacagaagatgatgagtacctggacaaggtggagaggaacatcaagaagagcctgcaggagcacctgcctgatgtggtggtgtacaatgccggcacagacatcctggagggggaccggctgggcggcctgagcatcagccctgctggcatcgtgaagagagatgagctggtgttcaggatggtgcggggccggcgggtgcccatcctgatggtgaccagcggcggctaccagaagaggacagcccgcatcatcgctgacagcatcctgaacctgtttggcctgggcctgattggccctgagagccccagcgtgtctgcccagaacagcgacacccccctgctgcccccagctgtgccctag

SEQ ID NO: 328611 - DNA, 960 bp, Artificial Sequence
  derived and/or modified sequence
atgggcctggagaagctgcaccccttcgacgccggcaagtggggcaaggtcattaacttcttgaaagaggagaaactcctttctgactctatgttggtcgaggcaagggaagcctcggaggaagatcttcttgtggtccatacgcgcaggtatctgaacgagctgaaatggtctttcgccgtggcgacaatcactgagatacctccagtcatcttcctccctaattttcttgttcagcgcaaagtgctcaggcccctgcggactcaaactgggggcactatcatggccgggaaactcgccgtggaacggggctgggccatcaacgttggcggaggctttcaccactgctccagtgatcgcggcggcggcttctgcgcctatgccgacattacactggccattaaattcttgttcgaaagggtagaagggatttcgagagctacgattattgacctcgacgcccatcaggggaacggccacgaacgcgacttcatggatgacaagagagtgtacatcatggatgtttataaccgacatatctatcctggagatcgcttcgcaaagcaggcaattaggcgcaaagtcgagctggagtggggcaccgaggatgacgagtacctagacaaggtggagcggaacataaaaaaatccctccaggaacacctgcccgatgttgtagtctataatgccggaactgacattctggaaggggatagactgggaggactgagcatcagccccgccgggatcgtaaagcgcgacgaactggtgttccgcatggtgcgtgggaggagagtacccatcctcatggtcacatcaggcggctaccagaagcgcacagctcgcattatcgccgactctatactaaatctgttcgggttgggcttaatcgggcccgaaagtccgagtgtgtccgcgcagaactccgatacccctttattgcctcctgccgtgccgtag

SEQ ID NO: 328612 - DNA, 960 bp, Artificial Sequence
  derived and/or modified sequence
atgggcctcgagaaactgcacccattcgatgccggtaaatggggcaaagtgatcaactttctgaaggaagagaagctgctgtcagatagcatgctcgtggaggctcgcgaagcttctgaagaagacctcctggttgtgcatactcgcaggtaccttaatgagctgaaatggtctttcgccgtagcaaccatcaccgaaatccccccagtgatcttcctgccgaactttctcgtccagcgcaaggtgttaaggccgcttagaacacaaacaggagggaccattatggcgggaaagctggccgtggagcgaggctgggccatcaatgttgggggtggttttcaccactgcagcagtgaccgtggtgggggattctgtgcttatgcagacataacccttgcaattaagttcttgtttgagcgagtggagggaatcagccgcgctacaataatcgatctcgatgcccaccagggaaatggacacgaaagggatttcatggacgacaagagggtgtacatcatggatgtatataacagacacatctatcctggggatcgcttcgccaagcaagccatacgcagaaaagtggaactcgaatggggaactgaagacgatgaatatcttgacaaagtagagcggaatattaagaagtctttacaggaacaccttccagatgttgtggtgtacaatgccggtacagacatcctcgagggggacagacttggcggactctcaataagccctgctggtattgtcaaacgagacgagttggtgtttcgtatggttcgcggacgacgcgtccccattctcatggttaccagcgggggttatcaaaaaagaaccgccaggatcatcgctgatagcatcttaaacctgttcggcttggggctaatcgggccagagtcaccaagcgtgagcgcccagaacagtgatacacctcttttacctccggctgttccctag

SEQ ID NO: 328613 - DNA, 468 bp, Artificial Sequence
  derived and/or modified sequence
atggacgacaagagagtgtacatcatggacgtgtacaacagacacatctaccccggcgacagattcgccaagcaggccatcagaagaaaggtggagctggagtggggcaccgaggacgacgagtacctggacaaggtggagagaaacatcaagaagagcctgcaggagcacctgcccgacgtggtggtgtacaacgccggcaccgacatcctggagggcgacagactgggcggcctgagcatcagccccgccggcatcgtgaagagagacgagctggtgttcagaatggtgagaggcagaagagtgcccatcctgatggtgaccagcggcggctaccagaagagaaccgccagaatcatcgccgacagcatcctgaacctgttcggcctgggcctgatcggccccgagagccccagcgtgagcgcccagaacagcgacacccccctgctgccccccgccgtgccctag

SEQ ID NO: 328614 - DNA, 468 bp, Artificial Sequence
  derived and/or modified sequence
atggatgacaaacgggtttatattatggatgtgtacaacaggcatatttatcccggggataggtttgcaaagcaggccattaggaggaaggtcgaattggagtgggggacagaagacgatgaatatctggacaaagtcgagagaaacattaagaagtctctgcaggagcatctcccagacgtagtggtgtacaacgccgggactgacatcctggagggagataggctggggggattgtcaatctcccctgcgggtatcgtaaagcgcgatgaactggtcttcagaatggtacgcggccgccgcgtgcctatactaatggtcacctctgggggataccagaagaggacagcacgaatcatcgccgattctatactgaacctcttcggactgggcctgatcgggcccgagtctcctagcgtgagtgcccagaattcagatacaccccttctgcctcctgctgtaccctag

SEQ ID NO: 328615 - DNA, 468 bp, Artificial Sequence
  derived and/or modified sequence
atggatgacaagagggtgtacatcatggatgtgtacaacagacacatctacccaggggacagatttgccaagcaggccatccggaggaaggtggagctggagtggggcacagaagatgatgagtacctggacaaggtggagaggaacatcaagaagagcctgcaggagcacctgcctgatgtggtggtgtacaatgccggcacagacatcctggagggggaccggctgggcggcctgagcatcagccctgctggcatcgtgaagagagatgagctggtgttcaggatggtgcggggccggcgggtgcccatcctgatggtgaccagcggcggctaccagaagaggacagcccgcatcatcgctgacagcatcctgaacctgtttggcctgggcctgattggccctgagagccccagcgtgtctgcccagaacagcgacacccccctgctgcccccagctgtgccctag

SEQ ID NO: 328616 - DNA, 468 bp, Artificial Sequence
  derived and/or modified sequence
atggacgacaagcgggtgtacatcatggacgtgtacaaccggcacatttacccaggggacagattcgcaaagcaggcgatcaggagaaaagtggaactcgaatggggtacagaagatgacgaatatctggacaaagtggagcggaatattaagaagtctctccaagaacatctgccagacgttgtcgtgtacaatgcagggaccgacattctagaaggggaccggctcggagggctgtctatcagcccggccggcatcgtgaaacgagacgagctcgtattcagaatggtgcgcgggcggagggtccctatcctgatggtgacttccggaggatatcagaagcgaacagcaaggattatcgccgattccattctaaatctcttcgggctcggattgatcggtccggagtcaccctccgtctcagcccagaactccgacacacctctgctcccccccgctgtgccctag

SEQ ID NO: 328617 - DNA, 468 bp, Artificial Sequence
  derived and/or modified sequence
atggacgacaagagagtctatattatggatgtttataacagacatatataccccggagataggtttgcgaagcaggccatccggaggaaggttgagctcgagtgggggactgaagatgacgagtatctggataaggtggagcgcaatatcaagaagtctctgcaggagcatctcccagatgtggtggtgtataatgccggaacagacatccttgaaggggaccgccttgggggactgtcaatcagtccagctggaatcgtgaaacgcgacgaactggtatttcggatggtgagagggagaagagtcccaattctgatggtcacttctgggggttatcagaagagaactgccagaatcattgccgatagcatattgaacttatttgggctcggcctgataggacctgaatctccctccgtgagcgcccagaactcagataccccactgctgccacccgctgtcccttag

SEQ ID NO: 328618 - DNA, 2426 bp, Artificial Sequence
  derived and/or modified sequence
acaagggcttgagagcagacaagggcttgagagcagacaagggcttgagagctggccaagcagtttctctcagcttctgtgttccagcccctatgtgggaggagagaagggcaggaccacaagcctgccagaggctgcggcctacagccggggagaggccagcccggcctacagtgcggacacaggacagaggggagccaggttctttgcactgaccaatgctgagagcagaccctcggagcagccgggttggaagtgtctctccatagtcaccagacagatccaggataggatgggcagcccagtgcaccgagtgtcattgggggatacctggagcaggcaaatgcaccccgacatagagagcgagaggtatatgcagtcctttgacgtggaacggctcaccaacatccttgatggaggtgcccagaacactgcactccgcaggaaagttgagagcatcatccacagttacccggagtttagctgtaaggacaattatttcatgacccagaatgagcgttataaggctgccatgcggagggcattccacatccggttgatagctcggcgcctgggttggttagaagatggtcgtgaattaggctacgcttacagagccctttctggagacgtggccttaaatatacacagagtcttcgtgagagccctcaggagcctgggctcagaggagcagattgccaaatgggacccactctgcaaaaacatccagatcatcgcaacgtatgcacagacagagttgggacatgggacatatcttcagggcctggagactgaagccacctatgacgcagccacccaggagtttgtgatacacagccccacgctgactgccaccaaatggtggcctggagacttgggacggtcagccacccatgccctggtccaggcccagctgatctgctcaggagccaggcggggcatgcacgcttttattgtgccaatccggagtcttcaggaccacaccccactgccaggaatcatcattggggacatcggacccaagatggactttgatcaaacagacaatggcttcctgcagctgaaccatgtgcgggtccccagggagaacatgctgagtcgctttgcacaggtcttgccagatggcacctacgtcaaactcggtacagcacagagcaactaccttcccatggtggtggtgcgggtggagctgctgtcaggggagatcctccctatactgcagaaggcctgtgtcatcgccatgcgctactcggtcatccgccgccaatcccggctccggcccagtgacccagaggcaaaggtcctggactaccagacacaacagcagaaactctttcctcagctggccatcagttatgccttccatttcctggcagtcagcctcttggagttcttccagcactcctacactgccattctgaaccaagacttcagcttcctgcctgagctccacgcactgagcacgggcatgaaggccatgatgtcagaattctgcacccagggagctgagatgtgccgcagggcctgtggcggacatggctactcaaagctgagtggcctgccatcactggtcaccaaattgtcggcctcctgtacctacgagggtgagaacacagtgctctacctgcaggtggccaggttcctggtgaagagctacctgcagactcagatgtcccctggctccacgccacagagatctctctctccatctgtcgcatatctcaccgcacctgacctggccaggtgtccagcccagagggcagccgacttcctctgcccggagctctacaccacggcctgggcacatgtggcagtaaggctcataaaggactcagtgcagcatttacagaccctgacgcaatccggagctgaccagcacgaggcttggaaccagaccactgtcatacacctccaggctgctaaggtgcactgctactatgtcactgtgaagggttttacagaagctctggagaaactagaaaatgaaccagcgattcagcaggtgctcaagcgcctctgtgacctccatgccatacatggaatcttgactaactcgggtgactttctccatgacgccttcctgtctggtgcccaagtggacatggcaagaacagcctacctggacctgctccgcctgatccggaaggatgccatcctgttaactgatgcttttgacttcaccgatcagtgtttaaattcagcacttggctgttatgatggaaacgtctacgaacgcctgttccagtgggctcagaagtcaccaaccaatactcaggagaaccctgcctatgaggaatatataagaccacttttacaaagttggagatccaagctatgaaataaccaacagtattcaagaagcaaccagcaccatcatgtgataatggtactatggcatatatgcaacattaaaattttaaattaga

SEQ ID NO: 328619 - DNA, 708 bp, Artificial Sequence
  derived and/or modified sequence
ctacagccggggagaggccagcccggcctacagtgcggacacaggacagaggggagccagccctggctgacacccagccctaggcagttcctcttgcacacaggttctttgcactgaccaatgctgagagcagaccctcggagcagccgggttggaagtgtctctccatagtcaccagacagatccaggataggatgggcagcccagtgcaccgagtgtcattgggggatacctggagcaggcaaatgcaccccgacatagagagcgagaggtatatgcagtcctttgacgtggaacggctcaccaacatccttgatggaggtgcccagaacactgcactccgcaggaaagttgagagcatcatccacagttacccggagtttagctgtaaggacaattatttcatgacccagaatgagcgttataaggctgccatgcggagggcattccacatccggttgatagctcggcgcctgggttggttagaagatggtcgtgaattaggctacgcttacagagccctttctggagacgtggccttaaatatacacagagtcttcgtgagagccctcaggagcctgggctcagaggagcagattgccaaatgggacccactctgcaaaaacatccagatcatcgcaacgtatgcacagacagagttgggacatgggacatatcttcagggcctggagactgaagccacctatg

SEQ ID NO: 328620 - protein, 167 aa, Artificial Sequence
  derived and/or modified sequence
MKSQLHCHISLAEGSSKIQARMEQQPTRPPQTSQPPPPPPPMPFRAPTKPPVGPKTSPLKDNPSPEPQLDDIKRELRAEVDIIEQMSSSSGSSSSDSESSSGSDDDSSSSGGEDNGPASPPQPSHQQPYNSRPAVANGTSRPQGSNQLMNTLRNDLQLSESGSDSDD

SEQ ID NO: 328621 - DNA, 504 bp, Artificial Sequence
  derived and/or modified sequence
atgaagtcccagctacattgtcacatctcactggccgaggggtcatcgaagatccaagcacgaatggaacagcagcccaccaggcccccccagacctcacaaccccccccaccaccaccgccaatgccattcagggcaccaaccaagcctcctgtgggtcctaaaacgtcccctctgaaagacaatccttcacctgaacctcaactcgacgatatcaagcgcgagctcagagcggaggtagatatcatagagcagatgtcatcctcctctggatcgtcatcatcagactcagagagctcttcggggagcgatgacgactcctccagctcaggtggcgaggacaacggaccagctagccccccacaaccttctcaccagcaaccatacaacagcagaccagccgttgcgaacggcacatcacggccccaggggtcaaaccagcttatgaacactcttcggaatgacctgcagctttcagagtccgggagtgacagtgacgattag

SEQ ID NO: 328622 - DNA, 504 bp, Artificial Sequence
  derived and/or modified sequence
atgaagagccagctgcactgccacatcagcctggccgagggcagcagcaagatccaggccaggatggagcagcagcccaccaggcctccccagaccagccagcccccacctcctcctccacccatgcccttccgggcccccaccaagccccctgtgggccccaagaccagccccctgaaggacaaccccagccctgagccccagctggatgacatcaagcgggagctgcgggcagaggtggacatcatcgagcagatgagcagcagcagcggcagcagcagcagtgacagcgagagcagcagcggcagtgatgatgacagcagcagcagtggaggagaagataatggacctgccagccccccccagcccagccaccagcagccctacaacagcaggcctgctgtggccaacggcaccagccggccccagggcagcaaccagctgatgaacaccctgagaaatgacctgcagctgtctgagagcggcagtgacagtgatgactag

SEQ ID NO: 328623 - DNA, 504 bp, Artificial Sequence
  derived and/or modified sequence
atgaagagccagctgcactgccacatcagcctggccgagggcagctctaaaattcaagccaggatggagcagcaacccactagaccacctcagacatcccaaccccctcctccacctccacctatgccctttagagctcccactaagcctcccgtgggaccaaaaacctccccactgaaggataatccatccccggaaccccagctcgatgacataaagcgcgagttgagagctgaagtggatatcatcgaacagatgagttcaagcagcggtagcagctcctcagatagcgaatcaagctcaggatcagacgacgattcaagttcatctggcggtgaggacaatggcccagcctctccaccccaaccaagccaccagcaaccctataactctaggcctgctgtggctaacggcacctcaagaccccaggggagcaatcagctgatgaacacattgcggaatgatctccagttgagtgaatccggaagcgatagtgatgactag

SEQ ID NO: 328624 - DNA, 504 bp, Artificial Sequence
  derived and/or modified sequence
atgaaaagtcagctgcattgtcacattagcctggccgaggggtccagcaagatccaagcccgtatggaacagcaacccacacgccctccacaaaccagccagcctccgcctccaccccctcccatgccatttcgtgcacccactaagccacctgttggcccaaaaacctcaccacttaaggataacccgtcccccgaacctcagctcgatgacatcaagcgcgagttgagagccgaggtggacatcattgaacagatgtccagctctagcggctccagctcatctgattcagaatcatcctcaggaagcgacgatgacagtagttcttccggcggagaagacaatggacctgcatctccaccccagccctcacatcagcaaccgtacaattctcggcctgcggttgcaaatggaaccagtcgcccacaggggagtaaccagctcatgaacactctcaggaatgatctgcagctaagtgaatctggatctgactctgacgattag

SEQ ID NO: 328625 - DNA, 504 bp, Artificial Sequence
  derived and/or modified sequence
atgaagagccagctgcactgccacatcagcctggccgagggcagcagcaagatccaggccagaatggagcagcagcccaccagacccccccagaccagccagcccccccccccccccccccccatgcccttcagagcccccaccaagccccccgtgggccccaagaccagccccctgaaggacaaccccagccccgagccccagctggacgacatcaagagagagctgagagccgaggtggacatcatcgagcagatgagcagcagcagcggcagcagcagcagcgacagcgagagcagcagcggcagcgacgacgacagcagcagcagcggcggcgaggacaacggccccgccagccccccccagcccagccaccagcagccctacaacagcagacccgccgtggccaacggcaccagcagaccccagggcagcaaccagctgatgaacaccctgagaaacgacctgcagctgagcgagagcggcagcgacagcgacgactag

SEQ ID NO: 328626 - DNA, 1037 bp, Artificial Sequence
  derived and/or modified sequence
ctctctcacccccacgcagaggagagaacttgcttctggacccgggtgggtgccggctcggctctccttgtcttccagagcggtggcccggaagcacagtcctcccagacgccagcgccagaagctcggatcgcggctgcaccgggagagcgccgatctgggtgcgaggcaggtgcggggccatgaatgggaccgcaaacccgctgctggaccgcgaggaacattgcctgaggctcggggagagcttcgagaagcggccgcgggcctccttccacactattcgttatgattttaaaccagcatctatagacacttcctgtgaaggagagcttcaagttggcaaaggagatgaagtcacaattacactgccacatatccctagctgagggcagcagtaaaatccaggcccgaatggaacagcagcccactcgtcctccacagacgtcacagccaccaccacctccaccacctatgccattcagagctccaacgaagcctccagttggacccaaaacttctcccttgaaagataacccctcacctgaacctcagttggatgacatcaaaagagagctgagggctgaagttgacattattgaacaaatgagcagcagcagtgggagcagctcttcagactctgagagctcttcgggaagtgatgacgatagctccagcagtggaggcgaggacaatggcccagcctctcctccgcagccttcacaccagcagccctacaacagtaggcctgccgttgccaatggaaccagccggccacaaggaagcaaccagctcatgaacaccctcagaaatgacttgcagttgagtgagtctggcagtgacagtgatgactagtgctggatctttcgaaacctactttttggtgcacaaacatgccgcaagactgagctactttggcgtggagtccattgcaagaggaaaatgttatggatcagtgactgtagtaggagtttgaggctctggaactctcacatattcaagtctttaacttagtggtgatgggtgattttctcgtgtca

SEQ ID NO: 328627 - protein, 345 aa, Artificial Sequence
  derived and/or modified sequence
  misc_feature (1)..(1): Xaa can be any naturally occurring amino acid
XLPNVNLPNVNLPKVPNLPVNIPLGIPQMPTFSAPSWMAAIYDADNGSGTSEDLFWKLDALQTFIRDLHWPEEEFGKHLEQRLKLMASDMIESCVKRTRIAFEVKLQKTSRSTDFRVPQSICTMFNVMVDAKAQSTKLCSMEMGQEFAKMWHQYHSKIDELIEETVKEMITLLVAKFVTILEGVLAKLSRYDEGTLFSSFLSFTVKAASKYVDVPKPGMDVADAYVTFVRHSQDVLRDKVNEEMYIERLFDQWYNSSMNVICTWLTDRMDLQLHIYQLKTLIRMVKKTYRDFRLQGVLDSTLNSKTYETIRNRLTVEEATASVSEGGGLQGISMKDSDEEDEEDD

SEQ ID NO: 328628 - DNA, 1038 bp, Artificial Sequence
  derived and/or modified sequence
tgactgcctaacgttaatttgccgaatgtgaacctccctaaagttcccaacttgcctgttaacatccccctgggtattccacagatgcccacattttctgcaccaagctggatggccgctatctacgatgcagacaacggaagcggcacctctgaggatctcttctggaagctggacgcacttcagacttttatacgagacttacattggcctgaggaggagtttggaaaacatctggagcagaggttgaagttaatggccagcgatatgatagagagctgcgttaagagaactagaattgctttcgaggtgaagctccagaagacgtctagatctactgattttagggtcccacagtcaatctgtaccatgttcaacgtgatggtggatgccaaagcccagtcgactaagttgtgctctatggagatgggccaggaatttgcaaaaatgtggcaccagtaccactctaagatcgacgaactcattgaggaaaccgtcaaagagatgatcactctcctggttgccaagttcgtaacaatcctcgagggcgtcctggccaagttgagtcggtatgacgaagggacccttttttcctcattcctgtcttttaccgtcaaagccgcttcaaaatacgtagatgtgcctaaacccggtatggacgtagcagatgcttatgtgacattcgtacgacacagccaggacgtgctgagagacaaagtgaacgaggagatgtacatcgagagactctttgaccagtggtacaactcaagcatgaatgtcatctgcacctggttgacggatcgaatggaccttcaactgcatatctaccaattgaagacactcatcaggatggtgaagaaaacttaccgcgattttcgcctccagggggttcttgattctactttaaatagcaaaacttacgaaaccataaggaacaggcttaccgtggaggaggctacagctagtgtgagcgaaggaggcgggctgcaaggtatctccatgaaggacagtgacgaagaagatgaggaagatgattag

SEQ ID NO: 328629 - DNA, 1038 bp, Artificial Sequence
  derived and/or modified sequence
tgactgcccaacgtgaacctgcccaacgtgaacctgcccaaggtgcccaacctgcctgtgaacatccccctgggcatcccccagatgcccaccttcagcgcccccagctggatggccgccatctatgatgctgacaatggcagcggcaccagcgaggacctcttctggaagctggatgccctgcagaccttcatccgggacctgcactggccagaggaggagtttgggaagcacctggagcagaggctgaagctgatggccagtgacatgattgagagctgtgtgaagaggacccgcatcgcctttgaggtgaagctgcagaagaccagccgcagcacagacttccgggtgccccagagcatctgcaccatgttcaacgtgatggtggatgccaaggcccagagcaccaagctgtgcagcatggagatgggccaggagtttgccaagatgtggcaccagtaccacagcaagattgatgagctgattgaggagaccgtgaaggagatgatcaccctgctggtggccaagtttgtgaccatcctggagggcgtgctggccaagctgagccgctatgatgagggcaccctcttcagcagcttcctgtccttcaccgtgaaggccgccagcaaatatgtggatgtgcccaagccaggcatggatgtggctgatgcctacgtgacctttgtgcgccacagccaggatgtgctgcgggacaaggtgaatgaggagatgtacatcgagcggctgtttgaccagtggtacaacagctccatgaatgtcatctgcacctggctgacagacaggatggacctgcagctgcacatctaccagctgaagaccctcatccgcatggtgaagaagacctacagagacttccggctgcagggcgtgctggacagcaccctgaacagcaagacctatgagaccatccggaaccggctgactgtggaggaggccacagcctctgtgtctgagggcggcggcctgcagggcatctccatgaaggacagtgatgaggaggatgaagaagatgactag

SEQ ID NO: 328630 - DNA, 1038 bp, Artificial Sequence
  derived and/or modified sequence
tgactgcccaacgtgaacctgcccaacgtgaacctgcccaaggtgcccaacctcccagtgaacattcccctggggattccccagatgcccactttctcagccccatcctggatggccgccatttacgatgccgacaatggcagtgggacgagtgaagatttgttctggaaactcgacgcccttcagacatttattagagacctgcattggcccgaagaggagtttggcaagcacctggagcagagattaaaacttatggcatcagacatgattgagagctgtgttaagcgtaccaggatagccttcgaagtgaagttacagaaaacaagtcggagcaccgactttcgagtcccacagtctatatgtacaatgttcaatgtgatggtggatgcaaaggcccaaagcacaaagttgtgtagcatggagatgggccaggaattcgctaaaatgtggcaccagtaccattcaaagatcgacgaactcattgaagagactgtcaaggaaatgatcacgctgctcgtggcaaaatttgtgactattttagaaggtgtgctggctaagctctcccgttacgacgaagggactctgttcagttcatttctctcgtttacagtaaaggcagccagtaagtacgtagacgtaccaaaaccaggcatggatgttgctgatgcctacgtcactttcgtacggcatagccaggacgtcctgcgagataaagtaaatgaggaaatgtatattgagcggctctttgaccagtggtacaatagcagcatgaatgttatctgcacatggttgacagatcggatggaccttcagctgcacatctaccagctcaaaactctgatacgaatggttaagaaaacctaccgcgactttaggctgcaaggcgtgcttgacagtactctgaattccaagacctacgagactatacgtaaccggctcacagtggaagaagccacagcgtccgtgtctgagggcggggggctacaggggatcagtatgaaagatagtgatgaggaggacgaggaggatgactag

SEQ ID NO: 328631 - DNA, 1038 bp, Artificial Sequence
  derived and/or modified sequence
taactgccgaacgttaatcttccaaacgtgaatctccccaaggtgcccaacctccctgtgaacatccctctcgggatccctcagatgcccacattttcagccccttcctggatggcagccatctacgatgcagacaacggttcagggacaagcgaggacctgttctggaaactagacgcactgcagactttcatccgcgatctccactggccagaggaggagtttggcaaacacctggaacaacgcctgaagctcatggcttccgatatgatcgaaagctgcgttaagcggacgagaattgcattcgaagtgaagctacaaaagacctccagatccacagatttcagagtgccgcagtccatctgcactatgtttaatgtcatggtggatgcaaaggctcaatctactaagctctgttctatggaaatgggccaggagtttgctaaaatgtggcatcagtaccacagcaagatcgacgagcttatcgaggagaccgttaaggaaatgatcaccctgctggtcgctaagttcgtgaccatacttgaaggcgtgctggcaaagctgtcccgatacgacgagggtacgctgttttctagctttctcagtttcaccgttaaggctgcctcgaagtacgttgacgttccaaagcccggaatggacgtagctgatgcctacgttacattcgtccgacatagccaggacgtcttgcgagataaggtaaatgaagaaatgtatattgagcgcttattcgaccagtggtacaatagctcaatgaatgtgatctgcacatggctaactgacagaatggacctgcagttgcatatttatcaactaaaaaccctgatccgtatggtcaaaaaaacttacagagattttcgcctgcaaggcgtgttggacagcaccctgaactccaaaacatatgaaaccatccgtaatcgacttaccgtggaggaggccacggccagcgtgagcgagggtgggggacttcagggcatcagcatgaaggactcggacgaggaagatgaggaagacgactag

SEQ ID NO: 328632 - DNA, 2095 bp, Artificial Sequence
  derived and/or modified sequence
acctacccaatgtgaacctacccaatgtgaaccttcccaaagtaccaaatctaccagttaacatccctctaggcatcccacaaatgcctactttttcggcaccgtcatggatggctgctatatatgatgcggataatgggtcaggcacctcagaagatctgttttggaaacttgacgcccttcagaccttcattcgggacctgcactggcctgaagaagagtttggaaagcacctggaacaacggctgaagttgatggcaagtgacatgatcgaatcttgtgtcaaaagaaccaggattgcatttgaagttaagctgcaaaaaaccagtcgatcaacagattttcgagtcccacagtcaatatgcaccatgtttaatgttatggttgatgccaaagctcaatcaacaaaactttgcagcatggaaatgggccaagagtttgctaaaatgtggcatcaataccattcaaaaatagacgaactaattgaagaaactgttaaagaaatgataacactcttggttgcaaagttcgttactatcttggaaggagtgctggcaaaattatccagatatgacgaagggactttgttttcttcttttctgtcatttaccgtgaaggcagcttccaaatatgtggatgtacctaaacccgggatggacgtggccgacgcctacgtgactttcgtccgccattctcaggatgtcctgcgtgataaggtcaatgaggagatgtacatagaaaggttatttgatcaatggtacaacagctccatgaacgtgatctgcacctggttgacggaccggatggacttacagcttcatatttatcagttgaaaacactaattaggatggtaaagaaaacctacagagatttccgattgcaaggggtcctggactccaccttaaacagcaagacctatgaaacgatccggaaccgtctcactgtggaggaagccacagcatcagtgagtgaaggtgggggactgcagggcatcagcatgaaggacagcgatgaggaagacgaagaagacgattagaccatttggtcctagagtctgctgggacagagtcctgtaatcagtgcatgtccttagtctgttagttaaacccattaggaattttctgtcaactaccatgcccatgagatgtttatcaatacaactgccattttagctatgtggtaccaagattagcaaatgaccttcatatccactgatttcctgatgtccatgtctatatgtttacaagcaatatggagcaccattctttaaatactgttcatggagaatacatagtctaaccactaggcgtgtccctgttatcagcaaagatcaatgatgcttcattcatgtactatgtatgcattggtggtaaatggatgtgagggcaagtacatcaagtacattcactctgtttcacgtatgtggatgccagttaattaaatgagtacgtaaataaattaattaaaacacatagatctgctttgtgtttttatttttattttttgaaaaacaaaaggcaagtctccaacaattaacttttgatgctttctgttcccctaaaaccaaaaaatgaaccccttgtgtcgttgttaacccatcctttcatttactcatataattagccaaaaaaaaaaggatggctacataccaatggattgattctcttaattgccacggcaagggggcgatcctatcatgacttaacatcaagcgcgcagttcaaaactactgtcttctgtcaaagttttctcctcttaaatgttattttgcttttacgtctcaactgtgtatgtaaaaaaaatgaatatttaaattacaaccctagactaaaaatgtgtttataataagatgtggatatttccttcagtagattgtaaccataatttaaattattttgttccacactgttttttatatctgtcatgtacattgcattttgatctgtaactgcacaaccctggggtttgctgcagagctatttctttccatgtaaagtagtggatccatcttgcttttgccttatataaagcctacagttatggaagtgtggaaaactgtggcttctcaataaatattcagatgtcctaagaata

SEQ ID NO: 328633 - DNA, 1038 bp, Artificial Sequence
  derived and/or modified sequence
tgactgcccaacgtgaacctgcccaacgtgaacctgcccaaggtgcccaacctgcccgtgaacatccccctgggcatcccccagatgcccaccttcagcgcccccagctggatggccgccatctacgacgccgacaacggcagcggcaccagcgaggacctgttctggaagctggacgccctgcagaccttcatcagagacctgcactggcccgaggaggagttcggcaagcacctggagcagagactgaagctgatggccagcgacatgatcgagagctgcgtgaagagaaccagaatcgccttcgaggtgaagctgcagaagaccagcagaagcaccgacttcagagtgccccagagcatctgcaccatgttcaacgtgatggtggacgccaaggcccagagcaccaagctgtgcagcatggagatgggccaggagttcgccaagatgtggcaccagtaccacagcaagatcgacgagctgatcgaggagaccgtgaaggagatgatcaccctgctggtggccaagttcgtgaccatcctggagggcgtgctggccaagctgagcagatacgacgagggcaccctgttcagcagcttcctgagcttcaccgtgaaggccgccagcaagtacgtggacgtgcccaagcccggcatggacgtggccgacgcctacgtgaccttcgtgagacacagccaggacgtgctgagagacaaggtgaacgaggagatgtacatcgagagactgttcgaccagtggtacaacagcagcatgaacgtgatctgcacctggctgaccgacagaatggacctgcagctgcacatctaccagctgaagaccctgatcagaatggtgaagaagacctacagagacttcagactgcagggcgtgctggacagcaccctgaacagcaagacctacgagaccatcagaaacagactgaccgtggaggaggccaccgccagcgtgagcgagggcggcggcctgcagggcatcagcatgaaggacagcgacgaggaggacgaggaggacgactag

SEQ ID NO: 328634 - protein, 286 aa, Artificial Sequence
  derived and/or modified sequence
MLISLLNYEDGVLDPSSIVPLIDGGTEGFKGNARVILPGMTACIECTLELYPPQVNFPMCTIASMPRLPEHCIEYVRMLQWPKEQPFGEGVPLDGDDPEHIQWIFQKSLERASQYNIRGVTYRLTQGVVKRIIPAVASTNAVIAAVCATEVFKIATSAYIPLNNYLVFNDVDGLYTYTFEAERKENCPACSQLPQNIQFSPSAKLQEVLDYLTNSASLQMKSPAITATLEGKNRTLYLQSVTSIEERTRPNLSKTLKELGLVDGQELAVADVTTPQTVLFKLHFTS

SEQ ID NO: 328635 - DNA, 861 bp, Artificial Sequence
  derived and/or modified sequence
atgctcatttcactcctgaattatgaagatggcgtcctagatccaagctctatcgtgcctctcatcgacggcggtaccgaaggtttcaaaggtaacgcccgtgtcatcctcccaggaatgacagcttgcatcgaatgcactttagaattataccctccccaggtgaactttccaatgtgcactatagccagcatgccccgactgccagaacattgcattgagtacgtccggatgctccagtggccaaaagaacagccttttggggaaggggtgcccttggatggagatgatcctgagcacatccagtggatcttccagaagtcccttgagcgggcatcacagtacaatatccgaggggtgacctaccgtctcacacaaggcgttgtgaaaaggattattcccgctgttgcttcaacaaacgcagtcattgcggctgtgtgcgccactgaagtctttaagatcgccactagtgcctacataccgttgaataactacctcgtgtttaacgacgtcgatggcttatatacctacacctttgaagctgagcgtaaggagaactgccccgcttgtagccagctgccacagaacattcagttctcaccatccgccaagctgcaggaggtgctggattacctgaccaactcagcttcactccaaatgaaatcacctgccattaccgccaccctggaggggaaaaacaggacactgtatctgcagtcagtcacctccattgaagaacggacgcgaccgaacctgagtaaaaccctcaaggagctcggtctggtggacggccaggagctggccgtggccgatgtgaccaccccgcagaccgtgctttttaagttgcactttacttcttag

SEQ ID NO: 328636 - DNA, 861 bp, Artificial Sequence
  derived and/or modified sequence
atgctgatcagcctgctgaactatgaagatggagtgctggaccccagcagcatcgtgcccctgattgatggcggcacagagggcttcaagggaaatgcccgggtcatcctgcccggcatgacagcctgcattgaatgtaccctggagctgtacccaccccaggtgaacttccccatgtgcaccatcgcctccatgccccggctgcctgagcactgcattgaatatgtgaggatgctgcagtggcccaaggagcagccctttggagagggcgtgcccctggatggagatgatcctgagcacatccagtggatcttccagaagagcctggagcgggccagccagtacaacatccggggcgtgacctaccgcctgacccagggcgtggtgaagaggatcatcccagctgtggccagcaccaatgctgtgattgctgctgtgtgtgccacagaggtgttcaagatcgccaccagcgcctacatccccctgaacaactacctggtgttcaatgatgtggatggcctgtacacctacacctttgaagctgagaggaaagaaaactgcccagcctgcagccagctgccccagaacatccagttcagccccagcgccaagctgcaggaggtgctggactacctgaccaacagcgccagcctgcagatgaagagccctgccatcacagccaccctggagggcaagaacagaaccctgtacctgcagagcgtgaccagcattgaggagaggacccggcccaacctgagcaagaccctgaaggagctgggcctggtggatggccaggagctggccgtggctgatgtgaccaccccccagacagtgctcttcaagctgcacttcaccagctag

SEQ ID NO: 328637 - DNA, 861 bp, Artificial Sequence
  derived and/or modified sequence
atgctgatcagcctgctgaactacgaggacggcgtgctggacccctcaagcatagtgcctctaatcgacggcggaacggaggggtttaagggcaatgctcgggtgatcctgcctggcatgaccgcctgtatcgaatgtaccctagaactgtacccgccccaagtgaacttccccatgtgcacaatcgcctctatgccccgcctgcccgaacactgcatcgagtacgtgcggatgctgcagtggccaaaagagcagccctttggtgaaggcgtgccgctcgacggggacgacccagaacacatacagtggatattccagaaaagtttggaacgagcctcacagtataatattagaggcgtcacgtatcgattaacccaaggcgtcgtgaaaagaattattccggcagtggcctcaacaaatgccgtcattgccgcagtctgcgcaacggaggtgttcaagatagcgacatctgcgtatatcccactgaataactacctggtctttaacgatgtggacggactctacacctatactttcgaagctgaacgaaaggagaactgccccgcatgctcacagttaccacaaaacatccaattttccccatcagctaaacttcaagaggtcctcgattatctcacaaatagcgcctctttgcagatgaagtcacctgcaattactgctacattggagggtaaaaatcggacactctaccttcagagtgtgacctcaatcgaggagaggacccgaccaaacttgtcaaagactcttaaagaattgggcttagtagacgggcaggaattagccgtcgctgacgttacaaccccccaaaccgtgttatttaagttacactttacaagttag

SEQ ID NO: 328638 - DNA, 861 bp, Artificial Sequence
  derived and/or modified sequence
atgctgatctccctcttaaactacgaagatggagttctggacccctcatccattgtgccattaattgatggcggtactgagggatttaagggcaacgcacgagtgattctgcctggcatgacagcttgcatagagtgtacattggagctctacccaccccaggtgaatttccctatgtgtacgattgcctcaatgcctcggctccctgagcactgtatcgagtacgtgcggatgctgcagtggcccaaggagcagcctttcggcgagggcgtccccctagacggcgatgaccccgagcacattcagtggatctttcagaagtccctggagcgcgctagccagtacaacatacgaggcgttacttatcggctgacccagggtgtggtgaaacggattattccagccgtggccagcacaaacgctgtgatagccgctgtttgtgccactgaggtgttcaagatcgccactagtgcatatatacccctgaacaactatctggtgtttaacgacgtggacggtctgtacacctacacctttgaggcggaacgtaaagaaaactgccctgcctgttcccagttacctcagaacattcagtttagccccagcgctaaactgcaagaagtactcgactatctcaccaactcagcgtccctccagatgaaatctccggctatcacagcaactctggaaggcaaaaaccgtactctgtacctacaaagcgtcacttcaatcgaagagcgcacccggcctaacctgtctaagactctgaaggaattggggctcgtggacggccaggaattagccgtggccgacgtgacgacgccacagacagttctgttcaaactgcattttacaagttag

SEQ ID NO: 328639 - DNA, 1218 bp, Artificial Sequence
  derived and/or modified sequence
acctgggaagaggcggagaacaatatggcggatggcgaggagccaatggctgttgatggtgggtgtggggacactggagactgggaaggtcgctggaaccatgtaaagaagttcctcgagcgatctggacccttcacacaccctgatttcgaaccgagcactgaaaatttcatattattgtatgtggactggactctatcatcgccagaagatggataaatggcatgctgatatctcttctaaattatgaagatggtgtcttagatccaagctccattgtccctttgatagatggggggacagaaggttttaaaggaaatgcccgggtgattctgcctggaatgactgcttgtatcgaatgcacgctggaactttatccaccacaggttaattttcccatgtgcaccattgcatctatgcccaggctaccagaacactgtattgagtatgtaaggatgttgcagtggcctaaggagcagccttttggagaaggggttccattagatggagatgatcctgaacatatacaatggattttccaaaaatccctagagagagcatcacaatataatattaggggtgttacgtataggctcactcaaggggtagtaaaaagaatcattcctgcagtagcttccacaaatgcagtcattgcagctgtgtgtgccactgaggtttttaaaatagccacaagtgcatacattcccttgaataattacttggtgtttaatgatgtagatgggctgtatacatacacatttgaagcagaaagaaaggaaaactgcccagcttgtagccagcttcctcaaaatattcagttttctccatcagctaaactacaggaggttttggattatctaaccaatagtgcttctctgcaaatgaaatctccagccatcacagccaccctagagggaaaaaatagaacactttacttacagtcggtaacctctattgaagaacgaacaaggccaaatctctccaaaacattgaaagaattggggcttgttgatggacaagaactggcggttgctgatgtcaccaccccacagactgtactattcaaacttcattttacttcttaaggaaaatctccacataatagaaaactcatggaaataatatactttgtggatgctaagaagttgaatcgatgtcatttttagcaatagtgttgccacgatttgtctttttttatataatgaaccactctttttt

SEQ ID NO: 328640 - DNA, 861 bp, Artificial Sequence
  derived and/or modified sequence
atgctgatcagcctgctgaactacgaggacggcgtgctggaccccagcagcatcgtgcccctgatcgacggcggcaccgagggcttcaagggcaacgccagagtgatcctgcccggcatgaccgcctgcatcgagtgcaccctggagctgtaccccccccaggtgaacttccccatgtgcaccatcgccagcatgcccagactgcccgagcactgcatcgagtacgtgagaatgctgcagtggcccaaggagcagcccttcggcgagggcgtgcccctggacggcgacgaccccgagcacatccagtggatcttccagaagagcctggagagagccagccagtacaacatcagaggcgtgacctacagactgacccagggcgtggtgaagagaatcatccccgccgtggccagcaccaacgccgtgatcgccgccgtgtgcgccaccgaggtgttcaagatcgccaccagcgcctacatccccctgaacaactacctggtgttcaacgacgtggacggcctgtacacctacaccttcgaggccgagagaaaggagaactgccccgcctgcagccagctgccccagaacatccagttcagccccagcgccaagctgcaggaggtgctggactacctgaccaacagcgccagcctgcagatgaagagccccgccatcaccgccaccctggagggcaagaacagaaccctgtacctgcagagcgtgaccagcatcgaggagagaaccagacccaacctgagcaagaccctgaaggagctgggcctggtggacggccaggagctggccgtggccgacgtgaccaccccccagaccgtgctgttcaagctgcacttcaccagctag

SEQ ID NO: 328641 - protein, 1153 aa, Artificial Sequence
  derived and/or modified sequence
MAVPARTCGASRPGPARTARPWPGCGPHPGPGTRRPTSGPPRPLWLLLPLLPLLAAPGASAYSFPQQHTMQHWARRLEQEVDGVMRIFGGVQQLREIYKDNRNLFEVQENEPQKLVEKVAGDIESLLDRKVQALKRLADAAENFQKAHRWQDNIKEEDIVYYDAKADAELDDPESEDVERGSKASTLRLDFIEDPNFKNKVNYSYAAVQIPTDIYKGSTVILNELNWTEALENVFMENRRQDPTLLWQVFGSATGVTRYYPATPWRAPKKIDLYDVRRRPWYIQGASSPKDMVIIVDVSGSVSGLTLKLMKTSVCEMLDTLSDDDYVNVASFNEKAQPVSCFTHLVQANVRNKKVFKEAVQGMVAKGTTGYKAGFEYAFDQLQNSNITRANCNKMIMMFTDGGEDRVQDVFEKYNWPNRTVRVFTFSVGQHNYDVTPLQWMACANKGYYFEIPSIGAIRINTQEYLDVLGRPMVLAGKEAKQVQWTNVYEDALGLGLVVTGTLPVFNLTQDGPGEKKNQLILGVMGIDVALNDIKRLTPNYTLGANGYVFAIDLNGYVLLHPNLKPQTTNFREPVTLDFLDAELEDENKEEIRRSMIDGNKGHKQIRTLVKSLDERYIDEVTRNYTWVPIRSTNYSLGLVLPPYSTFYLQANLSDQILQVKLPISKLKDFEFLLPSSFESEGHVFIAPREYCKDLNASDNNTEFLKNFIELMEKVTPDSKQCNNFLLHNLILDTGITQQLVERVWRDQDLNTYSLLAVFAATDGGITRVFPNKAAEDWTENPEPFNASFYRRSLDNHGYVFKPPHQDALLRPLELENDTVGILVSTAVELSLGRRTLRPAVVGVKLDLEAWAEKFKVLASNRTHQDQPQKCGPNSHCEMDCEVNNEDLLCVLIDDGGFLVLSNQNHQWDQVGRFFSEVDANLMLALYNNSFYTRKESYDYQAACAPQPPGNLGAAPRGVFVPTVADFLNLAWWTSAAAWSLFQQLLYGLIYHSWFQADPAEAEGSPETRESSCVMKQTQYYFGSVNASYNAIIDCGNCSRLFHAQRLTNTNLLFVVAEKPLCSQCEAGRLLQKETHCCPADGPEQCELVQRPRYRRGPHICFDYNATEDTSDCGRGASFPPSLGVLVSLQLLLLLGLPPRPQPQVLVHASRRL

SEQ ID NO: 328642 - DNA, 3462 bp, Artificial Sequence
  derived and/or modified sequence
atggctgtccctgcccgcacatgcggcgcaagccggcctggcccagcacggaccgcgcgaccctggcccggctgcggcccacacccaggcccaggaactcgtaggcccacctctggccctcccagacccttgtggctcctcttgcccctcctgcccctgctcgccgcgccaggagctagtgcttattcttttccacagcagcacacaatgcaacactgggcccgccgcctcgagcaagaagtggacggggtgatgcgtatattcggtggcgtgcaacagctccgcgaaatttataaggataaccggaatctgttcgaggtgcaggaaaatgagccccagaagctcgtggaaaaagtggcaggtgatatcgagtccctgcttgacaggaaggtccaagctctcaagcgtctagctgacgccgcagagaattttcagaaggcccataggtggcaggataatatcaaggaggaagacatcgtgtactacgacgccaaagctgacgctgagctagacgatcccgaatctgaggatgtggagcggggctccaaagcatccacccttcgcctggactttatagaggatcctaactttaaaaacaaagtaaactatagctacgctgcagtgcaaatccccacagacatctacaaaggatctactgtaatcctgaatgagctcaactggactgaagcattggagaacgttttcatggaaaacaggaggcaggatcctacccttttgtggcaggtcttcgggtccgcaacgggcgttactcggtattaccctgcgaccccgtggcgggcccccaagaagatagacttatacgacgtgaggcgtcgcccatggtacattcaaggagccagctctccaaaggacatggttattatcgtagatgtatcagggagtgtctcaggcctgactctgaagctcatgaaaacaagtgtgtgtgagatgctagatactctgtccgatgatgattatgtaaatgtcgcttcctttaacgaaaaggcacaacccgtcagctgcttcactcacctagtgcaggctaatgttaggaataaaaaggtgttcaaggaagccgtacaaggtatggtggccaagggcactaccgggtacaaggcggggtttgagtatgctttcgaccagctgcagaactccaacatcacacgagccaactgtaataagatgataatgatgttcacagatggcggtgaggatagggtgcaggacgtttttgagaaatacaactggcctaacaggactgtgagagtcttcacattcagtgtgggtcagcacaactacgatgtgacacctctgcagtggatggcatgcgccaacaaaggctattatttcgaaattcctagtatcggcgctatccggattaatacccaggaatatttggatgtgcttggaagacccatggtgctggctggcaaagaggccaaacaggtgcaatggactaatgtgtacgaagatgcccttggattaggccttgtggtgacaggtacactgcctgtttttaacctcacgcaggatggtccaggagagaagaagaatcagctaatcctgggagtaatggggatcgatgtcgcgctcaatgacataaagcgcctcactccaaattatactttaggtgccaacgggtatgtctttgcgatagacctgaacggctatgtcctgctgcatccgaatctgaagccacaaaccaccaattttagggagcccgttacactggatttcctggacgctgagttagaggacgagaataaggaggagataaggcggtcaatgatcgacggcaacaagggacacaaacagatccgcacgttggtcaagtctttggacgagagatacatcgatgaagtaacacgaaattacacttgggtgccaattcgctctaccaattattctctggggctcgtgctgccaccgtactccacgttctaccttcaggctaacctgagcgatcagatactccaggtcaagctgcccatttcaaaactcaaggatttcgagtttctcttgccgtctagctttgagagtgagggccatgtcttcatcgcccccagggagtactgcaaggacctgaatgcatcagacaacaatactgagttcttaaaaaattttattgaactgatggagaaggttactccagactctaaacagtgcaataacttcctgctgcacaatctgattttagataccggcataacccagcagctggttgaaagggtctggcgggatcaggatctgaacacatactccctgctcgctgtgtttgccgccactgacgggggaattacgagagttttccctaacaaagccgccgaggactggaccgagaacccagagccattcaacgccagcttttaccgccgctctctcgacaatcacggttacgttttcaagcccccacaccaggacgcccttctgcggcctctggaacttgagaacgataccgtaggaattcttgtcagcacagccgtcgagttgtcactgggtcggcgcacactacgccctgccgtcgtgggcgtcaaactggatttggaagcatgggccgagaaattcaaagtactggccagcaatcgaactcatcaggaccagccgcagaagtgcggcccgaattctcattgtgagatggattgcgaagtgaataacgaggacctgttatgtgtgctgatagacgacggcgggttcctggtgctctcaaatcagaatcatcagtgggaccaggtgggccgctttttcagcgaggtagacgcaaatttgatgctggctttatacaacaattctttttacactcggaaggagagttacgactaccaggcagcttgcgcccctcaaccccccggcaacctgggcgccgcacctaggggggtcttcgttcctactgttgcagacttcttgaatctggcatggtggacttctgctgccgcttggagcttgtttcagcagttactgtatggactcatttatcactcctggttccaggctgatccagccgaagccgaaggaagtcccgaaacgcgcgagtcatcatgcgtaatgaaacagactcagtattacttcgggtcagtcaatgccagttataatgccataatcgattgtggcaattgttctaggttgtttcacgctcagagactgaccaacactaatctgctattcgtagtggccgagaagccgctgtgcagccagtgtgaggccggtcgtctcctccagaaagaaacacattgctgcccagccgatggtccagaacagtgcgaattagtgcagcgacccaggtaccgacgagggcctcacatttgttttgattataacgctacggaggatacttcagactgtggcagaggtgcttcctttcccccatccctcggtgtgctggtctcacttcagcttttgctgctcctggggcttccacccagaccccagccccaagtgctcgtgcacgcatctagaaggctgtag

SEQ ID NO: 328643 - DNA, 3462 bp, Artificial Sequence
  derived and/or modified sequence
atggctgtgcctgcccggacctgtggggccagcaggcctggccctgccaggacagcccggccctggccaggctgcggcccccaccctggccctggcacccggcggcccaccagcggccccccccggcccctgtggctgctgctgcccctgctgcccctgctggccgcccctggggccagcgcctacagcttcccccagcagcacaccatgcagcactgggcccggcggctggagcaggaggtggatggagtgatgaggatctttggaggagtgcagcagctgcgggagatctacaaggacaacagaaacctgtttgaggtgcaggagaatgagccccagaagctggtggagaaggtggccggggacatcgagagcctgctggacaggaaggtgcaggccctgaagaggctggctgatgctgctgagaacttccagaaggcccaccgctggcaggacaacatcaaggaggaggacatcgtgtactatgatgccaaggcagatgctgagctggatgatcctgagagtgaagatgtggagcggggcagcaaggccagcaccctgcggctggacttcatcgaggaccccaacttcaagaacaaggtgaactacagctatgctgctgtgcagatccccacagacatctacaagggcagcaccgtcatcctgaatgagctgaactggacagaggccctggagaatgtgttcatggagaacagacggcaggaccccaccctgctgtggcaggtgtttggcagcgccaccggggtgacccgctactacccagccaccccctggagggcccccaagaagattgacctgtatgatgtgagaagaagaccctggtacatccagggcgccagcagccccaaggacatggtgatcatcgtggatgtgtctggctctgtgtctggcctgaccctgaagctgatgaagacctctgtgtgtgagatgctggacaccctgagtgatgatgattatgtgaatgtggccagcttcaatgagaaggcccagcctgtgtcctgcttcacccacctggtgcaggccaacgtgaggaacaagaaggtgttcaaggaggccgtgcagggcatggtggccaagggcaccaccggctacaaggccggctttgaatatgcctttgaccagctgcagaacagcaacatcacccgggccaactgcaacaagatgatcatgatgttcacagatggaggagaggacagagtgcaggatgtgtttgagaagtacaactggcccaacagaacagtgcgggtcttcaccttctctgtgggccagcacaactatgatgtgacccccctgcagtggatggcctgtgccaacaagggctactactttgagatccccagcattggagccatccgcatcaacacccaggagtacctggatgtgctgggccggcccatggtgctggccggcaaggaggccaagcaggtgcagtggaccaacgtgtatgaagatgccctgggcctgggcctggtggtgacaggcaccctgcccgtcttcaacctgacccaggacggccctggagagaagaagaaccagctgatcctgggcgtgatgggcattgatgtggccctgaatgacatcaagaggctgacccccaactacaccctgggcgccaacggctacgtgtttgccatcgacctgaatggctacgtgctgctgcaccccaacctgaagccccagaccaccaacttccgggagcctgtgaccctggacttcctggatgctgagctggaggatgagaacaaggaggagatcagaagatccatgattgatggcaacaagggccacaagcagatccgcaccctggtgaagagcctggatgagcgctacattgatgaggtgaccaggaactacacctgggtgcccatccgcagcaccaactacagcctgggcctggtgctgcccccctacagcaccttctacctgcaggccaacctgagtgaccagatcctgcaggtgaagctgcccatcagcaagctgaaggactttgagttcctgctgcccagcagctttgagagcgagggccacgtgttcatcgccccccgggagtactgcaaggacctgaatgccagtgacaacaacacagagttcctgaagaacttcatcgagctgatggagaaggtgaccccagacagcaagcagtgcaacaacttcctgctgcacaacctgatcctggacaccggcatcacccagcagctggtggagcgggtgtggagggaccaggacctgaacacctacagcctgctggccgtgtttgctgccacagatggcggcatcaccagggtcttccccaacaaggctgctgaggactggacagagaaccctgagcccttcaatgccagcttctacagaagaagcctggacaaccacggctacgtgttcaagccaccccaccaggatgccctgctgcggcccctggagctggagaatgacacagtgggcatcctggtgtccacagctgtggagctgagcctgggccgccgcaccctgcggcctgctgtggtgggcgtgaagctggacctggaggcctgggccgagaagttcaaggtgctggccagcaacagaacccaccaggaccagccccagaagtgtggccccaacagccactgtgagatggactgtgaggtgaacaatgaagacctgctgtgtgtgctgattgatgatggcggcttcctggtgctgagcaaccagaaccaccagtgggaccaggtgggccgcttcttcagcgaggtggatgccaacctgatgctggccctgtacaacaacagcttctacaccaggaaggagagctatgactaccaggccgcctgtgccccccagcccccaggcaacctgggcgccgccccccggggcgtgtttgtgcccaccgtggccgacttcctgaacctggcctggtggaccagcgctgctgcctggagcctcttccagcagctgctgtatggcctcatctaccacagctggttccaggccgaccctgctgaggccgagggcagccctgagacccgggagagcagctgtgtgatgaagcagacccagtactacttcggctctgtgaatgccagctacaatgccatcatcgactgtggcaactgcagccgcctcttccacgcccagaggctgaccaacaccaacctgctgtttgtggtggccgagaagcccctgtgcagccagtgtgaggccggccgcctgctgcagaaggagacccactgctgcccagcagatggccctgagcagtgtgagctggtgcagaggccccgctacagaagaggcccccacatctgctttgactacaatgccacagaggacaccagtgactgtggccgcggggccagcttcccccccagcctgggcgtgctggtgtccctgcagctgctgctgctgctgggcctgcccccccggccccagccccaggtgctggtgcacgccagccggcggctgtag

SEQ ID NO: 328644 - DNA, 3462 bp, Artificial Sequence
  derived and/or modified sequence
atggccgtgcccgcccggacctgcggcgccagccggcccggccccgccagaacagcaaggccctggccaggctgtggaccgcatccagggcctggaactcgccgcccaacctcaggccccccacggcctctctggttactgctgcctttgcttcctctgctggccgctcccggggcctctgcttacagctttccccagcaacacactatgcagcactgggctaggcgcttggagcaggaggttgacggtgtaatgcgtatcttcggcggagtccaacagctgcgtgaaatctataaagacaaccggaaccttttcgaagtgcaggagaacgaaccacagaagctagtggaaaaagtagccggcgacattgagagcttgctagacagaaaggtccaggctctcaagcgtctcgcagatgctgcagagaattttcaaaaggcacatcgatggcaggataacattaaagaggaagatatcgtgtactacgacgccaaggcggacgctgagctggacgaccctgagtctgaagatgtggagcgcggcagcaaggctagcaccctccgccttgattttatagaagacccaaatttcaagaacaaggtgaactattcctatgctgcagtgcagattcccacggacatctataagggctctaccgtgatcctaaacgagctgaattggactgaggccctggagaatgtgtttatggagaacaggcgccaagacccaacgctcctgtggcaggtcttcgggagcgcgactggggtgacccggtattacccagcgacaccctggagagcacctaagaagattgatttatacgacgtgaggcgcaggccctggtatatccaaggcgcctcctcaccaaaagatatggttataattgtcgatgtgagcggttccgtcagcgggctaacactgaagctcatgaaaaccagtgtctgcgagatgctggatactttaagcgatgatgactatgtcaatgttgcctcctttaacgaaaaagcccagcccgtcagctgtttcactcacttggtgcaagcaaacgtgcgaaataaaaaagtcttcaaagaagctgttcagggaatggttgcaaaaggaaccaccggctataaggcagggttcgaatatgcctttgaccagttgcagaattccaatatcacccgcgctaattgtaataaaatgattatgatgtttaccgatggcggggaggaccgtgtgcaggatgtgttcgaaaaatataactggcccaatagaaccgtccgggtgttcactttctccgtgggacaacacaattacgacgtgactccgttgcaatggatggcttgtgcgaacaagggatactatttcgaaattcctagcatcggagccatccgtatcaatacacaagagtatctggacgtgctgggccggccaatggtccttgctggaaaagaagcaaagcaggttcagtggactaatgtgtacgaagacgccctgggtctcggcctggtagtgacaggaacactacccgtgttcaatctgactcaggatggccccggggaaaaaaagaatcaacttattctcggagtgatgggaattgatgtcgccttaaacgacatcaagcgcctcacacccaactacacactgggcgcgaatggttacgtttttgcaattgacctgaatggctacgtgctactgcatcctaatcttaagccacagacaaccaactttcgggagccagtcaccctcgatttcctggatgccgagctcgaagacgagaacaaggaagagattcgacggagcatgattgacggcaacaagggacacaagcaaatacggaccttggtcaagtcactggatgagagatacattgacgaagtcactagaaactacacatgggtgccaatcagatcgactaattattctctcggccttgtgctccccccttattccaccttctacttgcaggccaatttgtccgatcagatattgcaggttaaactgccgatctctaaactgaaggacttcgaatttcttctgccgagctctttcgagtcagagggccacgtcttcatcgcccctagggaatattgtaaagacctgaacgccagtgacaataacaccgagtttttaaaaaacttcatagagctgatggaaaaggtgacacctgacagcaagcagtgcaacaacttcctgctgcataatctgattctggacactgggatcacacagcagctggttgaacgtgtgtggcgcgaccaagatctcaacacatactcattgctggccgttttcgccgccaccgacggcggtattactcgcgtatttcccaacaaagctgccgaggattggaccgaaaaccccgagcctttcaatgccagtttctatcgccggtcgttagacaaccatggttatgtcttcaagccacctcatcaagacgcgcttctgcgaccactggaactggagaacgataccgtcggaattctggtctccacggcggtggagctgtccctgggcagacgcacgctgaggccagcagttgtgggagtgaaattggacctcgaggcctgggccgagaaattcaaagttctggcttccaatcgaactcatcaggatcagccacagaagtgtgggccgaacagtcattgcgagatggattgcgaagtcaataacgaggacttgctttgcgttctgatcgacgacggaggttttcttgtgttatccaatcagaatcaccaatgggatcaggtaggcaggtttttttctgaggtggatgcaaatcttatgctggctctgtataacaactcattttataccaggaaagaatcatacgattatcaggccgcctgtgctcctcagccccctggaaacttaggcgccgccccccggggcgtttttgtgccgaccgtcgctgatttcctgaatcttgcctggtggacatcagccgccgcgtggagtttgttccagcagctcctttacgggctgatttaccactcttggttccaggccgaccctgcagaggccgaaggctccccagagacgcgggagtcaagttgcgtgatgaagcagactcagtactactttgggtcggtcaatgcgtcctacaacgccataatagactgcggcaattgctcccgcttgttccacgcccagagactgactaataccaacttactgttcgtcgtggcagagaagcctctctgcagccagtgcgaggctggacgtctgctgcagaaggagacgcattgttgcccggctgatggacccgaacagtgtgaactggttcagagacccaggtaccgcagaggcccacatatctgttttgactacaacgccacagaagatactagtgactgtggtcgaggagccagttttcccccttcactcggggtgctagtgtccctccagctgcttctactgttgggcttgcccccccgaccccagccacaggtgctggtgcatgcatcacgaaggctgtag

SEQ ID NO: 328645 - DNA, 3462 bp, Artificial Sequence
  derived and/or modified sequence
atggccgtacccgctaggacttgtggagctagccggccagggccagcaaggaccgcgagaccttggcccggatgcggcccacatcctggcccaggaactaggaggcctacatctggtccccctcggccattgtggctgctgctgccactcctgcccctcctcgcggcaccgggagccagcgcctattctttccctcagcagcacacaatgcagcattgggctcgcaggctggaacaggaggtcgacggagtgatgagaatttttgggggagtccagcagctgagagagatctacaaagataacagaaatcttttcgaggtgcaggaaaacgaaccccagaagctggtcgaaaaagtggccggagacatcgagtccttacttgaccgcaaagtacaagccctcaagaggctagcagacgctgcggaaaactttcaaaaagctcacaggtggcaggacaatattaaggaggaggacatcgtatactacgatgctaaggcggacgcggagcttgacgatcctgaatccgaggacgtggagcgcggaagcaaggctagcacgctgagactggattttattgaagatccaaattttaaaaataaggttaactactcctacgccgcagtgcagattcccacagacatctacaaggggagtactgtcatactgaatgagttaaactggaccgaggcactggagaatgtctttatggaaaataggagacaggatcccactttgctttggcaggtgtttggaagcgcaacaggggtaacacggtactacccggctacgccttggagggcgccaaagaaaatcgacctgtacgacgttaggagacgtccttggtacattcagggtgccagctcccccaaggacatggtgattatcgtcgacgtgtcagggagcgtttctggcctgactctgaaactcatgaaaaccagcgtgtgcgaaatgcttgacactctatcggatgacgactacgtcaatgtagctagttttaacgagaaggcacagcccgtttcctgttttacacacctggtacaagccaatgtgagaaacaagaaagtgttcaaagaagccgtccagggaatggttgcaaaggggacaaccggctataaggccggatttgagtacgcttttgaccaactacaaaactcaaacattaccagagctaactgcaacaagatgataatgatgttcacagacggaggcgaagacagagtgcaagatgttttcgaaaaatataattggcctaacagaactgtccgggtatttactttttcagttggacagcataattatgatgtaactcccttgcagtggatggcctgcgctaacaaaggctattattttgaaattccttcgatcggagccatacgaatcaacacacaagaatacctggatgttctggggcgtccgatggtactggcagggaaagaggccaaacaggtgcagtggactaacgtctacgaggacgccctcggactcggcctggtggtgaccggtactctgcctgtgttcaacttgacgcaggacggcccaggcgagaagaagaaccagctcattcttggggtcatgggcatagatgtcgcattgaatgacattaagaggctcacacctaactatacattgggcgcaaatggctacgtgttcgccattgacctgaacggctacgtcctcctgcatcccaatctgaagccccagaccacaaattttcgtgagccagtcacactggatttcctggatgctgagctcgaagacgagaataaggaagagatacgtcgcagtatgattgacgggaacaaaggccacaaacagatccgaacactggttaaatccctggacgaacgctacatcgacgaggtgacccggaattatacttgggtaccaattaggtccacaaactattccctaggtttggtgttgccaccatatagcactttctacctgcaggcaaacctgtccgatcaaattctgcaggtcaaacttcccatcagcaaattgaaggatttcgagttcttactaccctcctcctttgagagtgagggccacgtgttcattgcgcctcgagaatattgcaaggacctgaatgcatctgacaataacacagagttccttaaaaacttcatcgagcttatggagaaggtcactcccgattccaaacaatgcaacaactttctactgcataatcttattctcgacaccggaattacccagcagcttgttgaacgcgtctggagagatcaagatctgaatacatactccctgctagctgtcttcgccgcaacagacggaggcattacacgagtttttcctaataaggctgcggaggactggaccgagaatccagaaccctttaatgctagtttctacaggcgttctctggacaatcatggttacgtcttcaagccaccgcaccaagatgcgctgctgcgacctctcgaactcgagaatgacaccgtgggcatactcgtgtccacggcagttgagctgtctttggggcgtcggactcttagacccgcagtcgtgggagttaagctggacttggaagcatgggccgaaaaattcaaagtgttggcctctaaccggactcaccaggatcagcctcaaaaatgtggacctaattcccattgtgagatggattgtgaggtgaataacgaggatttactttgcgtgctgatcgatgacgggggttttctggtcctgtcaaaccagaatcaccagtgggaccaggtcggacgttttttctccgaagtagacgctaacctgatgctagcactttataacaatagtttttataccaggaaagagagttacgactaccaggcagcctgcgccccacagccaccaggcaacctgggggcagcaccaagaggggtgtttgtccctacagtggctgattttctcaatctggcgtggtggacgtcagcggcagcctggtctctcttccaacagcttctctacgggttgatataccactcatggtttcaagccgatcctgctgaggccgagggcagcccagaaactagggagagcagctgcgtcatgaagcaaacacagtattacttcgggtccgttaatgcttcctacaacgccatcatcgactgtgggaattgcagtagattatttcacgcacagcggctcaccaatactaacctgctctttgtagtagctgaaaaaccactctgttctcagtgcgaagctggcaggctcctgcaaaaggagacacactgctgccccgctgatggacctgaacagtgtgaactggttcagaggccccgttataggagggggcctcatatttgcttcgactacaatgctacggaggacactagcgactgcggaaggggggcatccttccctccttcactgggcgtgttggtgtctctgcagcttctcttactcctggggttaccgccaaggccacagcctcaagtgttggtacacgcatcgaggcgtctgtag

SEQ ID NO: 328646 - DNA, 5500 bp, Artificial Sequence
  derived and/or modified sequence
gcgcagcccgcagaggcgctgcggcccgtgcagccccggaggcccctcgcggagaaggcggcggcggaggagaggccgagttaccgcccgccgcccgcgcccccccaaccccgccgccgccgccgccgccgccactgccccccctccccgcggcgccgcatcttgaatggaaacatggcggtgccggctcggacctgcggcgcctctcggcccggcccagcgcggactgcgcgcccctggcccggctgcggcccccaccctggccccggcacccggcgcccgacgtccgggcccccgcgcccgctgtggctgctgctgccgcttctaccgctgctcgccgcccccggcgcctctgcctacagcttcccccagcagcacacgatgcagcactgggcccggcgtctggagcaggaggtcgacggcgtgatgcggatttttggaggcgtccagcagctccgtgagatttacaaggacaaccggaacctgttcgaggtacaggagaatgagcctcagaagttggtggagaaggtggcaggggacattgagagccttctggacaggaaggtgcaggccctgaagagactggctgatgctgcagagaacttccagaaagcacaccgctggcaggacaacatcaaggaggaagacatcgtgtactatgacgccaaggctgacgctgagctggacgaccctgagagtgaggatgtggaaagggggtctaaggccagcaccctaaggctggacttcatcgaggacccaaacttcaagaacaaggtcaactattcatacgcggctgtacagatccctacggacatctacaaaggctccactgtcatcctcaatgagctcaactggacagaggccctggagaatgtgttcatggaaaaccgcagacaagaccccacactgctgtggcaggtcttcggcagcgccacaggagtcactcgctactacccggccaccccgtggcgagcccccaagaagatcgacctgtacgatgtccgaaggagaccctggtatatccagggggcctcgtcacccaaagacatggtcatcatcgtggatgtgagtggcagtgtgagcggcctgaccctgaagctgatgaagacatctgtctgcgagatgctggacacgctgtctgatgatgactatgtgaatgtggcctcgttcaacgagaaggcacagcctgtgtcatgcttcacacacctggtgcaggccaatgtgcgcaacaagaaggtgttcaaggaagctgtgcagggcatggtggccaagggcaccacaggctacaaggccggctttgagtatgcctttgaccagctgcagaactccaacatcactcgggccaactgcaacaagatgatcatgatgttcacggatggtggtgaggaccgcgtgcaggacgtctttgagaagtacaattggccaaaccggacggtgcgcgtgtttactttctccgtggggcagcataactatgacgtcacaccgctgcagtggatggcctgtgccaacaaaggctactattttgagatcccttccatcggagccatccgcatcaacacacaggaatatctagatgtgttgggcaggcccatggtgctggcaggcaaggaggccaagcaggtgcagtggaccaacgtgtatgaggatgcactgggactggggttggtggtaacagggaccctccctgttttcaacctgacacaggatggccctggggaaaagaagaaccagctgatcctgggcgtgatgggcattgacgtggctctgaatgacatcaagaggctgacccccaactacacgcttggagccaacggctatgtgtttgccattgacctgaacggctacgtgttgctgcaccccaatctcaagccccagaccaccaacttccgggagcctgtgactctggacttcctggatgcggagctagaggatgagaacaaggaagagatccgtcggagcatgattgatggcaacaagggccacaagcagatcagaacgttggtcaagtccctggatgagaggtacatagatgaggtgacacggaactacacctgggtgcctataaggagcactaactacagcctggggctggtgctcccaccctacagcaccttctacctccaagccaatctcagtgaccagatcctgcaggtcaagttgccaatcagcaaactgaaggattttgagttcctgctccccagcagctttgagtctgaaggacacgttttcattgctcccagagagtactgcaaggacctgaatgcctcagacaacaacaccgagttcctgaaaaactttattgagctcatggagaaagtgactccagactccaagcagtgcaacaacttccttctgcacaacctgatcttggacacgggcatcacgcagcagctggtagagcgtgtgtggagggaccaggatctcaacacgtacagcctactggccgtgttcgctgccacagacggtggcatcacccgagtcttccccaacaaggcagctgaggactggacagagaaccctgagcccttcaatgccagcttctaccgccgcagcctggataaccacggttatgtcttcaagcccccacaccaggatgccctgttaaggccgctggagctggagaatgacactgtgggcatcctcgtcagcacagctgtggagctcagcctaggcaggcgcacactgaggccagcagtggtgggcgtcaagctggacctagaggcttgggctgagaagttcaaggtgctagccagcaaccgtacccaccaagaccagcctcagaagtgcggccccaacagccactgtgagatggactgcgaggttaacaatgaggacttactctgtgtcctcattgatgatggaggattcctggtgctgtcaaaccagaaccatcagtgggaccaggtgggcaggttcttcagtgaggtggatgccaacctgatgctggcactctacaataactccttctacacccgcaaggagtcctatgactatcaggcagcctgtgcccctcagccccctggcaacctgggtgctgcaccccggggtgtctttgtgcccaccgttgcagatttccttaacctggcctggtggacctctgctgccgcctggtccctgttccagcagcttctctacggcctcatctaccacagctggttccaagcagaccccgcggaggccgaggggagccccgagacgcgcgagagcagctgcgtcatgaaacagacccagtactacttcggctcggtaaacgcctcctacaacgccatcatcgactgcggaaactgctccaggctgttccacgcgcagagactgaccaacaccaatcttctctttgtggtggccgagaagccgctgtgcagccagtgcgaggctggccggctgctgcagaaggagacgcactgttgcccagcggacggcccggagcagtgtgagctagtgcagagaccgcgataccggagaggcccgcacatctgcttcgactacaacgcgacagaagatacctcagactgtggccgcggggcctccttcccgccgtcgctgggcgtcctggtctccctgcaactgctgctcctcctgggcctgccgccccggccgcagcctcaagtcctcgtccacgcctctcgccgcctctgagcaccctgccccaccccacctccactcccacctcacccggcctcttcgcctttcccaccctcctgccccacactccccgccttagagcctcgtccctccctcactgaaggacctgagctggccaggccctgagagtctggtctgcgccttgggatggggagtcccaaagcgggacgccgcaggtgtttggcacccaaatcacatctcacctccgaactgttcaagtgtccccagacccttcttgcctgctgggctccccccagtgggatgggacagggaggccacacgcactggtgccaaaaccaggcctctgctgccgcccttcctggaggctgcctatgttgggggggaccctgcctcagctgacccggcctctctgccccacccaagcccaaacttggtttctgtgagaatagtggaggaaggtgagatggccagtttgaagcctgtgcctcccagcttaaatcctagcaggagagaggctctggggcagcccccatgggctcctgcccctttcaggcctacagccacatccccaagcccaccaggtgtcaggatagtcacagtgataccagttcagacactaccccatatacacctggaacattgaggatggaaactggactcacattcgacataccccactgggcacacgcacaaacacacacactatggggtggggtgggtgtaggggcttacaaagccttacacagggcgaggggttggtgggagggttggcacctgcacactccatctcctgctcaccacctgcctctaatctgagctgcagcctggctggtcctcccatttctaaagctgaatgtcaaacagtgccaaatgctggggcagggggtgaagaaccctctgtcccacccctagccaccagtgtcctccaagtgccccctcacctctccaggtgctcattgtaaccatttctcactagtgtcaggcccccagtgggaccacatgccactgcctgcacctttcggcagaggaacccccaccagacatcaccctttgccttagcaggggtgactttgtctctcctggctgggccatccttccgccaatctggcccttacacactcaggcctgtgcccactccctatctccttcccacccctacacacacactccctgcttgcaggaggccaaactgtccctcccttgctgaacacacacacacacacacacacacaggtggggactgggcacagctcttcacaccattcattctggtcatttcccccaaaggcatcccagcctgggggccagtggggaactgagggcaaggggatatagtgatggggctcagatggactgggaggagggggagggtgatgcattaattaatggcttcgttaattaatgtcatgttgcttgtcgctttctcagtgtgtgtgtgtggtccatgcccactgctggtgccagggtgggtgtccatgtgcacccggcctggatgccagctgtgtccttcgggggcgtgcgtgtaactgtagtgtagtcaggtgctcaatggagaatataaacatatacagaaaaatatatattttaagtttaaaaaacagaaaaacagacaaaacaatccccatcaggtagctgtctaacccccagctgggtctaatccttctcattacccacccgacctggctgcccctcaccttgggctgggggactggggggccatttccttttctctgccctttttttgttgttctattttgtacagacaagttggaaaaacaacagcgacaaaaaagtcaagaaactttgtaaaatatcgtgtgtgtgattccttgtaaaatattttcaaatggtttattacagaagatcagttattaaataatgttcatattttcacttc

SEQ ID NO: 328647 - DNA, 3462 bp, Artificial Sequence
  derived and/or modified sequence
atggccgtgcccgccagaacctgcggcgccagcagacccggccccgccagaaccgccagaccctggcccggctgcggcccccaccccggccccggcaccagaagacccaccagcggcccccccagacccctgtggctgctgctgcccctgctgcccctgctggccgcccccggcgccagcgcctacagcttcccccagcagcacaccatgcagcactgggccagaagactggagcaggaggtggacggcgtgatgagaatcttcggcggcgtgcagcagctgagagagatctacaaggacaacagaaacctgttcgaggtgcaggagaacgagccccagaagctggtggagaaggtggccggcgacatcgagagcctgctggacagaaaggtgcaggccctgaagagactggccgacgccgccgagaacttccagaaggcccacagatggcaggacaacatcaaggaggaggacatcgtgtactacgacgccaaggccgacgccgagctggacgaccccgagagcgaggacgtggagagaggcagcaaggccagcaccctgagactggacttcatcgaggaccccaacttcaagaacaaggtgaactacagctacgccgccgtgcagatccccaccgacatctacaagggcagcaccgtgatcctgaacgagctgaactggaccgaggccctggagaacgtgttcatggagaacagaagacaggaccccaccctgctgtggcaggtgttcggcagcgccaccggcgtgaccagatactaccccgccaccccctggagagcccccaagaagatcgacctgtacgacgtgagaagaagaccctggtacatccagggcgccagcagccccaaggacatggtgatcatcgtggacgtgagcggcagcgtgagcggcctgaccctgaagctgatgaagaccagcgtgtgcgagatgctggacaccctgagcgacgacgactacgtgaacgtggccagcttcaacgagaaggcccagcccgtgagctgcttcacccacctggtgcaggccaacgtgagaaacaagaaggtgttcaaggaggccgtgcagggcatggtggccaagggcaccaccggctacaaggccggcttcgagtacgccttcgaccagctgcagaacagcaacatcaccagagccaactgcaacaagatgatcatgatgttcaccgacggcggcgaggacagagtgcaggacgtgttcgagaagtacaactggcccaacagaaccgtgagagtgttcaccttcagcgtgggccagcacaactacgacgtgacccccctgcagtggatggcctgcgccaacaagggctactacttcgagatccccagcatcggcgccatcagaatcaacacccaggagtacctggacgtgctgggcagacccatggtgctggccggcaaggaggccaagcaggtgcagtggaccaacgtgtacgaggacgccctgggcctgggcctggtggtgaccggcaccctgcccgtgttcaacctgacccaggacggccccggcgagaagaagaaccagctgatcctgggcgtgatgggcatcgacgtggccctgaacgacatcaagagactgacccccaactacaccctgggcgccaacggctacgtgttcgccatcgacctgaacggctacgtgctgctgcaccccaacctgaagccccagaccaccaacttcagagagcccgtgaccctggacttcctggacgccgagctggaggacgagaacaaggaggagatcagaagaagcatgatcgacggcaacaagggccacaagcagatcagaaccctggtgaagagcctggacgagagatacatcgacgaggtgaccagaaactacacctgggtgcccatcagaagcaccaactacagcctgggcctggtgctgcccccctacagcaccttctacctgcaggccaacctgagcgaccagatcctgcaggtgaagctgcccatcagcaagctgaaggacttcgagttcctgctgcccagcagcttcgagagcgagggccacgtgttcatcgcccccagagagtactgcaaggacctgaacgccagcgacaacaacaccgagttcctgaagaacttcatcgagctgatggagaaggtgacccccgacagcaagcagtgcaacaacttcctgctgcacaacctgatcctggacaccggcatcacccagcagctggtggagagagtgtggagagaccaggacctgaacacctacagcctgctggccgtgttcgccgccaccgacggcggcatcaccagagtgttccccaacaaggccgccgaggactggaccgagaaccccgagcccttcaacgccagcttctacagaagaagcctggacaaccacggctacgtgttcaagcccccccaccaggacgccctgctgagacccctggagctggagaacgacaccgtgggcatcctggtgagcaccgccgtggagctgagcctgggcagaagaaccctgagacccgccgtggtgggcgtgaagctggacctggaggcctgggccgagaagttcaaggtgctggccagcaacagaacccaccaggaccagccccagaagtgcggccccaacagccactgcgagatggactgcgaggtgaacaacgaggacctgctgtgcgtgctgatcgacgacggcggcttcctggtgctgagcaaccagaaccaccagtgggaccaggtgggcagattcttcagcgaggtggacgccaacctgatgctggccctgtacaacaacagcttctacaccagaaaggagagctacgactaccaggccgcctgcgccccccagccccccggcaacctgggcgccgcccccagaggcgtgttcgtgcccaccgtggccgacttcctgaacctggcctggtggaccagcgccgccgcctggagcctgttccagcagctgctgtacggcctgatctaccacagctggttccaggccgaccccgccgaggccgagggcagccccgagaccagagagagcagctgcgtgatgaagcagacccagtactacttcggcagcgtgaacgccagctacaacgccatcatcgactgcggcaactgcagcagactgttccacgcccagagactgaccaacaccaacctgctgttcgtggtggccgagaagcccctgtgcagccagtgcgaggccggcagactgctgcagaaggagacccactgctgccccgccgacggccccgagcagtgcgagctggtgcagagacccagatacagaagaggcccccacatctgcttcgactacaacgccaccgaggacaccagcgactgcggcagaggcgccagcttcccccccagcctgggcgtgctggtgagcctgcagctgctgctgctgctgggcctgccccccagaccccagccccaggtgctggtgcacgccagcagaagactgtag

SEQ ID NO: 328648 - DNA, 1880 bp, Artificial Sequence
  derived and/or modified sequence
gagaaagccttgctatggatgtgacatttgggctgagatgtggatgatgagaaggagtcaggcagccgtgccctggaggagatagcgatgcagacagcagaagccctgaggacagagccagctgacagcccatgtggtgccagaggggagaactggagaagttaaatcagtccacggatgatatcaacagacgggagactgaacttgaggtccagtaggtgtttgcagatcccttcttaagcctcaactgtgtttcctcggtttcccctggctgcaggatgctcgtcagaagttccgctctgttctggttgaagcaacggtgaaactggatgaactggtgaagaaaattggcaaagctgtggaagactccaagccctactgggaggcacggagggtggcgaggcaggctcagctggaagctcagaaagccacgcaggacttccagagggccacagaggtgctccgtgccgccaaggagaccatctccctggccgagcagcggctgctggaggatgacaagcggcagttcgactccgcctggcaggagatgctgaatcacgccactcagagggtcatggaggcggagcagaccaagaccaggagcgagctggtgcataaggagacggcagccaggtacaatgccgccatgggccgcatgcgacagctggagaagaaactcaagagagccatcaacaagtccaagccttattttgaactcaaggcaaagtactatgtgcagctcgagcaactgaaaaagactgtggatgacctgcaggccaaactgaccctggcaaaaggcgagtacaagatggccctgaagaacctggagatgatctcagatgagatccacgagcggcggcgctccagtgccatggggcctcggggatgcggtgttggtgctgagggcagcagcacatctgtggaggatctgccagggagcaaacctgagcctgatgccatttctgtggcctcggaggcctttgaagatgacagctgtagcaactttgtgtctgaagatgactcggaaacccagtccgtgtccagctttagttcaggaccaacaagcccgtctgagatgcctgaccagttccctgcggttgtgaggcctggcagcctggatctgcccagccctgtgtccctgtcagagtttgggatgatgttcccagtgttgggccctcgaagtgaatgcagcggggcctcctcccctgaatgtgaagtagaacgaggagacagggcagaaggggcagagaataaaacaagtgacaaagccaacaacaaccggggcctcagcagtagcagtggcagtggtggcagcagtaagagccaaagcagcacctcccctgagggccaggccttggagaaccggatgaagcagctctccctacagtgctcaaagggaagagatggaattattgctgacataaaaatggtgcagattggctgattcatcctgggccctggccgatgtgcatatcaacatttatacatggaactggagaacattgtgccaataatcatttaatatatgccaaatcttacacgtctactctaaactgctctaatgaagtttcagtgaccttgagggctaaagattgttcttctgggtaagagctcttgggctggtttttcagagcagagttcttgttgtgggtagactgtgactaggttcacagcctttgtggaacattccgtataacggcattgtggaagcaataactagttcctatgaaagaaccagagctgggaagatggctgggaagccaggccaaagtgggggcaacagcttgcttctctttctcttctcaccctcagtttgtatgggaaaatggagatgtcctctccactttatcccacgatatctaaatgaaaaagaaagaaaa

SEQ ID NO: 328649 - DNA, 2190 bp, Artificial Sequence
  derived and/or modified sequence
aattcataaattcttggccagagtgtgcccatcaacaggggttacacttgccacctccttaaatcccagctcaatgcattctccatgctcctggctattcagggagaactggagaagttaaatcagtccacggatgatatcaacagacgggagactgaacttgaggatgctcgtcagaagttccgctctgttctggttgaagcaacggtgaaactggatgaactggtgaagaaaattggcaaagctgtggaagactccaagccctactgggaggcacggagggtggcgaggcagagatctggttctcttatttggaactcatcagatacatggcagagggtgtgaagaggtgctgggcccgtggtacagcagccacctttcagaaggccgtcaaaagagcatcttttcttgcttgaagaaataagggattcataactgaagcagagagaactgggagaagagagtttacccttaaatgttgctgaattgaaatactaaaaaattcctaaaaaggcaaatacaaatcccattttaggatcctgtgggattcatcctgtctcctggagttggtgtgaagcatatagaatttcgctcttgtcatccaggctggagtgcaatggcgtgatctcggctcactgcaacctccacctcccaggctcagctggaagctcagaaagccacgcaggacttccagagggccacagaggtgctccgtgccgccaaggagaccatctccctggccgagcagcggctgctggaggatgacaagcggcagttcgactccgcctggcaggagatgctgaatcacgccactcagagggtcatggaggcggagcagaccaagaccaggagcgagctggtgcataaggagacggcagccaggtacaatgccgccatgggccgcatgcgacagctggagaagaaactcaagagagccatcaacaagtccaagccttattttgaactcaaggcaaagtactatgtgcagctcgagcaactgaaaaagactgtggatgacctgcaggccaaactgaccctggcaaaaggcgagtacaagatggccctgaagaacctggagatgatctcagatgagatccacgagcggcggcgctccagtgccatggggcctcggggatgcggtgttggtgctgagggcagcagcacatctgtggaggatctgccagggagcaaacctgagcctgatgccatttctgtggcctcggaggcctttgaagatgacagctgtagcaactttgtgtctgaagatgactcggaaacccagtccgtgtccagctttagttcaggaccaacaagcccgtctgagatgcctgaccagttccctgcggttgtgaggcctggcagcctggatctgcccagccctgtgtccctgtcagagtttgggatgatgttcccagtgttgggccctcgaagtgaatgcagcggggcctcctcccctgaatgtgaagtagaacgaggagacagggcagaaggggcagagaataaaacaagtgacaaagccaacaacaaccggggcctcagcagtagcagtggcagtggtggcagcagtaagagccaaagcagcacctcccctgagggccaggccttggagaaccggatgaagcagctctccctacagtgctcaaagggaagagatggaattattgctgacataaaaatggtgcagattggctgattcatcctgggccctggccgatgtgcatatcaacatttatacatggaactggagaacattgtgccaataatcatttaatatatgccaaatcttacacgtctactctaaactgctctaatgaagtttcagtgaccttgagggctaaagattgttcttctgggtaagagctcttgggctggtttttcagagcagagttcttgttgtgggtagactgtgactaggttcacagcctttgtggaacattccgtataacggcattgtggaagcaataactagttcctatgaaagaaccagagctgggaagatggctgggaagccaggccaaagtgggggcaacagcttgcttctctttctcttctcaccctcagtttgtatgggaaaatggagatgtcctctccactttatcccacgatatctaaatgaaaaagaaagaaaacccacacacaaagcaaaaactcaagtattaagagcacatatttttgacccagtggaggctt

SEQ ID NO: 328650 - DNA, 903 bp, Artificial Sequence
  derived and/or modified sequence
aggcttttttttttttttttttttttgagacagagtctcactttgttgcccaggctggagtgcagtggcacgatcttggcttgctgcaacctccacctcctggattcaagtgattctcctgcctcagcctcccgagtagctgggagtacaggctcccacaaccatgcccagctaatttttgtatttaggtagaggcggggtttcaccatgttggccaagctggtcttgaactcctggcctcaagtgatccacccgccttggccttccatagtgctgggattacaggtgtgttactgcgcccagcccataagctgccttttaaaattttctccatggagctcttcccatgaaagctgttagtgtctgtaagtcatgaaggctcagctggaagctcagaaagccacgcaggacttccagagggccacagaggtgctccgtgccgccaaggagaccatctccctggccgagcagcggctgctggaggatgacaagcggcagttcgactccgcctggcaggagatgctgaatcacgccactcagagggtcatggaggcggagcagaccaagaccaggagcgagctggtgcataaggagacggcagccaggtacaatgccgccatgggccgcatgcgacagctggagaagaaactcaagagagccatcaacaagtccaagccttattttgaactcaaggcaaagtactatgtgcagctcgagcaactgaaaaagactgtggatgacctgcaggccaaactgaccctggcaaaaggcgagtacaagatggccctgaagaacctggagatgatctcagatgagatccacgagcggcggcgctccagtgccatggggcctcggggatgcggtgttggtgctgagggcagcagcacatctgtggaggatctg

SEQ ID NO: 328651 - DNA, 826 bp, Artificial Sequence
  derived and/or modified sequence
tagctgggagtacaggctcccacaaccatgcccagctaatttttgtatttaggtagaggcggggtttcaccatgttggccaagctggtcttgaactcctggcctcaagtgatccacccgccttggccttccatagtgctgggattacaggtgtgttactgcgcccagcccataagctgccttttaaaattttctccatggagctcttcccatgaaagctgttagtgtctgtaagtcatgaagagatctggttctcttatttggaactcatcagatacatggcagagggtgtgaagaggtgctgggcccgtggtacagcagccacctttcagaaggccgtcaaaagagcatcttttcttgcttgaagaaataagggattcataactgaagcagagagaactgggagaagagagtttacccttaaatgttgctgaattgaaatactaaaaaattcctaaaaaggcaaatacaaatcccattttaggatcctgtgggattcatcctgtctcctggagttggtgtgaagcatataggctcagctggaagctcagaaagccacgcaggacttccagagggccacagaggtgctccgtgccgccaaggagaccatctccctggccgagcagcggctgctggaggatgacaagcggcagttcgactccgcctggcaggagatgctgaatcacgccactcagagggtcatggaggcggagcagaccaagaccaggagcgagctggtgcataaggagacggcagccaggtacaatgccgccatgggccgcatgcgacagctggagaagaaactcaagagagccatcaacaagtcc

SEQ ID NO: 328652 - protein, 1259 aa, Artificial Sequence
  derived and/or modified sequence
MEADGAGEQMRPLLTRVTSRGPDEEAVVDLGKTSSTVNTKFEKEELESHRAVYIGVHVPFSKESRRRHRHRGHKHHHRRRKDKESDKEDGRESPSYDTPSQRVQFILGTEDDDEEHIPHDLFTEMDELCYRDGEEYEWKETARWLKFEEDVEDGGDRWSKPYVATLSLHSLFELRSCILNGTVMLDMRASTLDEIADMVLDNMIASGQLDESIRENVREALLKRHHHQNEKRFTSRIPLVRSFADIGKKHSDPHLLERNGEGLSASRHSLRTGLSASNLSLRGESPLSLLLGHLLPSSRAGTPAGSRCTTPVPTPQNSPPSSPSISRLTSRSSQESQRQAPELLVSPASDDIPTVVIHPPEEDLEAALKGEEQKNEENVDLTPGILASPQSAPGNLDNSKSGEIKGNGSGGSRENSTVDFSKVDMNFMRKIPTGAEASNVLVGEVDFLERPIIAFVRLAPAVLLTGLTEVPVPTRFLFLLLGPAGKAPQYHEIGRSIATLMTDEIFHDVAYKAKDRNDLLSGIDEFLDQVTVLPPGEWDPSIRIEPPKSVPSQEKRKIPVFHNGSTPTLGETPKEAAHHAGPELQRTGRLFGGLILDIKRKAPFFLSDFKDALSLQCLASILFLYCACMSPVITFGGLLGEATEGRISAIESLFGASLTGIAYSLFAGQPLTILGSTGPVLVFEKILYKFCRDYQLSYLSLRTSIGLWTSFLCIVLVATDASSLVCYITRFTEEAFAALICIIFIYEALEKLFDLGETYAFNMHNNLDKLTSYSCVCTEPPNPSNETLAQWKKDNITAHNISWRNLTVSECKKLRGVFLGSACGHHGPYIPDVLFWCVILFFTTFFLSSFLKQFKTKRYFPTKVRSTISDFAVFLTIVIMVTIDYLVGVPSPKLHVPEKFEPTHPERGWIISPLGDNPWWTLLIAAIPALLCTILIFMDQQITAVIINRKEHKLKKGAGYHLDLLMVGVMLGVCSVMGLPWFVAATVLSISHVNSLKVESECSAPGEQPKFLGIREQRVTGLMIFILMGLSVFMTSVLKFIPMPVLYGVFLYMGVSSLKGIQLFDRIKLFGMPAKHQPDLIYLRYVPLWKVHIFTVIQLTCLVLLWVIKVSAAAVVFPMMVLALVFVRKLMDLCFTKRELSWLDDLMPESKKKKEDDKKKKEKEEAERMLQDDDDTVHLPFEGGSLLQIPVKALKYSVDPSIVNISDEMAKTAQWKALSMNTENAKVTRSNMSPDKPVSVKISFEDEPRKKYVDAETSL

SEQ ID NO: 328653 - DNA, 3780 bp, Artificial Sequence
  derived and/or modified sequence
atggaggccgacggcgccggcgagcagatgagacccctgctgaccagagtgaccagcagaggccccgacgaggaggccgtggtggacctgggcaagaccagcagcaccgtgaacaccaagttcgagaaggaggagctggagagccacagagccgtgtacatcggcgtgcacgtgcccttcagcaaggagagcagaagaagacacagacacagaggccacaagcaccaccacagaagaagaaaggacaaggagagcgacaaggaggacggcagagagagccccagctacgacacccccagccagagagtgcagttcatcctgggcaccgaggacgacgacgaggagcacatcccccacgacctgttcaccgagatggacgagctgtgctacagagacggcgaggagtacgagtggaaggagaccgccagatggctgaagttcgaggaggacgtggaggacggcggcgacagatggagcaagccctacgtggccaccctgagcctgcacagcctgttcgagctgagaagctgcatcctgaacggcaccgtgatgctggacatgagagccagcaccctggacgagatcgccgacatggtgctggacaacatgatcgccagcggccagctggacgagagcatcagagagaacgtgagagaggccctgctgaagagacaccaccaccagaacgagaagagattcaccagcagaatccccctggtgagaagcttcgccgacatcggcaagaagcacagcgacccccacctgctggagagaaacggcgagggcctgagcgccagcagacacagcctgagaaccggcctgagcgccagcaacctgagcctgagaggcgagagccccctgagcctgctgctgggccacctgctgcccagcagcagagccggcacccccgccggcagcagatgcaccacccccgtgcccaccccccagaacagcccccccagcagccccagcatcagcagactgaccagcagaagcagccaggagagccagagacaggcccccgagctgctggtgagccccgccagcgacgacatccccaccgtggtgatccacccccccgaggaggacctggaggccgccctgaagggcgaggagcagaagaacgaggagaacgtggacctgacccccggcatcctggccagcccccagagcgcccccggcaacctggacaacagcaagagcggcgagatcaagggcaacggcagcggcggcagcagagagaacagcaccgtggacttcagcaaggtggacatgaacttcatgagaaagatccccaccggcgccgaggccagcaacgtgctggtgggcgaggtggacttcctggagagacccatcatcgccttcgtgagactggcccccgccgtgctgctgaccggcctgaccgaggtgcccgtgcccaccagattcctgttcctgctgctgggccccgccggcaaggccccccagtaccacgagatcggcagaagcatcgccaccctgatgaccgacgagatcttccacgacgtggcctacaaggccaaggacagaaacgacctgctgagcggcatcgacgagttcctggaccaggtgaccgtgctgccccccggcgagtgggaccccagcatcagaatcgagccccccaagagcgtgcccagccaggagaagagaaagatccccgtgttccacaacggcagcacccccaccctgggcgagacccccaaggaggccgcccaccacgccggccccgagctgcagagaaccggcagactgttcggcggcctgatcctggacatcaagagaaaggcccccttcttcctgagcgacttcaaggacgccctgagcctgcagtgcctggccagcatcctgttcctgtactgcgcctgcatgagccccgtgatcaccttcggcggcctgctgggcgaggccaccgagggcagaatcagcgccatcgagagcctgttcggcgccagcctgaccggcatcgcctacagcctgttcgccggccagcccctgaccatcctgggcagcaccggccccgtgctggtgttcgagaagatcctgtacaagttctgcagagactaccagctgagctacctgagcctgagaaccagcatcggcctgtggaccagcttcctgtgcatcgtgctggtggccaccgacgccagcagcctggtgtgctacatcaccagattcaccgaggaggccttcgccgccctgatctgcatcatcttcatctacgaggccctggagaagctgttcgacctgggcgagacctacgccttcaacatgcacaacaacctggacaagctgaccagctacagctgcgtgtgcaccgagccccccaaccccagcaacgagaccctggcccagtggaagaaggacaacatcaccgcccacaacatcagctggagaaacctgaccgtgagcgagtgcaagaagctgagaggcgtgttcctgggcagcgcctgcggccaccacggcccctacatccccgacgtgctgttctggtgcgtgatcctgttcttcaccaccttcttcctgagcagcttcctgaagcagttcaagaccaagagatacttccccaccaaggtgagaagcaccatcagcgacttcgccgtgttcctgaccatcgtgatcatggtgaccatcgactacctggtgggcgtgcccagccccaagctgcacgtgcccgagaagttcgagcccacccaccccgagagaggctggatcatcagccccctgggcgacaacccctggtggaccctgctgatcgccgccatccccgccctgctgtgcaccatcctgatcttcatggaccagcagatcaccgccgtgatcatcaacagaaaggagcacaagctgaagaagggcgccggctaccacctggacctgctgatggtgggcgtgatgctgggcgtgtgcagcgtgatgggcctgccctggttcgtggccgccaccgtgctgagcatcagccacgtgaacagcctgaaggtggagagcgagtgcagcgcccccggcgagcagcccaagttcctgggcatcagagagcagagagtgaccggcctgatgatcttcatcctgatgggcctgagcgtgttcatgaccagcgtgctgaagttcatccccatgcccgtgctgtacggcgtgttcctgtacatgggcgtgagcagcctgaagggcatccagctgttcgacagaatcaagctgttcggcatgcccgccaagcaccagcccgacctgatctacctgagatacgtgcccctgtggaaggtgcacatcttcaccgtgatccagctgacctgcctggtgctgctgtgggtgatcaaggtgagcgccgccgccgtggtgttccccatgatggtgctggccctggtgttcgtgagaaagctgatggacctgtgcttcaccaagagagagctgagctggctggacgacctgatgcccgagagcaagaagaagaaggaggacgacaagaagaagaaggagaaggaggaggccgagagaatgctgcaggacgacgacgacaccgtgcacctgcccttcgagggcggcagcctgctgcagatccccgtgaaggccctgaagtacagcgtggaccccagcatcgtgaacatcagcgacgagatggccaagaccgcccagtggaaggccctgagcatgaacaccgagaacgccaaggtgaccagaagcaacatgagccccgacaagcccgtgagcgtgaagatcagcttcgaggacgagcccagaaagaagtacgtggacgccgagaccagcctgtag

SEQ ID NO: 328654 - DNA, 3780 bp, Artificial Sequence
  derived and/or modified sequence
atggaagctgatggggccggggaacagatgcgtcctctcctgacgcgggtcaccagccgcggccctgatgaagaggcggtggttgacttggggaagacttcctctactgtcaacacaaagttcgaaaaagaagaattggaatcccacagggccgtctacattggggtgcacgttccattcagcaaggaatctagaagacggcaccgccaccggggacataaacatcaccacaggagacgaaaagacaaggaaagtgacaaagaagatggtcgggagtcaccctcttatgacactccctcccagagagtccaattcattctgggtacagaggatgatgatgaagagcacattccccatgacctgttcacagaaatggatgagctctgttacagagacggcgaggagtacgaatggaaggagaccgccagatggctgaagtttgaagaggacgtggaggatgggggagatcgatggtccaagccctatgttgccaccctgtcactccacagcttgttcgaactgcggagctgtatcctgaacggcactgtcatgctggacatgcgggcctctactctggacgagattgctgacatggtgctggataatatgatcgcttccggccaattggacgagtccattcgcgaaaatgtccgcgaggccctgctcaagcgccaccaccaccagaatgaaaagaggtttacctcccggatcccccttgtcagaagtttcgcagacatcggcaagaaacattccgaccctcaccttctcgagaggaatggggagggcctgtcggcatccaggcactcacttaggaccggtctgtccgcttccaatctctcattgaggggggaatcgcccctaagcctgctcctgggtcacctcttgccctcctcccgagctggcacccccgccggcagccggtgcaccacccctgtccccaccccccagaattcccctcccagctctccctcaatctcacgcctgacttcgcggagcagccaggagtctcagcgccaagcacctgaactcctggtgtccccggcatccgacgacatccctacagtcgtcattcatccgccagaggaagacctggaggccgcattgaagggcgaggagcagaagaacgaggaaaacgtcgacctgacgcccggtattctggctagcccacagagtgcccccgggaatttagacaattctaaaagtggggagatcaaagggaacggctccggcgggtctcgggagaacagtacagtcgacttctccaaggtggatatgaactttatgagaaaaatccccaccggcgcagaggcgagcaatgttctagtcggcgaagtcgacttcctggaaaggcctattattgcattcgttcggcttgcacccgccgtgctcctaactggtctgacggaagtgcccgtaccaaccaggtttttgtttcttcttctgggtcccgcaggaaaagcaccccagtaccacgagatcgggaggtctatcgctacactgatgacagacgaaatcttccatgatgtggcctacaaagcaaaggatagaaacgacctgctctccggcatcgacgagttcctggaccaggttacggtcttgccgccaggggaatgggacccttctattcgcatcgagcctcctaagtcggtccccagccaggagaagaggaaaattcccgtgttccataatggctcaacacccaccctcggcgagactccgaaggaggctgctcaccacgctggacctgagctgcagagaactggtcgtctgttcggaggcctgatcctagacattaagagaaaagcgccattcttcttatccgacttcaaagacgcactgtctctgcagtgcctggcatcaatactgtttctctactgtgcttgcatgagtcctgtgattacttttgggggccttttgggcgaggctacagagggccgaatctcagccatagaatccctgttcggggcgtccctgacgggcattgcctatagcctctttgccggacagccgctcacgattctggggagtactggtccagtattggtattcgagaaaatactgtataagttttgccgggattaccaactgtcctatctaagtctgagaaccagcattgggttatggacatcattcctttgcatcgtgctagtggctactgatgcgtcctccttggtctgttatatcactagatttacagaggaagcatttgctgcgcttatatgcattatatttatttacgaggcactggaaaaactgtttgacttgggtgagacttatgcatttaatatgcataataatctagacaaacttacttcatatagttgcgtgtgtaccgaaccacctaatccgtcgaatgagaccctggcgcagtggaagaaggacaatataacagcccataacattagttggcgcaaccttacagttagcgagtgtaaaaagttgagaggggtcttccttgggagcgcctgtggccatcacggtccctatattccagacgtgctgttttggtgcgtcattctgttctttacaacattcttcctatccagttttctgaagcagttcaagacaaagcgttatttccccactaaggtgcgatctaccataagcgatttcgcggtctttttgactattgtaataatggtgaccatcgactaccttgtgggcgtgccgagtcctaaactccacgtccccgagaagttcgagcctacacacccagaaagagggtggatcatctcaccactgggggataatccatggtggaccctgctgattgccgctattccagccttgctgtgcaccattctgattttcatggaccagcagattaccgccgtcattattaatcgcaaggaacacaaattgaagaaaggcgctggctaccatctggatctattgatggtcggtgtgatgctgggtgtgtgcagtgtaatgggcctgccttggttcgtggccgctactgttctgagtatctcacatgtcaactctttaaaagtggagtccgaatgtagcgcacccggcgagcagcctaagttcctcggcattcgggaacagagggtgaccggactaatgatttttattcttatgggcctgagtgtgttcatgactagtgttttaaagttcattcctatgcccgtgttgtacggcgtatttctctacatgggggtgtcatcactgaagggcattcagctgttcgatcgcatcaaactgtttggaatgccagcaaaacatcaaccggacctgatttatcttcggtatgttcccctctggaaagtccacatcttcactgtgatccagctgacgtgcttagtgctgttatgggtgattaaagtgtccgccgccgccgtggtttttccgatgatggtgctggccctggtgttcgttaggaagcttatggatttatgtttcacaaaacgggagctcagttggctggacgatctcatgccagagtccaagaagaagaaggaggacgacaaaaaaaagaaggaaaaggaagaggcggaacggatgctccaggatgatgacgatacagtgcatttgcccttcgaaggaggcagcttgctgcagattcccgtcaaagcgcttaaatactccgtagacccctcgattgtaaacatctcagacgaaatggctaaaactgctcagtggaaagctttgagtatgaacacggaaaatgctaaagttacccgtagcaatatgtcacccgacaagcccgtgtctgtcaaaatttcatttgaggatgagccaaggaagaagtacgttgacgcagagacaagcttgtag

SEQ ID NO: 328655 - DNA, 3780 bp, Artificial Sequence
  derived and/or modified sequence
atggaggctgatggagctggggagcagatgaggcccctgctgaccagggtgaccagccggggcccagatgaggaggccgtggtggacctgggcaagaccagcagcacagtgaacaccaagtttgagaaggaggagctggagagccacagagctgtgtacatcggcgtgcacgtgcccttcagcaaggagagcagaagaagacaccgccaccggggccacaagcaccaccacagaagaaggaaggacaaggagagtgacaaggaggatggccgggagagccccagctatgacacccccagccagagggtgcagttcatcctgggcacagaagatgatgatgaggagcacatcccccatgacctcttcacagagatggatgagctgtgctacagagatggagaggagtatgagtggaaggagacagcccgctggctgaagtttgaagaagatgtggaggatggaggagaccgctggagcaagccctacgtggccaccctgagcctgcacagcctgtttgagctgcggagctgcatcctgaatggcaccgtgatgctggacatgagggccagcaccctggatgaaattgctgacatggtgctggacaacatgattgccagcggccagctggatgagagcatcagagaaaatgtgcgggaggccctgctgaagaggcaccaccaccagaatgagaagcgcttcaccagccgcatccccctggtgcgcagctttgctgacatcggcaagaagcacagcgacccccacctgctggagagaaatggagagggcctgagcgccagccgccacagcctgaggacaggcctgagcgccagcaacctgagcctgcggggggagagccccctgagcctgctgctgggccacctgctgcccagcagccgggccggcaccccagctggcagccgctgcaccacccctgtgcccaccccccagaacagcccccccagcagccccagcatcagccggctgaccagccgcagcagccaggagagccagaggcaggcccctgagctgctggtgtccccagccagtgatgacatccccaccgtggtgatccaccccccagaggaggacctggaggccgccctgaagggggaggagcagaagaatgaagaaaatgtggacctgaccccaggcatcctggccagcccccagagcgcccctggcaacctggacaacagcaagtctggagagatcaagggaaatggaagtggcggcagccgggagaacagcacagtggacttcagcaaggtggacatgaacttcatgaggaagatccccactggagctgaggccagcaatgtgctggtgggggaggtggacttcctggagcggcccatcatcgcctttgtgcggctggccccagctgtgctgctgaccggcctgacagaggtgcctgtgcccacccgcttcctgttcctgctgctgggccctgctgggaaggccccccagtaccatgaaattggccgcagcatcgccaccctgatgacagatgagatcttccatgatgtggcctacaaggccaaggacagaaatgacctgctgtctggaattgatgagttcctggaccaggtgacagtgctgcccccaggagagtgggaccccagcatccgcatcgagccccccaagtctgtgcccagccaggagaagaggaagatccctgtgttccacaacggcagcacccccaccctgggggagacccccaaggaggccgcccaccacgccggccctgagctgcagaggacaggccgcctgtttggaggcctcatcctggacatcaagaggaaggcccccttcttcctgagtgacttcaaggatgccctgagcctgcagtgcctggccagcatcctcttcctgtactgtgcctgcatgagccctgtgatcacctttggaggcctgctgggggaggccacagagggccgcatcagcgccatcgagagcctgtttggagccagcctgactggaattgcctacagcctgtttgctggccagcccctgaccatcctgggcagcactggacctgtgctggtgtttgagaagatcctgtacaagttctgccgggactaccagctgagctacctgagcctgcggaccagcatcggcctgtggaccagcttcctgtgcatcgtgctggtggccacagatgccagcagcctggtgtgctacatcacccgcttcacagaggaggcctttgctgccctgatctgcatcatcttcatctatgaggccctggagaagctgtttgacctgggggagacctacgccttcaacatgcacaacaacctggacaagctgaccagctacagctgtgtgtgcacagagccccccaaccccagcaatgagaccctggcccagtggaagaaggacaacatcacagcccacaacatctcctggaggaacctgactgtgtctgagtgcaagaagctgcggggcgtcttcctgggcagcgcctgtggccaccacggcccctacatcccagatgtgctcttctggtgtgtgatcctcttcttcaccaccttcttcctgagcagcttcctgaagcagttcaagaccaagcgctacttccccaccaaggtgcgcagcaccatcagtgactttgctgtgttcctgaccatcgtcatcatggtgaccatcgactacctggtgggcgtgcccagccccaagctgcacgtgcctgagaagtttgagcccacccaccctgagcggggctggatcatcagccccctgggggacaacccctggtggaccctgctgattgctgccatcccagccctgctgtgcaccatcctgatcttcatggaccagcagatcacagctgtgatcatcaacaggaaggagcacaagctgaagaagggggccggctaccacctggacctgctgatggtgggcgtgatgctgggcgtgtgcagcgtgatgggcctgccctggtttgtggccgccaccgtgctgagcatcagccacgtgaacagcctgaaggtggagagtgaatgttctgcccctggagagcagcccaagttcctgggcatccgggagcagagggtgacaggcctgatgatcttcatcctgatgggcctgtctgtgttcatgacctctgtgctgaagttcatccccatgcctgtgctgtatggagtcttcctgtacatgggcgtgagcagcctgaagggcatccagctgtttgaccgcatcaagctgtttggcatgcctgccaagcaccagcctgacctgatctacctgcgctacgtgcccctgtggaaggtgcacatcttcaccgtcatccagctgacctgcctggtgctgctgtgggtgatcaaggtgtctgctgctgctgtggtgttccccatgatggtgctggccctggtgtttgtgaggaagctgatggacctgtgcttcaccaagcgggagctgtcctggctggatgacctgatgcctgagagcaagaagaagaaggaggatgacaagaagaagaaggagaaggaggaggccgagaggatgctgcaggatgatgatgacacagtgcacctgccctttgaaggaggcagcctgctgcagatccctgtgaaggccctgaagtacagcgtggaccccagcatcgtgaacatcagtgatgagatggccaagacagcccagtggaaggccctgtccatgaacacagaaaatgccaaggtgaccaggagcaacatgagcccagacaagcctgtgtctgtgaagatcagctttgaagatgagcccaggaagaagtatgtggatgctgagaccagcctgtag

SEQ ID NO: 328656 - DNA, 3780 bp, Artificial Sequence
  derived and/or modified sequence
atggaggccgacggcgccggcgagcagatgcggcccctgctgacccgcgtcaccagtagggggcccgatgaagaggccgtggtggatttaggtaagacgtccagtactgtgaatacaaaattcgagaaggaagagctggaaagccacagagccgtgtacatcggagtgcatgtgcccttctcaaaagaaagcagaagacgccacaggcacaggggccacaagcatcatcacaggagacgaaaggataaagaatctgacaaggaggacggcagggagagcccatcatatgacacacccagccagcgagtgcagttcatcctcggaactgaggatgacgatgaagaacacattcctcatgatctgttcaccgaaatggacgagctgtgttatcgcgatggggaggagtatgaatggaaagagactgccaggtggcttaaattcgaagaggacgtcgaggatgggggagacagatggagtaagccttatgttgcaactctttccctgcacagcttgttcgagcttaggtcatgcatactgaatggcaccgtgatgctcgacatgcgtgccagtactctggacgagatcgctgacatggtgctggacaatatgatagcgtcaggccagctggacgagagtatccgggaaaacgtgcgggaggcactgctgaagaggcatcatcatcagaacgagaagagatttacgtccagaatcccgctggtacgctcctttgccgacattgggaagaagcattccgacccccacctcctggagagaaacggcgaaggcctcagtgccagtcgtcattcactcagaactgggctctcagcaagcaacctgtcgctccgcggcgagagcccactgagtcttctacttggacacctgctgccatcctccagggcagggacacctgctggaagccgctgtaccacccccgtgcccactccccagaactcacccccttcctcgccctcaatcagtcggctgacctctcggtcttcgcaggagtcgcagcgacaggcccccgaattgctggttagcccggccagtgatgacattcctacagtggtaattcaccctccagaagaagacctcgaggctgcactcaaaggcgaggagcagaagaacgaggagaatgtggatctgaccccaggcatcctggcttcgccgcagagcgccccaggcaacttagataattccaaaagtggagaaatcaaggggaatggaagtggggggtcaagagagaacagtaccgtcgacttctccaaagttgatatgaacttcatgcggaagatcccaacaggagccgaagccagtaatgtactggtgggggaagtagatttcctcgagaggccgatcatcgcctttgtgcgcctggcccctgcggtcctgctgacaggccttaccgaagttcctgtgcctacacggttcctatttttgctgctggggcctgcaggaaaggcccctcagtaccacgaaataggacgctcgatagctacactcatgacagatgagattttccatgatgtggcatataaggcaaaagaccggaacgatcttctaagtggaattgacgagtttctggatcaggtaaccgtgctgccacccggagaatgggatccttcgattcgaatagagccacctaaatctgtgccttctcaggagaagagaaagatccccgtttttcacaatgggtcaactcccacactcggggaaacacctaaggaagcagctcaccacgccggcccagagctccagcgcactggcaggctgttcggggggctgattctggatatcaaacggaaagcccctttctttctctcagacttcaaagacgccctaagcttacagtgcctggctagtattttgttcctgtattgtgcctgtatgtccccagttatcacatttggtgggcttttgggcgaagcaactgagggcagaattagcgccatcgagtcgcttttcggggccagtctgacaggtatagcctattctctgttcgcaggccaacccctgactatccttggctcaaccgggcctgtgttggttttcgaaaaaatcctgtataagttctgccgagattatcaactcagttacttgtctttgaggactagcattggactttggacttcatttctgtgcattgtacttgtggcgacggatgcctcctctctggtgtgttacataactcggtttacagaggaggccttcgccgcgctaatctgtatcatttttatatacgaggctttggaaaagctattcgatctgggcgaaacctatgcgttcaacatgcataataatctggataaactgaccagttactcttgtgtatgtacagagcccccgaatccatcaaacgagaccctggctcaatggaaaaaggataacattaccgcacacaatatttcctggcggaatctgactgtcagcgaatgcaaaaaactgagaggggtgtttctgggcagtgcctgcgggcaccacgggccctacattcccgatgttctgttctggtgtgtcatcctcttttttacaacgttcttcctgtccagcttcctcaaacagtttaaaacaaagagatattttccaactaaggtccggtcgacaatctccgattttgccgtctttctgactatcgtgattatggttacgatagattatctcgtgggtgtgccgtcaccaaaattgcacgtaccagaaaaatttgagcccacccaccccgagagaggctggattatctcacccctcggggacaacccttggtggacactgctcatcgcagccataccagccctattgtgcaccatcctgatctttatggaccagcagataacagccgtaattattaaccggaaagagcacaaattgaaaaaaggagcagggtatcacctcgacttgcttatggtgggggtgatgctgggggtctgcagcgtgatgggactgccttggttcgtggctgcaacggtcctctccataagtcacgtaaatagcctcaaagtggagtcggaatgtagtgcacctggcgagcagcctaaatttcttgggattagagaacagagagtcaccggtctcatgatctttattctgatgggactgtctgttttcatgacgagcgtgctgaaattcatccctatgcctgtgctatacggcgtcttcttatacatgggagtaagctccctaaagggcatccagctgtttgatcgcattaagttattcggcatgcctgccaaacaccagcccgacctgatatatctacggtatgtaccgctgtggaaggtgcacatcttcaccgtgatccagctcacctgcctggtgttgctgtgggtcatcaaggtgagcgccgctgcggtggtgtttccaatgatggtgctggccctcgtctttgtccgcaaacttatggatctctgcttcactaaacgcgaactctcgtggctcgatgacctcatgcctgaatccaaaaagaaaaaagaggatgacaagaagaagaaagagaaagaggaagctgagagaatgctccaggacgacgatgataccgttcaccttccctttgagggagggagcctgctgcaaatccccgttaaggccctaaagtattccgtagaccccagcatcgtgaatatttcggacgaaatggcgaagaccgcacagtggaaggccttgagcatgaataccgagaacgccaaggtcacgcgatcaaacatgtcacctgacaaacctgtgagcgtaaagatcagctttgaggacgaaccgcggaagaaatatgtagatgctgagacaagcctgtag

SEQ ID NO: 328657 - DNA, 3780 bp, Artificial Sequence
  derived and/or modified sequence
atggaagctgacggcgctggcgaacagatgcgcccattgttgactcgggtgactagtcgcggacccgacgaggaagccgtagtggatcttggtaagaccagctctacggtgaacacaaaatttgaaaaagaggaactggagagccatcgcgcagtatacataggggtgcacgttcctttttccaaggagtcgagacgcagacatagacaccgaggacataaacaccatcatcgacgtagaaaggataaggaatccgataaagaggacggcagagaatcgccttcctatgatactccatcccagagggtgcaattcatcctaggaacagaggacgatgatgaggaacacatcccacacgatctgttcaccgaaatggatgaactttgctaccgcgacggagaggaatatgaatggaaagagacagcacgctggcttaagttcgaagaagatgtggaggatggtggtgaccggtggagcaagccttacgtagccactctgtctctccattcattgttcgaactgagaagctgcatcctcaacggaacagtcatgctcgatatgcgtgcatccactctggacgaaatcgctgacatggtgctagacaatatgatcgcctctgggcaactggatgagagcatccgggagaacgttcgtgaagccctgctgaagcgccaccatcatcagaacgagaagaggtttacgtcgagaatcccactggtcaggagttttgccgacattggcaagaagcacagcgatccgcacttgctggaaagaaacggggaggggctgtccgcatcacggcacagtcttcgcacgggcctctctgctagtaacctcagcttgcgcggagaaagccctctctctttacttctgggccacctgctgccatctagtagagctggaactccagccggatcccgctgtacgaccccagttccgaccccacagaactcaccgccaagtagtcccagtatctccagactgacctctcggagctctcaggaatcacagcgccaggcgcctgagttactagtgtcccctgctagcgacgacatccctactgtggtgatccatccgccagaggaagacttggaggccgcactcaaaggagaggaacagaagaatgaggagaatgtcgacctgacccctggcattctcgcatccccgcagtctgcccctggaaaccttgataactccaaatcaggcgagatcaagggaaacggttccggcggtagccgggaaaactctacagtagacttctccaaagtggacatgaactttatgcggaagatccctactggagccgaggcctccaacgttctggtgggcgaggttgacttcctggaacgccctattatcgcttttgttcggctggctcccgctgtcttactgaccggccttaccgaggtgccggtgccgaccagattcttgtttctgctcctggggccagctgggaaggcaccccagtaccatgaaataggcaggagtatcgcaacactcatgactgatgaaatttttcacgatgtggcctacaaggccaaggatcggaacgacctgctttccggtatagacgagttccttgatcaggtgacggtcttaccccctggtgaatgggacccttccattcggatcgaaccgccaaagtcggtgccatcacaggaaaagcggaaaattcccgtgttccataatgggagtacccctacgttgggcgagacccccaaggaggccgcacaccacgcgggtcccgagctccagcgaacggggagattatttggcggtcttatccttgacattaagaggaaggccccattctttctatccgatttcaaagacgctctctcacttcaatgtctggcatctatcctgttcctttactgcgcttgtatgagtcccgtgattacctttggtggactgttgggtgaagccactgaggggagaatttctgcaattgaatccctgtttggcgctagcttgacgggaatcgcctacagtttattcgctggtcagcctctgacaatcctgggtagtacgggtcctgtgttggtatttgaaaagatcctctacaagttttgccgggactaccagctgtcgtatttatccctgcggacgtcaatcggactttggactagcttcctgtgtattgtgttagtcgcaacagacgctagtagcctggtctgctacatcactcgattcaccgaagaggcatttgcagccttgatatgcataattttcatttacgaagccctggaaaagcttttcgatctgggtgagacttacgcattcaacatgcacaataatttggataagctgacatcctactcttgtgtctgtaccgaaccccctaacccttccaacgagacacttgcccagtggaaaaaggataacatcacagcccacaacattagctggcggaatctcacagtgagcgagtgcaagaaactgagaggggtgttcctgggctctgcctgtggtcaccatggcccttacatccctgacgtgcttttctggtgcgtcatcttgttctttacaacattcttcctgtcttccttcctcaaacaatttaagacaaaacgctattttcccaccaaagttcggagcacaatttctgactttgccgtttttctgactatagtgataatggtgacaatcgattatctcgtgggcgtgccctcaccgaaactgcatgtgcctgaaaagtttgagccgacccacccagagagaggttggattatctctccactgggggacaatccatggtggacccttcttatagctgccatccccgcactgctgtgcacaatcctgatcttcatggaccagcagatcactgctgtcatcataaaccgaaaggagcacaaactcaaaaaaggagcgggttaccatttagatctcttaatggtaggggtcatgttgggagtgtgttccgtcatgggcctaccttggttcgtagccgctacagtcctgagcatttcccatgtgaacagtttaaaagtggaatcagagtgctcggcccctggcgagcaacctaagttcctcggcatacgcgagcagagagttaccggcctgatgatcttcattctcatgggactttccgtgtttatgacatctgtcctgaaattcatccccatgccagtcctgtacggtgtgttcctttacatgggggtgtcatctcttaagggaattcagctgttcgatcggatcaagctgttcggcatgccggcaaagcatcagcctgatctcatttatttaaggtacgtacctctgtggaaagtgcacattttcacagtaattcagcttacatgcctggtccttctttgggttattaaggtgagcgctgccgcagtggtatttcctatgatggtgctagccctggtgtttgtaaggaaacttatggacctgtgttttacaaagcgcgagcttagttggttggacgatctcatgcctgagtctaagaagaagaaggaggacgataaaaaaaagaaggagaaggaagaggccgagcggatgttgcaggacgatgacgatacagtgcacttacccttcgaaggtggcagcctattacagattccggtgaaggccctgaagtactcagttgacccgtctatcgtgaatattagcgatgaaatggcgaagactgcccaatggaaggcccttagcatgaatactgagaatgctaaagttactaggtcaaacatgagtcccgataagcccgtttccgttaagatttctttcgaggatgagccaaggaaaaaatatgttgatgccgaaacctcactgtag

SEQ ID NO: 328658 - DNA, 4159 bp, Artificial Sequence
  derived and/or modified sequence
cctactaaagccagcccagcagtcgcagcgcgcacacgcacgccccgcgtctcccgcgcccggcgcccggctctccccacgcgcgcacacctcgcgcacggacgcacccacgtttgtcctcgcgcgccgggggctcggcggcggcggcaggggcagcggcagaagcaggcagaccgcgcggggcagtaccgtagcggccgtcacgggctggccggccggccatggaggctgatggggccggcgagcagatgagaccgctactcacccgggtaacgagcaggggtcctgatgaagaagctgttgtggatcttggcaaaactagctcaactgtgaacaccaagtttgaaaaagaagaactagaaagtcatagagctgtatatattggtgttcacgtcccgtttagtaaagagagtcgtcggcgtcataggcatcgcggacacaaacatcaccaccggagaagaaaagataaagaatcagataaagaagatggacgggaatctccttcttatgatacaccatcccagagagttcagtttatccttggtactgaagatgatgatgaagaacatattccccatgatctcttcacggaaatggatgaactgtgttacagagatggagaagaatatgaatggaaagaaactgctagatggctgaaatttgaagaggatgttgaagatggcggtgaccgatggagtaaaccttatgtggcaactctctctttgcacagtctttttgaactaaggagttgcatcctcaatggaacagtcatgctggatatgagagcaagcactctagatgaaatagcagatatggtattagacaacatgatagcttctggccaattagacgagtccatacgagagaatgtcagagaagctcttctgaagagacatcatcatcagaatgagaaaagattcaccagtcggattcctcttgttcgatcttttgcagatataggcaagaaacattctgaccctcacttgcttgaaaggaatggggaaggcctttcagcctcccgccactctttgcgaacaggtctgtctgcctcaaacctttccttgagaggagaatcacctttatctcttcttcttggtcatcttcttccttcttcaagagctggaacccctgcaggctcaaggtgtacaaccccagtacccacccctcaaaacagtcctccttctagccctagcatcagccgcctgacctccagaagttcccaagagagtcagcgtcaggccccagaactactggtttcacctgccagtgatgatattcccacagtagtaattcatccgcctgaggaagacttagaagcagcgctgaaaggcgaggagcagaagaatgaggaaaatgttgacttaactccaggtattttggcctctccccagtctgctcctggaaacttggacaatagtaaaagtggagaaattaaaggtaatggaagtggtggaagcagagaaaatagtactgttgacttcagcaaggttgatatgaatttcatgagaaaaattcctacgggtgctgaggcatccaacgtcctggtgggcgaagtagactttttggaaaggccaataattgcatttgtgagactggctcctgctgtcctccttacagggttgactgaggtccctgttccaaccaggtttttgtttttgttattgggtccagcgggcaaggcaccacagtaccatgaaattggacgatcaatagccactctcatgacagatgagattttccatgatgtagcttataaagcaaaagacagaaatgacctcttatctggaattgatgaatttttagatcaagtaactgtcctacctccaggagagtgggatccttctatacgcatagaaccaccaaaaagtgtcccttctcaggaaaagagaaagattcctgtgtttcacaatggatctacccccacactgggtgagactcctaaagaggccgctcatcatgctgggcctgagctacagaggactggacggctttttggtggtttgatacttgacatcaaaaggaaagcaccttttttcttgagtgacttcaaggatgcattaagcctgcagtgcctggcctcgattcttttcctatactgtgcctgtatgtctcctgtaatcacttttggagggctgcttggagaagctacagaaggcagaataagtgcaatagagtctctttttggagcatcattaactgggattgcctattcattgtttgctgggcaacctctaacaatattggggagcacaggtccagttctagtgtttgaaaaaattttatataaattctgcagagattatcaactttcttatctgtctttaagaaccagtattggtctgtggacttcttttttgtgcattgttttggttgcaacagatgcaagcagccttgtgtgttatattactcgatttacagaagaggcttttgcagcccttatttgcatcatattcatctacgaggctttggagaagctctttgatttaggagaaacatatgcatttaatatgcacaacaacttagataaactgaccagctactcatgtgtatgtactgaacctccaaaccccagcaatgaaactctagcacaatggaagaaagataatataacagcacacaatatttcctggagaaatcttactgtttctgaatgtaaaaaacttcgtggtgtattcttggggtcagcttgtggtcatcatggaccttatattccagatgtgctcttttggtgtgtcatcttgtttttcacaacattttttctgtcttcattcctcaagcaatttaagaccaagcgttactttcctaccaaggtgcgatcgacaatcagtgattttgctgtatttctcacaatagtaataatggttacaattgactaccttgtaggagttccatctcctaaacttcatgttcctgaaaaatttgagcctactcatccagagagagggtggatcataagcccactgggagataatccttggtggaccttattaatagctgctattcctgctttgctttgtaccattctcatctttatggatcaacaaatcacagctgtaattataaacagaaaggaacacaaattgaagaaaggagctggctatcaccttgatttgctcatggttggcgttatgttgggagtttgctctgtcatgggacttccatggtttgtggctgcaacagtgttgtcaataagtcatgtcaacagcttaaaagttgaatctgaatgttctgctccaggggaacaacccaagtttttgggaattcgtgaacagcgggttacagggctaatgatttttattctaatgggcctctctgtgttcatgacttcagtcctaaagtttattccaatgcctgttctgtatggtgttttcctttatatgggagtttcctcattaaaaggaatccagttatttgaccgtataaaattatttggaatgcctgctaagcatcagcctgatttgatatacctccgttatgtgccgctctggaaggtccatattttcacagtcattcagcttacttgtttggtccttttatgggtgataaaagtttcagctgctgcagtggtttttcccatgatggttcttgcattagtgtttgtgcgcaaactcatggacctgtgtttcacgaagagagaacttagttggcttgatgatcttatgccagaaagtaagaaaaagaaagaagatgacaaaaagaaaaaagagaaagaggaagctgaacggatgcttcaagatgatgatgatactgtgcaccttccatttgaagggggaagtctcttgcaaattccagtcaaggccctaaaatatagtgttgatccctcaattgttaacatatcagatgaaatggccaaaactgcacagtggaaggcactttccatgaatactgagaatgccaaagtaaccagatctaacatgagtcctgataaacctgtgagtgtgaaaataagttttgaagatgaaccaagaaagaaatacgtggatgctgaaacttcattatagaattgaaccaagaggcattatacatatagatatatacatatgtaatgtgtgcgtatcatgtcactatatataagaatattgtatgtcatgctgtttatgtgtgactaccgggtttttaaaagtagtgtctggagtttgtaatgagcaccgtggagact

SEQ ID NO: 328659 - protein, 801 aa, Artificial Sequence
  derived and/or modified sequence
VMEVVEAEKIVLLTSARFLFLLLGPAGKAPQYHEIGRSIATLMTDEIFHDVAYKAKDRNDLLSGIDEFLDQVTVLPPGEWDPSIRIEPPKSVPSQEKRKIPVFHNGSTPTLGETPKEAAHHAGPELQRTGRLFGGLILDIKRKAPFFLSDFKDALSLQCLASILFLYCACMSPVITFGGLLGEATEGRISAIESLFGASLTGIAYSLFAGQPLTILGSTGPVLVFEKILYKFCRDYQLSYLSLRTSIGLWTSFLCIVLVATDASSLVCYITRFTEEAFAALICIIFIYEALEKLFDLGETYAFNMHNNLDKLTSYSCVCTEPPNPSNETLAQWKKDNITAHNISWRNLTVSECKKLRGVFLGSACGHHGPYIPDVLFWCVILFFTTFFLSSFLKQFKTKRYFPTKVRSTISDFAVFLTIVIMVTIDYLVGVPSPKLHVPEKFEPTHPERGWIISPLGDNPWWTLLIAAIPALLCTILIFMDQQITAVIINRKEHKLKKGAGYHLDLLMVGVMLGVCSVMGLPWFVAATVLSISHVNSLKVESECSAPGEQPKFLGIREQRVTGLMIFILMGLSVFMTSVLKFIPMPVLYGVFLYMGVSSLKGIQLFDRIKLFGMPAKHQPDLIYLRYVPLWKVHIFTVIQLTCLVLLWVIKVSAAAVVFPMMVLALVFVRKLMDLCFTKRELSWLDDLMPESKKKKEDDKKKKEKEEAERMLQDDDDTVHLPFEGGSLLQIPVKALKYSVDPSIVNISDEMAKTAQWKALSMNTENAKVTRSNMSPDKPVSVKISFEDEPRKKYVDAETSL

SEQ ID NO: 328660 - protein, 800 aa, Artificial Sequence
  derived and/or modified sequence
MEVVEAEKIVLLTSARFLFLLLGPAGKAPQYHEIGRSIATLMTDEIFHDVAYKAKDRNDLLSGIDEFLDQVTVLPPGEWDPSIRIEPPKSVPSQEKRKIPVFHNGSTPTLGETPKEAAHHAGPELQRTGRLFGGLILDIKRKAPFFLSDFKDALSLQCLASILFLYCACMSPVITFGGLLGEATEGRISAIESLFGASLTGIAYSLFAGQPLTILGSTGPVLVFEKILYKFCRDYQLSYLSLRTSIGLWTSFLCIVLVATDASSLVCYITRFTEEAFAALICIIFIYEALEKLFDLGETYAFNMHNNLDKLTSYSCVCTEPPNPSNETLAQWKKDNITAHNISWRNLTVSECKKLRGVFLGSACGHHGPYIPDVLFWCVILFFTTFFLSSFLKQFKTKRYFPTKVRSTISDFAVFLTIVIMVTIDYLVGVPSPKLHVPEKFEPTHPERGWIISPLGDNPWWTLLIAAIPALLCTILIFMDQQITAVIINRKEHKLKKGAGYHLDLLMVGVMLGVCSVMGLPWFVAATVLSISHVNSLKVESECSAPGEQPKFLGIREQRVTGLMIFILMGLSVFMTSVLKFIPMPVLYGVFLYMGVSSLKGIQLFDRIKLFGMPAKHQPDLIYLRYVPLWKVHIFTVIQLTCLVLLWVIKVSAAAVVFPMMVLALVFVRKLMDLCFTKRELSWLDDLMPESKKKKEDDKKKKEKEEAERMLQDDDDTVHLPFEGGSLLQIPVKALKYSVDPSIVNISDEMAKTAQWKALSMNTENAKVTRSNMSPDKPVSVKISFEDEPRKKYVDAETSL

SEQ ID NO: 328661 - protein, 1246 aa, Artificial Sequence
  derived and/or modified sequence
MEADGAGEQMRPLLTRVTSRGPDEEAVVDLGKTSSTVNTKFEKEELESHRAVYIGVHVPFSKESRRRHRHRGHKHHHRRRKDKESDKEDGRESPSYDTPSQRVQFILGTEDDDEEHIPHDLFTEMDELCYRDGEEYEWKETARWLKFEEDVEDGGDRWSKPYVATLSLHSLFELRSCILNGTVMLDMRASTLDEIADMVLDNMIASGQLDESIRENVREALLKRHHHQNEKRFTSRIPLVRSFADIGEGLSASRHSLRTGLSASNLSLRGESPLSLLLGHLLPSSRAGTPAGSRCTTPVPTPQNSPPSSPSISRLTSRSSQESQRQAPELLVSPASDDIPTVVIHPPEEDLEAALKGEEQKNEENVDLTPGILASPQSAPGNLDNSKSGEIKGNGSGGSRENSTVDFSKVDMNFMRKIPTGAEASNVLVGEVDFLERPIIAFVRLAPAVLLTGLTEVPVPTRFLFLLLGPAGKAPQYHEIGRSIATLMTDEIFHDVAYKAKDRNDLLSGIDEFLDQVTVLPPGEWDPSIRIEPPKSVPSQEKRKIPVFHNGSTPTLGETPKEAAHHAGPELQRTGRLFGGLILDIKRKAPFFLSDFKDALSLQCLASILFLYCACMSPVITFGGLLGEATEGRISAIESLFGASLTGIAYSLFAGQPLTILGSTGPVLVFEKILYKFCRDYQLSYLSLRTSIGLWTSFLCIVLVATDASSLVCYITRFTEEAFAALICIIFIYEALEKLFDLGETYAFNMHNNLDKLTSYSCVCTEPPNPSNETLAQWKKDNITAHNISWRNLTVSECKKLRGVFLGSACGHHGPYIPDVLFWCVILFFTTFFLSSFLKQFKTKRYFPTKVRSTISDFAVFLTIVIMVTIDYLVGVPSPKLHVPEKFEPTHPERGWIISPLGDNPWWTLLIAAIPALLCTILIFMDQQITAVIINRKEHKLKKGAGYHLDLLMVGVMLGVCSVMGLPWFVAATVLSISHVNSLKVESECSAPGEQPKFLGIREQRVTGLMIFILMGLSVFMTSVLKFIPMPVLYGVFLYMGVSSLKGIQLFDRIKLFGMPAKHQPDLIYLRYVPLWKVHIFTVIQLTCLVLLWVIKVSAAAVVFPMMVLALVFVRKLMDLCFTKRELSWLDDLMPESKKKKEDDKKKKEKEEAERMLQDDDDTVHLPFEGGSLLQIPVKALKYSVDPSIVNISDEMAKTAQWKALSMNTENAKVTRSNMSPDKPVSVKISFEDEPRKKYVDAETSL

SEQ ID NO: 328662 - DNA, 3741 bp, Artificial Sequence
  derived and/or modified sequence
atggaggccgacggcgccggcgagcagatgagacccctgctgaccagagtgaccagcagaggccccgacgaggaggccgtggtggacctgggcaagaccagcagcaccgtgaacaccaagttcgagaaggaggagctggagagccacagagccgtgtacatcggcgtgcacgtgcccttcagcaaggagagcagaagaagacacagacacagaggccacaagcaccaccacagaagaagaaaggacaaggagagcgacaaggaggacggcagagagagccccagctacgacacccccagccagagagtgcagttcatcctgggcaccgaggacgacgacgaggagcacatcccccacgacctgttcaccgagatggacgagctgtgctacagagacggcgaggagtacgagtggaaggagaccgccagatggctgaagttcgaggaggacgtggaggacggcggcgacagatggagcaagccctacgtggccaccctgagcctgcacagcctgttcgagctgagaagctgcatcctgaacggcaccgtgatgctggacatgagagccagcaccctggacgagatcgccgacatggtgctggacaacatgatcgccagcggccagctggacgagagcatcagagagaacgtgagagaggccctgctgaagagacaccaccaccagaacgagaagagattcaccagcagaatccccctggtgagaagcttcgccgacatcggcgagggcctgagcgccagcagacacagcctgagaaccggcctgagcgccagcaacctgagcctgagaggcgagagccccctgagcctgctgctgggccacctgctgcccagcagcagagccggcacccccgccggcagcagatgcaccacccccgtgcccaccccccagaacagcccccccagcagccccagcatcagcagactgaccagcagaagcagccaggagagccagagacaggcccccgagctgctggtgagccccgccagcgacgacatccccaccgtggtgatccacccccccgaggaggacctggaggccgccctgaagggcgaggagcagaagaacgaggagaacgtggacctgacccccggcatcctggccagcccccagagcgcccccggcaacctggacaacagcaagagcggcgagatcaagggcaacggcagcggcggcagcagagagaacagcaccgtggacttcagcaaggtggacatgaacttcatgagaaagatccccaccggcgccgaggccagcaacgtgctggtgggcgaggtggacttcctggagagacccatcatcgccttcgtgagactggcccccgccgtgctgctgaccggcctgaccgaggtgcccgtgcccaccagattcctgttcctgctgctgggccccgccggcaaggccccccagtaccacgagatcggcagaagcatcgccaccctgatgaccgacgagatcttccacgacgtggcctacaaggccaaggacagaaacgacctgctgagcggcatcgacgagttcctggaccaggtgaccgtgctgccccccggcgagtgggaccccagcatcagaatcgagccccccaagagcgtgcccagccaggagaagagaaagatccccgtgttccacaacggcagcacccccaccctgggcgagacccccaaggaggccgcccaccacgccggccccgagctgcagagaaccggcagactgttcggcggcctgatcctggacatcaagagaaaggcccccttcttcctgagcgacttcaaggacgccctgagcctgcagtgcctggccagcatcctgttcctgtactgcgcctgcatgagccccgtgatcaccttcggcggcctgctgggcgaggccaccgagggcagaatcagcgccatcgagagcctgttcggcgccagcctgaccggcatcgcctacagcctgttcgccggccagcccctgaccatcctgggcagcaccggccccgtgctggtgttcgagaagatcctgtacaagttctgcagagactaccagctgagctacctgagcctgagaaccagcatcggcctgtggaccagcttcctgtgcatcgtgctggtggccaccgacgccagcagcctggtgtgctacatcaccagattcaccgaggaggccttcgccgccctgatctgcatcatcttcatctacgaggccctggagaagctgttcgacctgggcgagacctacgccttcaacatgcacaacaacctggacaagctgaccagctacagctgcgtgtgcaccgagccccccaaccccagcaacgagaccctggcccagtggaagaaggacaacatcaccgcccacaacatcagctggagaaacctgaccgtgagcgagtgcaagaagctgagaggcgtgttcctgggcagcgcctgcggccaccacggcccctacatccccgacgtgctgttctggtgcgtgatcctgttcttcaccaccttcttcctgagcagcttcctgaagcagttcaagaccaagagatacttccccaccaaggtgagaagcaccatcagcgacttcgccgtgttcctgaccatcgtgatcatggtgaccatcgactacctggtgggcgtgcccagccccaagctgcacgtgcccgagaagttcgagcccacccaccccgagagaggctggatcatcagccccctgggcgacaacccctggtggaccctgctgatcgccgccatccccgccctgctgtgcaccatcctgatcttcatggaccagcagatcaccgccgtgatcatcaacagaaaggagcacaagctgaagaagggcgccggctaccacctggacctgctgatggtgggcgtgatgctgggcgtgtgcagcgtgatgggcctgccctggttcgtggccgccaccgtgctgagcatcagccacgtgaacagcctgaaggtggagagcgagtgcagcgcccccggcgagcagcccaagttcctgggcatcagagagcagagagtgaccggcctgatgatcttcatcctgatgggcctgagcgtgttcatgaccagcgtgctgaagttcatccccatgcccgtgctgtacggcgtgttcctgtacatgggcgtgagcagcctgaagggcatccagctgttcgacagaatcaagctgttcggcatgcccgccaagcaccagcccgacctgatctacctgagatacgtgcccctgtggaaggtgcacatcttcaccgtgatccagctgacctgcctggtgctgctgtgggtgatcaaggtgagcgccgccgccgtggtgttccccatgatggtgctggccctggtgttcgtgagaaagctgatggacctgtgcttcaccaagagagagctgagctggctggacgacctgatgcccgagagcaagaagaagaaggaggacgacaagaagaagaaggagaaggaggaggccgagagaatgctgcaggacgacgacgacaccgtgcacctgcccttcgagggcggcagcctgctgcagatccccgtgaaggccctgaagtacagcgtggaccccagcatcgtgaacatcagcgacgagatggccaagaccgcccagtggaaggccctgagcatgaacaccgagaacgccaaggtgaccagaagcaacatgagccccgacaagcccgtgagcgtgaagatcagcttcgaggacgagcccagaaagaagtacgtggacgccgagaccagcctgtag

SEQ ID NO: 328663 - DNA, 3741 bp, Artificial Sequence
  derived and/or modified sequence
atggaagctgatggggcaggcgaacagatgcgcccgctgctaacccgggttacatcaagagggcccgatgaagaagccgtcgtagacttaggtaaaacgagctcgaccgtgaacaccaagtttgagaaagaagaactcgaatcccatagagctgtctacatcggagttcacgtgccgttttccaaagagtcccgaagaaggcataggcacagaggtcataaacatcatcacaggaggcgaaaggacaaggaatcagataaagaagatggtcgtgaaagtccttcgtatgatactccttctcagcgggtgcagttcatacttggaactgaagatgacgacgaagaacatatcccgcacgatctgtttaccgagatggacgagctttgttatcgggacggcgaggagtacgagtggaaggagaccgccagatggctgaagttcgaggaggatgttgaggatgggggcgacaggtggagtaagccctatgtggctactctaagtctgcatagccttttcgaattgaggagttgcattttgaacggcactgtgatgctggatatgcgcgctagcaccctggacgagatagctgatatggtgctcgacaatatgatcgctagcggtcagctcgatgaatctatcagagaaaacgtgcgtgaggccctgttgaagcgccaccaccaccagaatgagaaacgcttcactagccgcatccccctcgtccgcagcttcgcagacatcggagagggtctgtccgctagtcggcacagtctgcgaaccggcttgtccgctagtaacctaagcttgagaggggagagccccttgtccctgttgctgggacatctccttccaagttctcgggcgggaacaccggctggatctaggtgtacgacgccagtgccaacacctcagaactccccgccctcctccccatcgatatcaaggctaacgtccagaagcagtcaagagagccagcgacaggccccagagctcttggtgagccccgcctctgatgacatccctactgtggtgatccacccacctgaggaggacttggaagctgcgctcaaaggcgaggaacagaaaaatgaggaaaacgtcgacctgacaccaggaattctggccagtcctcagagcgcacctggcaatttggacaatagtaagagtggagagataaaaggcaacggatccggcggcagcagggagaactccacagtggacttctctaaggtggacatgaattttatgaggaagattcccactggcgccgaggctagcaacgtgcttgtgggagaagtagattttcttgaaagacctattatcgctttcgtccggttggcaccagctgttcttctaactggtttgaccgaggtgccagttccaacgagatttctgtttctgcttcttgggcctgcagggaaggctccgcagtaccatgaaatcgggaggtcaatcgcaacgctgatgacggatgagatttttcatgacgttgcctataaggctaaggataggaatgacttactgtccgggattgatgaattcttggatcaagtaacggtcctgccaccaggcgagtgggacccgtctatcaggatagagccacccaaaagcgtgcctagccaggagaagcggaaaataccagtcttccacaacggctccacccctaccctgggcgagacaccgaaggaggccgcacaccatgcggggcccgagctgcaacgcaccggccgtctgttcggcgggctcattttggatataaaacggaaggcccctttttttctgtcagatttcaaagacgccctgtccctgcaatgtctggcttccatcttgttcctctactgcgcttgcatgtccccagtgattacattcgggggtcttctgggcgaggctacggagggtcgtatctcagccatcgagagtctgttcggtgccagcctgaccggcatagcctactctcttttcgccggacagcccctgacaattcttggaagcactgggcccgtgctcgtgttcgaaaagatcctttacaagttctgccgggattaccaactgagttatctgtccctgcgaacttctataggactgtggacctcgtttttgtgtattgtgctggtcgccaccgatgcatccagtctggtgtgttacataacccggttcacagaggaggcttttgcagccctcatctgcatcattttcatctacgaagccttagagaagctgtttgatttgggcgagacgtacgcgttcaacatgcataacaatcttgacaaactgacttcatattcgtgcgtttgcactgaaccaccaaacccatcgaacgagactctggctcagtggaagaaggacaatataacagctcataacatctcatggcggaatttaacagttagtgagtgtaagaagctccggggcgtatttcttggaagcgcctgcggtcatcacggcccctacatccctgacgtgctgttttggtgcgtcatcctgttctttactacattctttttgtcaagctttctcaagcagttcaagaccaagcgttattttccgactaaagtgaggtccacaatctccgactttgctgtgttcctgacgattgtcatcatggtcaccatcgattacttggtgggcgtgccaagccctaagctccacgtgccggaaaaatttgaacccacccaccctgagagaggatggattatatcgcccctgggcgacaatccatggtggactctcttgatagccgccattccagccctgctgtgtacgatcctgatctttatggatcagcaaatcactgccgttatcattaaccgtaaggaacataagttaaagaaaggggctggctatcacttggacctcctaatggtcggtgtgatgctgggggtctgttccgttatgggtctcccttggtttgtagcagctactgtgctgtctatcagccatgtgaatagtctcaaggtggagagcgaatgcagtgcccccggggaacaacccaaatttttggggatcagggaacagagggtgaccgggctaatgatattcatcctgatggggctgtccgttttcatgacatcggttttaaaatttattcctatgccagtgctgtatggggtcttcctctatatgggcgtcagctccttgaaagggattcagctcttcgaccggattaagctgtttggaatgcccgcaaagcatcagccagacctcatatatctcaggtatgttccactgtggaaagtacacatatttaccgtgattcaactgacatgcctcgtgctactttgggtgatcaaggtctcggctgctgctgtggtgttccccatgatggtcctagccctcgtgttcgttagaaaattgatggacctatgctttacaaagagagaactgagctggctggacgacctgatgcccgagtccaaaaagaaaaaagaagacgataaaaagaagaaagagaaagaggaggctgagagaatgttgcaagacgacgacgataccgtgcatctcccatttgagggcggatctctgctgcagatccctgtgaaggcactgaagtactctgttgatccgagtatcgtaaatatctctgacgagatggcgaagaccgcccagtggaaagcccttagcatgaacactgaaaacgctaaagtaacccgatcgaacatgagcccagataagcccgtctccgtcaaaattagcttcgaggatgaaccaaggaagaagtatgtcgacgccgagacatcgttgtag

SEQ ID NO: 328664 - DNA, 3741 bp, Artificial Sequence
  derived and/or modified sequence
atggaggctgatggagctggggagcagatgaggcccctgctgaccagggtgaccagccggggcccagatgaggaggccgtggtggacctgggcaagaccagcagcacagtgaacaccaagtttgagaaggaggagctggagagccacagagctgtgtacatcggcgtgcacgtgcccttcagcaaggagagcagaagaagacaccgccaccggggccacaagcaccaccacagaagaaggaaggacaaggagagtgacaaggaggatggccgggagagccccagctatgacacccccagccagagggtgcagttcatcctgggcacagaagatgatgatgaggagcacatcccccatgacctcttcacagagatggatgagctgtgctacagagatggagaggagtatgagtggaaggagacagcccgctggctgaagtttgaagaagatgtggaggatggaggagaccgctggagcaagccctacgtggccaccctgagcctgcacagcctgtttgagctgcggagctgcatcctgaatggcaccgtgatgctggacatgagggccagcaccctggatgaaattgctgacatggtgctggacaacatgattgccagcggccagctggatgagagcatcagagaaaatgtgcgggaggccctgctgaagaggcaccaccaccagaatgagaagcgcttcaccagccgcatccccctggtgcgcagctttgctgacatcggggagggcctgagcgccagccgccacagcctgaggacaggcctgagcgccagcaacctgagcctgcggggggagagccccctgagcctgctgctgggccacctgctgcccagcagcagagctggcaccccagctggcagccgctgcaccacccctgtgcccaccccccagaacagcccccccagcagccccagcatcagccggctgaccagccgcagcagccaggagagccagaggcaggcccctgagctgctggtgtccccagccagtgatgacatccccaccgtggtgatccaccccccagaggaggacctggaggccgccctgaagggggaggagcagaagaatgaggagaatgtggacctgaccccaggcatcctggccagcccccagagcgcccctggcaacctggacaacagcaagagcggggagatcaagggaaatggcagcggcggcagccgggagaacagcacagtggacttcagcaaggtggacatgaacttcatgaggaagatccccaccggggctgaggccagcaatgtgctggtgggggaggtggacttcctggagcggcccatcatcgcctttgtgcggctggccccagctgtgctgctgaccggcctgacagaggtgcctgtgcccacccgcttcctgttcctgctgctgggccctgctgggaaggccccccagtaccacgagatcggccgcagcatcgccaccctgatgacagatgagatcttccatgatgtggcctacaaggccaaggacagaaatgacctgctgagcggcattgatgagttcctggaccaggtgacagtgctgcccccaggagagtgggaccccagcatcagaattgagccccccaagtctgtgcccagccaggagaagaggaagatccctgtgttccacaacggcagcacccccaccctgggggagacccccaaggaggccgcccaccacgccggccctgagctgcagaggacaggccgcctgtttggaggcctcatcctggacatcaagaggaaggcccccttcttcctgagtgacttcaaggatgccctgagcctgcagtgcctggccagcatcctcttcctgtactgtgcctgcatgagccctgtgatcaccttcggcggcctgctgggggaggccacagagggccgcatcagcgccatcgagagcctgtttggagccagcctgaccggcatcgcctacagcctgtttgctggccagcccctgaccatcctgggcagcacaggccctgtgctggtgtttgagaagatcctgtacaagttctgccgggactaccagctgagctacctgagcctgcggaccagcatcggcctgtggaccagcttcctgtgcatcgtgctggtggccacagatgccagcagcctggtgtgctacatcacccgcttcacagaggaggcctttgctgccctgatctgcatcatcttcatctatgaggccctggagaagctgtttgacctgggggagacctacgccttcaacatgcacaacaacctggacaagctgaccagctacagctgtgtgtgcacagagccccccaaccccagcaatgagaccctggcccagtggaagaaggacaacatcacagcccacaacatctcctggaggaacctgactgtgtctgagtgcaagaagctgcggggcgtcttcctgggcagcgcctgtggccaccacggcccctacatcccagatgtgctcttctggtgtgtgatcctcttcttcaccaccttcttcctgagcagcttcctgaagcagttcaagaccaagcgctacttccccaccaaggtgcgcagcaccatcagtgactttgctgtgttcctgaccatcgtcatcatggtgaccatcgactacctggtgggcgtgcccagccccaagctgcacgtgcctgagaagtttgagcccacccaccctgagcggggctggatcatcagccccctgggggacaacccctggtggaccctgctgattgctgccatcccagccctgctgtgcaccatcctgatcttcatggaccagcagatcacagctgtgatcatcaacaggaaggagcacaagctgaagaagggagctggctaccacctggacctgctgatggtgggcgtgatgctgggcgtgtgcagcgtgatgggcctgccctggtttgtggccgccaccgtgctgagcatcagccacgtgaacagcctgaaggtggagagcgagtgcagcgcccctggagagcagcccaagttcctgggcatccgggagcagagggtgacaggcctgatgatcttcatcctgatgggcctgagcgtcttcatgacctctgtgctgaagttcatccccatgcctgtgctgtatggagtcttcctgtacatgggcgtgagcagcctgaagggcatccagctgtttgaccgcatcaagctgtttggcatgcctgccaagcaccagcctgacctgatctacctgcgctacgtgcccctgtggaaggtgcacatcttcaccgtcatccagctgacctgcctggtgctgctgtgggtgatcaaggtgtctgctgctgctgtggtgttccccatgatggtgctggccctggtgtttgtgaggaagctgatggacctgtgcttcaccaagcgggagctgtcctggctggatgacctgatgcctgagagcaagaagaagaaggaggatgacaagaagaagaaggagaaggaggaggccgagaggatgctgcaggatgatgatgacacagtgcacctgccctttgagggcggcagcctgctgcagatccctgtgaaggccctgaagtacagcgtggaccccagcatcgtgaacatcagtgatgagatggccaagacagcccagtggaaggccctgtccatgaacacagaaaatgccaaggtgaccaggagcaacatgagcccagacaagcctgtgtctgtgaagatcagctttgaagatgagcccaggaagaagtatgtggatgctgagaccagcctgtag

SEQ ID NO: 328665 - DNA, 3741 bp, Artificial Sequence
  derived and/or modified sequence
atggaggccgacggcgccggcgagcagatgcggcccctgctgaccagagtgacgagcagaggtcccgatgaagaggccgtcgtggacctcggcaagacaagtagcacagtgaatacaaaatttgaaaaggaagagctggagagccacagggctgtatacattggtgtgcatgtacccttctcaaaggagagcagacgccgacatcgccatagagggcataagcaccaccatcgccgaaggaaggacaaagagagcgataaggaggatgggcgggagagccccagttacgacaccccttctcagcgtgtgcagttcatcttaggcaccgaggacgatgatgaagaacatatcccacacgacctgttcaccgagatggacgagttgtgctaccgcgacggggaggaatacgagtggaaggagaccgcaagatggctgaagtttgaggaggatgtcgaggacggaggtgacagatggtcaaagccctatgtagctaccctgtctctacattccttgttcgaactgcgatcctgcatcttaaacggcacagtgatgcttgacatgcgggcgtccaccttggacgagatcgccgacatggtgttggataacatgatagcttcgggtcagcttgacgaatccattcgtgaaaatgttagagaggcactgctaaagcggcatcatcaccagaatgaaaaacgatttaccagccggatacctctggtccgatcattcgccgatatcggagaagggctgagcgcaagccggcactctctcagaactgggctctctgcatcaaatctcagtctgcgtggggaatctccattgtctctcctacttggccatctactgcctagctcaagggccggcacccctgctggctcaaggtgcactactcctgtgcctaccccccagaattcccccccatcctccccatcgatctccaggctgaccagccgctcgtcccaggagagtcagaggcaggcccctgaattgcttgtcagcccagcaagtgatgacatacctacagtggttatccatccacccgaggaggacttagaggcggcactgaagggtgaggagcaaaagaacgaagaaaatgtagatctgacgcccggcattctggcatctccacaatcagcccccgggaatctcgacaacagtaagtcgggcgaaattaaagggaatggatcaggcggcagtcgcgagaatagtacggtggatttcagcaaagttgacatgaactttatgagaaaaattcctaccggcgcggaagcctctaatgtgctggtgggcgaggtggatttcctggaaagacctatcattgcctttgtgaggttggcgcccgccgtcctgttgactgggctgaccgaagtgccggtccccacaaggtttttattcctgctgttgggcccagccggcaaagctccccaataccacgagatcggcagaagtattgcaacgcttatgacagatgaaatcttccatgacgttgcctataaggcaaaagacaggaacgacctgctgtccggcatcgacgagtttctggatcaagtgacagtgttgcctccaggcgaatgggaccccagcattcggattgaacctcccaagtctgtgccgagccaggagaaacgaaagatccctgttttccacaatggatcaacaccaaccctcggggaaacccccaaggaggccgcacatcacgcaggccctgagctgcagaggaccggccgtctgtttggtggacttatcctggatattaagcgtaaagctccatttttcctgagtgattttaaagacgcactttctctgcagtgtctggcctcgattctgttcttatactgcgcctgtatgagtcccgtaattacattcggtggactcttaggggaagctacggaaggacgtatctccgctattgagtccctgttcggggcatccctcaccgggattgcgtactctcttttcgccggtcaaccccttacaatcctcgggtcaacaggcccagtgctggttttcgagaaaatcctgtataaattctgccgtgattatcagttgtcatacttgagtctgcgcacttctattggcctgtggacatcatttctttgtatcgtccttgtggcaactgatgcttcatccctggtttgttacattacccgttttactgaagaggcattcgctgcactgatatgtattatttttatctacgaagcgctcgaaaagctgtttgatctgggcgaaacttacgcattcaatatgcacaacaatctcgataagctgactagttactcctgcgtgtgtactgaacccccaaacccatccaacgagacgttggcgcagtggaaaaaggacaacattaccgcccataatatctcctggaggaacctgactgtgtctgagtgcaagaagctacgcggcgtgtttctcgggtcagcttgcgggcaccatggaccatacattccagacgtgctgttctggtgtgttatcctattttttactacgttcttcctgtcaagctttctgaagcagtttaaaacaaagcggtactttcctacgaaagtcaggtctaccatttcagactttgcagtctttctcactatcgtgatcatggtgacaattgattaccttgtgggtgtcccaagtcccaagctgcacgtgccagaaaagttcgagcccacacatccagaacgggggtggattataagtcctctgggcgataacccttggtggacactgctgattgcagccataccggccctcctgtgcacaatccttatttttatggatcagcaaataaccgcagtgattattaaccgcaaagaacacaaactgaagaagggcgctggttatcacctcgacttgctgatggttggggtcatgctgggggtctgtagtgtgatgggactgccatggttcgtggccgctaccgttctgtccataagtcacgtgaactcactcaaggtggagagtgagtgtagtgcccccggagaacaacccaagtttctaggaatcagggagcagcgagtcactggacttatgatcttcatactaatgggactctccgtgtttatgacctccgtgctgaagttcatcccaatgccagtactgtatggagtcttcctgtatatgggggtctcctcccttaagggtatacagctgttcgacagaatcaagttattcggaatgccagccaagcatcaacccgatctgatttatttgaggtatgtacctctgtggaaggtgcatatcttcactgtgattcagctgacatgcctggtgctgctgtgggtcatcaaggtttccgctgctgcagttgtgttcccaatgatggttctggccctcgtctttgtccggaagctgatggacttgtgctttaccaagcgtgagcttagctggctggatgatctgatgccggagagcaaaaagaaaaaggaggacgacaagaagaagaaggagaaggaagaagcagagcggatgctgcaggacgatgacgacacagtccacttgcctttcgaaggggggtccctgctgcaaatcccagtcaaggccctgaaatactccgtcgacccgtcaattgtaaacatctctgatgaaatggccaaaaccgcccagtggaaagctctgtccatgaacactgagaatgccaaggtcacacgcagcaacatgtccccagacaagcctgtttccgtaaagatttcttttgaagacgagccccgcaaaaaatatgtcgacgccgagacttccctgtag

SEQ ID NO: 328666 - DNA, 3741 bp, Artificial Sequence
  derived and/or modified sequence
atggaggcggatggtgctggtgagcagatgcgccctctactcacccgagtcaccagcagaggcccagacgaggaagcagttgtggaccttggaaaaacatcaagcacagtcaacacaaaatttgaaaaggaagaactcgaatctcatcgtgccgtctacattggagtccacgtccccttctctaaagagtctaggagaagacatcgccatcgcggacataaacaccatcacaggcgcagaaaagataaggagagcgataaggaagacgggcgtgaatctccatcatacgatacccctagccagagagtgcagttcatccttggaacagaagatgatgatgaagagcacattccacatgacctgttcaccgagatggatgaactgtgttacagggatggagaagagtatgagtggaaggaaacagcacgatggctcaaatttgaggaggacgttgaggacggaggagaccgctggtccaagccctatgtggcaacactgtcccttcacagtctctttgagttgagaagctgcatcctgaatggcaccgtcatgctggatatgagagcctcaactcttgacgagatcgcagacatggtgctggacaacatgatagcaagcggacaactagacgaatctatacgggaaaacgttcgcgaggcattactgaaaaggcatcaccaccagaatgagaagagatttaccagtaggattccccttgtgcgaagttttgctgacattggagaggggctgtctgcttcccggcatagcctccggaccggactttctgcatcaaatcttagcctcaggggggagtccccattaagtttgctgctcgggcacctgctgccttcttcccgagccggtacgcccgcaggcagtagatgtacaactcctgtgcctactccacagaacagcccgccttctagcccatcaatcagtcggctgactagcaggagctcccaggaatctcaacggcaggcccctgaactcctggtgagtccagcaagtgacgacatccccactgtggttatccacccaccagaagaggatctcgaggcagcactgaaaggagaagagcagaagaatgaggaaaacgtcgacctcactccgggtattctggcctccccccagagcgcacctggtaatctggataactccaaatccggtgagattaaaggtaatggctccggcggatctcgcgaaaactcaactgtcgacttttcaaaggtcgatatgaatttcatgcgtaaaattccaaccggagctgaggcgtccaacgtacttgtgggtgaagtggatttcctcgagagaccgattatagcctttgtgagactggcacccgcagttttgctgaccgggctgaccgaagtcccagtacccacgcggtttttgttcctacttcttggacctgccggaaaggcaccccagtatcacgagataggtcgttccatcgcgaccctcatgacagacgagatttttcacgacgtggcatacaaggcaaaagatcgtaacgacttattgtccgggattgatgaattcctggatcaggttacggtgctgccacccggagaatgggacccgagcatcaggatagagccacccaagtccgtgccatcccaggagaaaaggaagattcccgttttccacaacggcagcacccccaccttgggggagactcccaaagaagccgctcaccatgcgggtcccgaattgcagcgcaccggcaggctcttcggcggtttgatcttggacattaagagaaaagctccattcttccttagtgacttcaaggacgctctgagcctgcagtgtctcgcatctatcctgttcctctattgcgcctgtatgtctccagtgattacttttggcggtctccttggggaggcaactgaaggtagaatctcagcaattgaaagtttgtttggggcttccctcaccggcatcgcatattctctcttcgcaggtcagccactcacgattctcggatctactggcccagtcctcgtgttcgagaagatcctctataagttctgtcgcgactaccagttaagctatttgagtctgagaacctccattggactctggaccagttttctgtgcatcgtgcttgtggccacggacgcctcttctttagtgtgttatatcacaagattcacagaggaggcatttgctgcactcatctgcataatcttcatctatgaagctcttgagaaactttttgacctgggggagacctatgctttcaacatgcacaacaacctagacaagctgacatcatatagttgtgtgtgcactgagccccctaatccctccaatgagactctcgctcagtggaagaaagacaatatcactgcgcataacatctcgtggaggaatctcaccgtgtcagagtgcaagaaattgcggggagtcttcttgggatccgcatgtgggcaccacggaccttacatccctgatgttcttttctggtgtgtcatcctttttttcactactttcttcctgtcatcctttctcaaacagttcaagacaaagcggtattttcccaccaaagtgaggagcaccataagtgacttcgcggtcttccttaccatcgtgattatggtcaccattgattacctcgtgggcgtgccatcaccgaaattgcacgtgcccgagaaattcgagcctacacaccccgagcgcggttggattataagtcctctcggggacaatccctggtggacactgcttattgcagccatccccgctctattgtgcaccatccttatctttatggaccagcagataacagctgtcataattaataggaaagaacataagctcaagaagggagccggatatcatcttgacctactgatggtgggggttatgctgggggtgtgcagtgtcatgggattaccttggtttgtggccgcaaccgtgttaagcataagtcatgtcaacagcctcaaggtggaatctgaatgttccgcccctggcgagcaacccaagttcctcggcatccgagagcagagggtaaccggcttaatgatattcatcctgatgggactttcagtgtttatgacatctgtgctgaagtttattccaatgccagtcctgtacggggtctttttgtacatgggggtcagtagtctgaaaggaattcagcttttcgaccgaatcaaactattcggaatgcctgccaagcatcagcctgatctcatctatttaagatacgtgccactgtggaaagtccatatcttcacagtgatccagctgacttgcttggtgctgctgtgggttatcaaggtgtctgcagcggctgtggtatttcccatgatggtgcttgcgctcgttttcgtacgcaagctgatggatctgtgctttaccaagcgcgaactttcttggctggatgacctgatgcctgaaagcaagaaaaagaaggaagatgacaaaaaaaaaaaggaaaaggaggaggccgagcgaatgctgcaggatgacgacgatactgtccacctgcccttcgaggggggaagtctattgcagatcccagtcaaggcactgaagtatagcgttgacccatcgatcgtaaatataagtgacgagatggccaagacagctcaatggaaggccctatccatgaacacagaaaatgcaaaggtgactcggtccaacatgtctcccgataaacctgtgtcagtgaaaatttcctttgaagatgaaccgcgaaaaaagtatgtggatgccgagactagtctgtag

SEQ ID NO: 328667 - DNA, 4120 bp, Artificial Sequence
  derived and/or modified sequence
cctactaaagccagcccagcagtcgcagcgcgcacacgcacgccccgcgtctcccgcgcccggcgcccggctctccccacgcgcgcacacctcgcgcacggacgcacccacgtttgtcctcgcgcgccgggggctcggcggcggcggcaggggcagcggcagaagcaggcagaccgcgcggggcagtaccgtagcggccgtcacgggctggccggccggccatggaggctgatggggccggcgagcagatgagaccgctactcacccgggtaacgagcaggggtcctgatgaagaagctgttgtggatcttggcaaaactagctcaactgtgaacaccaagtttgaaaaagaagaactagaaagtcatagagctgtatatattggtgttcacgtcccgtttagtaaagagagtcgtcggcgtcataggcatcgcggacacaaacatcaccaccggagaagaaaagataaagaatcagataaagaagatggacgggaatctccttcttatgatacaccatcccagagagttcagtttatccttggtactgaagatgatgatgaagaacatattccccatgatctcttcacggaaatggatgaactgtgttacagagatggagaagaatatgaatggaaagaaactgctagatggctgaaatttgaagaggatgttgaagatggcggtgaccgatggagtaaaccttatgtggcaactctctctttgcacagtctttttgaactaaggagttgcatcctcaatggaacagtcatgctggatatgagagcaagcactctagatgaaatagcagatatggtattagacaacatgatagcttctggccaattagacgagtccatacgagagaatgtcagagaagctcttctgaagagacatcatcatcagaatgagaaaagattcaccagtcggattcctcttgttcgatcttttgcagatataggggaaggcctttcagcctcccgccactctttgcgaacaggtctgtctgcctcaaacctttccttgagaggagaatcacctttatctcttcttcttggtcatcttcttccttcttcaagagctggaacccctgcaggctcaaggtgtacaaccccagtacccacccctcaaaacagtcctccttctagccctagcatcagccgcctgacctccagaagttcccaagagagtcagcgtcaggccccagaactactggtttcacctgccagtgatgatattcccacagtagtaattcatccgcctgaggaagacttagaagcagcgctgaaaggcgaggagcagaagaatgaggaaaatgttgacttaactccaggtattttggcctctccccagtctgctcctggaaacttggacaatagtaaaagtggagaaattaaaggtaatggaagtggtggaagcagagaaaatagtactgttgacttcagcaaggttgatatgaatttcatgagaaaaattcctacgggtgctgaggcatccaacgtcctggtgggcgaagtagactttttggaaaggccaataattgcatttgtgagactggctcctgctgtcctccttacagggttgactgaggtccctgttccaaccaggtttttgtttttgttattgggtccagcgggcaaggcaccacagtaccatgaaattggacgatcaatagccactctcatgacagatgagattttccatgatgtagcttataaagcaaaagacagaaatgacctcttatctggaattgatgaatttttagatcaagtaactgtcctacctccaggagagtgggatccttctatacgcatagaaccaccaaaaagtgtcccttctcaggaaaagagaaagattcctgtgtttcacaatggatctacccccacactgggtgagactcctaaagaggccgctcatcatgctgggcctgagctacagaggactggacggctttttggtggtttgatacttgacatcaaaaggaaagcaccttttttcttgagtgacttcaaggatgcattaagcctgcagtgcctggcctcgattcttttcctatactgtgcctgtatgtctcctgtaatcacttttggagggctgcttggagaagctacagaaggcagaataagtgcaatagagtctctttttggagcatcattaactgggattgcctattcattgtttgctgggcaacctctaacaatattggggagcacaggtccagttctagtgtttgaaaaaattttatataaattctgcagagattatcaactttcttatctgtctttaagaaccagtattggtctgtggacttcttttttgtgcattgttttggttgcaacagatgcaagcagccttgtgtgttatattactcgatttacagaagaggcttttgcagcccttatttgcatcatattcatctacgaggctttggagaagctctttgatttaggagaaacatatgcatttaatatgcacaacaacttagataaactgaccagctactcatgtgtatgtactgaacctccaaaccccagcaatgaaactctagcacaatggaagaaagataatataacagcacacaatatttcctggagaaatcttactgtttctgaatgtaaaaaacttcgtggtgtattcttggggtcagcttgtggtcatcatggaccttatattccagatgtgctcttttggtgtgtcatcttgtttttcacaacattttttctgtcttcattcctcaagcaatttaagaccaagcgttactttcctaccaaggtgcgatcgacaatcagtgattttgctgtatttctcacaatagtaataatggttacaattgactaccttgtaggagttccatctcctaaacttcatgttcctgaaaaatttgagcctactcatccagagagagggtggatcataagcccactgggagataatccttggtggaccttattaatagctgctattcctgctttgctttgtaccattctcatctttatggatcaacaaatcacagctgtaattataaacagaaaggaacacaaattgaagaaaggagctggctatcaccttgatttgctcatggttggcgttatgttgggagtttgctctgtcatgggacttccatggtttgtggctgcaacagtgttgtcaataagtcatgtcaacagcttaaaagttgaatctgaatgttctgctccaggggaacaacccaagtttttgggaattcgtgaacagcgggttacagggctaatgatttttattctaatgggcctctctgtgttcatgacttcagtcctaaagtttattccaatgcctgttctgtatggtgttttcctttatatgggagtttcctcattaaaaggaatccagttatttgaccgtataaaattatttggaatgcctgctaagcatcagcctgatttgatatacctccgttatgtgccgctctggaaggtccatattttcacagtcattcagcttacttgtttggtccttttatgggtgataaaagtttcagctgctgcagtggtttttcccatgatggttcttgcattagtgtttgtgcgcaaactcatggacctgtgtttcacgaagagagaacttagttggcttgatgatcttatgccagaaagtaagaaaaagaaagaagatgacaaaaagaaaaaagagaaagaggaagctgaacggatgcttcaagatgatgatgatactgtgcaccttccatttgaagggggaagtctcttgcaaattccagtcaaggccctaaaatatagtgttgatccctcaattgttaacatatcagatgaaatggccaaaactgcacagtggaaggcactttccatgaatactgagaatgccaaagtaaccagatctaacatgagtcctgataaacctgtgagtgtgaaaataagttttgaagatgaaccaagaaagaaatacgtggatgctgaaacttcattatagaattgaaccaagaggcattatacatatagatatatacatatgtaatgtgtgcgtatcatgtcactatatataagaatattgtatgtcatgctgtttatgtgtgactaccgggtttttaaaagtagtgtctggagtttgtaatgagcaccgtggagact

SEQ ID NO: 328668 - protein, 574 aa, Artificial Sequence
  derived and/or modified sequence
MEADGAGEQMRPLLTRGPDEEAVVDLGKTSSTVNTKFEKEELESHRAVYIGVHVPFSKESRRRHRHRGHKHHHRRRKDKESDKEDGRESPSYDTPSQRVQFILGTEDDDEEHIPHDLFTEMDELCYRDGEEYEWKETARWLKFEEDVEDGGDRWSKPYVATLSLHSLFELRSCILNGTVMLDMRASTLDEIADMVLDNMIASGQLDESIRENVREALLKRHHHQNEKRFTSRIPLVRSFADIGEGLSASRHSLRTGLSASNLSLRGESPLSLLLGHLLPSSRAGTPAGSRCTTPVPTPQNSPPSSPSISRLTSRSSQESQRQAPELLVSPASDDIPTVVIHPPEEDLEAALKGEEQKNEENVDLTPGILASPQSAPGNLDNSKSGEIKGNGSGGSRENSTVDFSKVDMNFMRKIPTGAEASNVLVGEVDFLERPIIAFVRLAPAVLLTGLTEVPVPTRFLFLLLGPAGKAPQYHEIGRSIATLMTDEIFHDVAYKAKDRNDLLSGIDEFLDQVTVLPPGEWDPSIRIEPPKSVPSQEKRKIPVFHNGSTPTLGETPKEAAHHAGPELQRTGRVQ

SEQ ID NO: 328669 - DNA, 1725 bp, Artificial Sequence
  derived and/or modified sequence
atggaggccgacggcgccggcgagcagatgagacccctgctgaccagaggccccgacgaggaggccgtggtggacctgggcaagaccagcagcaccgtgaacaccaagttcgagaaggaggagctggagagccacagagccgtgtacatcggcgtgcacgtgcccttcagcaaggagagcagaagaagacacagacacagaggccacaagcaccaccacagaagaagaaaggacaaggagagcgacaaggaggacggcagagagagccccagctacgacacccccagccagagagtgcagttcatcctgggcaccgaggacgacgacgaggagcacatcccccacgacctgttcaccgagatggacgagctgtgctacagagacggcgaggagtacgagtggaaggagaccgccagatggctgaagttcgaggaggacgtggaggacggcggcgacagatggagcaagccctacgtggccaccctgagcctgcacagcctgttcgagctgagaagctgcatcctgaacggcaccgtgatgctggacatgagagccagcaccctggacgagatcgccgacatggtgctggacaacatgatcgccagcggccagctggacgagagcatcagagagaacgtgagagaggccctgctgaagagacaccaccaccagaacgagaagagattcaccagcagaatccccctggtgagaagcttcgccgacatcggcgagggcctgagcgccagcagacacagcctgagaaccggcctgagcgccagcaacctgagcctgagaggcgagagccccctgagcctgctgctgggccacctgctgcccagcagcagagccggcacccccgccggcagcagatgcaccacccccgtgcccaccccccagaacagcccccccagcagccccagcatcagcagactgaccagcagaagcagccaggagagccagagacaggcccccgagctgctggtgagccccgccagcgacgacatccccaccgtggtgatccacccccccgaggaggacctggaggccgccctgaagggcgaggagcagaagaacgaggagaacgtggacctgacccccggcatcctggccagcccccagagcgcccccggcaacctggacaacagcaagagcggcgagatcaagggcaacggcagcggcggcagcagagagaacagcaccgtggacttcagcaaggtggacatgaacttcatgagaaagatccccaccggcgccgaggccagcaacgtgctggtgggcgaggtggacttcctggagagacccatcatcgccttcgtgagactggcccccgccgtgctgctgaccggcctgaccgaggtgcccgtgcccaccagattcctgttcctgctgctgggccccgccggcaaggccccccagtaccacgagatcggcagaagcatcgccaccctgatgaccgacgagatcttccacgacgtggcctacaaggccaaggacagaaacgacctgctgagcggcatcgacgagttcctggaccaggtgaccgtgctgccccccggcgagtgggaccccagcatcagaatcgagccccccaagagcgtgcccagccaggagaagagaaagatccccgtgttccacaacggcagcacccccaccctgggcgagacccccaaggaggccgcccaccacgccggccccgagctgcagagaaccggcagagtgcagtag

SEQ ID NO: 328670 - DNA, 1725 bp, Artificial Sequence
  derived and/or modified sequence
atggaagcagatggagcaggcgaacagatgcggcctctgctaaccagaggaccagatgaagaagctgttgtggatttgggcaagacctctagcacagtgaatacaaaattcgaaaaggaagagcttgagtctcaccgtgccgtctacatcggcgtccatgtccccttctcaaaggagagccgcaggcggcacaggcacaggggacacaaacaccaccaccggcgcagaaaagacaaagagtcagacaaagaagatggacgggagtccccttcctatgacaccccttcacaacgagtgcagtttatccttggaaccgaagatgacgacgaagagcacatcccacatgacttattcactgagatggacgagctttgctacagggatggcgaggagtacgagtggaaggagactgccagatggctaaagttcgaggaagacgtggaggacgggggcgaccggtggagcaaaccatacgtcgccacactaagtctccactcactgttcgagcttaggtcttgtatccttaatggaaccgttatgttggacatgcgggcgtctacactcgacgaaatagccgacatggtactggataatatgatagcatctggccagcttgacgaatccatacgcgaaaacgtcagggaggcactccttaagcgacaccatcaccagaacgagaaacgtttcacatcccgaatccccttggtcagatcttttgctgacattggagagggccttagtgctagcagacactccctccggaccggcctctccgccagtaatctttctctgcgaggtgagtcacctctgagtctgcttctggggcatttgctgccttcctccagggcaggtactccagcaggatctagatgcactacgcctgtgccgacgcctcagaacagccccccctcctccccctctatctctcgactgactagcagaagtagccaggagagtcagcgtcaggcccctgaactgctggtgagcccggcctctgatgatataccaactgttgtgattcacccaccagaagaagatctcgaagccgctttaaaaggtgaggagcaaaagaacgaggagaatgtagacctcacacctggcatcctcgcttccccccagagcgctccaggcaatctcgacaactctaagagtggagaaatcaaggggaatggctcggggggatcacgagaaaattccaccgtcgactttagcaaagtcgacatgaactttatgcggaagatccctaccggcgccgaggcgtcaaatgtgctcgtcggcgaagtggactttcttgaacggccaattatcgcatttgtgaggctagcccctgcagtgctgcttaccggattgacggaggtgcccgttcccactcgctttctgtttctcctgctcggaccagctggcaaggctccgcagtatcacgagatagggcgcagcatcgccacccttatgacagacgaaatcttccacgatgtagcctataaggccaaggatcgtaatgacctgttgtccggcattgatgaattccttgaccaggtgaccgtgctgccccctggtgaatgggatcccagcataaggatagaaccgcctaagtctgttccaagccaggagaaaaggaaaataccagtttttcacaacggttctacccctactctgggagagacaccgaaggaagccgcacatcatgccgggcccgagttgcaacgtaccggccgggtccagtag

SEQ ID NO: 328671 - DNA, 1725 bp, Artificial Sequence
  derived and/or modified sequence
atggaagcggacggcgccggggagcagatgagaccactcttgactaggggccccgatgaagaggcagtggtggatcttgggaagacgtcatccaccgtgaataccaaatttgagaaggaagagctggaatcacatcgggctgtgtatattggtgtccacgtaccgttctcaaaagagtcccgcagaaggcataggcacagaggacacaagcatcatcaccggcgtagaaaagataaggagagcgataaagaggatggaagagaatctcctagttatgatacccctagccagagagttcagtttattctgggtacagaggatgacgacgaagaacacattccccatgacttattcaccgaaatggatgaattatgctacagggacggagaggagtacgaatggaaagagactgcaagatggctcaaattcgaagaggatgtagaggatggcggcgaccgttggtccaaaccctacgtcgccaccctcagtctgcattccctgtttgaactgagatcgtgcattctgaatgggaccgtcatgttagacatgagagcgtccacactggacgaaatcgccgacatggttcttgacaatatgatcgcctccggacagctggacgagtctatcagagagaatgtgcgggaggccctcctgaagcgccaccatcaccaaaacgagaaacggtttacatctagaattcctctcgttagatcattcgccgacataggggaaggcttaagcgccagccgccacagcctgcgaacaggactgtccgcctcaaacctctcccttcggggggaatccccgctcagtctcttacttggccacctgctgccatcatctcgcgctggcacgccagccggttcccgatgcacgacacccgtcccgaccccccagaatagtccacctagctcgccaagcatttctagactgacgtccagatcgtcccaagaatcacagcggcaggctcctgaattgttggtctctcccgcatctgatgatataccgactgtcgtgattcatccccccgaagaagacttggaagcagccctaaagggggaggaacagaaaaatgaagagaatgtggacctcacgccgggaattctggcgagtccgcagagtgcacccggcaatctcgataacagcaaatctggcgagatcaagggcaatggctccgggggttcacgggagaactctacagtggatttctcaaaagtcgacatgaacttcatgagaaaaattcccaccggggccgaagcatccaacgtactggtcggcgaagtcgatttcctggaacggcccattattgcattcgtgaggctcgcgcccgcagtgcttctcactgggcttacagaggttcctgtccccacacgcttcctgttcttgctgcttggcccagccggtaaggcaccccaataccatgagataggtcggtccattgctacactgatgactgatgagatttttcatgatgtggcatacaaagccaaagatcggaacgatttactgtccggcattgatgagttcttggaccaggtgaccgtcctgccaccaggcgagtgggacccaagcattcggatcgaaccccctaaaagtgtgccgtcgcaggagaagcggaaaatcccggtgttccacaacgggtctacaccaacattgggtgaaacccctaaggaagccgcccaccacgccgggccagagctgcagcgcactggacgggtccagtag

SEQ ID NO: 328672 - DNA, 1725 bp, Artificial Sequence
  derived and/or modified sequence
atggaggctgatggagctggggagcagatgaggcccctgctgacccggggcccagatgaggaggccgtggtggacctgggcaagaccagcagcacagtgaacaccaagtttgagaaggaggagctggagagccacagagctgtgtacatcggcgtgcacgtgcccttcagcaaggagagcagaagaagacaccgccaccggggccacaagcaccaccacagaagaaggaaggacaaggagagtgacaaggaggatggccgggagagccccagctatgacacccccagccagagggtgcagttcatcctgggcacagaagatgatgatgaggagcacatcccccatgacctcttcacagagatggatgagctgtgctacagagatggagaggagtatgagtggaaggagacagcccgctggctgaagtttgaagaagatgtggaggatggaggagaccgctggagcaagccctacgtggccaccctgagcctgcacagcctgtttgagctgcggagctgcatcctgaatggcaccgtgatgctggacatgagggccagcaccctggatgaaattgctgacatggtgctggacaacatgattgccagcggccagctggatgagagcatcagagaaaatgtgcgggaggccctgctgaagaggcaccaccaccagaatgagaagcgcttcaccagccgcatccccctggtgcgcagctttgctgacatcggggagggcctgagcgccagccgccacagcctgaggacaggcctgagcgccagcaacctgagcctgcggggggagagccccctgagcctgctgctgggccacctgctgcccagcagcagagctggcaccccagctggcagccgctgcaccacccctgtgcccaccccccagaacagcccccccagcagccccagcatcagccggctgaccagccgcagcagccaggagagccagaggcaggcccctgagctgctggtgtccccagccagtgatgacatccccaccgtggtgatccaccccccagaggaggacctggaggccgccctgaagggggaggagcagaagaatgaggagaatgtggacctgaccccaggcatcctggccagcccccagagcgcccctggcaacctggacaacagcaagagcggggagatcaagggaaatggcagcggcggcagccgggagaacagcacagtggacttcagcaaggtggacatgaacttcatgaggaagatccccaccggggctgaggccagcaatgtgctggtgggggaggtggacttcctggagcggcccatcatcgcctttgtgcggctggccccagctgtgctgctgaccggcctgacagaggtgcctgtgcccacccgcttcctgttcctgctgctgggccctgctgggaaggccccccagtaccacgagatcggccgcagcatcgccaccctgatgacagatgagatcttccatgatgtggcctacaaggccaaggacagaaatgacctgctgagcggcattgatgagttcctggaccaggtgacagtgctgcccccaggagagtgggaccccagcatcagaattgagccccccaagtctgtgcccagccaggagaagaggaagatccctgtgttccacaacggcagcacccccaccctgggggagacccccaaggaggccgcccaccacgccggccctgagctgcagaggacaggccgggtgcagtag

SEQ ID NO: 328673 - DNA, 1725 bp, Artificial Sequence
  derived and/or modified sequence
atggaggccgacggcgccggcgagcagatgcggcccctgctgacccggggtcctgatgaagaggcggtagtggacctcgggaagacaagcagtacagtgaacacaaaattcgagaaggaggaactagagtcacacagagccgtatacataggggttcacgtgcccttctccaaagaaagtcgacgcaggcatcggcatcgcggacacaagcatcaccatagaagacgcaaggacaaagagtcagataaggaggatggtagggaatcgccatcctacgacacccctagtcagcgagttcagtttatcctcgggacggaggacgacgatgaggagcacatccctcacgatctgtttactgagatggacgaactatgctaccgcgacggcgaggaatacgagtggaaggagactgcgcggtggctgaaatttgaggaggacgtggaggacggcggggacagatggagcaaaccctatgtcgccaccttaagcttacacagcctctttgagttgcggagttgtatcttaaatggtactgtcatgttagacatgagggcgtccacattggatgagatcgccgacatggtgctggataatatgattgctagtgggcagctagacgagtccattagagaaaacgtgcgcgaggccttgttgaagcgacaccaccaccagaacgaaaaacggttcacgagccggatccctctcgtgcgctcttttgccgacattggagaaggtctgagcgcctctagacacagtctgcgaaccggcctgtcagctagtaacttgtcccttaggggggaatcacccctgagcctgctcctgggccatctgctgcccagtagcagagcaggcacccctgccgggagcagatgtactacccctgttcccacgccgcagaactcccccccaagctccccaagcatctccagactcaccagtagaagctctcaagagagtcaacggcaggcaccagagcttctcgtgtccccagcctctgacgacataccaactgtcgttatccacccacctgaagaggacctcgaggccgcgcttaaaggtgaggaacagaaaaatgaggagaatgtggatctgacccccggaatcctggccagcccccagagtgcccccggtaacttggataattctaaatcaggagaaattaaggggaatggctctggcggttctcgagaaaactccactgtggacttcagcaaggtggacatgaatttcatgagaaagattccaaccggagccgaagcgtcaaatgtccttgtcggcgaagtggactttcttgaaagacctattatcgcattcgtacgattggctccagctgtcctccttaccgggctgaccgaggttcctgtgccgaccagatttctttttctactcctgggtcccgccggcaaggctccacagtaccacgagataggcagaagtatcgcgacacttatgacggacgagattttccacgacgtcgcctataaggcgaaggaccgcaacgacttactgtccggaattgacgaatttctggaccaagtgacggtcctgccacccggggaatgggatccttccataagaattgaaccccccaagtctgtgccctcgcaggagaagagaaaaattcccgtcttccacaacgggtccactcctacattgggagagaccccaaaggaggctgcacaccacgccggacccgaactgcaaaggaccggtagggtccaatag

SEQ ID NO: 328674 - DNA, 1725 bp, Artificial Sequence
  derived and/or modified sequence
atggaggccgacggcgccggcgagcagatgcggcccctgctgaccagggggcctgacgaggaggcggtggtcgatttgggaaagacatccagcaccgttaacacgaaattcgagaaggaggagttagagtcccatagagcagtgtacattggagtgcacgtccccttctctaaagaatctaggcgacggcaccgccatcgcggacataagcaccaccaccggaggcgtaaagacaaggaatcagacaaagaggatggtcgcgagagtcccagctatgatacccctagccaaagagtccagttcatattgggaacggaagacgatgacgaggaacacatccctcacgacctctttactgagatggacgagctgtgttatagagatggagaggagtacgagtggaaagaaactgcccgctggctgaagttcgaagaggatgtggaggacggcggcgacaggtggtccaaaccctacgtggcaacactgtcactgcactccctcttcgagctgagatcctgtatcttaaacggcactgtgatgctcgacatgagagcaagcacccttgatgaaatcgctgacatggtgctggataacatgattgcttcgggacagctcgatgagtccatacgcgaaaatgtgcgtgaggctctgttgaagcgccaccatcaccagaacgagaagcgatttacatctagaatcccactggtgcgaagtttcgcagatattggcgaggggctgtccgcatcacggcattccctgagaactggactctctgcctccaatctatctttgcgtggcgaaagcccactctcattgctgttaggacacctgctccctagctcaagagccgggacacctgctgggagcaggtgtactacccctgttccaacccctcagaactccccaccttcctctccgtcgatcagtcgcctgacatcgagaagcagccaggaatcacaaaggcaggcgcccgaactccttgtgtccccagcctctgatgatatccctaccgtggtgattcatccccctgaagaggacttggaagctgccttgaagggagaggaacagaaaaatgaagaaaatgtggacctgacccctgggattctcgcttccccgcagagcgcacctggaaatctagacaactccaagagcggcgagatcaaaggtaacgggtcaggagggtcccgcgaaaactcaaccgtcgactttagtaaagtggacatgaactttatgcgtaagattccgacaggagctgaggccagcaacgtattggtgggcgaggttgatttcctggagaggccgattatcgcattcgttagactggctcctgctgttctgctgactgggctgaccgaggtgcctgtaccaacaaggttcctgtttctgctgctcggcccagcgggcaaggccccgcagtaccatgagatcggcaggagcatcgcaacccttatgaccgacgagatcttccacgacgttgcctacaaggccaaagacaggaatgacctgctgtccgggatcgatgaatttctggatcaggtcactgttctgcctcccggggaatgggacccctcaatcaggatcgagccaccaaagtccgtgccatcacaggaaaagaggaagatacctgtgtttcacaatggctccacccctaccctcggagagactcccaaagaagccgcccatcacgctggcccggagctacagaggaccgggagggtacagtag

SEQ ID NO: 328675 - DNA, 1725 bp, Artificial Sequence
  derived and/or modified sequence
atggaggctgacggcgcaggagagcagatgaggcccctcttgacaaggggtcctgacgaagaagctgttgtggacctggggaaaactagtagtacggtgaatacgaaattcgaaaaagaggagcttgagagtcacagggcggtgtacattggcgtgcatgtcccattctctaaggagagccgcaggcggcacaggcacagaggacataaacaccaccacagaaggcggaaggacaaggaatctgataaggaggacggccgtgagtctccgagttatgatactccttcccaacgcgtccaatttatcctcgggacagaggatgacgatgaagaacacatcccacacgatttgttcacggaaatggatgagctgtgctatcgtgacggcgaagagtacgagtggaaggagactgcacgatggcttaagtttgaggaggatgtcgaagacggcggtgacaggtggagcaagccctacgtcgcaactctgtcccttcactcgctcttcgaactcaggtcctgcattctcaacggtacggttatgctcgatatgagagcgtctaccctcgatgaaatcgccgacatggtcctcgacaacatgattgccagtggacagttagatgagtcaattagagaaaacgtgcgcgaagccctgctaaagcgccatcaccatcaaaacgagaagcggttcacaagtcgcatccccctagtacgcagttttgccgatatcggagaaggactgagcgcaagcagacactcgctgaggaccggcctgtccgcaagtaacctgtccttaagaggcgagagtccactgtctctgctgctgggtcatcttttgccttctagcagagcaggcaccccagccggtagtaggtgtacgaccccagtccccacaccacagaattccccaccctcttcgcctagcatcagtcgattaacctccagaagctctcaggagtcccagagacaagctccagagctcttggtgagccccgcatccgatgatatccctaccgtggtcatccaccctcccgaagaggatctggaggccgcattaaaaggggaggaacagaagaatgaggagaacgtggacctcacacccggtattctggcatcaccccaaagcgctcccggtaacctggacaatagcaaatccggagagataaagggaaacggctctggcggatccagagagaatagtaccgtggacttctccaaggtggacatgaattttatgcggaaaattcctaccggcgctgaagcatcaaatgtcttagtcggcgaggtggactttctggaacgccctattattgctttcgtacgcttagccccagccgttctcttaacggggctaactgaagtaccagtccccaccagatttctgtttctgctcttgggtccagccggaaaggcaccgcaatatcacgaaattggtagatcaattgcaacactgatgacggatgagatatttcacgacgtggcttataaggctaaagatcgcaatgatctcctttcaggcattgatgaattcttagaccaggtcactgtgctcccgcctggcgaatgggatccaagcatccggatcgagcccccaaaatctgtccccagtcaagaaaagcgtaagatccctgtcttccataatgggtccaccccaaccctgggcgagactcctaaggaggctgcacatcatgctggaccagagcttcagcggacgggcagggtgcagtag

SEQ ID NO: 328676 - DNA, 1725 bp, Artificial Sequence
  derived and/or modified sequence
atggaagctgacggagcaggtgagcagatgcgcccactactcacaagaggtccagacgaagaagctgtagtagatctggggaaaacctcatctacagtgaatactaagtttgagaaggaagagctcgagtcgcacagagccgtatatataggggtacacgtaccattctctaaggagtcgcggcgacgtcatagacacagggggcataaacatcatcaccggaggcgcaaagacaaggaatccgataaagaagacgggagggagtctccatcgtacgacactccatctcagagggttcagttcatcctgggaaccgaggacgacgacgaagaacatattccccatgatctctttacggaaatggatgagctctgctatagggatggagaagaatatgagtggaaggagacagccagatggctcaagtttgaagaagacgtggaggacggtggcgatcggtggagcaagccttatgttgccaccctcagcctgcactcattgttcgagttacggagctgtattttgaacggtactgtgatgcttgacatgagagcctcaactctggacgagatagctgatatggtgcttgataacatgatcgcttccggccaactagatgagtccattcgagaaaatgtgagagaagcacttctgaaacgacatcatcaccaaaacgaaaagcgatttactagtagaattccactcgtccgctcgtttgccgacataggtgagggcctctcagctagtagacacagtctgcgtactggcctctccgcttccaacctctcactgcgcggagagtcccctctgtccttactgctcggccacctactgccaagctctagggcaggcactcctgcaggttcccgatgcacaacccctgttcccacgcctcaaaattctcctccttcctcgccctcaattagtaggttaacaagccgatcttcccaggaaagccagaggcaggccccagagctgctggtgtcccccgcaagcgatgacattccgaccgtggtgatccacccccctgaggaggacctggaagctgcccttaagggcgaagagcagaagaacgaagaaaatgtggacctgacacccggtatactggcatcaccacagtctgctcccggaaatcttgataactcaaagtccggagaaatcaagggcaatggctccgggggaagcagagagaattccactgtcgacttcagcaaagtcgacatgaattttatgagaaagatccctacgggggcagaggcgagcaatgttcttgtgggcgaagtggactttctggaacggcctattatagctttcgttcggctggcaccggcagtgttgttgactggactgaccgaggtaccagtcccgaccaggttcctcttcttacttctgggtccagctggcaaggcacctcagtatcatgaaatcggcaggtctatcgccaccttaatgaccgacgaaatctttcatgacgttgcctacaaagctaaagatcgaaatgacctcctatccggaatcgacgagttccttgatcaggtgaccgtgctaccacccggagagtgggacccctccattaggatcgagcccccaaaatccgttcccagtcaagagaaacggaagattcccgtgttccacaatggttctactcctacactgggcgagacccccaaggaggcggctcaccatgccggtcccgagctccagaggacagggagggtgcaatag

SEQ ID NO: 328677 - protein, 1135 aa, Artificial Sequence
  derived and/or modified sequence
MEADGAGEQMRPLLTRVTSRGPDEEAVVDLGKTSSTVNTKFEKEELESHRAVYIGVHVPFSKESRRRHRHRGHKHHHRRRKDKESDKEDGRESPSYDTPSQRVQFILGTEDDDEEHIPHDLFTEMDELCYRDGEEYEWKETARWLKFEEDVEDGGDRWSKPYVATLSLHSLFELRSCILNGTVMLDMRASTLDEIADMVLDNMIASGQLDESIRENVREALLKRHHHQNEKRFTSRIPLVRSFADIGKKHSDPHLLERNGILASPQSAPGNLDNSKSGEIKGNGSGGSRENSTVDFSKVDMNFMRKIPTGAEASNVLVGEVDFLERPIIAFVRLAPAVLLTGLTEVPVPTRFLFLLLGPAGKAPQYHEIGRSIATLMTDEIFHDVAYKAKDRNDLLSGIDEFLDQVTVLPPGEWDPSIRIEPPKSVPSQEKRKIPVFHNGSTPTLGETPKEAAHHAGPELQRTGRLFGGLILDIKRKAPFFLSDFKDALSLQCLASILFLYCACMSPVITFGGLLGEATEGRISAIESLFGASLTGIAYSLFAGQPLTILGSTGPVLVFEKILYKFCRDYQLSYLSLRTSIGLWTSFLCIVLVATDASSLVCYITRFTEEAFAALICIIFIYEALEKLFDLGETYAFNMHNNLDKLTSYSCVCTEPPNPSNETLAQWKKDNITAHNISWRNLTVSECKKLRGVFLGSACGHHGPYIPDVLFWCVILFFTTFFLSSFLKQFKTKRYFPTKVRSTISDFAVFLTIVIMVTIDYLVGVPSPKLHVPEKFEPTHPERGWIISPLGDNPWWTLLIAAIPALLCTILIFMDQQITAVIINRKEHKLKKGAGYHLDLLMVGVMLGVCSVMGLPWFVAATVLSISHVNSLKVESECSAPGEQPKFLGIREQRVTGLMIFILMGLSVFMTSVLKFIPMPVLYGVFLYMGVSSLKGIQLFDRIKLFGMPAKHQPDLIYLRYVPLWKVHIFTVIQLTCLVLLWVIKVSAAAVVFPMMVLALVFVRKLMDLCFTKRELSWLDDLMPESKKKKEDDKKKKEKEEAERMLQDDDDTVHLPFEGGSLLQIPVKALKYSVDPSIVNISDEMAKTAQWKALSMNTENAKVTRSNMSPDKPVSVKISFEDEPRKKYVDAETSL

SEQ ID NO: 328678 - DNA, 3408 bp, Artificial Sequence
  derived and/or modified sequence
atggaggccgacggcgccggcgagcagatgagacccctgctgaccagagtgaccagcagaggccccgacgaggaggccgtggtggacctgggcaagaccagcagcaccgtgaacaccaagttcgagaaggaggagctggagagccacagagccgtgtacatcggcgtgcacgtgcccttcagcaaggagagcagaagaagacacagacacagaggccacaagcaccaccacagaagaagaaaggacaaggagagcgacaaggaggacggcagagagagccccagctacgacacccccagccagagagtgcagttcatcctgggcaccgaggacgacgacgaggagcacatcccccacgacctgttcaccgagatggacgagctgtgctacagagacggcgaggagtacgagtggaaggagaccgccagatggctgaagttcgaggaggacgtggaggacggcggcgacagatggagcaagccctacgtggccaccctgagcctgcacagcctgttcgagctgagaagctgcatcctgaacggcaccgtgatgctggacatgagagccagcaccctggacgagatcgccgacatggtgctggacaacatgatcgccagcggccagctggacgagagcatcagagagaacgtgagagaggccctgctgaagagacaccaccaccagaacgagaagagattcaccagcagaatccccctggtgagaagcttcgccgacatcggcaagaagcacagcgacccccacctgctggagagaaacggcatcctggccagcccccagagcgcccccggcaacctggacaacagcaagagcggcgagatcaagggcaacggcagcggcggcagcagagagaacagcaccgtggacttcagcaaggtggacatgaacttcatgagaaagatccccaccggcgccgaggccagcaacgtgctggtgggcgaggtggacttcctggagagacccatcatcgccttcgtgagactggcccccgccgtgctgctgaccggcctgaccgaggtgcccgtgcccaccagattcctgttcctgctgctgggccccgccggcaaggccccccagtaccacgagatcggcagaagcatcgccaccctgatgaccgacgagatcttccacgacgtggcctacaaggccaaggacagaaacgacctgctgagcggcatcgacgagttcctggaccaggtgaccgtgctgccccccggcgagtgggaccccagcatcagaatcgagccccccaagagcgtgcccagccaggagaagagaaagatccccgtgttccacaacggcagcacccccaccctgggcgagacccccaaggaggccgcccaccacgccggccccgagctgcagagaaccggcagactgttcggcggcctgatcctggacatcaagagaaaggcccccttcttcctgagcgacttcaaggacgccctgagcctgcagtgcctggccagcatcctgttcctgtactgcgcctgcatgagccccgtgatcaccttcggcggcctgctgggcgaggccaccgagggcagaatcagcgccatcgagagcctgttcggcgccagcctgaccggcatcgcctacagcctgttcgccggccagcccctgaccatcctgggcagcaccggccccgtgctggtgttcgagaagatcctgtacaagttctgcagagactaccagctgagctacctgagcctgagaaccagcatcggcctgtggaccagcttcctgtgcatcgtgctggtggccaccgacgccagcagcctggtgtgctacatcaccagattcaccgaggaggccttcgccgccctgatctgcatcatcttcatctacgaggccctggagaagctgttcgacctgggcgagacctacgccttcaacatgcacaacaacctggacaagctgaccagctacagctgcgtgtgcaccgagccccccaaccccagcaacgagaccctggcccagtggaagaaggacaacatcaccgcccacaacatcagctggagaaacctgaccgtgagcgagtgcaagaagctgagaggcgtgttcctgggcagcgcctgcggccaccacggcccctacatccccgacgtgctgttctggtgcgtgatcctgttcttcaccaccttcttcctgagcagcttcctgaagcagttcaagaccaagagatacttccccaccaaggtgagaagcaccatcagcgacttcgccgtgttcctgaccatcgtgatcatggtgaccatcgactacctggtgggcgtgcccagccccaagctgcacgtgcccgagaagttcgagcccacccaccccgagagaggctggatcatcagccccctgggcgacaacccctggtggaccctgctgatcgccgccatccccgccctgctgtgcaccatcctgatcttcatggaccagcagatcaccgccgtgatcatcaacagaaaggagcacaagctgaagaagggcgccggctaccacctggacctgctgatggtgggcgtgatgctgggcgtgtgcagcgtgatgggcctgccctggttcgtggccgccaccgtgctgagcatcagccacgtgaacagcctgaaggtggagagcgagtgcagcgcccccggcgagcagcccaagttcctgggcatcagagagcagagagtgaccggcctgatgatcttcatcctgatgggcctgagcgtgttcatgaccagcgtgctgaagttcatccccatgcccgtgctgtacggcgtgttcctgtacatgggcgtgagcagcctgaagggcatccagctgttcgacagaatcaagctgttcggcatgcccgccaagcaccagcccgacctgatctacctgagatacgtgcccctgtggaaggtgcacatcttcaccgtgatccagctgacctgcctggtgctgctgtgggtgatcaaggtgagcgccgccgccgtggtgttccccatgatggtgctggccctggtgttcgtgagaaagctgatggacctgtgcttcaccaagagagagctgagctggctggacgacctgatgcccgagagcaagaagaagaaggaggacgacaagaagaagaaggagaaggaggaggccgagagaatgctgcaggacgacgacgacaccgtgcacctgcccttcgagggcggcagcctgctgcagatccccgtgaaggccctgaagtacagcgtggaccccagcatcgtgaacatcagcgacgagatggccaagaccgcccagtggaaggccctgagcatgaacaccgagaacgccaaggtgaccagaagcaacatgagccccgacaagcccgtgagcgtgaagatcagcttcgaggacgagcccagaaagaagtacgtggacgccgagaccagcctgtag

SEQ ID NO: 328679 - DNA, 3408 bp, Artificial Sequence
  derived and/or modified sequence
atggaagctgacggcgctggagaacagatgcgcccattattgactagagttacaagtcggggacccgacgaagaggcagtggtggaccttggcaagacttcttctactgtgaataccaagtttgagaaggaggaattagaaagtcatcgcgccgtgtacattggagtgcatgttccattctctaaggagtctaggcggcggcatagacatcgcggtcacaaacaccatcataggcgacgcaaggataaagagtccgacaaggaagatggcagagagtccccctcgtatgacacccctagtcaacgcgtgcagtttatccttggaacagaagatgatgatgaagagcacattccccatgatctgtttactgagatggatgaactctgctaccgggacggcgaggagtacgagtggaaggagaccgcccgctggctgaagttcgaggaggatgtcgaagacggtggcgatcgctggagcaagccttatgtagctactctttccctgcacagtctgtttgagttgcggagttgtatactcaacggtacagttatgttagacatgagagctagcaccttagacgagattgccgatatggttctggacaacatgattgcttccgggcaattggacgagtctatccgggagaacgtccgggaggccctcctgaagagacatcaccatcagaacgaaaaacgtttcacctctcgcataccactcgttagaagctttgcagatattggcaaaaagcacagcgacccgcacctcctggaaagaaacggaatactggcctcaccccagtccgcccccggcaatctcgataattccaagagtggggaaatcaagggcaatgggtctggcgggtcaagggaaaactcaacagtagacttctctaaagtggacatgaactttatgagaaaaattcccacaggagccgaggcaagcaacgtgctcgtgggagaagtcgattttctggaacgcccaattattgccttcgttcgtctggcccctgctgtcctccttaccggtctgacagaagtccccgttcccactcggttcctcttcttactcctggggcccgccggtaaggctccacagtaccatgagatcggtcgcagcatcgcgactctaatgacagatgaaattttccacgatgtggcatacaaggccaaggatcggaatgacttgctgtccgggatcgatgagtttctggaccaggtgactgttctgcctcccggagaatgggatccatccatcagaatcgagccaccgaagtctgtccccagtcaggagaaacgaaaaatccccgtattccacaatgggtctacaccgactctgggagagactccgaaagaggccgctcaccacgctggacccgagctccagcggacgggtaggttattcggcggattgattttggacataaaacgtaaagcccccttcttcttaagtgatttcaaagacgctttgagccttcagtgcctcgcctccatcctgtttctgtactgcgcgtgcatgtcaccagtgattaccttcggaggattgctgggtgaggcaaccgagggccgtatctcagccatcgagtctctattcggcgcctcactaactggtattgcttactccttgttcgcagggcaacctctgactattctcggatccactggaccagtgctggtgttcgagaagattctgtacaaattttgtcgtgactatcagctgtcttatctgtcattgcgtacgtcaatcggcctgtggacgtccttcctgtgcattgttctggtcgctacagacgcttcttcattggtgtgctatattacacgattcactgaagaggcattcgcagcacttatctgcattattttcatttacgaagcactggaaaaattatttgacttgggtgaaacatatgcgttcaatatgcacaacaatctggataaacttaccagctatagctgtgtgtgtacagagcccccgaacccatccaacgaaaccctggctcagtggaagaaggacaatattaccgctcacaatatctcttggagaaacctgactgtgtccgagtgtaagaaactgaggggagtgttcctgggctctgcatgtggtcaccacgggccatatatacccgacgtcctgttctggtgcgttatcttatttttcacaacctttttcttgtcaagctttcttaaacagtttaagaccaagagatatttcccaactaaggtgagatctacaatttccgacttcgccgtgttcctgactatagttatcatggtgaccatagactatctggtgggagttccaagtcctaagctacacgttccagaaaaatttgagcccacccacccagagaggggctggatcatctcaccacttggagataacccctggtggaccttactcatcgccgcaatccccgcccttctgtgcactattctgatcttcatggaccagcagattaccgcggttatcatcaatcgcaaagagcacaagttgaaaaaaggggccggctatcatttagacctcctaatggtgggtgtcatgttgggcgtatgtagtgtgatgggcctgccatggttcgtagccgccaccgtgctgtccataagccacgttaatagccttaaggtggagtccgaatgcagcgccccgggggagcagcctaaattcctcggcatacgcgaacagcgagttactggacttatgatattcatattaatggggctgagtgtctttatgacttcagtgctgaagttcatacccatgccagtgttatacggagtattcctatacatgggcgtctcttctctgaagggtatccagttatttgacagaattaagctgtttgggatgcccgccaagcaccagccggaccttatctatttgcggtacgtgcctctttggaaggtccatatcttcaccgtgatccagttaacctgcctggtactcttatgggtgattaaggtgagcgctgcagccgtggtgtttcccatgatggtcctggcactggtgtttgttcgcaagttaatggacttatgtttcacgaagagagagctttcctggcttgatgatcttatgcccgaatccaagaagaaaaaggaagacgacaaaaagaagaaggaaaaggaggaggctgagcggatgttgcaggacgatgacgatactgtccacctaccctttgaagggggctcactgctccagattcctgtgaaggcactgaaatattcagttgatccctcaatagtgaatatctctgacgaaatggctaagaccgcgcaatggaaagctcttagcatgaacaccgagaacgctaaagtgacacgctccaatatgtcaccggacaaaccagtctccgtcaagatttcattcgaagacgagccccgcaaaaagtacgtcgatgccgagacgtccttgtag

SEQ ID NO: 328680 - DNA, 3408 bp, Artificial Sequence
  derived and/or modified sequence
atggaggctgatggagctggggagcagatgaggcccctgctgaccagggtgaccagccggggcccagatgaggaggccgtggtggacctgggcaagaccagcagcacagtgaacaccaagtttgagaaggaggagctggagagccacagagctgtgtacatcggcgtgcacgtgcccttcagcaaggagagcagaagaagacaccgccaccggggccacaagcaccaccacagaagaaggaaggacaaggagagtgacaaggaggatggccgggagagccccagctatgacacccccagccagagggtgcagttcatcctgggcacagaagatgatgatgaggagcacatcccccatgacctcttcacagagatggatgagctgtgctacagagatggagaggagtatgagtggaaggagacagcccgctggctgaagtttgaagaagatgtggaggatggaggagaccgctggagcaagccctacgtggccaccctgagcctgcacagcctgtttgagctgcggagctgcatcctgaatggcaccgtgatgctggacatgagggccagcaccctggatgaaattgctgacatggtgctggacaacatgattgccagcggccagctggatgagagcatcagagaaaatgtgcgggaggccctgctgaagaggcaccaccaccagaatgagaagcgcttcaccagccgcatccccctggtgcgcagctttgctgacatcggcaagaagcacagcgacccccacctgctggagagaaatggcatcctggccagcccccagagcgcccctggcaacctggacaacagcaagtctggagagatcaagggaaatggaagtggcggcagccgggagaacagcacagtggacttcagcaaggtggacatgaacttcatgaggaagatccccactggagctgaggccagcaatgtgctggtgggggaggtggacttcctggagcggcccatcatcgcctttgtgcggctggccccagctgtgctgctgaccggcctgacagaggtgcctgtgcccacccgcttcctgttcctgctgctgggccctgctgggaaggccccccagtaccatgaaattggccgcagcatcgccaccctgatgacagatgagatcttccatgatgtggcctacaaggccaaggacagaaatgacctgctgtctggaattgatgagttcctggaccaggtgacagtgctgcccccaggagagtgggaccccagcatccgcatcgagccccccaagtctgtgcccagccaggagaagaggaagatccctgtgttccacaacggcagcacccccaccctgggggagacccccaaggaggccgcccaccacgccggccctgagctgcagaggacaggccgcctgtttggaggcctcatcctggacatcaagaggaaggcccccttcttcctgagtgacttcaaggatgccctgagcctgcagtgcctggccagcatcctcttcctgtactgtgcctgcatgagccctgtgatcacctttggaggcctgctgggggaggccacagagggccgcatcagcgccatcgagagcctgtttggagccagcctgactggaattgcctacagcctgtttgctggccagcccctgaccatcctgggcagcactggacctgtgctggtgtttgagaagatcctgtacaagttctgccgggactaccagctgagctacctgagcctgcggaccagcatcggcctgtggaccagcttcctgtgcatcgtgctggtggccacagatgccagcagcctggtgtgctacatcacccgcttcacagaggaggcctttgctgccctgatctgcatcatcttcatctatgaggccctggagaagctgtttgacctgggggagacctacgccttcaacatgcacaacaacctggacaagctgaccagctacagctgtgtgtgcacagagccccccaaccccagcaatgagaccctggcccagtggaagaaggacaacatcacagcccacaacatctcctggaggaacctgactgtgtctgagtgcaagaagctgcggggcgtcttcctgggcagcgcctgtggccaccacggcccctacatcccagatgtgctcttctggtgtgtgatcctcttcttcaccaccttcttcctgagcagcttcctgaagcagttcaagaccaagcgctacttccccaccaaggtgcgcagcaccatcagtgactttgctgtgttcctgaccatcgtcatcatggtgaccatcgactacctggtgggcgtgcccagccccaagctgcacgtgcctgagaagtttgagcccacccaccctgagcggggctggatcatcagccccctgggggacaacccctggtggaccctgctgattgctgccatcccagccctgctgtgcaccatcctgatcttcatggaccagcagatcacagctgtgatcatcaacaggaaggagcacaagctgaagaagggggccggctaccacctggacctgctgatggtgggcgtgatgctgggcgtgtgcagcgtgatgggcctgccctggtttgtggccgccaccgtgctgagcatcagccacgtgaacagcctgaaggtggagagtgaatgttctgcccctggagagcagcccaagttcctgggcatccgggagcagagggtgacaggcctgatgatcttcatcctgatgggcctgtctgtgttcatgacctctgtgctgaagttcatccccatgcctgtgctgtatggagtcttcctgtacatgggcgtgagcagcctgaagggcatccagctgtttgaccgcatcaagctgtttggcatgcctgccaagcaccagcctgacctgatctacctgcgctacgtgcccctgtggaaggtgcacatcttcaccgtcatccagctgacctgcctggtgctgctgtgggtgatcaaggtgtctgctgctgctgtggtgttccccatgatggtgctggccctggtgtttgtgaggaagctgatggacctgtgcttcaccaagcgggagctgtcctggctggatgacctgatgcctgagagcaagaagaagaaggaggatgacaagaagaagaaggagaaggaggaggccgagaggatgctgcaggatgatgatgacacagtgcacctgccctttgaaggaggcagcctgctgcagatccctgtgaaggccctgaagtacagcgtggaccccagcatcgtgaacatcagtgatgagatggccaagacagcccagtggaaggccctgtccatgaacacagaaaatgccaaggtgaccaggagcaacatgagcccagacaagcctgtgtctgtgaagatcagctttgaagatgagcccaggaagaagtatgtggatgctgagaccagcctgtag

SEQ ID NO: 328681 - DNA, 3408 bp, Artificial Sequence
  derived and/or modified sequence
atggaggccgacggcgccggcgagcagatgcggcccctgctgaccagagtgacctcacgggggccagacgaagaggccgtcgttgacctcggaaaaaccagtagtaccgttaatacgaaatttgagaaggaagagctggagtcccatcgggccgtgtacataggcgttcacgtcccattttctaaggaatctcgtcgacgacaccgacatcggggccacaaacaccatcacaggcgacgaaaagataaggagagtgacaaggaggatggccgggagagtccttcttatgatactccatcccagagggttcaattcatcctgggaacagaggatgatgatgaagaacacatcccccacgacctttttactgagatggatgagctgtgctacagagacggcgaagagtatgaatggaaggagactgcccgctggctgaagtttgaggaggacgtggaagacgggggagacagatggagtaagccctacgtcgcgacattatctcttcacagtctgttcgagctgcgatcttgcattctcaacggtactgtcatgcttgacatgcgcgcgtccacactcgacgagattgcagatatggtgttggacaatatgatcgcatccgggcagctagatgaaagcataagagagaatgtccgtgaggctctgctgaaacgccaccaccaccagaatgagaaacgtttcacaagtcggatccccctcgtgaggagcttcgcagacatcggtaaaaaacattccgatccgcaccttctcgaacgaaacggtatcctggcatctccccagagtgctccaggcaatctagacaactctaagtctggagagattaaggggaatggctccggagggtccagagaaaacagtacagtggacttctccaaggtggatatgaactttatgaggaagatccccactggggcagaggccagcaacgtgctggtgggtgaggtggatttcctggagaggcctataattgcatttgtgcgcctggcacctgctgttcttctaaccggtttaaccgaagttcctgtcccaacacggttcctgtttctgttgctcggtcccgctgggaaggcacctcagtatcatgagatcgggcgatctattgccaccttaatgactgatgaaatatttcacgacgtggcctacaaagccaaggacagaaacgatcttctgtccggaattgacgaatttctggaccaggtaacagtccttccacccggggagtgggacccatccatcagaatcgaacccccaaaatctgtgccgagccaagagaagagaaagatccctgtgttccataatgggtccacccccaccctgggagagacccccaaagaggccgctcaccacgccggccctgaattgcaaagaactgggagactgttcggagggctgatcctggatataaaaagaaaagctcctttctttctctcagacttcaaagatgctctttcgctgcagtgtctggcttcaatcctgttcctgtattgtgcatgcatgagtcccgttataacattcggcggactgctgggggaggccactgagggacgcatctccgcaatcgaaagcttgtttggcgctagtttgacgggaatcgcctactctttgttcgcaggtcagcccctgaccattctaggatctaccggtcctgtccttgtttttgagaaaatactgtataaattttgtcgcgactatcagctgtcttacctgtcactcaggacctccatcgggctgtggacaagcttcctgtgcatcgtccttgtggccacagacgcatcaagcctggtgtgctatattacacgctttaccgaagaggcattcgccgcactgatctgcattatctttatctacgaagctctggaaaagctctttgatctcggagagacctacgccttcaacatgcacaacaatctcgataagctcacctcatactcctgcgtgtgcactgaaccgccaaatcctagcaatgagactctagctcaatggaagaaggataatattactgcccataatattagttggcggaacctgacagttagtgaatgcaagaagttgagaggtgtgttcctagggtctgcttgtggccatcacggaccttatattcccgatgtcttgttttggtgtgtgattctcttctttacaacattcttcttgagtagctttctaaaacaattcaaaacgaaacgttatttccctaccaaggtgagatcaaccatcagcgattttgccgtgttcctaactatagtcattatggtgacgatcgattatttggtgggcgtcccgagccctaaactgcatgtgccagaaaaatttgagccaacccatcctgagagaggatggatcatcagccccttgggtgataatccttggtggactcttctgatcgccgctatcccagccctgctctgcacaattcttatcttcatggaccagcaaattacagccgtgattatcaatagaaaggagcataagctgaaaaaaggagccggctatcacctggacttgctcatggtgggcgtgatgttaggagtgtgcagcgtcatggggctgccatggttcgttgcggcgaccgtccttagtatcagtcacgtcaacagtctgaaggttgaatccgaatgttctgcaccaggagagcagcctaaatttctgggcattcgagagcagagagtgacgggcctgatgatttttatccttatggggctgagtgttttcatgacctctgtgctgaagtttatcccaatgccagttctgtatggtgtctttctgtatatgggagtctcttcactgaagggcatccaactgtttgacagaatcaagctgtttgggatgcctgccaagcatcagccggatcttatatacctcaggtatgtccccctgtggaaggtccacatttttacggtaattcagcttacttgcctggtactgctgtgggtcatcaaagtatcagccgccgccgttgttttccccatgatggtcttagcgctggtcttcgtgcggaaattgatggatctatgtttcactaagagggaactgtcctggttagacgatttaatgcctgaaagcaaaaaaaagaaggaagacgacaaaaagaaaaaagagaaggaggaggcggaacgtatgttgcaggatgacgatgacactgttcatctacctttcgagggcggaagtctcctacagatccccgtcaaggctcttaaatactcggtggatccgagtatcgtcaacatatccgacgagatggcgaaaaccgcacagtggaaggccctgtccatgaacacggagaatgctaaagttaccaggtcgaacatgagccctgataaacctgtgagtgttaagatctcttttgaggatgaacctaggaagaaatacgtggacgcagaaaccagcttgtag

SEQ ID NO: 328682 - DNA, 3408 bp, Artificial Sequence
  derived and/or modified sequence
atggaggccgatggggcaggagaacaaatgcgcccactgctcacccgcgtgacctccaggggacccgacgaggaggctgtcgtagacctgggcaaaacatcttctactgtgaacactaaatttgaaaaagaggaactggagagccaccgcgctgtgtatattggggtgcatgtgcccttcagcaaagaatccagacggcgtcaccgtcatcggggacacaaacatcatcatcggcgtcgtaaggataaggaaagtgataaggaggacggaagagagtcccccagctatgacaccccatcgcagcgggtgcagtttattctcgggacagaggatgatgatgaggagcatattccccacgatctttttaccgaaatggacgagctttgctacagagacggcgaagaatacgagtggaaagagaccgccaggtggctgaaattcgaggaagatgtggaggatggaggcgatagatggtccaagccatatgtggccaccctatccttgcactccctgttcgagctgcgctcgtgtatcctcaacgggaccgtcatgttagacatgagagcttccacactggatgagatcgcagacatggtgctggataatatgatcgcctctgggcagctggacgaatcaatccgagaaaatgtcagggaggcgttactaaaaagacaccatcaccagaatgaaaaacgtttcacttcacgcatcccccttgttcggtcatttgctgacattggaaagaagcattccgacccacacctcttggaaaggaatgggatactggccagtcctcagtcagccccaggcaacctggacaactctaaaagcggagaaattaaaggtaacggatctgggggttccagagagaacagcaccgtggatttttccaaggttgatatgaattttatgaggaaaatcccaaccggagcagaggcctccaacgtgctcgttggagaagtggacttcctggaaaggccgatcattgcatttgtgcggctcgcccctgcagtcctgcttaccggcctgacagaagtgccggtgccaacccgattcctctttctcctgctgggtccagccggtaaggcgccacagtatcatgagatcggcaggagcatagcaacccttatgactgatgagatcttccacgacgtagcctacaaggccaaggaccggaacgacttattatctgggattgacgagttcctggatcaagtgacggttctgcctcccggtgaatgggacccttcaatccgtatcgagcccccaaagtctgtacccagccaagaaaagaggaagataccagttttccataacggaagtactccaacacttggcgaaactcccaaggaagctgcgcaccacgccggtcccgaacttcaaaggacaggcaggctgttcggtggtctgatcctggatatcaagagaaaagctccctttttcctgagcgacttcaaggacgcactgtcattgcaatgccttgcaagtatcttgtttctgtactgcgcttgcatgtcaccagtcattacattcggtggccttttgggtgaagccactgaggggcgtatatctgctattgaatccttattcggcgcttcacttacagggatcgcttacagtctttttgcaggccaaccactgaccatcctgggatccactggacctgtcttagttttcgaaaagattttatacaagttctgtagggactaccagctgagctatttgtcattgagaacaagcattgggttgtggacgtcatttctgtgtattgtcctggtcgctaccgacgcaagtagcttagtatgctacattacccgctttacagaggaggcctttgctgcactgatttgtattatttttatttacgaagccctggagaaactgttcgatcttggggagacctatgccttcaacatgcataacaatctggacaagctaactagctatagctgtgtctgcaccgagccccctaatcctagcaatgagactctggcccaatggaagaaggacaacatcactgcgcataatatctcctggcgcaacctcacagtgagcgaatgtaaaaagctccgcggagtctttcttgggtctgcatgcggccaccacggtccctatatcccggacgttttgttctggtgcgtcatcctcttcttcactacattctttcttagttcttttttaaagcagttcaaaactaaacgatatttcccaactaaggtcaggtccaccatatctgacttcgcggtattccttactatagtgatcatggtgacaatcgattacctggtgggcgtccctagccccaaacttcacgttccagaaaagttcgaaccaacgcatccagaacgcggatggatcatttcaccactgggcgacaatccctggtggacactgctcatcgccgctatccctgccctgctgtgcacgattctgattttcatggatcagcagatcacagccgtcatcatcaaccggaaagagcacaagctgaaaaaaggtgctggctaccacttggacctactgatggtgggcgtgatgctgggcgtatgctccgtgatgggactgccatggttcgttgccgctacagtcctctcgatatcacatgtcaattcgttaaaagtcgaaagcgagtgttcagccccaggagaacagccgaagtttttgggtataagagaacagagagtgaccggacttatgattttcatattgatgggactgtctgtgtttatgaccagcgtgctcaaattcatccccatgccagtcctgtacggagtttttctgtatatgggcgtttcaagcttaaagggtatccagctgttcgacagaattaagctttttgggatgccggcaaagcaccagcccgatttgatatatctgcgatatgttcctctatggaaggtgcacatttttacagttattcagttgacttgcttagtgcttctgtgggtgataaaggttagcgcagccgctgttgtgttcccaatgatggtactcgcgctcgtgtttgtgcgcaagctgatggacttatgttttacaaagcgggagctgagctggctggacgatctgatgcccgaatctaagaaaaagaaggaggacgataaaaagaagaaggagaaggaggaagccgaaaggatgctgcaggatgatgatgatacggtgcaccttccctttgaaggtggcagtctcttacaaataccggtgaaggcactgaaatactcagtcgacccatccatcgtgaatatctcagacgaaatggccaagacggcccagtggaaagctttatccatgaataccgaaaacgcaaaagttacccgctctaacatgagtcccgataagccagtgagcgtgaaaatcagcttcgaagatgaacctcggaaaaagtatgtggacgcggagacaagtctgtag

SEQ ID NO: 328683 - DNA, 3787 bp, Artificial Sequence
  derived and/or modified sequence
cctactaaagccagcccagcagtcgcagcgcgcacacgcacgccccgcgtctcccgcgcccggcgcccggctctccccacgcgcgcacacctcgcgcacggacgcacccacgtttgtcctcgcgcgccgggggctcggcggcggcggcaggggcagcggcagaagcaggcagaccgcgcggggcagtaccgtagcggccgtcacgggctggccggccggccatggaggctgatggggccggcgagcagatgagaccgctactcacccgggtaacgagcaggggtcctgatgaagaagctgttgtggatcttggcaaaactagctcaactgtgaacaccaagtttgaaaaagaagaactagaaagtcatagagctgtatatattggtgttcacgtcccgtttagtaaagagagtcgtcggcgtcataggcatcgcggacacaaacatcaccaccggagaagaaaagataaagaatcagataaagaagatggacgggaatctccttcttatgatacaccatcccagagagttcagtttatccttggtactgaagatgatgatgaagaacatattccccatgatctcttcacggaaatggatgaactgtgttacagagatggagaagaatatgaatggaaagaaactgctagatggctgaaatttgaagaggatgttgaagatggcggtgaccgatggagtaaaccttatgtggcaactctctctttgcacagtctttttgaactaaggagttgcatcctcaatggaacagtcatgctggatatgagagcaagcactctagatgaaatagcagatatggtattagacaacatgatagcttctggccaattagacgagtccatacgagagaatgtcagagaagctcttctgaagagacatcatcatcagaatgagaaaagattcaccagtcggattcctcttgttcgatcttttgcagatataggcaagaaacattctgaccctcacttgcttgaaaggaatggtattttggcctctccccagtctgctcctggaaacttggacaatagtaaaagtggagaaattaaaggtaatggaagtggtggaagcagagaaaatagtactgttgacttcagcaaggttgatatgaatttcatgagaaaaattcctacgggtgctgaggcatccaacgtcctggtgggcgaagtagactttttggaaaggccaataattgcatttgtgagactggctcctgctgtcctccttacagggttgactgaggtccctgttccaaccaggtttttgtttttgttattgggtccagcgggcaaggcaccacagtaccatgaaattggacgatcaatagccactctcatgacagatgagattttccatgatgtagcttataaagcaaaagacagaaatgacctcttatctggaattgatgaatttttagatcaagtaactgtcctacctccaggagagtgggatccttctatacgcatagaaccaccaaaaagtgtcccttctcaggaaaagagaaagattcctgtgtttcacaatggatctacccccacactgggtgagactcctaaagaggccgctcatcatgctgggcctgagctacagaggactggacggctttttggtggtttgatacttgacatcaaaaggaaagcaccttttttcttgagtgacttcaaggatgcattaagcctgcagtgcctggcctcgattcttttcctatactgtgcctgtatgtctcctgtaatcacttttggagggctgcttggagaagctacagaaggcagaataagtgcaatagagtctctttttggagcatcattaactgggattgcctattcattgtttgctgggcaacctctaacaatattggggagcacaggtccagttctagtgtttgaaaaaattttatataaattctgcagagattatcaactttcttatctgtctttaagaaccagtattggtctgtggacttcttttttgtgcattgttttggttgcaacagatgcaagcagccttgtgtgttatattactcgatttacagaagaggcttttgcagcccttatttgcatcatattcatctacgaggctttggagaagctctttgatttaggagaaacatatgcatttaatatgcacaacaacttagataaactgaccagctactcatgtgtatgtactgaacctccaaaccccagcaatgaaactctagcacaatggaagaaagataatataacagcacacaatatttcctggagaaatcttactgtttctgaatgtaaaaaacttcgtggtgtattcttggggtcagcttgtggtcatcatggaccttatattccagatgtgctcttttggtgtgtcatcttgtttttcacaacattttttctgtcttcattcctcaagcaatttaagaccaagcgttactttcctaccaaggtgcgatcgacaatcagtgattttgctgtatttctcacaatagtaataatggttacaattgactaccttgtaggagttccatctcctaaacttcatgttcctgaaaaatttgagcctactcatccagagagagggtggatcataagcccactgggagataatccttggtggaccttattaatagctgctattcctgctttgctttgtaccattctcatctttatggatcaacaaatcacagctgtaattataaacagaaaggaacacaaattgaagaaaggagctggctatcaccttgatttgctcatggttggcgttatgttgggagtttgctctgtcatgggacttccatggtttgtggctgcaacagtgttgtcaataagtcatgtcaacagcttaaaagttgaatctgaatgttctgctccaggggaacaacccaagtttttgggaattcgtgaacagcgggttacagggctaatgatttttattctaatgggcctctctgtgttcatgacttcagtcctaaagtttattccaatgcctgttctgtatggtgttttcctttatatgggagtttcctcattaaaaggaatccagttatttgaccgtataaaattatttggaatgcctgctaagcatcagcctgatttgatatacctccgttatgtgccgctctggaaggtccatattttcacagtcattcagcttacttgtttggtccttttatgggtgataaaagtttcagctgctgcagtggtttttcccatgatggttcttgcattagtgtttgtgcgcaaactcatggacctgtgtttcacgaagagagaacttagttggcttgatgatcttatgccagaaagtaagaaaaagaaagaagatgacaaaaagaaaaaagagaaagaggaagctgaacggatgcttcaagatgatgatgatactgtgcaccttccatttgaagggggaagtctcttgcaaattccagtcaaggccctaaaatatagtgttgatccctcaattgttaacatatcagatgaaatggccaaaactgcacagtggaaggcactttccatgaatactgagaatgccaaagtaaccagatctaacatgagtcctgataaacctgtgagtgtgaaaataagttttgaagatgaaccaagaaagaaatacgtggatgctgaaacttcattatagaattgaaccaagaggcattatacatatagatatatacatatgtaatgtgtgcgtatcatgtcactatatataagaatattgtatgtcatgctgtttatgtgtgactaccgggtttttaaaagtagtgtctggagtttgtaatgagcaccgtggagact

SEQ ID NO: 328684 - protein, 212 aa, Artificial Sequence
  derived and/or modified sequence
MHWIHLQVLGSLLSAHRIITDSKQPFGDMTIKDYDNELLYMAHDLAVRLLPAFENTKTGIPYPRVNLKTGVPPDTNNETCTAGAGSLLVEFGILSRLLGDSTFEWVARRAVKALWNLRSNDTGLLGNVVNIQTGHWVGKQSGLGAGLDSFYEYLLKSYILFGEKEDLEMFNAAYQSIQNYLRRGREACNEGEGDPPLCQREHVQWAADEHLD

SEQ ID NO: 328685 - protein, 376 aa, Artificial Sequence
  derived and/or modified sequence
MGNSSEFQKAVKLVINTVSFDKDSTVQVFEATIRVLGSLLSAHRIITDSKQPFGDMTIKDYDNELLYMAHDLAVRLLPAFENTKTGIPYPRVNLKTGVPPDTNNETCTAGAGSLLVEFGILSRLLGDSTFEWVARRAVKALWNLRSNDTGLLGNVVNIQTGHWVGKQSGLGAGLDSFYEYLLKSYILFGEKEDLEMFNAAYQSIQNYLRRGREACNEGEGDPPLYVNVNMFSGQLMNTWIDSLQAFFPGLQVLIGDVEDAICLHAFYYAIWKRYGALPERYNWQLQAPDVLFYPLRPELVESTYLLYQATKNPFYLHVGMDILQSLEKYTKVKCGYATLHHVIDKSTEDRMESFFLSETCKYLYLVCVLQDEPRNI

SEQ ID NO: 328686 - DNA, 639 bp, Artificial Sequence
  derived and/or modified sequence
atgcactggatccacctgcaggtgctgggcagcctgctgagcgcccacagaatcatcaccgacagcaagcagcccttcggcgacatgaccatcaaggactacgacaacgagctgctgtacatggcccacgacctggccgtgagactgctgcccgccttcgagaacaccaagaccggcatcccctaccccagagtgaacctgaagaccggcgtgccccccgacaccaacaacgagacctgcaccgccggcgccggcagcctgctggtggagttcggcatcctgagcagactgctgggcgacagcaccttcgagtgggtggccagaagagccgtgaaggccctgtggaacctgagaagcaacgacaccggcctgctgggcaacgtggtgaacatccagaccggccactgggtgggcaagcagagcggcctgggcgccggcctggacagcttctacgagtacctgctgaagagctacatcctgttcggcgagaaggaggacctggagatgttcaacgccgcctaccagagcatccagaactacctgagaagaggcagagaggcctgcaacgagggcgagggcgacccccccctgtgccagagagagcacgtgcagtgggccgccgacgagcacctggactag

SEQ ID NO: 328687 - DNA, 1131 bp, Artificial Sequence
  derived and/or modified sequence
atgggcaacagcagcgagttccagaaggccgtgaagctggtgatcaacaccgtgagcttcgacaaggacagcaccgtgcaggtgttcgaggccaccatcagagtgctgggcagcctgctgagcgcccacagaatcatcaccgacagcaagcagcccttcggcgacatgaccatcaaggactacgacaacgagctgctgtacatggcccacgacctggccgtgagactgctgcccgccttcgagaacaccaagaccggcatcccctaccccagagtgaacctgaagaccggcgtgccccccgacaccaacaacgagacctgcaccgccggcgccggcagcctgctggtggagttcggcatcctgagcagactgctgggcgacagcaccttcgagtgggtggccagaagagccgtgaaggccctgtggaacctgagaagcaacgacaccggcctgctgggcaacgtggtgaacatccagaccggccactgggtgggcaagcagagcggcctgggcgccggcctggacagcttctacgagtacctgctgaagagctacatcctgttcggcgagaaggaggacctggagatgttcaacgccgcctaccagagcatccagaactacctgagaagaggcagagaggcctgcaacgagggcgagggcgacccccccctgtacgtgaacgtgaacatgttcagcggccagctgatgaacacctggatcgacagcctgcaggccttcttccccggcctgcaggtgctgatcggcgacgtggaggacgccatctgcctgcacgccttctactacgccatctggaagagatacggcgccctgcccgagagatacaactggcagctgcaggcccccgacgtgctgttctaccccctgagacccgagctggtggagagcacctacctgctgtaccaggccaccaagaaccccttctacctgcacgtgggcatggacatcctgcagagcctggagaagtacaccaaggtgaagtgcggctacgccaccctgcaccacgtgatcgacaagagcaccgaggacagaatggagagcttcttcctgagcgagacctgcaagtacctgtacctggtgtgcgtgctgcaggacgagcccagaaacatctag

SEQ ID NO: 328688 - DNA, 1363 bp, Artificial Sequence
  derived and/or modified sequence
acgcgcttccttccgccctccgcgccggggtgcagccctctgtcctccggggcccccgagggcgccagggccgttagggtcccgggcagcgctcccgcgccctgtcccgtttcaaatctgaacatcaatgatgtactagggaactactcattgactcttgttgatgcattggatacacttgcaataatgggaaattcatccgagttccagaaagccgtcaagttagtgatcaacacagtttcatttgacaaagattccaccgtccaagtctttgaggccacgataagggtcctgggaagcctcctttctgctcacagaataataactgactccaagcagccctttggtgacatgacaattaaggactatgataatgagttgttatacatggcccatgacctggcggtgcggctcctccctgcttttgaaaacaccaagacagggattccatatcctcgggtgaatctaaagacaggagttcctcctgacaccaataatgagacatgcacagcgggagccggttccctcctggtggaatttgggattctgagtcgactcctgggggactccacatttgagtgggtggccagacgagcagtgaaagccctttggaacctccggagcaatgatacaggattactaggcaatgtcgtgaacattcagacgggccactgggttggaaagcagagtggcctgggtgccgggctggactccttctatgaatacctcttgaaatcttacattctctttggagaaaaagaagacctagaaatgtttaatgctgcatatcagagtattcagaactacttaagaagagggcgggaagcctgcaatgaaggagaaggagaccctccactctatgtcaacgtgaacatgttcagtgggcagctgatgaacacctggattgactctctgcaggcctttttccctggactgcaggtgctgataggagatgtggaagatgccatctgccttcatgccttctactatgccatatggaaacgatatggtgccctccctgagagatataactggcagctgcaggcccctgacgttctcttctacccactgagaccagagttagtggaatccacatatctcctctaccaggcaaccaagaatcccttctacctccatgtaggaatggatattctgcagagtctggaaaagtacacaaaagtcaagtgtgggtacgccacgctgcatcacgtcattgacaagtccacagaagaccggatggagagcttctttctcagtgagacctgtaaatatttgtatctggtatgtgtgttgcaagatgaacccaggaatatttagtattgcttagagcaagcattcgcatagtcttccatctgacaggtac

SEQ ID NO: 328689 - DNA, 639 bp, Artificial Sequence
  derived and/or modified sequence
atgcactggattcatcttcaggtgcttgggtcattgctctcagcccaccggatcatcacagattcaaaacagccctttggcgacatgaccatcaaggattacgacaatgaactgctttatatggcacatgatcttgcggtaaggctcctgccggcctttgagaatacaaaaacggggattccataccctagagtgaatctgaaaaccggcgtgccccctgacaccaataacgagacatgcaccgccggagccggctccctgcttgtcgagttcggaatcctcagccgactgttgggggactcgacgtttgagtgggtagcccgccgcgcagtaaaagccctgtggaatctccgatccaatgatactggcctcctcggtaatgtcgttaacattcaaacaggccactgggtgggcaagcaatcagggctcggcgcaggactggattctttctacgaataccttcttaaaagctacattctatttggcgagaaagaagatctggaaatgttcaatgcggcataccagtcgatccagaactatctacgacgcggtcgagaggcatgcaatgagggggagggggacccaccactttgccagagagagcacgtccagtgggccgccgacgagcacttagactag

SEQ ID NO: 328690 - DNA, 1131 bp, Artificial Sequence
  derived and/or modified sequence
atggggaattccagtgagttccagaaggcagtcaagcttgtaataaacacagtgagcttcgataaagactccacggtacaggtgttcgaagcgacgattagagttttgggatcgctcttgtctgcacatcgaatcattaccgactccaaacagccctttggcgatatgactataaaagactacgataacgagctcctgtacatggcacacgacctggctgtaagactactccccgccttcgaaaatacaaagaccggcattccttacccaagggttaatctgaaaactggcgtgccacccgacacaaataacgagacatgcacagcgggcgccggctccctgttggttgagttcggcatcttgtcaaggttgctaggagatagcacattcgagtgggtggcaagacgggcagtcaaggcactctggaacttgagatccaacgacactggactcctgggcaatgtggtcaatatccagacaggccactgggtgggcaaacagtccggcctcggcgccggactggactcgttctatgagtaccttttaaaaagttatattctgttcggtgagaaagaggacttagagatgttcaatgctgcgtaccagagcattcagaattatctgaggcggggacgggaagcatgtaacgaaggcgaaggggacccccctctctacgtgaatgttaatatgttcagcgggcagctgatgaacacctggattgattccctccaggccttcttccctggcttgcaagtcctgatcggagacgtcgaagatgcaatctgtctgcacgccttttactacgccatctggaagaggtatggcgcgttgccggaacgttacaactggcagttgcaggctccggacgtcttgttctacccactccggcccgagctagtggagagtacctatctgctataccaggccaccaaaaacccattctacctccatgtcggcatggacattctgcagagtcttgagaaatacaccaaagtgaagtgcggctacgccaccctgcatcacgtcattgacaaaagtaccgaagaccgtatggagtccttcttcctatctgaaacttgtaaatatctgtatcttgtttgtgtcctgcaggacgagccccgcaacatctag

SEQ ID NO: 328691 - DNA, 639 bp, Artificial Sequence
  derived and/or modified sequence
atgcactggatccacctgcaggtgctgggcagcctgctgagcgcccaccgcatcatcacagacagcaagcagccctttggagacatgaccatcaaggactatgacaatgagctgctgtacatggcccatgacctggccgtgcggctgctgcctgcctttgagaacaccaagacaggcatcccctacccccgggtgaacctgaagacaggagtgcccccagacaccaacaatgagacctgcacagctggggccggcagcctgctggtggagtttggcatcctgagccggctgctgggggacagcacctttgagtgggtggcccggcgggctgtgaaggccctgtggaacctgcggagcaatgacaccggcctgctgggcaatgtggtgaacatccagacaggccactgggtgggcaagcagagcggcctgggcgccggcctggacagcttctatgagtacctgctgaagagctacatcctgtttggagagaaggaggacctggagatgtttaatgctgcctaccagagcatccagaactacctgcggcggggccgggaggcctgcaatgaaggagagggggacccccccctgtgccagcgggagcacgtgcagtgggccgcagatgagcacctggactag

SEQ ID NO: 328692 - DNA, 1131 bp, Artificial Sequence
  derived and/or modified sequence
atgggcaacagcagcgagttccagaaggctgtgaagctggtgatcaacacagtgtcctttgacaaggacagcacagtgcaggtgtttgaggccaccatccgggtgctgggcagcctgctgagcgcccaccgcatcatcacagacagcaagcagccctttggagacatgaccatcaaggactatgacaatgagctgctgtacatggcccatgacctggccgtgcggctgctgcctgcctttgagaacaccaagacaggcatcccctacccccgggtgaacctgaagacaggagtgcccccagacaccaacaatgagacctgcacagctggagctggcagcctgctggtggagtttggcatcctgagccggctgctgggggacagcacctttgagtgggtggccaggagagctgtgaaggccctgtggaacctgcggagcaatgacaccggcctgctgggcaatgtggtgaacatccagacaggccactgggtgggcaagcagagcggcctgggcgccggcctggacagcttctatgagtacctgctgaagagctacatcctgtttggagagaaggaggacctggagatgtttaatgctgcctaccagagcatccagaactacctgcggcggggccgggaggcctgcaatgaaggagagggggacccccccctgtatgtgaatgtgaacatgttcagcggccagctgatgaacacctggattgacagcctgcaggccttcttccctggcctgcaggtgctgattggagatgtggaggatgccatctgcctgcacgccttctactatgccatctggaagcgctacggggccctgcctgagcgctacaactggcagctgcaggccccagatgtgctcttctaccccctgcggcctgagctggtggagagcacctacctgctgtaccaggccaccaagaaccccttctacctgcacgtgggcatggacatcctgcagagcctggagaagtacaccaaggtgaagtgtggctacgccaccctgcaccacgtgattgacaagagcacagaggacaggatggagagcttcttcctgtctgagacctgcaagtacctgtacctggtgtgtgtgctgcaggatgagcccaggaacatctag

SEQ ID NO: 328693 - DNA, 639 bp, Artificial Sequence
  derived and/or modified sequence
atgcactggatccacctgcaggtgctgggcagcctgctgagcgcccaccgcattataaccgactccaagcagcccttcggcgatatgacaattaaagattatgataatgagctcctgtatatggcccacgacctggccgtacgactgttgccagcctttgagaacacgaaaaccggaatcccctatccgcgtgtgaatcttaagaccggggtcccaccagataccaataatgaaacttgtacagccggtgcgggtagcctgctcgtcgaatttggaattctgagtaggctgttaggcgactccacttttgagtgggtggcacgtagagccgtgaaggcactgtggaaccttcgctcaaacgacactgggctacttgggaacgtggtgaatattcaaactgggcactgggttggtaagcaatctggtctgggcgccggcctcgattctttttacgagtatctgctcaagagttacattctcttcggcgaaaaagaagaccttgaaatgttcaacgctgcctaccaaagcattcagaactatctgaggcgaggacgcgaggcatgcaatgaaggggaaggagatccccctctgtgccaacgcgagcatgttcagtgggctgccgatgagcatcttgactag

SEQ ID NO: 328694 - DNA, 1131 bp, Artificial Sequence
  derived and/or modified sequence
atgggcaacagcagcgagttccagaaggccgtgaagctggtgatcaacaccgttagtttcgacaaggacagcaccgttcaggttttcgaagctacaattcgcgtgttaggctctctgcttagcgcccatcgaatcataacagactctaaacagcctttcggagacatgaccataaaagactatgacaacgagttactttacatggcgcacgatctggctgtgcggttactccccgcatttgagaataccaagaccggcattccctacccccgcgttaatctgaagacaggggtgcctccggacaccaataacgagacctgcacagcgggagctggaagccttctggtggaatttggtattctgagccggcttctaggagacagtacattcgaatgggtggcacggcgggcagtgaaggccctctggaacctgaggtccaatgatactggcctgcttggcaacgttgtgaacatacagaccgggcattgggtcggaaaacagagtggcctcggtgcggggctggatagcttctacgaatacctgctcaagtcctacatcctatttggggagaaggaggacctggagatgttcaacgccgcctatcagagcattcagaactacctgcgacggggacgggaggcttgtaatgaaggagagggggaccccccactctatgtgaatgtcaacatgttctcagggcagttgatgaacacttggattgacagtctacaggcgttttttccagggttgcaggtcttgataggagacgtggaagacgcgatctgtcttcatgcattctattacgccatttggaagaggtacggcgctctgcccgaaaggtacaattggcagctgcaggcccctgatgtcttgttctacccgctgcgcccagagctcgtggagtcgacctacctgctgtaccaggccactaaaaacccattctacctgcacgtgggcatggacattctacaaagtttggaaaaatacaccaaggttaagtgcgggtatgctacactccatcacgtcatagataagtcaaccgaggatcgcatggagtctttctttcttagtgagacttgcaaatacctctacctcgtgtgtgtcctgcaggacgagccccgcaacatatag

SEQ ID NO: 328695 - DNA, 639 bp, Artificial Sequence
  derived and/or modified sequence
atgcactggattcatctgcaggtcctgggttctctgctgtctgcccacaggatcattacagatagcaagcagcctttcggtgacatgaccataaaagactacgacaatgagttgctctatatggcccatgacctggcagtccgactcttgcctgctttcgaaaatacgaagacaggcatcccctatcccagagttaacctgaaaactggggttccacccgataccaataacgaaacctgcaccgccggagctggatctctgctggtggaattcggcattctgtctagactgctgggggacagtacatttgagtgggtggcacggagggccgtaaaggccctgtggaatctgcggagcaacgacacaggcctgctggggaatgttgttaacatccaaaccggccactgggtgggcaaacaatctgggctgggcgctggccttgattccttttacgagtaccttcttaagtcttatatcctgtttggggaaaaggaagatctcgagatgtttaatgcagcgtaccagtccatccagaattacctgagacgaggtagagaagcctgcaatgaaggagagggagatccgccattgtgccagcgcgagcacgtgcaatgggcagctgatgagcacttggattag

SEQ ID NO: 328696 - DNA, 1131 bp, Artificial Sequence
  derived and/or modified sequence
atgggcaactctagtgaattccaaaaagcagtgaagctggtcatcaatacggtgtctttcgataaagacagcacagtgcaggtgttcgaagctactattcgcgtactgggcagtttactgtctgcacataggatcataactgattcaaagcagccatttggtgatatgaccataaaggactacgataacgaactgttgtacatggctcatgacctagcagttaggttactgcccgcttttgagaataccaaaacggggattccatacccacgggtgaacctaaaaacaggggttccacctgataccaacaatgagacctgcacggccggtgcgggaagcctgctggtggagtttgggatcctgagccgcctgctgggagactccacttttgaatgggtcgcccgacgggctgtgaaggccttgtggaacttgaggtcgaatgatactggtttgctgggaaacgtcgtaaatatacagaccggacactgggtaggcaaacagtcaggactgggagctggattagactcattctatgaatatctgctgaagagctacatcctcttcggggagaaggaggacttggagatgttcaatgcagcctatcaatcaattcagaattacctgcggcgaggaagagaggcatgtaacgagggagagggcgacccccctctttatgtcaatgtgaatatgttctccggccagctgatgaatacgtggatcgactctcttcaggcttttttccctggcttacaggtgcttataggcgatgtggaggatgctatctgcttgcatgccttctactatgctatctggaagcgctacggggctctccctgaaaggtataactggcagctgcaggctcccgatgtgctgttttatccactccggcctgagctagttgagagcacatatctactttaccaagcaaccaagaaccctttctacttacacgtaggtatggatatactccagtccctcgaaaagtatactaaggttaagtgcggctatgccaccttacaccacgttatagataagagtacggaagatcgaatggagtcattcttcctatcagagacctgtaaatacttgtacttggtgtgcgtgctgcaagatgaaccgcgtaatatttag

SEQ ID NO: 328697 - protein, 376 aa, Artificial Sequence
  derived and/or modified sequence
MTTVVVHVDSKAELTTLLEQWEKEHGSGQDMVPILTRMSQLIEKETEEYRKGDPDPFDDRHPGRADPECMLGHLLRILFKNDDFMNALVNAYVMTSREPPLNTAACRLLLDIMPGLETAVVFQEKEGIVENLFKWAREADQPLRTYSTGLLGGAMENQDIAANYRDENSQLVAIVLRRLRELQLQEVALRQENKRPSPRKLSSEPLLPLDEEAVDMDYGDMAVDVVDGDQEEASGDMEISFHLDSGHKTSSRVNSTTKPEDGGLKKNKSAKQGDRENFRKAKQKLGFSSSDPDRMFVELSNSSWSEMSPWVIGTNYTLYPMTPAIEQRLILQYLTPLGEYQELLPIFMQLGSRELMMFYIDLKQTNDVLLTFEALK

SEQ ID NO: 328698 - DNA, 1131 bp, Artificial Sequence
  derived and/or modified sequence
atgaccaccgtggtggtgcacgtggacagcaaggccgagctgaccaccctgctggagcagtgggagaaggagcacggcagcggccaggacatggtgcccatcctgaccagaatgagccagctgatcgagaaggagaccgaggagtacagaaagggcgaccccgaccccttcgacgacagacaccccggcagagccgaccccgagtgcatgctgggccacctgctgagaatcctgttcaagaacgacgacttcatgaacgccctggtgaacgcctacgtgatgaccagcagagagccccccctgaacaccgccgcctgcagactgctgctggacatcatgcccggcctggagaccgccgtggtgttccaggagaaggagggcatcgtggagaacctgttcaagtgggccagagaggccgaccagcccctgagaacctacagcaccggcctgctgggcggcgccatggagaaccaggacatcgccgccaactacagagacgagaacagccagctggtggccatcgtgctgagaagactgagagagctgcagctgcaggaggtggccctgagacaggagaacaagagacccagccccagaaagctgagcagcgagcccctgctgcccctggacgaggaggccgtggacatggactacggcgacatggccgtggacgtggtggacggcgaccaggaggaggccagcggcgacatggagatcagcttccacctggacagcggccacaagaccagcagcagagtgaacagcaccaccaagcccgaggacggcggcctgaagaagaacaagagcgccaagcagggcgacagagagaacttcagaaaggccaagcagaagctgggcttcagcagcagcgaccccgacagaatgttcgtggagctgagcaacagcagctggagcgagatgagcccctgggtgatcggcaccaactacaccctgtaccccatgacccccgccatcgagcagagactgatcctgcagtacctgacccccctgggcgagtaccaggagctgctgcccatcttcatgcagctgggcagcagagagctgatgatgttctacatcgacctgaagcagaccaacgacgtgctgctgaccttcgaggccctgaagtag

SEQ ID NO: 328699 - DNA, 1131 bp, Artificial Sequence
  derived and/or modified sequence
atgacgactgtggtggtgcatgtcgattccaaggcagagctaactacacttttggaacagtgggaaaaggaacacggaagcggccaggacatggtgcccattttgaccagaatgagccaacttatagaaaaggagaccgaggagtaccgcaaaggggacccagaccctttcgacgaccgacaccccgggcgagctgacccagagtgcatgctaggccatctactccggattctgtttaagaatgacgactttatgaacgcactcgtgaatgcatacgttatgactagcagagagcctccacttaacactgcagcctgccgcttgttgctggacatcatgcccggcttggagactgcagtggtgtttcaggagaaggagggcatagtagaaaatctcttcaagtgggcaagagaagcggaccagccattgaggacatattccacggggctgctggggggcgccatggagaatcaggacatcgcagccaattatcgagatgaaaatagccaattagtcgccatcgtgctgcgcaggctgcgcgagttacagctccaagaggtagctctgagacaggaaaacaagaggccttctccacgcaaactgagtagcgaaccactcctgcctcttgacgaggaagccgttgacatggattacggagacatggcagtcgacgtggtggatggagatcaggaggaggcgagcggtgacatggaaatatcttttcacctcgactcaggccacaagactagcagcagggtgaactccactactaaaccagaagatgggggtctgaaaaagaataagtccgccaaacagggagatagagagaattttaggaaggccaaacaaaaacttggtttctcatcgtccgatcctgataggatgttcgtagagctgtctaactcttcttggtcagaaatgtccccttgggtgatcgggaccaactacactctgtatcccatgactcctgccattgaacagaggcttattttacagtatctcactcctttgggcgagtaccaggaactgctgccaatctttatgcaactgggctccagggagttgatgatgttttacattgaccttaagcagacaaacgacgtgcttctgaccttcgaggccttgaagtag

SEQ ID NO: 328700 - DNA, 1131 bp, Artificial Sequence
  derived and/or modified sequence
atgaccaccgtggtggtgcacgtggacagcaaggccgagctgaccaccctgctggagcagtgggagaaggagcacggcagcggccaggacatggtgcccatcctgaccaggatgagccagctgattgagaaggagacagaggagtacagaaaaggagaccctgacccctttgatgacagacaccctggccgggctgaccctgagtgcatgctgggccacctgctgcgcatcctcttcaagaatgatgacttcatgaatgccctggtgaatgcctacgtgatgaccagccgggagccccccctgaacacagctgcctgccgcctgctgctggacatcatgcctggcctggagacagctgtggtgttccaggagaaggagggcatcgtggagaacctcttcaagtgggcccgggaggccgaccagcccctgcggacctacagcacaggcctgctgggcggggccatggagaaccaggacattgctgccaactacagagatgagaacagccagctggtggccatcgtgctgcggcggctgcgggagctgcagctgcaggaggtggccctgcggcaggagaacaagaggcccagccccaggaagctgagcagcgagcccctgctgcccctggatgaggaggccgtggacatggactatggagacatggctgtggatgtggtggatggagaccaggaggaggccagcggggacatggagatctccttccacctggacagcggccacaagaccagcagccgggtgaacagcaccaccaagccagaagatggcggcctgaagaagaacaagagcgccaagcagggcgaccgggagaacttcaggaaggccaagcagaagctgggcttcagcagcagtgaccctgacaggatgtttgtggagctgagcaacagctcctggagcgagatgagcccctgggtgattggcaccaactacaccctgtaccccatgaccccagccatcgagcagaggctcatcctgcagtacctgacccccctgggggagtaccaggagctgctgcccatcttcatgcagctgggcagccgggagctgatgatgttctacatcgacctgaagcagaccaatgatgtgctgctgacctttgaggccctgaagtag

SEQ ID NO: 328701 - DNA, 1131 bp, Artificial Sequence
  derived and/or modified sequence
atgaccaccgtggtggtgcacgtggacagcaaggccgagctgaccaccctgttggaacagtgggagaaggagcatggttcaggccaggacatggtgccaatcttaacccggatgtcccagctcatcgagaaagagactgaagagtatcgcaaaggcgatccagacccttttgatgatcggcatcctggacgggccgatcctgagtgcatgctcggtcatctgctacggatactttttaagaatgacgactttatgaacgcgcttgttaatgcatatgtgatgacatcccgggaaccaccattaaacactgcggcttgtaggctccttttagacattatgccagggctggagactgctgtggtgttccaagagaaggagggcattgtcgagaatttatttaaatgggcaagagaggctgaccaacctctgcgcacatacagtaccggtctgctcggtggggcaatggagaaccaggacatcgcagccaactatagagacgaaaactcccagctggtggccatcgtgctcaggcgcctgcgtgagctgcagctccaagaagttgctctgaggcaggaaaacaagcgaccatcacccaggaagttgtcttctgaacccctcctgccattggacgaggaggccgtggatatggactatggcgacatggctgtggatgtagtcgacggcgaccaggaggaggccagtggagacatggagatatcattccatttagacagtggtcataaaaccagttcccgtgtgaactccactactaagcctgaggatggggggcttaagaagaataagtcggccaagcaaggggatcgcgaaaattttagaaaggctaagcaaaagctgggctttagcagctccgacccagatcggatgttcgtggagttgtccaattcttcttggtctgaaatgagcccatgggtgattggcaccaactacaccctgtatcccatgacccctgcaattgaacagagactgatcctgcaatacctaactcctctcggtgaataccaggagttgctccctatattcatgcagctgggttccagagagttgatgatgttttatatagacctaaaacagacaaacgatgtcctcctgacctttgaggctctaaagtag

SEQ ID NO: 328702 - DNA, 1131 bp, Artificial Sequence
  derived and/or modified sequence
atgacaactgtcgtggtccacgtggactccaaagctgagctcaccaccttgctcgaacaatgggaaaaagaacacggcagtgggcaagatatggttcccatcctaacgaggatgagtcaattgattgagaaggagactgaagagtataggaaaggtgacccagacccttttgatgataggcacccaggcagagccgaccctgagtgcatgttgggtcatttgctgcgcattctcttcaagaacgatgacttcatgaatgccctggtgaacgcatacgtgatgacatcaagagagcctccactgaacaccgctgcctgccgccttcttctcgatattatgcccggtcttgaaaccgccgttgtctttcaggaaaaggaaggcatcgtggagaatctattcaagtgggcacgggaggccgaccagcctctccggacctacagcacaggcctgctgggcggagccatggaaaatcaggatatagctgccaactaccgagacgaaaatagccaactcgtcgccattgtcttacgacggctgcgcgaactgcagctgcaggaagttgccttacgccaggaaaataagcgcccaagtcctagaaaattgagcagcgagcctctactcccccttgacgaggaggccgttgatatggactacggagacatggcggtggacgtcgttgatggcgaccaggaggaagcgagcggggatatggaaatcagcttccaccttgacagcggacacaaaactagcagccgcgtgaattccactaccaaacctgaagacggtggactgaagaagaataagtcagctaagcagggagatagagagaatttcaggaaagcaaagcaaaagcttggcttcagttccagtgaccccgaccgaatgttcgtggagctttctaactcctcatggagcgagatgtcaccttgggtgattggtaccaattatacgctctaccccatgactccagctattgaacaaagactcattttgcagtacctgaccccactgggagaataccaggaactactacctatattcatgcagttaggatcacgcgagctaatgatgttttacattgatcttaagcagaccaacgacgtgctgctgacattcgaagctctcaagtag

SEQ ID NO: 328703 - DNA, 1258 bp, Artificial Sequence
  derived and/or modified sequence
agccgtggtcgcgctgtgtgtgtgtgtgagtggagagtgagtgcgggacctgaggctgtgtgtgtgtgaactgtggccactggcggggtcgggggggggcagcggcggagccgcctcggacggcaaagccatgactacagtagtggtacatgtggactccaaagctgagctcactaccctgctggagcagtgggaaaaggaacatggcagtgggcaggacatggtacctatccttaccaggatgtctcaattgattgaaaaagaaactgaagagtatcgtaaaggggatccagacccatttgatgatcgacatcctggtcgagctgatccagagtgtatgctgggccacttgctgagaatactcttcaagaatgatgatttcatgaatgcactggtgaatgcatatgtgatgacaagccgagagccccctttaaacactgcagcttgcagactcctattagacatcatgccagggctggaaactgctgtcgtctttcaagaaaaggagggaattgtcgagaatcttttcaaatgggcccgagaggccgatcaaccattgaggacatattctactggactgttaggaggtgctatggaaaatcaagacattgctgccaactatagagatgaaaattcacagctggtggcaatagtgcttcgaagactgagggagctacagctacaggaagtggctttgcggcaggaaaacaagcgtcccagtccacggaagctctcttctgaaccccttttgcctctggatgaggaggctgtggatatggactatggtgacatggctgtagatgtagtggatggagaccaagaggaagcttctggagacatggagatctcctttcatcttgattcaggccacaagactagtagcagagtgaactcaacaaccaaacctgaggatggaggattaaagaaaaacaagtcagcaaaacagggtgacagagagaactttaggaaagccaagcaaaagttgggtttctcatcttctgatccagatcgcatgtttgttgagctgtctaatagcagttggtcagaaatgtctccctgggtgattggcaccaattataccctttatcctatgactcctgctatcgagcagcgactcattctccaatatttgacccctctaggagaatatcaggagctacttcccatattcatgcaacttggatcacgggagctgatgatgttctatattgacctgaagcaaactaatgatgtcctgcttacatttgaggcactaaag

SEQ ID NO: 328704 - protein, 335 aa, Artificial Sequence
  derived and/or modified sequence
MNNVIVRLSQISEDVIRLFKKSKEIGLQMHEELLKVTNELYTVMKTYHMYHAESISAESKLKEAEKQEEKQFNKSGDLSMNLLRHEDRPQRRSSVKKIEKMKEKRQAKYSENKLKCTKARNDYLLNLAATNAAISKYYIHDVSDLIDCCDLGFHASLARTFRTYLSAEYNLETSRHEGLDVIENAVDNLDSRSDKHTVMDMCNQVFCPPLKFEFQPHMGDEVCQVSAQQPVQTELLMRYHQLQSRLATLKIENEEVRKTLDATMQTLQDMLTVEDFDVSDAFQHSRSTESVKSAASETYMSKINIAKRRANQQETEMFYFTKGPDDVFPICHPRL

SEQ ID NO: 328705 - DNA, 1008 bp, Artificial Sequence
  derived and/or modified sequence
atgaacaatgtgattgtgagactgtcccaaatttctgaagatgtgattaggttattcaaaaagtcaaaagagatcggactccaaatgcacgaggagctgctgaaggtgaccaatgaactatatacggtgatgaaaacgtatcatatgtaccacgctgaatccatatcggcggagtcaaagctgaaggaggctgagaaacaagaagaaaagcagtttaataaaagcggagacctttctatgaacctgctccggcacgaagatagaccccaacggcgctcgtctgtcaaaaagatcgaaaagatgaaagagaaacgccaggccaagtactccgaaaacaagttaaagtgtacaaaggcccgtaacgactacttactcaatctcgcagctacaaacgctgctatctccaagtactacatacacgacgtgtcagatctgattgattgctgcgacttgggctttcatgcatcattggctcgcaccttcagaacctacttaagcgctgagtataatctcgagacatcccggcacgaaggtctcgatgtgatagagaatgctgtcgacaacttggattctagaagtgataagcatactgtgatggacatgtgtaaccaagtattttgtcctccgcttaagtttgagtttcagcctcacatgggggacgaagtatgtcaggtgtccgctcagcagcctgtccagaccgagctcctcatgcgatatcatcagctacagagcagacttgctaccctcaagatagagaacgaggaggtgcggaagactctcgatgcaacaatgcagactctccaagacatgcttactgtggaggatttcgatgtaagtgatgcctttcagcactcccggagtaccgagtccgtgaaaagcgccgcaagtgagacctacatgagcaagatcaacatcgcaaaaaggagggcaaaccagcaggagaccgaaatgttctacttcacgaaaggacctgacgatgtattcccaatctgccatccccgattgtag

SEQ ID NO: 328706 - DNA, 1008 bp, Artificial Sequence
  derived and/or modified sequence
atgaacaacgtgattgtgcggctgagccagatcagtgaagatgtgatccgcctcttcaagaagagcaaggagatcggcctgcagatgcatgaggagctgctgaaggtgaccaatgagctgtacacagtgatgaagacctaccacatgtaccacgccgagagcatctctgctgagagcaagctgaaggaggccgagaagcaggaggagaagcagttcaacaagagcggggacctgtccatgaacctgctgcggcatgaggaccggccccagaggaggagctctgtgaagaagattgagaagatgaaggagaagaggcaggccaagtacagcgagaacaagctgaagtgcaccaaggccagaaatgactacctgctgaacctggccgccaccaatgctgccatcagcaagtactacatccatgatgtgtctgacctgattgactgctgtgacctgggcttccacgccagcctggcccggaccttccgcacctacctgtctgctgagtacaacctggagaccagcagacatgagggcctggatgtgattgaaaatgctgtggacaacctggacagcagaagtgacaagcacacagtgatggacatgtgcaaccaggtgttctgcccccccctgaagtttgagttccagccccacatgggagatgaggtgtgccaggtgtctgcccagcagcctgtgcagacagagctgctgatgagataccaccagctgcagagccggctggccaccctgaagattgaaaatgaggaggtgaggaagaccctggatgccaccatgcagaccctgcaggacatgctgactgtggaggactttgatgtgtctgatgccttccagcacagccgcagcacagagagcgtgaagtctgctgccagcgagacctacatgagcaagatcaacatcgccaagaggcgggccaaccagcaggagacagagatgttctacttcaccaagggcccagatgatgtgttccccatctgccacccccggctgtag

SEQ ID NO: 328707 - DNA, 1008 bp, Artificial Sequence
  derived and/or modified sequence
atgaacaacgtgatcgtgcggctgagccagatcagcgaggacgtgattcggttatttaaaaaatccaaagagattggcctccagatgcacgaggaactgctcaaagtcactaatgaactctacacggtgatgaagacctaccatatgtaccatgccgagtctatttccgccgaaagtaaactaaaggaggctgagaaacaggaagagaaacagtttaacaaatcgggcgatctgtccatgaaccttctgcggcacgaagaccgtccacagcgccgcagctccgttaaaaagattgagaaaatgaaagagaaaaggcaagctaaatactctgaaaataagcttaagtgcaccaaagcaaggaacgactatctgctgaacctggcggccacaaacgctgctatttctaagtactatatacacgatgtcagcgacctgattgattgttgcgatctgggattccacgcctctttggccaggacctttcgcacttatctctctgctgaatacaacctggagacttccaggcatgagggcctggacgtgattgaaaacgcagtcgataacttagatagcagatctgataagcataccgtgatggacatgtgcaaccaggtcttctgtccaccgttgaagttcgagtttcaacctcacatgggcgacgaggtttgtcaggtatctgctcagcagcccgtgcagaccgagttactgatgcgttaccatcagttgcagagcaggctggcaaccttgaagattgaaaatgaggaggtcaggaaaactttagacgcaactatgcagacattacaggacatgctgacagtagaagactttgacgtgtctgacgcattccagcacagtaggagtaccgagtccgttaagagcgcagcctcagagacctacatgtccaaaataaatattgcgaaacgtcgcgctaaccagcaagagacagaaatgttttatttcaccaaaggaccagacgatgtgttcccaatttgtcatcctagactctag

SEQ ID NO: 328708 - DNA, 1008 bp, Artificial Sequence
  derived and/or modified sequence
atgaacaacgttatcgtgagactctcacaaatttcagaggacgtgattcggctgttcaaaaaaagcaaagagattgggctgcaaatgcacgaggagctgctgaaagtaaccaatgagttgtataccgtcatgaaaacctatcacatgtatcacgctgagagtatttctgcagagtctaaactcaaggaagctgaaaagcaggaggagaagcagttcaacaagagcggggacctctctatgaacttgctgcgccacgaggacagaccccagaggcggtcgagcgtgaaaaagattgaaaagatgaaagagaaaagacaggctaaatattctgagaacaaactcaagtgtaccaaggcccgtaacgactaccttctaaacctggcggctaccaatgccgcaatctccaagtattacatccacgacgtgtccgacctgatcgattgttgtgatttaggattccatgcgtcacttgctcggacatttcgcacctatttatctgccgaatataatctggaaaccagccgtcatgagggcctggatgtcattgagaacgcggtcgataacttggatagtagatctgataagcatacagtgatggatatgtgcaatcaagtgttttgcccacccctgaagttcgagttccagccacatatgggagacgaagtttgccaggtatctgcacaacagccggtgcagaccgagctcctcatgcgctatcaccagttacagagcaggctcgcaacactgaagattgagaatgaggaggttagaaagactctggatgcgactatgcagactctgcaagatatgttaacagtcgaagactttgacgtgtctgatgcattccaacactccaggtctaccgagagcgttaagtcagctgcatctgagacatacatgagtaagatcaatatcgctaaacgcagggctaaccagcaggagaccgagatgttctatttcacgaaaggtccggatgatgtgttccccatatgccaccctagactgtag

SEQ ID NO: 328709 - DNA, 3929 bp, Artificial Sequence
  derived and/or modified sequence
gggccccagtgcccccgtccccaccaccagtctcatgctcctacccttgtgtgcccgcagagatccgcacgcagctggtggagcagttcaaatgtctggagcagcaatcagagtcgcgactgcagctgcttcaagacctccaggagtttttccgccggaaagctgagattgagctcgagtactcccgcagcctggagaagctggctgagcgcttctcctccaaaatccgcagctcccgggagcaccagttcaagaaggaccagtacctcctctcgcctgtgaactgttggtatctggttctgcatcagacccggcgggagagccgagaccatgccaccctcaatgacatcttcatgaacaatgtcatcgtccgcctctcccagatcagtgaggatgtcatcagactcttcaaaaagagcaaggagattggcctgcagatgcacgaggagctcctgaaggtgaccaatgagctctacacagtcatgaaaacctaccacatgtaccatgcagagagcatcagtgcggaaagcaagctgaaggaggctgagaagcaggaggagaagcagttcaataagtcaggagacctcagcatgaacctgctccggcacgaggaccggccccagcgccgcagctctgtgaagaagattgagaagatgaaggagaagaggcaggccaagtactctgagaacaagctgaaatgcacaaaggcccggaatgactacttgctcaatctggcagccaccaacgcagctataagcaaatactacatccatgatgtctctgatctgatcgattgctgtgatttgggcttccatgccagcctggcccgcaccttccggacctatctctcagctgaatacaacctggagacctctcgccacgaagggctggatgtcattgagaatgcagtggacaacctggattcccgaagtgacaagcacacagtcatggacatgtgcaatcaagtcttctgccctccactcaagttcgagttccagccccacatgggggatgaggtctgccaggtcagcgctcagcagcccgtccagacagaactgctcatgcgttatcaccagctgcagtccagactggccaccctcaagatagagaatgaggaggttaggaaaaccctggatgccaccatgcagacattacaggacatgctgactgtggaggactttgatgtctccgatgccttccaacacagtcgatcgacagagtccgtcaagtcggctgcctctgagacctacatgagcaagatcaacattgccaagaggagagccaaccagcaggaaacagaaatgttttattttacaaaggggcctgatgatgttttccccatttgccatccaagactctgatgaggcttaaacgtacgtgtgtgaaaactgtcaagtgctctgtggatacaagtcgagtgactcttaatggccaataggccaggtcctgggagcctaggaccatggaaaaggagagaggacaccacaacctcccaccagcccagtcgttccagaaacccatcaagaaatttaaagagtatgtgaatggcagtaacctcatcaccaagctgcaggccaagcacgatttactcaagcagaccctgggcgaaggggaaagagcagaatgcggcaccaccaggcccccctgtcttccccctaaaccacagaaaatgaggagacctaggcctctctcagtgtatagccataaactctttaacggcagtatggaagcattcattaagaggaagaagaaatgctcgaaccaggaaccaggattcaggacaagctataccgcttgtagtcgagagctgcatccgttacatcaatttatatggactccagcagcaggggatcttcagagtgccaggatctcaggtggaagtcaatgacatcaaaaattcctttgagagaggtgaagacccccttgtggacgatcaaaatgaacgagatatcaattcagtcgctggtgttttaaaactgtatttccgaggactggaaaacccactctttcctaaggaaaggtttcaagatttgatatctactattaaaaagttgccccatacccagtttcatttggggtgtttctcacagtactctgagagatatttgcagccaggaaagtgtcccaggagatggcaagagaagagaactggagaacccagccgagagggtgcaccagatccaacaaatcctcgtcacccttccccgcgtggtcattgtggtcatgagatacctcttcgctttcctcaaccacctctcccagtatagcgacgagaacatgatggatccctacaacctggccatctgcttcgggcctaccctcatgcacatccctgatgggcaggaccctgtgtcctgccaggcacacatcaatgaagtcatcaaaaccatcatcatccatcatgaagccatcttccccagcccccgggagctagagggacctgtgtatgaaaaatgcatggctggaggggaagaatattgtgacagcccacacagcgagccaggggccatcgatgaagttgaccatgacaatggcactgagcctcataccagcgatgaagctcctcgggctgatgggcagaaggcttctctggacaccaggactgaagatgaggagggacagagagaatagggcttgctgggtcagcgaagaagcagccatgggactcacccagtggggcttcctccccataagaaccaccccccagaaagtgctgcctcccacttctcagggtaaaggttcacagtggcccccagaatgcatgagtcagagctttgggtccccctccgagatgatccttcttctttttgttctttgtaaggctgctggtttctgggaatgacaaaggcaggaaaaatcattctgggaaggaagaagccacagtctgggagagccagtttcatgttccctgaaggctctcaaagtatcctgtgtgtattagtggggggtattgaatcaggggcactctttggtggaaaatcaattgcattttctaaatgttacattcttgccatccctggccaaacagtggcagaatagtgagctgcagagacagtcaaggggtcactgtgctcagaaaaaagagacctggagttgaagcacagagggagtccttatggtcatgtaatctgaggcaagccacatcacctctggcctctatttccttatctataaaatgggaatgacagcaccaagcaaattatggcatgggttaaaatgaggtgacatatgtgaaggagcctagcacagtgcctgggacagggaggtggataagaaacatcaatggactctgtatcaaacagacatccttcctaatcctgatagaaaaactgagtcctggagaattttcttgacctaactggcattggcagttactggtcattggcaaccagaacctcctgatttgtttacctgtttcctcttagacatttcatttaggggatcatcaatatctgtcttctttgctcttgacagcacccggtatgaatggaatccagcaggcctcaaaggtcaaatcaggcagagaaccatgagtccaggtctttgccatgcatgaatcagccaatgaatgccaaattgcaggaacaatttagttgtttgtgtatctgttgcctttcttgtctcaaagattctgtaccaactgggcgtggtggctcacacctgtaaccccaacactttgggaagttgaggtgggcagatcacttgagcccaggaattcgagaccagcctgggcaacatggtgaaactccgtctctacaaaaaaaaccaaaatacaaaaattagccaggcatggtggcatatgcctgtggtcccagcaactcaggaggctgaagtgggagaattacttaagcccagggaggttgaggctgcagtgagccatgattgtgccactgtactccagcctgagtgacagaacaaggtcctgtctc

SEQ ID NO: 328710 - DNA, 1008 bp, Artificial Sequence
  derived and/or modified sequence
atgaacaacgtgatcgtgagactgagccagatcagcgaggacgtgatcagactgttcaagaagagcaaggagatcggcctgcagatgcacgaggagctgctgaaggtgaccaacgagctgtacaccgtgatgaagacctaccacatgtaccacgccgagagcatcagcgccgagagcaagctgaaggaggccgagaagcaggaggagaagcagttcaacaagagcggcgacctgagcatgaacctgctgagacacgaggacagaccccagagaagaagcagcgtgaagaagatcgagaagatgaaggagaagagacaggccaagtacagcgagaacaagctgaagtgcaccaaggccagaaacgactacctgctgaacctggccgccaccaacgccgccatcagcaagtactacatccacgacgtgagcgacctgatcgactgctgcgacctgggcttccacgccagcctggccagaaccttcagaacctacctgagcgccgagtacaacctggagaccagcagacacgagggcctggacgtgatcgagaacgccgtggacaacctggacagcagaagcgacaagcacaccgtgatggacatgtgcaaccaggtgttctgcccccccctgaagttcgagttccagccccacatgggcgacgaggtgtgccaggtgagcgcccagcagcccgtgcagaccgagctgctgatgagataccaccagctgcagagcagactggccaccctgaagatcgagaacgaggaggtgagaaagaccctggacgccaccatgcagaccctgcaggacatgctgaccgtggaggacttcgacgtgagcgacgccttccagcacagcagaagcaccgagagcgtgaagagcgccgccagcgagacctacatgagcaagatcaacatcgccaagagaagagccaaccagcaggagaccgagatgttctacttcaccaagggccccgacgacgtgttccccatctgccaccccagactgtag

SEQ ID NO: 328711 - protein, 937 aa, Artificial Sequence
  derived and/or modified sequence
  misc_feature (1)..(1): Xaa can be any naturally occurring amino acid
XLRSQPGCGCLWQEAPTHSTGPSVEGEAPSSETGTSLDSPSAYPQGPLVPGSSLSPDHYEHTSVGAYGLYSGPPGQQQRTRRPKLQHSTSILRKQAEEEAIKRSRSLSESYELSSDLQDKQVEMLERKYGGRLVTRHAARTIQTAFRQYQMNKNFERLRSSMSENRMSRRIVLSNMRMQFSFEGPEKVHSSYFEGKQVSVTNDGSQLGALVSPECGDLSEPTTLKSPAPSSDFADAITELEDAFSRQVKSLAESIDDALNCRSLHTEEAPALDAARARDTEPQTALHGMDHRKLDEMTASYSDVTLYIDEEELSPPLPLSQAGDRPSSTESDLRLRAGGAAPDYWALAHKEDKADTDTSCRSTPSLERQEQRLRVEHLPLLTIEPPSDSSVDLSDRSERGSLKRQSAYERSLGGQQGSPKHGPHSGAPKSLPREEPELRPRPPRPLDSHLAINGSANRQSKSESDYSDGDNDSINSTSNSNDTINCSSESSSRDSLREQTLSKQTYHKEARNSWDSPAFSNDVIRKRHYRIGLNLFNKKPEKGVQYLIERGFVPDTPVGVAHFLLQRKGLSRQMIGEFLGNRQKQFNRDVLDCVVDEMDFSTMELDEALRKFQAHIRVQGEAQKVERLIEAFSQRYCICNPGVVRQFRNPDTIFILAFAIILLNTDMYSPNVKPERKMKLEDFIKNLRGVDDGEDIPREMLMGIYERIRKRELKTNEDHVSQVQKVEKLIVGKKPIGSLHPGLGCVLSLPHRRLVCYCRLFEVPDPNKPQKLGLHQREIFLFNDLLVVTKIFQKKKNSVTYSFRQSFSLYGMQVLLFENQYYPNGIRLTSSVPGADIKVLINFNAPNPQDRKKFTDDLRESIAEVQEMEKHRIESELEKQKGVVRPSMSQCSSLKKESGNGTLSRACLDDSYASGEGLKRSALSSSLRDLSEAGVHH

SEQ ID NO: 328712 - DNA, 2814 bp, Artificial Sequence
  derived and/or modified sequence
tgactgagaagccagcccggctgcggctgcctgtggcaggaggcccccacccacagcaccggccccagcgtggagggcgaggcccccagcagcgagaccggcaccagcctggacagccccagcgcctacccccagggccccctggtgcccggcagcagcctgagccccgaccactacgagcacaccagcgtgggcgcctacggcctgtacagcggcccccccggccagcagcagagaaccagaagacccaagctgcagcacagcaccagcatcctgagaaagcaggccgaggaggaggccatcaagagaagcagaagcctgagcgagagctacgagctgagcagcgacctgcaggacaagcaggtggagatgctggagagaaagtacggcggcagactggtgaccagacacgccgccagaaccatccagaccgccttcagacagtaccagatgaacaagaacttcgagagactgagaagcagcatgagcgagaacagaatgagcagaagaatcgtgctgagcaacatgagaatgcagttcagcttcgagggccccgagaaggtgcacagcagctacttcgagggcaagcaggtgagcgtgaccaacgacggcagccagctgggcgccctggtgagccccgagtgcggcgacctgagcgagcccaccaccctgaagagccccgcccccagcagcgacttcgccgacgccatcaccgagctggaggacgccttcagcagacaggtgaagagcctggccgagagcatcgacgacgccctgaactgcagaagcctgcacaccgaggaggcccccgccctggacgccgccagagccagagacaccgagccccagaccgccctgcacggcatggaccacagaaagctggacgagatgaccgccagctacagcgacgtgaccctgtacatcgacgaggaggagctgagcccccccctgcccctgagccaggccggcgacagacccagcagcaccgagagcgacctgagactgagagccggcggcgccgcccccgactactgggccctggcccacaaggaggacaaggccgacaccgacaccagctgcagaagcacccccagcctggagagacaggagcagagactgagagtggagcacctgcccctgctgaccatcgagccccccagcgacagcagcgtggacctgagcgacagaagcgagagaggcagcctgaagagacagagcgcctacgagagaagcctgggcggccagcagggcagccccaagcacggcccccacagcggcgcccccaagagcctgcccagagaggagcccgagctgagacccagaccccccagacccctggacagccacctggccatcaacggcagcgccaacagacagagcaagagcgagagcgactacagcgacggcgacaacgacagcatcaacagcaccagcaacagcaacgacaccatcaactgcagcagcgagagcagcagcagagacagcctgagagagcagaccctgagcaagcagacctaccacaaggaggccagaaacagctgggacagccccgccttcagcaacgacgtgatcagaaagagacactacagaatcggcctgaacctgttcaacaagaagcccgagaagggcgtgcagtacctgatcgagagaggcttcgtgcccgacacccccgtgggcgtggcccacttcctgctgcagagaaagggcctgagcagacagatgatcggcgagttcctgggcaacagacagaagcagttcaacagagacgtgctggactgcgtggtggacgagatggacttcagcaccatggagctggacgaggccctgagaaagttccaggcccacatcagagtgcagggcgaggcccagaaggtggagagactgatcgaggccttcagccagagatactgcatctgcaaccccggcgtggtgagacagttcagaaaccccgacaccatcttcatcctggccttcgccatcatcctgctgaacaccgacatgtacagccccaacgtgaagcccgagagaaagatgaagctggaggacttcatcaagaacctgagaggcgtggacgacggcgaggacatccccagagagatgctgatgggcatctacgagagaatcagaaagagagagctgaagaccaacgaggaccacgtgagccaggtgcagaaggtggagaagctgatcgtgggcaagaagcccatcggcagcctgcaccccggcctgggctgcgtgctgagcctgccccacagaagactggtgtgctactgcagactgttcgaggtgcccgaccccaacaagccccagaagctgggcctgcaccagagagagatcttcctgttcaacgacctgctggtggtgaccaagatcttccagaagaagaagaacagcgtgacctacagcttcagacagagcttcagcctgtacggcatgcaggtgctgctgttcgagaaccagtactaccccaacggcatcagactgaccagcagcgtgcccggcgccgacatcaaggtgctgatcaacttcaacgcccccaacccccaggacagaaagaagttcaccgacgacctgagagagagcatcgccgaggtgcaggagatggagaagcacagaatcgagagcgagctggagaagcagaagggcgtggtgagacccagcatgagccagtgcagcagcctgaagaaggagagcggcaacggcaccctgagcagagcctgcctggacgacagctacgccagcggcgagggcctgaagagaagcgccctgagcagcagcctgagagacctgagcgaggccggcgtgcaccactag

SEQ ID NO: 328713 - DNA, 2814 bp, Artificial Sequence
  derived and/or modified sequence
tgattacgatcacaacccggttgtggctgcctctggcaggaggcacctacccattcaacagggccttcagtcgagggcgaagcacctagttcagagaccggaacgtcgctggactctccaagcgcctacccacagggcccactggtgccgggcagctctctctcacccgatcactacgagcacacatctgttggggcctatgggctttattcaggccctcctgggcagcagcaacgaactaggcggcctaagctccagcactctacaagtatacttagaaagcaggccgaagaggaggccataaaacggagtcgatccctgtcggagtcttatgaattgtcttccgatctccaggacaaacaggttgagatgctcgaaaggaagtacggaggtaggcttgtgacgaggcatgctgcaagaactatacagacggcctttaggcaataccagatgaacaagaattttgaaagattaaggtctagcatgtctgagaaccgtatgagccgccggattgtgctgagcaatatgaggatgcagttctcttttgagggacccgaaaaagtccacagtagctatttcgaaggaaagcaggtctcggtgactaatgacggaagccagctgggggctctcgtttctccagagtgcggagatcttagcgagcccaccactttaaaatctcccgcaccctctagcgatttcgccgacgccattacagagttggaggacgcgttttctaggcaggtgaagtcccttgctgaatctatcgatgatgccctaaactgtagaagcctgcatactgaggaggcacctgccctggacgctgcccgagctcgcgataccgagcctcagactgcgttgcacggaatggaccacaggaaactggacgaaatgacagcctcgtactccgatgttaccttgtatatcgacgaggaggagctgtccccccccctcccactgagtcaggctggagaccggccttcaagtaccgagagtgacctgaggttaagagccggaggcgcagcaccggactattgggccctggcccacaaagaagataaagcggacacagacacttcttgtcggtctacacctagcctggagcgccaggagcaacgcctgcgcgtggagcatctccccctgctgacaattgaaccaccaagcgacagcagcgtggacctgtcagatcgaagcgagagggggagtctcaaaagacaatccgcttatgaacgtagtcttggtggccagcaaggctcaccaaagcacgggccacattcgggcgcccccaagtctctacccagagaagaacctgaactacgacctcgaccccctcgccccctggactcccatctggcgattaacggttctgccaacagacagagcaagtcggagtccgattactcggacggtgacaatgattcaataaattccactagtaattccaacgacaccattaactgttcctctgagagtagctccagggacagcctgcgcgagcagaccctttccaagcaaacctatcacaaggaagcccgcaactcctgggatagcccagccttctccaacgacgtcattaggaaacgccattatcggattggcctgaatttattcaataaaaaaccagagaagggtgtccagtatctaattgaacgtgggttcgtgccagacacacccgtcggggtggcgcactttttgcttcagaggaagggacttagccgacagatgatcggagaatttttaggcaacaggcagaagcagtttaaccgggatgtgctggattgtgtggttgatgaaatggatttcagcaccatggagctggacgaggccctgcgcaagttccaggcacatatcagagtgcagggtgaagcccagaaggtggagcgcctgattgaggccttctcccagagatactgcatttgcaacccaggagtcgttagacagtttcggaaccctgatacaatctttattttggcttttgctattattctactcaataccgacatgtactcacctaatgttaaaccagagaggaagatgaagctggaggacttcatcaaaaatctgaggggggtcgatgacggggaggacatcccacgtgagatgctgatgggaatctatgaaaggataaggaagcgtgagctcaaaactaacgaagaccatgtgtcacaagtgcagaaggtggagaagctgatcgtgggcaagaagccgatcgggtctctgcatcctgggctcggatgtgtcctgagccttccccaccgaagactggtgtgctattgcagacttttcgaggtccccgatcctaacaaaccacagaaactggggttgcaccagagggagatcttcctttttaatgacctcttggtggtgactaagatctttcagaaaaagaagaactctgtgacctactcattccgacaaagcttctctctgtatgggatgcaggtgcttttatttgaaaaccagtactaccctaacggcatcagactaacttcttcagttcccggggctgacatcaaagtgctgatcaatttcaatgctccgaatcctcaggatagaaaaaagttcaccgatgacttgcgggagtccattgctgaggtgcaagagatggaaaagcatcgtatagagagcgaactggagaaacagaaaggagttgtgcgtccaagcatgtcccagtgttcatccctgaagaaggaatcgggaaatggcactctctctagagcttgtcttgatgattcgtacgcctccggcgaggggctcaaacgaagcgcgctctctagcagtctgcgagacttgagcgaagccggggtccatcactag

SEQ ID NO: 328714 - DNA, 2814 bp, Artificial Sequence
  derived and/or modified sequence
tgactgcggagccagcccggctgcggctgcctgtggcaggaggcccccacccacagcacaggccccagcgtggagggggaggcccccagcagcgagaccggcaccagcctggacagccccagcgcctacccccagggccccctggtgcccggcagcagcctgagcccagaccactatgagcacacctctgtgggcgcctacggcctgtacagcggccccccaggccagcagcagaggacccggcggcccaagctgcagcacagcaccagcatcctgaggaagcaggccgaggaggaggccatcaagaggagccgcagcctgtctgagagctatgagctgagcagtgacctgcaggacaagcaggtggagatgctggagaggaaatatggaggccgcctggtgaccaggcatgctgcccggaccatccagacagccttccggcagtaccagatgaacaagaactttgagcggctgcggagctccatgtctgagaacaggatgagcagaagaattgtgctgagcaacatgaggatgcagttctcctttgagggccctgagaaggtgcacagcagctactttgagggcaagcaggtgtctgtgaccaatgatggcagccagctgggcgccctggtgtccccagaatgtggggacctgtctgagcccaccaccctgaagagccctgcccccagcagtgactttgctgatgccatcacagagctggaggatgccttcagccggcaggtgaagagcctggccgagagcattgatgatgccctgaactgccgcagcctgcacacagaggaggccccagccctggatgctgcccgggcccgggacacagagccccagacagccctgcacggcatggaccacaggaagctggatgagatgacagccagctacagtgatgtgaccctgtacattgatgaggaggagctgagcccccccctgcccctgagccaggccggggaccggcccagcagcacagaaagtgacctgcggctgcgggccggcggggccgccccagactactgggccctggcccacaaggaggacaaggctgacacagacaccagctgccgcagcacccccagcctggagcggcaggagcagaggctgcgggtggagcacctgcccctgctgaccatcgagcccccaagtgacagctctgtggacctgagtgacagaagtgagcggggcagcctgaagaggcagagcgcctatgaaagaagcctgggcggccagcagggcagccccaagcacggcccccacagcggggcccccaagagcctgccccgggaggagcctgagctgcggccccggcccccccggcccctggacagccacctggccatcaatggaagtgccaaccggcagagcaagtctgagagtgactacagtgatggagacaatgacagcatcaacagcaccagcaacagcaatgacaccatcaactgcagcagcgagagcagcagccgggacagcctgcgggagcagaccctgagcaagcagacctaccacaaggaggccagaaattcctgggacagccctgccttcagcaatgatgtgatcaggaagaggcactacagaattggcctgaacctcttcaacaagaagccagagaagggcgtgcagtacctgattgaaagaggatttgtgcctgacacccctgtgggcgtggcccacttcctgctgcagaggaagggcctgagccggcagatgattggagagttcctgggcaaccggcagaagcagttcaacagagatgtgctggactgtgtggtggatgagatggacttcagcaccatggagctggatgaggccctgaggaagttccaggcccacatccgggtgcagggcgaggcccagaaggtggagcggctgattgaggccttcagccagcgctactgcatctgcaaccctggggtggtgcggcagttcaggaacccagacaccatcttcatcctggcctttgccatcatcctgctgaacacagacatgtacagccccaacgtgaagccagagaggaagatgaagctggaggacttcatcaagaacctgcggggcgtggatgatggagaggacatcccccgggagatgctgatgggcatctatgagcgcatcaggaagcgggagctgaagaccaatgaagatcatgtgtcccaggtgcagaaggtggagaagctgattgtgggcaagaagcccatcggcagcctgcaccctggcctgggctgtgtgctgagcctgccccaccggcggctggtgtgctactgccgcctgtttgaggtgcctgaccccaacaagccccagaagctgggcctgcaccagcgggagatcttcctgttcaatgacctgctggtggtgaccaagatcttccagaagaagaagaacagcgtgacctacagcttccggcagagcttcagcctgtatggcatgcaggtgctgctgtttgagaaccagtactaccccaacggcatccggctgaccagctctgtgcctggagctgacatcaaggtgctgatcaacttcaatgcccccaacccccaggacaggaagaagttcacagatgacctgcgggagagcattgctgaggtgcaggagatggagaagcacagaattgaaagtgagctggagaagcagaagggcgtggtgcggcccagcatgagccagtgcagcagcctgaagaaggagagcggaaatggcaccctgagccgggcctgcctggatgacagctatgccagcggggagggcctgaagaggtctgccctgagcagcagcctgcgggacctgtctgaggccggcgtgcaccactag

SEQ ID NO: 328715 - DNA, 2814 bp, Artificial Sequence
  derived and/or modified sequence
tgactgcggagccagcccggctgcggctgcctgtggcaggaggccccaactcactccactggtccaagcgttgagggcgaagccccttccagtgaaactggtacaagcctggattccccgtctgcatatcctcagggtccactggtgcccgggtccagcctctctcccgatcattatgagcacacatctgtcggggcatacggactttattctggaccgccaggacagcaacagagaacccgtagacccaaactacagcatagcacttctatactgcgtaagcaggctgaggaagaggcaattaagcggtctaggtcactgagtgaaagttatgagctctcctccgacctgcaggataaacaagtggaaatgctggagaggaagtacgggggaaggcttgtcactaggcatgccgcccgtaccatacagaccgcgtttcggcagtaccagatgaataagaatttcgagaggctgagaagcagtatgtcagagaaccgcatgtccagacggatagttctgtcgaacatgaggatgcagttctcgttcgaggggccagaaaaagtgcactcatcttactttgaaggaaaacaggtatccgtcaccaatgacggcagtcaactcggagcccttgtatcgcccgaatgcggtgatctgagcgagcctactaccctgaaaagccccgctccgtcctctgatttcgccgatgctattaccgaacttgaggatgccttcagcaggcaggtaaaatccttggcagagtccatcgacgacgcactgaactgcaggagcctgcacaccgaagaggcccctgcattggatgcagccagagctcgcgataccgagccccaaaccgctcttcacggcatggatcacaggaagctagacgaaatgaccgcttcctacagcgacgtcacactgtatattgatgaagaggagctgtcccccccgttgccactgtctcaggctggagaccgcccctctagtacagagagcgacctccgactgcgggccggcggcgccgcccccgattattgggctctcgctcacaaggaggataaggctgacacagatacctcttgtcggtcaacgccaagcttagagcggcaggaacaaagactgagagtcgaacacttacccctgctgacaatcgaacccccttctgatagcagtgtggatttgtcagaccgctcggaacggggctcactgaaacggcagtcagcctacgagagatcattgggggggcagcagggcagtcccaagcacggaccgcattctggggcccccaaaagcttaccccgggaagagcctgagctgcggcctcggcctcctcgtccactggactcccacctcgcgataaacgggagcgctaacagacagagtaagagcgagtccgattacagcgacggcgataacgattctataaatagtacgtcaaactccaacgatactataaactgctcttctgaaagctcttctcgcgattctttgagagaacagacactgagcaagcagacttatcataaagaagcacgtaacagttgggactcaccagctttcagcaatgacgtgatccgcaagagacactatcggatcggcctgaatctttttaataagaagccagagaaaggcgtgcaatatctcattgaaagggggtttgtgccggacacacccgtgggagtagcccatttcttgctccagaggaaaggactgagtcggcagatgatcggcgaatttctcggtaaccggcagaagcagttcaaccgagacgtgcttgattgcgtggtggacgagatggatttctctacgatggaactggacgaggccttacgaaagtttcaggctcacatccgcgtccagggggaagctcagaaagtggaacggttaattgaggcctttagtcagagatattgcatttgtaaccctggggtagtacgacaatttaggaatcctgacaccatcttcatcttggcatttgccatcatcctgctgaacaccgatatgtatagtcccaacgtgaagcccgagaggaagatgaagcttgaggacttcatcaaaaacttgcgcggcgtggatgatggggaggatataccacgggagatgcttatgggaatctacgagcgtattaggaagcgagaactgaaaacaaatgaggatcacgtaagccaggtccagaaagtggagaagctcattgtggggaaaaagccaattggttctttgcaccctggacttggctgtgtcctgtccctccctcaccgaaggctagtctgttactgccggctgttcgaggtcccggaccctaataagccacagaagttgggactgcatcaaagggagattttcctatttaacgacctgctagtggtaacaaagatattccagaagaaaaaaaactctgttacctacagtttcaggcagtcattttctttgtatggcatgcaggtgctgctgttcgaaaaccaatattaccccaacggcattcgactgacctccagtgtaccgggcgctgacataaaggtgttaattaactttaacgccccaaatcctcaggacaggaaaaagtttaccgatgacttgagagagtctatcgccgaagtgcaggagatggagaagcaccggatcgaatcagagctggagaaacagaagggggttgtgcgccctagtatgtcccaatgctccagtctgaagaaggagagtggcaatggcacactgtcacgcgcttgtctcgacgattcttacgcttcaggagaggggctcaaacggtcagcattgtcctctagtctaagagatctcagtgaggcaggagtgcaccattag

SEQ ID NO: 328716 - DNA, 2814 bp, Artificial Sequence
  derived and/or modified sequence
tagctgagatcacagcccggatgtgggtgcttgtggcaggaagctccgacccattctacagggccaagcgtggaaggggaggccccatcctccgaaaccggtacctcattagattcaccatcagcttatcctcaggggcctctcgtacctggctctagcttatcccctgatcattacgagcatacatctgtgggcgcttacgggttatattcaggtccgcctggccagcagcagcggacgcgcagaccaaaattgcagcattccacttctatcctcagaaaacaggctgaagaagaggccattaagaggagccggtcactgagcgagagttacgagctgagctccgatctgcaagataagcaagtggagatgctggaacgaaaatatggcggtagactcgtcacccgtcatgccgctagaaccatccaaacagcatttaggcagtatcaaatgaataagaacttcgagcgactacgttcttctatgtccgagaacaggatgagccgcaggattgttcttagtaatatgaggatgcaatttagcttcgaaggccctgagaaagttcactcttcctatttcgaggggaagcaggtcagtgttaccaacgatgggagccagctgggtgccctggtaagccccgaatgtggggacttgagtgaacccaccacgcttaaatcgcctgccccatcctccgatttcgctgacgctattacggagctggaggacgctttctctcgccaagtgaaatctctggcagagtccatcgatgatgcattgaactgccggtctctgcatacagaagaggcgccagccctcgatgctgccagggccagagacacagaaccccagactgccttgcatggaatggatcaccgtaagctggatgaaatgactgccagttatagcgacgtaacactgtacatcgatgaggaagaactgtccccccctcttcccttgagccaagctggagatagaccctccagcaccgagagcgatctccggttgcgtgccggtggcgctgcgcctgactactgggctctggcacataaggaggataaggcagatacggatacatcttgtagatctacaccttccctggaaagacaggagcagcgacttagagtcgaacacctgcctctactcacaattgagcctcccagtgattcctccgttgacctctcagatcgtagcgagagaggctcactgaagaggcagtccgcctatgagcgctccttaggcggacagcagggaagccccaaacacggcccacactcaggggcaccaaaaagcctacctcgagaggagccggagctgcgtccacgaccacctcggcctcttgacagccatctcgctattaatggatcagcgaataggcagtcaaaaagcgagagcgactatagtgatggagataatgattccatcaacagtacttccaatagcaacgacaccataaattgctcttctgagagctctagccgggattctcttagggaacaaacactgtctaaacagacctatcacaaagaggctaggaattcttgggatagtcccgcattctcaaatgacgtgatccggaaacggcattacagaattggtctgaatctctttaataagaaacctgagaagggcgtgcaatacctgattgagcgcggatttgtgcccgatacaccagtgggggtagctcatttccttttgcagcggaaagggctgtctcgtcagatgattggagaattcctgggtaataggcagaagcagttcaaccgcgatgtgcttgactgtgtggtcgatgagatggacttctccactatggaactcgacgaggccctgcgaaaatttcaggctcatatacgagtgcagggggaagcacagaaagtggaacgcctgattgaagctttttcccagcgttactgtatctgtaacccaggagtggtgcggcaattccggaaccccgataccatttttattctggccttcgccatcatccttctgaataccgacatgtacagccccaatgtcaagccagagcggaagatgaaactggaagactttattaagaacctccgcggagtggatgacggtgaggatattccaagagagatgttgatgggcatctacgagcgaatccggaagagggagttaaagacaaacgaagaccatgtttcccaggtgcagaaagtggagaaactgatcgtaggtaaaaagccaatcggcagtctgcaccccggacttggctgcgtactgagtcttccccacaggaggctggtttgttattgtaggctctttgaggtccctgacccgaacaaaccacagaaactgggtctgcatcagcgagagatttttctctttaacgatctgctggtcgttaccaagatttttcagaagaagaaaaacagcgtcacatactcctttaggcagtcattctctttgtacggcatgcaggttcttctgttcgagaaccagtactatcccaacggcatcaggctcacaagctccgtccccggagccgatattaaggttttgatcaactttaatgcacccaaccctcaagatcggaaaaagttcactgatgacctgcgcgaatctattgcagaagtgcaagagatggagaaacatagaatcgagtccgaactcgaaaagcagaagggagtagtgcggccaagcatgtcgcagtgttcttctctgaagaaagaatctggcaacggcactctgagtcgcgcatgcttggacgatagttatgcctccggagaggggctgaagcgtagcgccttatcctcttcgctgcgggacctttccgaggccggagtccatcactag

SEQ ID NO: 328717 - DNA, 3745 bp, Artificial Sequence
  derived and/or modified sequence
cctgagaagccagccaggctgcggctgtttgtggcaggaggcccccacccacagcactggaccaagcgtcgagggcgaggcccccagcagtgagactggcacatccctggacagcccctcagcctacccccagggccccttggtgcccggttccagcctgagcccggatcactacgagcacacgtcagtgggagcctatgggctgtactcggggccgccggggcaacagcagcgcacgcggaggcccaagctgcagcactcgacctccatcctgcgcaagcaggctgaggaggaggccatcaagcgctcacgctcactctccgagagctatgagctctcctcggacctgcaggacaagcaggtggagatgctagaacgaaagtatggggggcgcctggtaacccgccatgcggcccgcaccatccagacggcgtttcgccagtaccagatgaacaagaacttcgagcgcttgcgcagctccatgtcagagaaccgcatgtcacgccggattgtgctgtccaacatgaggatgcagttctcctttgaggggcctgagaaagtgcacagctcctacttcgaggggaagcaggtctcagtgactaacgacggctcccagctgggagccctggtgtcccctgagtgtggtgacctcagcgagcccaccaccctcaagtctccggccccctccagtgactttgcggacgccatcaccgagctggaggacgccttctctaggcaagtgaaatcactggccgagtccatcgacgatgccctcaactgccgcagcctgcacactgaggaggcaccggccctggatgcggcgcgggcccgggacaccgaaccccagacagccctgcacggcatggaccaccgcaaactggacgagatgacggcctcgtacagtgatgtcaccctgtacatcgatgaggaggagctgtcgccccctctgcccctctcgcaggcaggggaccggccgtccagcaccgagtcggacctgcggctacgggctgggggcgcagccccagactactgggccctggcccacaaagaggacaaggctgacacggacacgagctgccggagcacgccgtcgctggagcggcaggagcagcggctgcgggtggagcatctgccgctgctcaccatcgagccacccagcgacagctctgtggaccttagtgaccgctcggagcgggggtcactcaagaggcagagtgcttacgagcgcagccttggcgggcagcagggcagtcccaagcatggtccccacagcggcgcccccaagagcctcccccgggaggagcctgagttgcggccccggccccccaggcccctggacagccacttggccatcaatggctcagccaaccggcagagcaagtctgagtcggactactcagacggtgacaatgacagcatcaacagcacgtccaactccaacgataccatcaactgcagctccgagtcatcgtcccgtgacagcctgcgggagcagacgctcagcaagcagacctaccacaaggaggcccgcaacagctgggactcgcctgcctttagcaacgatgtcatccgcaagaggcactaccgcatcggcctgaacctcttcaacaagaagcctgagaagggagtccagtacctcatcgagcgtggctttgtgcccgacacgcccgtcggggtggcccacttcctgctgcagcgcaagggcctcagccggcagatgatcggcgagttcctgggcaaccggcagaagcagttcaaccgtgacgtgctcgactgcgtcgtggacgagatggacttctctaccatggagctggatgaggccctcaggaaattccaggcgcacatccgtgtccaaggggaggctcagaaagtggagcggctcatagaggcgttcagccagcgctactgcatctgcaaccctggggtggtgcggcaattccggaacccagacaccattttcatcctggccttcgccatcatcctgctgaacaccgacatgtacagccccaatgtcaagcccgagcggaaaatgaagctagaggacttcatcaagaacctccgaggtgtggacgatggtgaggacattccccgtgagatgctgatggggatctatgaacggatccgtaagcgagagctaaagaccaatgaggaccatgtgtcccaggtgcagaaggtggagaagctcattgtggggaaaaagccgatcggatccctgcatcccgggctcggctgtgtgctctctctgccccaccgtcggttggtctgctactgccggctctttgaggttccagacccaaacaagccccagaaactcggactacaccagcgagaaatcttcctgttcaacgacctcctggtggtcaccaagatcttccagaagaagaagaactcggtgacgtacagcttccgacagtccttctccttgtacggcatgcaggtcctgctcttcgagaaccagtactaccccaatggcatccggctcacctcgtctgtccccggagcagatatcaaagtgttaataaacttcaacgcccccaaccctcaagaccggaagaaattcaccgatgacctgcgggagtccattgcggaagtccaagagatggagaagcacaggatagagtcggagctcgagaagcagaaaggcgtcgtgcggcccagcatgtcccagtgctctagcctcaaaaaggagtcgggcaacggaacactgagccgggcctgcctggacgacagctatgccagcggtgagggcctcaagcgcagcgccctcagcagctccctgcgggacctctcggaagccggggtccatcattagcagtcctcacatgcgccggagagctacatcaacacgagagtgtccatctcgcccacaccagactatgcccaactcatcttccctcctgggctccttattcgggagcaagagagggaagccccctccccaggcccacctgccctcagccccagccctggccacccccccacccaccggtggtcctgcctcacttgcagcactctgtggctggccaccacctggggcccccagaggggctgccgcaggccgccatgcacgggcatcacacccagtactgccacatgcagaaccctcccccgtaccaccatcaccaccaccaccacccaccccagcacatccagcacgcacaccagtaccaccacggcccccatgggggccacccagcctacggggcccatgcccacggccacccgccgctgccctcggcccacgtggggcacacagtgcaccaccatgggcagccccctgccccgccgccccccaccagcagcaaggccaaacccagcggcatcagcacaattgtgtagacagcctgggtaggggtcccaggctccctgaaacacctgcacaccacacagggcacgcccgggggtcgccagccgcacaccaaacccggggcacttctgttgccatctctcccctctgcccctcacggcccaaccggagccccaggagcccacagggctggtgttgtgtggaacaaaggcccagatttcatttcttgttggcaccctgggctctgctcacctcagtctgagggatgggtgggcctcagacaccatcagccttgaaacggtgagccagccaagtagtgttgaactgcctcccccactccagctctcagctccctgtgccctaatgtacatgcatatgaaaacccaacctagaaaacgaagaaatgagatacaaaaacagacaaaacaaaccccaaaa

SEQ ID NO: 328718 - DNA, 411 bp, Artificial Sequence
  derived and/or modified sequence
atgggagacagcagaagagatgtgctgcacgagcccgccatcgccctgctgagcagcccccagacccagagccggctgcagattgatgccttcatcgcccggcgctgctggggcagccagtgggacatcaccggctacatccaccagcaggacttccccacagctgtgttcatcggcttcagcaatgagttcaacatctgcatcccccaccccttcacagagtggctgcagtgtgtgaggaagtacagccagagctggggcgtgaggaagggccagaggcacatccgctatggcatgtgcagcgagaggacccaccacctgagcaggacctacagcagcctgctggagcgggaggagaagctggccttctacggcgtgctgaccatgtgccagatctggtgtgagacctag

SEQ ID NO: 328719 - DNA, 498 bp, Artificial Sequence
  derived and/or modified sequence
atgagccacccccaggccaccagcaacctgcagcacaccgtgagcaacagcgacaacatcggcagcagcgccggcagatggacctgggtgcccctgacctggaccgacaccagcaagatgagcatgagaggcctgctggacctgttcagcttccacagctgcatcctgaagaacggcagcgagcccgaggagccccaggacagcgccaagaccgacacccagctgagccccgccaccctggccctggagagagaggagcacagcagcagacacgtgcccagcgtgctgagcaagaccatgagcagagccagcgccgagctgacctgcaccgccggcagacagggccccggcccccccggcagccacagccaggccccccacatgctgccccagcccgagcccctgctggcctgcgcccccgccatgtggtgcagaagagagccccagcccatcggcggcctgcagcccccccacctgagactgcacctggagagctag

SEQ ID NO: 328720 - DNA, 498 bp, Artificial Sequence
  derived and/or modified sequence
atgagccacccccaggccaccagcaacctgcagcacacagtgagcaacagcgacaacatcggcagcagcgctggccgctggacctgggtgcccctgacctggacagacaccagcaagatgtccatgaggggcctgctggacctcttctccttccacagctgcatcctgaagaatggcagcgagcctgaggagccccaggacagcgccaagacagacacccagctgagccctgccaccctggccctggagcgggaggagcacagcagcagacatgtgcccagcgtgctgagcaagaccatgagccgggccagcgctgagctgacctgcacagctggccggcagggccctggccccccaggcagccacagccaggccccccacatgctgccccagcctgagcccctgctggcctgtgccccagccatgtggtgcagaagagagccccagcccatcggcggcctgcagcccccccacctgcggctgcacctggagagctag

SEQ ID NO: 328721 - DNA, 54 bp, Artificial Sequence
  derived and/or modified sequence
atggagaaccccagccctgctgctgccctgggcaaggccctgtgtgccctgtag

SEQ ID NO: 328722 - protein, 1089 aa, Artificial Sequence
  derived and/or modified sequence
MGTSHPAFLVLGCLLTGLSLILCQLSLPSILPNENEKVVQLNSSFSLRCFGESEVSWQYPMSEEESSDVEIRNEENNSGLFVTVLEVSSASAAHTGLYTCYYNHTQTEENELEGRHIYIYVPDPDVAFVPLGMTDYLVIVEDDDSAIIPCRTTDPETPVTLHNSEGVVPASYDSRQGFNGTFTVGPYICEATVKGKKFQTIPFNVYALKATSELDLEMEALKTVYKSGETIVVTCAVFNNEVVDLQWTYPGEVKGKGITMLEEIKVPSIKLVYTLTVPEATVKDSGDYECAARQATREVKEMKKVTISVHEKGFIEIKPTFSQLEAVNLHEVKHFVVEVRAYPPPRISWLKNNLTLIENLTEITTDVEKIQEIRYRSKLKLIRAKEEDSGHYTIVAQNEDAVKSYTFELLTQVPSSILDLVDDHHGSTGGQTVRCTAEGTPLPDIEWMICKDIKKCNNETSWTILANNVSNIITEIHSRDRSTVEGRVTFAKVEETIAVRCLAKNLLGAENRELKLVAPTLRSELTVAAAVLVLLVIVIISLIVLVVIWKQKPRYEIRWRVIESISPDGHEYIYVDPMQLPYDSRWEFPRDGLVLGRVLGSGAFGKVVEGTAYGLSRSQPVMKVAVKMLKPTARSSEKQALMSELKIMTHLGPHLNIVNLLGACTKSGPIYIITEYCFYGDLVNYLHKNRDSFLSHHPEKPKKELDIFGLNPADESTRSYVILSFENNGDYMDMKQADTTQYVPMLERKEVSKYSDIQRSLYDRPASYKKKSMLDSEVKNLLSDDNSEGLTLLDLLSFTYQVARGMEFLASKNCVHRDLAARNVLLAQGKIVKICDFGLARDIMHDSNYVSKGSTFLPVKWMAPESIFDNLYTTLSDVWSYGILLWEIFSLGGTPYPGMMVDSTFYNKIKSGYRMAKPDHATSEVYEIMVKCWNSEPEKRPSFYHLSEIVENLLPGQYKKSYEKIHLDFLKSDHPAVARMRVDSDNAYIGVTYKNEEDKLKDWEGGLDEQRLSADSGYIIPLPDIDPVPEEEDLGKRNRHSSQTSEESAIETGSSSSTFIKREDETIEDIDMMDDIGIDSSDLVEDSFL

SEQ ID NO: 328723 - protein, 159 aa, Artificial Sequence
  derived and/or modified sequence
MGTSHPAFLVLGCLLTGLSLILCQLSLPSILPNENEKVVQLNSSFSLRCFGESEVSWQYPMSEEESSDVEIRNEENNSGLFVTVLEVSSASAAHTGLYTCYYNHTQTEENELEGRHIYIYVPDPDVAFVPLGMTDYLVIVEDDDSAIIPCRTTDPETPV

SEQ ID NO: 328724 - protein, 158 aa, Artificial Sequence
  derived and/or modified sequence
MGTSHPAFLVLGCLLTGLSLILCQLSLPSILPNENEKVVQLNSSFSLRCFGESEVSWQYPMSEEESSDVEIRNEENNSGLFVTVLEVSSASAAHTGLYTCYYNHTQTEENELEGRHIYIYVPDPDVAFVPLGMTDYLVIVEDDDSAIIPCRTTDPETP

SEQ ID NO: 328725 - protein, 218 aa, Artificial Sequence
  derived and/or modified sequence
MGTSHPAFLVLGCLLTGLSLILCQLSLPSILPNENEKVVQLNSSFSLRCFGESEVSWQYPMSEEESSDVEIRNEENNSGLFVTVLEVSSASAAHTGLYTCYYNHTQTEENELEGRHIYIYVPDPDVAFVPLGMTDYLVIVEDDDSAIIPCRTTDPETPVTLHNSEGVVPASYDSRQGFNGTFTVGPYICEATVKGKKFQTIPFNVYALKGTCIISFLL

SEQ ID NO: 328726 - protein, 154 aa, Artificial Sequence
  derived and/or modified sequence
MGTSHPAFLVLGCLLTGLSLILCQLSLPSILPNENEKVVQLNSSFSLRCFGESEVSWQYPMSEEESSDVEIRNEENNSGLFVTVLEVSSASAAHTGLYTCYYNHTQTEENELEGRHIYIYVPDPDVAFVPLGMTDYLVIVEDDDSAIIPCRTTD

SEQ ID NO: 328727 - DNA, 3270 bp, Artificial Sequence
  derived and/or modified sequence
atgggcaccagccaccccgccttcctggtgctgggctgcctgctgaccggcctgagcctgatcctgtgccagctgagcctgcccagcatcctgcccaacgagaacgagaaggtggtgcagctgaacagcagcttcagcctgagatgcttcggcgagagcgaggtgagctggcagtaccccatgagcgaggaggagagcagcgacgtggagatcagaaacgaggagaacaacagcggcctgttcgtgaccgtgctggaggtgagcagcgccagcgccgcccacaccggcctgtacacctgctactacaaccacacccagaccgaggagaacgagctggagggcagacacatctacatctacgtgcccgaccccgacgtggccttcgtgcccctgggcatgaccgactacctggtgatcgtggaggacgacgacagcgccatcatcccctgcagaaccaccgaccccgagacccccgtgaccctgcacaacagcgagggcgtggtgcccgccagctacgacagcagacagggcttcaacggcaccttcaccgtgggcccctacatctgcgaggccaccgtgaagggcaagaagttccagaccatccccttcaacgtgtacgccctgaaggccaccagcgagctggacctggagatggaggccctgaagaccgtgtacaagagcggcgagaccatcgtggtgacctgcgccgtgttcaacaacgaggtggtggacctgcagtggacctaccccggcgaggtgaagggcaagggcatcaccatgctggaggagatcaaggtgcccagcatcaagctggtgtacaccctgaccgtgcccgaggccaccgtgaaggacagcggcgactacgagtgcgccgccagacaggccaccagagaggtgaaggagatgaagaaggtgaccatcagcgtgcacgagaagggcttcatcgagatcaagcccaccttcagccagctggaggccgtgaacctgcacgaggtgaagcacttcgtggtggaggtgagagcctaccccccccccagaatcagctggctgaagaacaacctgaccctgatcgagaacctgaccgagatcaccaccgacgtggagaagatccaggagatcagatacagaagcaagctgaagctgatcagagccaaggaggaggacagcggccactacaccatcgtggcccagaacgaggacgccgtgaagagctacaccttcgagctgctgacccaggtgcccagcagcatcctggacctggtggacgaccaccacggcagcaccggcggccagaccgtgagatgcaccgccgagggcacccccctgcccgacatcgagtggatgatctgcaaggacatcaagaagtgcaacaacgagaccagctggaccatcctggccaacaacgtgagcaacatcatcaccgagatccacagcagagacagaagcaccgtggagggcagagtgaccttcgccaaggtggaggagaccatcgccgtgagatgcctggccaagaacctgctgggcgccgagaacagagagctgaagctggtggcccccaccctgagaagcgagctgaccgtggccgccgccgtgctggtgctgctggtgatcgtgatcatcagcctgatcgtgctggtggtgatctggaagcagaagcccagatacgagatcagatggagagtgatcgagagcatcagccccgacggccacgagtacatctacgtggaccccatgcagctgccctacgacagcagatgggagttccccagagacggcctggtgctgggcagagtgctgggcagcggcgccttcggcaaggtggtggagggcaccgcctacggcctgagcagaagccagcccgtgatgaaggtggccgtgaagatgctgaagcccaccgccagaagcagcgagaagcaggccctgatgagcgagctgaagatcatgacccacctgggcccccacctgaacatcgtgaacctgctgggcgcctgcaccaagagcggccccatctacatcatcaccgagtactgcttctacggcgacctggtgaactacctgcacaagaacagagacagcttcctgagccaccaccccgagaagcccaagaaggagctggacatcttcggcctgaaccccgccgacgagagcaccagaagctacgtgatcctgagcttcgagaacaacggcgactacatggacatgaagcaggccgacaccacccagtacgtgcccatgctggagagaaaggaggtgagcaagtacagcgacatccagagaagcctgtacgacagacccgccagctacaagaagaagagcatgctggacagcgaggtgaagaacctgctgagcgacgacaacagcgagggcctgaccctgctggacctgctgagcttcacctaccaggtggccagaggcatggagttcctggccagcaagaactgcgtgcacagagacctggccgccagaaacgtgctgctggcccagggcaagatcgtgaagatctgcgacttcggcctggccagagacatcatgcacgacagcaactacgtgagcaagggcagcaccttcctgcccgtgaagtggatggcccccgagagcatcttcgacaacctgtacaccaccctgagcgacgtgtggagctacggcatcctgctgtgggagatcttcagcctgggcggcaccccctaccccggcatgatggtggacagcaccttctacaacaagatcaagagcggctacagaatggccaagcccgaccacgccaccagcgaggtgtacgagatcatggtgaagtgctggaacagcgagcccgagaagagacccagcttctaccacctgagcgagatcgtggagaacctgctgcccggccagtacaagaagagctacgagaagatccacctggacttcctgaagagcgaccaccccgccgtggccagaatgagagtggacagcgacaacgcctacatcggcgtgacctacaagaacgaggaggacaagctgaaggactgggagggcggcctggacgagcagagactgagcgccgacagcggctacatcatccccctgcccgacatcgaccccgtgcccgaggaggaggacctgggcaagagaaacagacacagcagccagaccagcgaggagagcgccatcgagaccggcagcagcagcagcaccttcatcaagagagaggacgagaccatcgaggacatcgacatgatggacgacatcggcatcgacagcagcgacctggtggaggacagcttcctgtag

SEQ ID NO: 328728 - DNA, 3270 bp, Artificial Sequence
  derived and/or modified sequence
atgggtacttcccaccctgccttcttagtgttggggtgtctgctgacaggtctctccttgattctgtgccagcttagcttgccttcaattctgcctaatgaaaacgagaaagtggtacagctgaactctagcttctcacttcggtgtttcggtgaatccgaagtctcctggcagtatcccatgagcgaagaggaatcttccgacgtggagattagaaacgaggaaaataactctggtctgttcgttactgtgctggaggttagtagtgcgtcagccgctcacaccggtctgtacacatgttactacaatcacactcagactgaggagaacgagttagagggccgacacatatacatctatgttcctgatcccgacgttgcctttgtccctctgggtatgaccgactacctcgtgattgtagaagacgacgacagtgccatcattccttgtaggacaacggatccagaaactcccgtgacactgcacaatagcgagggagttgttcccgcctcctacgattccagacaaggtttcaacggtaccttcacagtgggcccttacatttgcgaagcaacggtaaaagggaaaaagttccagactattcccttcaatgtttatgctctgaaggccacaagcgagctggacctcgagatggaagccctgaagactgtttacaagagcggtgaaaccatagtcgtgacatgtgctgtgttcaacaatgaagtcgttgacttgcagtggacatacccgggggaagttaaaggcaaagggattacaatgcttgaagagatcaaggttcccagcatcaagctggtgtacaccctaaccgtaccagaagctaccgttaaggacagcggcgactacgagtgtgctgcaaggcaggcgactagggaagttaaggagatgaagaaggtaacaatcagtgttcacgagaagggattcatagagatcaaacctacattcagccaattggaggcagtgaacttacatgaggtgaagcacttcgtcgttgaagtaagggcatacccccctcctaggatttcatggttgaagaataatctgacactgattgaaaatctcaccgagattacgactgacgttgagaagatccaagaaatcaggtatcgctcgaaactgaaactgattagagctaaggaagaggatagtggacattataccatagttgcacagaatgaagatgctgttaagagttacacgtttgaattgctaacccaggttccgagctcaattctggaccttgttgacgatcatcatgggtcgaccgggggacagaccgtaagatgcacagctgagggaacaccacttcccgacatcgagtggatgatttgcaaggatattaagaaatgtaacaatgaaacgagttggacaatcctcgccaacaatgtatcaaatatcattaccgaaattcattcccgggaccgctccacagtggaggggcgcgtaacattcgccaaggtagaggagacgattgctgtgcgctgccttgccaagaatctgttaggcgccgagaacagagagttgaagcttgtggcccccaccttacgcagtgagctcacggtggcagccgctgtgctggttttactcgtaatcgttattattagcctcattgtcttggtcgtgatttggaagcaaaaacccaggtatgaaattaggtggagagtcatcgaaagtattagtccagacggccatgagtacatttacgtggacccaatgcaactgccctacgatagtagatgggagtttcccagggatggcctggtgcttggcagggtgctcggctcgggagccttcggcaaagtggtcgaagggaccgcttacgggttgtctaggagccagcccgttatgaaggtagcagtcaagatgctgaagccgactgcccgcagcagtgaaaaacaggcactcatgtctgagctgaagataatgacccacctaggtcctcaccttaacattgtgaatctactgggcgcttgcacaaaatctggccctatatacatcatcactgaatattgtttctatggggatcttgttaactacctgcacaagaaccgtgatagctttctgtcacatcacccagagaaacccaaaaaagagttggatatattcggtttgaatcccgctgacgaatcaactaggtcttacgtcatcctgtctttcgagaataacggggactatatggacatgaagcaagccgatacaacgcaatatgtgcccatgttggaacgcaaggaggtgtccaagtattccgacattcagagaagcctttatgatcgcccagcctcctacaagaagaagagcatgttagactctgaggtgaagaatctcctgagcgatgacaattccgaaggcttgacgttgttagacttacttagttttacctaccaggttgccaggggcatggagttccttgcatctaaaaattgcgtccatcgagacctggccgctagaaacgtcctccttgcccagggaaagatcgtcaaaatctgcgatttcggcttggccagagacatcatgcatgactcaaattacgtctccaagggcagcacctttctgcctgtgaaatggatggcaccggaaagcatattcgacaacctgtacaccacactgagtgacgtgtggagttatgggatccttctgtgggaaatcttcagtctcggcggaactccatacccaggtatgatggtcgatagcaccttttacaataaaatcaagtcggggtaccgtatggctaagcccgaccatgcaacttcagaagtctatgaaatcatggtgaagtgctggaattctgaacctgaaaaacgtccttccttttaccacctgagcgaaatagtggaaaacctgctccctggccaatacaagaagtcatatgagaagattcatttggattttttgaaatccgatcatcccgccgtagcccggatgagggtggatagcgacaatgcttacatcggtgtgacatataaaaatgaagaagacaaactaaaagactgggaaggaggcctagacgagcaacgtctctccgccgattcaggttatattatcccactgcctgatatagacccagtgccagaggaagaagatcttgggaaaagaaatcggcatagttctcagaccagtgaggaaagcgccatcgaaacaggtagtagcagtagcacattcatcaagcgagaagacgagaccatcgaagatattgatatgatggatgatatcgggattgattcttccgacctggttgaggacagttttctttag

SEQ ID NO: 328729 - DNA, 3270 bp, Artificial Sequence
  derived and/or modified sequence
atgggcaccagccacccagccttcctggtgctgggctgcctgctgaccggcctgagcctcatcctgtgccagctgagcctgcccagcatcctgcccaatgaaaatgagaaggtggtgcagctgaacagcagcttcagcctgcgctgcttcggggagagcgaggtgtcctggcagtaccccatgtctgaggaggagagcagtgatgtggagatcagaaatgaggagaacaacagcggcctgtttgtgacagtgctggaggtgtcctctgccagcgctgcccacacaggcctgtacacctgctactacaaccacacccagacagaagaaaatgagctggagggccgccacatctacatctacgtgcctgaccctgatgtggcctttgtgcccctgggcatgacagactacctggtgattgtggaggatgatgattctgccatcatcccctgcaggaccacagatcctgagacccctgtgaccctgcacaacagcgagggcgtggtgcctgccagctatgacagccggcagggcttcaacggcaccttcaccgtgggcccctacatctgtgaggccaccgtgaagggcaagaagttccagaccatccccttcaacgtgtatgccctgaaggccaccagcgagctggacctggagatggaggccctgaagacagtgtacaagtctggagagaccatcgtggtgacctgtgctgtgttcaacaatgaggtggtggacctgcagtggacctacccaggagaggtgaagggcaagggcatcaccatgctggaggagatcaaggtgcccagcatcaagctggtgtacaccctgactgtgcctgaggccaccgtgaaggacagcggggactatgaatgtgccgcccggcaggccacccgggaggtgaaggagatgaagaaggtgaccatctctgtgcatgagaagggcttcatcgagatcaagcccaccttcagccagctggaggccgtgaacctgcacgaggtgaagcactttgtggtggaggtgcgggcctaccccccaccccgcatctcctggctgaagaacaacctgaccctgattgagaacctgacagagatcaccacagatgtggagaagatccaggagatccgctaccgcagcaagctgaagctgatccgggccaaggaggaggacagcggccactacaccatcgtggcccagaatgaagatgctgtgaagagctacacctttgagctgctgacccaggtgcccagcagcatcctggacctggtggatgaccaccacggcagcactggaggccagacagtgcgctgcacagctgagggcacccccctgcctgacatcgagtggatgatctgcaaggacatcaagaagtgcaacaatgagacctcctggaccatcctggccaacaacgtgagcaacatcatcacagagatccacagccgggacaggagcacagtggagggccgggtgacctttgccaaggtggaggagaccatcgctgtgcgctgcctggccaagaacctgctgggcgctgagaaccgggagctgaagctggtggcccccaccctgcggtctgagctgactgtggccgctgctgtgctggtgctgctggtgattgtcatcatcagcctgattgtgctggtggtgatctggaagcagaagcccaggtatgagatccgctggagggtcatcgagagcatcagcccagatggccacgagtacatctacgtggaccccatgcagctgccctatgacagccgctgggagttccccagagatggcctggtgctgggccgggtgctgggcagcggggccttcggcaaggtggtggagggcacagcctacggcctgagccgcagccagcctgtgatgaaggtggccgtgaagatgctgaagcccacagcccggagcagcgagaagcaggccctgatgtctgagctgaagatcatgacccacctgggcccccacctgaacatcgtgaacctgctgggcgcctgcaccaagagcggccccatctacatcatcacagagtactgcttctatggagacctggtgaactacctgcacaagaacagagacagcttcctgagccaccaccctgagaagcccaagaaggagctggacatcttcggcctgaacccagcagatgagagcaccaggagctatgtgatcctgagctttgagaacaacggggactacatggacatgaagcaggccgacaccacccagtatgtgcccatgctggagaggaaggaggtgtccaagtacagcgacatccagaggagcctgtatgacaggcctgccagctacaagaagaagtccatgctggacagcgaggtgaagaacctgctgagtgatgacaacagcgagggcctgaccctgctggacctgctgtccttcacctaccaggtggcccggggcatggagttcctggccagcaagaactgtgtgcaccgggacctggccgccagaaatgtgctgctggcccagggcaagatcgtgaagatctgtgactttggcctggcccgggacatcatgcatgacagcaactacgtgtccaagggcagcaccttcctgcctgtgaagtggatggcccctgagagcatctttgacaacctgtacaccaccctgagtgatgtgtggagctatggcatcctgctgtgggagatcttcagcctgggcggcaccccctacccaggcatgatggtggacagcaccttctacaacaagatcaagagcggctacaggatggccaagccagaccacgccaccagcgaggtgtatgagatcatggtgaagtgctggaacagcgagcctgagaagaggcccagcttctaccacctgtctgaaattgtggagaacctgctgcccggccagtacaagaagagctatgagaagatccacctggacttcctgaagagtgaccaccctgctgtggccaggatgagggtggacagcgacaatgcctacatcggcgtgacctacaagaatgaggaggacaagctgaaggactgggagggcggcctggatgagcagaggctgtctgctgacagcggctacatcatccccctgcctgacattgatcctgtgcctgaggaggaggacctgggcaagaggaacagacacagcagccagaccagcgaggagagcgccatcgagaccggcagcagcagcagcaccttcatcaagagagaagatgagaccatcgaggacatcgacatgatggatgacatcggcatcgacagcagtgacctggtggaggacagcttcctgtag

SEQ ID NO: 328730 - DNA, 3270 bp, Artificial Sequence
  derived and/or modified sequence
atgggcaccagccaccccgccttcctggtgctgggctgcctgctgaccggtctgtccctcatcttatgccagctgtctttacccagcattctgcctaacgagaacgaaaaggtggtacaattgaactcgtctttctcattacgatgtttcggggagtcagaagtgtcgtggcagtaccccatgtccgaggaggagtcatcagacgttgagatcagaaacgaggaaaacaactcaggcctgtttgtgaccgttcttgaggtgagctctgcctctgctgcacacactggactgtatacgtgttattacaaccatacacaaacagaagagaatgagcttgagggcagacatatctatatttatgtgcccgatccagatgtggcttttgtcccactgggaatgaccgactatctcgtcattgtcgaggacgatgatagcgctataatcccctgccggacgactgaccctgagaccccagtgactctccacaactcggagggcgtcgtgccagcctcctatgattctcggcaggggtttaatggtaccttcacagtgggaccatatatctgtgaagcaaccgtgaagggtaagaaattccagacaatcccttttaatgtctacgctcttaaggccacttctgagttggatctcgagatggaagcactcaaaacagtctataaatccggtgagactatcgtggttacatgtgcagtgttcaacaatgaagtagtggacctgcagtggacttatcccggggaagtgaagggcaagggaatcaccatgctcgaggaaatcaaagtaccatcgataaagcttgtttatacactgactgtgccagaagcaacagtcaaggatagtggtgattacgaatgcgcagctagacaagcaacgagagaagtgaaagaaatgaaaaaggtcacaatctcggtccacgaaaagggctttatcgagatcaagccaaccttctcccagctggaagcggtgaatctgcatgaggtaaagcattttgtcgtagaagtacgggcttatccacctccccgcatatcttggcttaagaacaatctgacgctgattgaaaacttgacagaaatcaccacagatgttgagaaaatccaagaaatcagatataggtctaagctgaaattaatacgggcaaaggaggaagacagcggtcactataccatagtggctcagaatgaagatgccgtgaaaagctacaccttcgagctgcttacccaggtaccgagttccattctggatctggtagatgaccatcatggcagcaccgggggccagactgtaagatgcaccgccgagggaacacctctccctgatattgagtggatgatctgtaaagatatcaagaagtgcaacaatgagacaagttggactattttggcaaacaacgtgtccaacatcatcacagaaattcactcacgagatcgttcaacagtggagggccgtgtgactttcgctaaggtcgaagagactattgcagtccggtgtctggccaagaatttattaggcgcggaaaacagagagctgaagctcgtggctcccaccctgagatctgaactcaccgtcgccgccgctgtgctggtcttgctagtgatcgtgatcatatcactgatagttctcgtcgtcatctggaagcagaagcctcgatatgagatccgctggcgagtcatcgaaagcataagccccgacggccatgagtatatctatgtggatcccatgcagttaccctatgatagtaggtgggagttccctcgtgatgggttggtcctcgggagagttctgggcagcggcgcctttgggaaagtggtggagggaaccgcatatggcttatccaggagccaacccgtgatgaaagttgcagttaaaatgctgaaacccactgcccggagcagtgaaaagcaggcgttgatgagcgagctcaagattatgacacacttggggccacacttgaacatagtaaatctgctgggtgcctgcactaagtccggacccatttacatcatcactgagtactgcttttatggggatttagtcaactacctgcacaaaaatagagactcttttctaagccaccacccagagaaaccgaagaaagaattagacattttcggtctgaacccggcagatgaatccacaagatcttacgtgatccttagttttgagaataatggcgattatatggatatgaagcaggcggatactactcagtatgtgcccatgctggagcgaaaagaggttagcaaatactcagatatccagaggtctctgtatgacagacccgcctcctataagaagaagagcatgctcgatagcgaggtaaagaacttgctctccgacgacaactctgagggcctaactttgttggacctgctgtcattcacatatcaggtggcgcggggaatggaattccttgcgtccaaaaactgcgtgcatcgagatctggctgcccgaaacgtcctcctagctcaaggcaagatcgtgaaaatttgcgacttcggtctggcccgggacatcatgcacgattctaactatgtttccaaaggaagcacattcttacccgtgaaatggatggcgcccgagtcaatcttcgacaatctttacactactcttagcgacgtttggagctatggcatcttgctctgggaaatctttagcttgggcggcacaccctacccaggaatgatggtcgatagcacattttacaacaagattaaaagcggctacaggatggccaagcctgaccatgctacgagcgaggtttacgaaatcatggtcaagtgctggaatagcgaaccagagaagcgaccctccttctatcatttgtcagaaatagttgagaacctgcttcccggtcaatacaagaagtcctatgagaagatccacctggatttcctgaagtcagatcaccctgctgtggccagaatgagagtggatagcgacaacgcttacatcggggtgacctataagaatgaagaagataaactaaaagattgggagggcggattggatgaacagcggttgagcgcggattccggatatattattcctctccctgacatcgatcctgtcccagaagaagaggatctcggaaaaagaaatagacatagcagccagacaagcgaagagtcagcaatcgaaacagggtctagctcaagcacatttatcaaaagagaggacgaaacaatcgaagatatcgatatgatggatgacattggaattgattccagcgacctcgtcgaggacagtttcttgtag

SEQ ID NO: 328731 - DNA, 3270 bp, Artificial Sequence
  derived and/or modified sequence
atggggacaagccatcctgcttttctggtccttgggtgcctcttgactggcctttcgctcatcctgtgccagctgagcctgccgagtattctgccaaatgagaacgagaaggtcgtacaactgaactcatctttttcgcttaggtgtttcggcgaaagcgaagtgtcttggcagtatcctatgagtgaagaagaatccagcgacgtagagatccgcaatgaagagaacaacagcggattgtttgtgaccgttctagaagtgtcatccgcaagcgccgctcatactggtttgtacacatgttactacaatcacacccaaacagaggagaacgaattggaagggaggcacatatatatttatgttcctgaccccgacgtcgccttcgtgccattgggcatgacagattatctggttatcgtggaggatgacgattccgccataatcccttgtcggactacagaccccgaaacacccgtgacactacacaactcggaaggcgtcgtgcccgcatcatatgactctcggcaagggttcaacggaaccttcacagttggtccctatatttgcgaagctactgtcaaaggaaagaagttccagacaattccttttaatgtttacgcattaaaggctacatctgagcttgacctcgaaatggaggcactaaaaactgtctacaagtccggggaaacaatcgtggttacttgcgcagtgttcaataatgaagttgtagacttgcagtggacctaccccggagaagtgaaaggcaagggtatcactatgctggaagagatcaaagtgccctctatcaagttggtgtacaccctcacggttccagaagcaactgtcaaagacagtggcgactacgagtgtgcggctcgccaggccactagagaggtgaaggaaatgaagaaggtgacaatcagcgtgcacgaaaagggatttatcgagattaagccaacgtttagtcagttagaggctgtcaacttacatgaagtgaaacattttgtcgtagaagtgagggcatatcctccaccacgcatcagttggctgaaaaacaatctgaccctcatcgagaacctcaccgaaatcactaccgatgttgaaaagatacaagagattcgctaccggtccaagctcaaactaattagggccaaagaagaggattctggacactatactatcgtggcccaaaatgaggatgccgtcaaatcctatacatttgagttactcactcaggtcccttcttccatcctggatctggtagacgaccatcatggaagtactggtgggcagacagtacgctgcacagctgagggtactcccctgccagacatagagtggatgatctgcaaggatattaagaagtgcaataatgagacatcttggaccatcctggccaacaacgtatcaaatattattaccgagatccacagcagagacaggtcaacggtggagggtagagtgacgtttgctaaagtagaggagacgatagcggtacgctgcttggctaagaacttacttggtgctgagaacagggagctgaaactggtagccccaacactacggagtgagcttaccgtggcagccgctgtgttagtgctgcttgtcatcgtcatcattagccttattgtgttggtcgtcatttggaagcagaaaccaagatatgagatccgttggagagttatcgagtccataagtccagatggacacgagtacatatatgtggaccccatgcaacttccttacgacagtagatgggagtttccaagagacgggttagtgctgggcagggtgttgggctccggcgcattcggcaaagtagtggaagggaccgcctatggactgagccgctcgcagcctgtcatgaaagtggctgtcaagatgctaaagcccacagccagatcgagcgaaaaacaggccctgatgtctgagctcaagattatgacgcacctggggcctcacctgaatatcgtgaacctgcttggcgcatgtacaaaaagtggccctatatacatcattacggaatactgcttttacggcgatcttgtcaattacttacataagaatagggactcattcctgagtcaccatcctgagaaacctaaaaaagaactggacatttttggtctgaaccccgctgatgagtccacaagatcttacgtcatcctttcatttgagaataatggggactatatggacatgaaacaggccgacaccactcaatacgtgccgatgctagagcgcaaggaggtttccaaatactcagacattcagcggtccctttacgaccgcccagcctcatacaaaaaaaagtctatgcttgattcggaagtcaagaatctcctcagtgatgacaacagtgaaggactgacactccttgacttgttgtcattcacctaccaagtggctcggggtatggagtttctcgcctctaaaaactgcgttcaccgcgatctggccgctaggaacgttctgctcgcacaaggcaaaattgttaagatctgtgattttgggttagcccgagatattatgcatgatagtaactacgtttcaaagggttctacgtttctcccagtgaagtggatggcgcctgaatctattttcgataacctctatacgactctgtcggatgtgtggtcctatggcattttactgtgggagatcttctccctcggaggtacgccttatcccggaatgatggtggactcaacgttttacaacaagatcaaaagcggttacaggatggcaaagcccgatcacgctacctctgaggtctatgagatcatggtcaaatgctggaactctgagcccgaaaaacgtccttcattctaccatctatccgaaattgtggagaatcttctcccgggacagtacaaaaagtcttatgaaaagatccatctggattttctgaaatctgaccacccggcagtggcacggatgcgcgtggacagcgacaatgcttacatcggtgtaacctacaagaacgaagaagataaactaaaggattgggagggcggtttggatgaacagaggctctctgcggactctggctacatcatccccctccctgacattgacccagtacccgaggaggaggatctgggaaagcgaaaccgccattctagtcagacgagcgaggagtctgcaattgaaaccgggtcctcctcctccacttttataaagagagaagatgaaactatcgaggacatcgatatgatggacgacatcgggatagatagctctgacctggtggaagatagtttcctgtag

SEQ ID NO: 328732 - protein, 1226 aa, Artificial Sequence
  derived and/or modified sequence
MGEQKVSRQFKQCHRTTSWAKSKLFSRLSSMFLQQLGKNIKFGQRSPNAIPMNKANSGEASLEEDLFLTSPMEIVTQQDIVLSDAENKSSDTPSSLSPLNLPGAGSEMEEKVAPVKPSRPKRHFSSAGTIESVNLDAIPLAIARLDNSAAKHKLAVKPKKQRVSKKHRRLAQDPQHEQGGLESRPCLDQNGHPGEDKPTWHEEEPNPLDSEEERRRQEDYWRELEAKCKRQKAEAAEKRRLEEQRLQALERRLWEENRRQELLEEEGEGQEPPLEAERAPREEQQRSLEAPGWEDAERREREERERLEAEEERRRLQAQAQAEERRRLEEDARLEERRRQEEEEGRCAEELKRQEEEEAEGWEELEQQEAEVQGPPEALEETGEGRRGAEEEDLGEEEEEGQAHLEDWRGQLSELLNDFEERLEDQERLKPEGQREHSEEPGICEEQNPEAERRREQQGRSGDFQGADRPGPEEKREEGDTEPLLKQEGPVEAAQPPVERKEAAALEQGRKVEELRWQEVDERQTMPRPYTFQVSSGGKQILFPKVNLSPVTPAKDTGLTAAPQEPKAPKASPVQHALPSSLSVPHTAILVTGAQLCGPAVNLSQIKDTACKSLLGLEEKKHAEAPAGENPPRGPGDARAGSGKAKPRQESPSSASALAEWASIRSRILKNAESDPRSSERDQLRPGDESTPRGRCDSRGNQRKTPPVNAKFSIMPAWQKFSDGGTETSKQSTEAESIRKRPMLGPSEETAPQPPPAGVRELGKGPEKSEMHREPADTTEGCKFAKDLPSFLVPSLPYPPQKVVAHTEFTTSSDSETANGIAKPDPVMPGGEEKASPFGIKLRRTNYSLRFNCDQQAEQKKKKRHSSTGDSADAGPPAAGSARGEKEMEGVALKHGPSLPQERKQAPSTRRDSAEPSSSRSVPVAHPGPPPASSQTPAPEHDKAANKMPLAQKPALAPKPTSQTPPASPLSKLSRPYLVELLSRRAGRPDPEPSEPSKEDQESSDRRPPSPPGPEERKGQKRDEEEEATERKPASPPLPATQQEKPSQTPEAGRKEKPMLQSRHSLDGSKLTEKVETAQPLWITLALQKQKGFREQQATREERKQAREAKQAEKLSKENVSVSVQPGSSSVSRAGSLHKSTALPEEKRPETAVSRLERREQLKKANTLPTSVTVEISDSAPPAPLVKEVTKRFSTPDAAPVSTEPAWLALAKRKAKAWSDCPQIIK

SEQ ID NO: 328733 - protein, 248 aa, Artificial Sequence
  derived and/or modified sequence
MAAAAAAAAEQITLVIWAVIRIGPNGCDSMEFHESGLLRFKQVSDMGVIHPLYKSTVGGRRNENLVITGNNQPIVFQQGTTKLSVENNKTSITSDIGMQFFDPRTQNILFSTDYETHEFHLPSGVKSLNVQKASTERITSNATSDLNIKVDGRAIVRGNEGVFIMGKTIEFHMGGNMELKAENSIILNGSVMVSTTRLPSSSSGDQLGSGDWVRYKLCMCADGTLFKVQVTSQNMGCQISDNPCGNTH

SEQ ID NO: 328734 - DNA, 747 bp, Artificial Sequence
  derived and/or modified sequence
atggcagccgcagcagccgccgcagccgaacaaatcaccctcgtgatttgggcagttatcagaataggcccaaatgggtgcgatagcatggagtttcatgagagtgggctactgcggtttaagcaggtgagtgatatgggggttattcatcctctttataaatctaccgttggaggtcgacgaaacgagaaccttgtgatcaccggcaataaccagcccatcgtgttccagcagggaacaactaaactcagcgtggagaacaacaaaaccagtattacatcagacattgggatgcaattttttgacccccgcacccagaacatcctcttctctacagattatgagacacacgagttccacttgcccagtggcgtcaagtctctcaacgtccagaaggcctctactgaacggatcacttccaatgccaccagcgatctaaatatcaaagtggacggtcgcgcaattgtccgtggtaatgagggagtcttcattatgggaaaaactatagagtttcatatgggcggcaacatggaattaaaggcggagaattcaattatcctgaacgggagcgtgatggtctctactactcggctcccgagctcgagctccggcgatcagctgggatctggagattgggttcgctacaagctctgcatgtgcgcagatggtaccttgttcaaggttcaagttacctcacagaacatgggatgccaaattagtgataatccctgcggtaatactcattag

SEQ ID NO: 328735 - DNA, 747 bp, Artificial Sequence
  derived and/or modified sequence
atggctgctgctgctgctgctgctgctgagcagatcaccctggtgatctgggccgtcatccgcatcggccccaacggctgtgacagcatggagttccatgaaagtggcctgctgcgcttcaagcaggtgtctgacatgggcgtcatccaccccctgtacaagagcacagtgggcggcagaagaaatgaaaacctggtgatcaccggcaacaaccagcccatcgtgttccagcagggcaccaccaagctgtctgtggagaacaacaagaccagcatcaccagtgacatcggcatgcagttctttgaccccaggacccagaacatcctcttcagcacagattatgagacccatgagttccacctgcccagcggcgtgaagagcctgaatgtgcagaaggccagcacagagcgcatcaccagcaatgccaccagtgacctgaacatcaaggtggatggccgggccatcgtgagaggaaatgaaggagtcttcatcatgggcaagaccatcgagttccacatgggcggcaacatggagctgaaggccgagaacagcatcatcctgaatggatctgtgatggtgtccaccacccggctgcccagcagcagcagcggggaccagctgggcagcggggactgggtgcgctacaagctgtgcatgtgtgctgatggcaccctcttcaaggtgcaggtgaccagccagaacatgggctgccagatcagtgacaacccctgtggcaacacccactag

SEQ ID NO: 328736 - DNA, 747 bp, Artificial Sequence
  derived and/or modified sequence
atggccgccgccgccgccgccgccgccgagcagatcaccctggtgatttgggcggtgattcgcatcggacctaatgggtgtgatagcatggagtttcacgagtctggcctgctgcgtttcaagcaggtctccgacatgggtgtgatccacccactgtacaagtccactgtaggtggacggcgcaacgagaaccttgtcattaccggaaataaccagccaattgtgttccagcagggcacaactaagctgagcgttgaaaacaacaagacttcaatcacttccgatataggcatgcagtttttcgatcccagaacacagaacatcctcttctccacagactatgagacccatgagtttcacctgccgtcaggagtaaagagtctcaacgtgcaaaaagcctcaaccgaaagaattacaagtaatgccacctccgacttgaacatcaaggtggatggccgtgccatcgtgcggggaaacgagggtgtctttattatggggaagacgattgaattccacatgggcggcaatatggaactgaaagccgagaattccatcatcctcaatgggagtgtcatggtgtccacgacaagattgccaagtagttcgagtggggatcagctgggatcaggtgattgggttcggtataagctgtgtatgtgtgccgacgggaccctttttaaggtgcaagtgacgtcccaaaatatgggttgccagatctctgacaatccctgcggaaatactcattag

SEQ ID NO: 328737 - DNA, 747 bp, Artificial Sequence
  derived and/or modified sequence
atggcagcagctgcagcagccgctgccgagcaaatcaccctggtaatctgggctgtcataaggattgggccaaacggatgtgattctatggagtttcatgagtctgggttgctacgtttcaaacaagtttcggacatgggtgtaatccatccactttacaaatccacagtcgggggacgtcgtaacgaaaacctcgtcatcactgggaacaatcagcctatcgtgttccagcaagggactacaaaattaagtgtggaaaataacaaaaccagcatcacgtccgacattggaatgcaattctttgatcccagaactcagaatattctattctcaactgactatgagacccatgagttccacttgcctagtggggtgaaatcattgaatgtgcagaaagcttccactgaacgtataacgtctaacgcaaccagtgacctgaatattaaagtggatggccgagccatcgttcggggtaacgaaggcgtatttataatgggcaagaccatagaattccatatggggggaaacatggaactcaaagcagaaaattccatcatcctgaatggtagtgtgatggtgtctacaacccgtttgccctcctccagcagcggagaccagttaggttccggggactgggtcaggtacaagctgtgtatgtgcgcagacggcaccctgtttaaggtccaggtgacctcacagaatatgggctgccaaatttctgataacccctgtggcaacacccactag

SEQ ID NO: 328738 - DNA, 2645 bp, Artificial Sequence
  derived and/or modified sequence
atggcggcagcggcggcggcggctgcagaacagataacacttgttatttgggccgtgattcgcattggaccaaatggctgtgatagtatggagtttcatgaaagtggcctgcttcgatttaagcaagtatctgacatgggagtgatccaccctctttataaaagcacagtaggaggaaggcgaaatgaaaatttggtcatcactggcaacaaccagcctattgtttttcagcaagggacaacaaagctcagtgtagaaaacaacaaaacttctattacaagtgacatcggcatgcagttttttgacccgaggactcaaaatatcttattcagcacagactatgaaactcatgagtttcatttgccaagtggagtgaaaagtttgaatgttcaaaaggcatctactgaaaggattaccagcaatgctaccagtgatttaaatataaaagttgatgggcgtgctattgtgcgtggaaatgaaggtgtattcattatgggcaaaaccattgaatttcacatgggtggtaatatggagttaaaggcggaaaacagtatcatcctaaatggatctgtgatggtcagcaccacccgcctacccagttcctccagtggagaccagttgggtagtggtgactgggtacgctacaagctctgcatgtgtgctgatgggacgctcttcaaggtgcaagtaaccagccagaacatgggctgccaaatctcagacaacccctgtggaaacactcattaaaagaaccccagaggtcaccaacatgtttatatcttgacttgacttttttatgcatgcaaatcattgtttttacagagtttgtgataactcataattattttaatggcagagcactgctgtatctgttttatggtctacatagttaaaatcttctcagagagcctaaattctaatacattttattaatttatactaatcttcatatttactgttctctaaaataattatgagaagcaaataaaatcaaaagtcatgtttaaagacgtgtttttaaaattccactatcccttttctaaaggttaaaggtctgaagcagctgtttagattcactgtaagtaaactttggtaactctaatggggatagacccacttaagatatttaaaaaggtatggcatcagcgtttcatgctctgccttttagcttctaaaaggaaagatgcagatttctagtgcattaagcctgagccatattctcacatgcaagtgaagtcattaaagaactttacatatgtgagatagaaacaatggttccttagttttgcactgggaagaaaatattttgtaaaagaatgtttatttgaaataatgataactatcaattgttcacaatgtggtggaaattaaaacaccatctcagctttaacttttaaataataatgataactatctttattgagcatcttctacatcctaggcattgtcctaggcattgcatgtttatatccccaattctcaccacaaccctgcaagtaggtggtattatccaagttttacccattaagaaactgaagatcagagaagttaagaaacttgctcaacatcatatagtaagtagcagagttgggattggaattcaggcatgactcaaacctggatgtacttgattccaaatgccatgttgttttcactctctgcactgactttttaattatttaaaactctagaaagatgaacaaaggttaatttaaacttacctaagaagatgagaatcaaacaaaacagatatgcttactctagttaaaaagaaaataaatctcatgtcagacccagaaaggaccaatcactgtccgattgtaagctatgttgggccaattccaaaatattatacgatggagaggtcaaatttacctacttctgagttacctcagtttcccaacaatggaccttggcacactggagtaacaatacataacagagttgccaagatatttataccctcagcactcggggcaacacagtggaaagtggggaggccatagacccaaacaagttctttgggccaggcatggcctagtaagtacaccatgcctcgaaaataagtccagaagcactggactaaagagtgctaatgcaggaaataatacacataatttttaggtaaggataataatttatctctgctcctaatattactatcccattgtaattatttataaccctcaagccagttgatttttaatatatttgattggaaaagaactctctggtattattaagactcacacagaatcagggacagggcccccaaaggagtttgctgtaaaataggcagtagagttgtggcatgggcccaaccctgcattcaagtgtaacagcattctgtcagggtcactttgaattgtgcacataagaaaaccaatacaaaaaacaatttgtattcaatattgtcacatttctctctggtagaaaaatcaaataccttagagattatgaagtcattaatttatactgaaattggattgacttactacctaacactgagcgctgtttttaaatgaaaagaatgagatttataaccacttgagtgttattgcagtgatatttgaactcatttgaatatattcagtatcatttaatgtctgaattcagaaaaaaatgccgaaatttttattcagatg

SEQ ID NO: 328739 - DNA, 744 bp, Artificial Sequence
  derived and/or modified sequence
atggccgccgccgccgccgccgccgccgagcagatcaccctggtgatctgggccgtgatccgcatcggccccaacggctgcgacagcatggagttccacgagagcggcctgctgcgcttcaagcaggtgagcgacatgggcgtgatccaccccctgtacaagagcaccgtgggcggccgccgcaacgagaacctggtgatcaccggcaacaaccagcccatcgtgttccagcagggcaccaccaagctgagcgtggagaacaacaagaccagcatcaccagcgacatcggcatgcagttcttcgacccccgcacccagaacatcctgttcagcaccgactacgagacccacgagttccacctgcccagcggcgtgaagagcctgaacgtgcagaaggccagcaccgagcgcatcaccagcaacgccaccagcgacctgaacatcaaggtggacggccgcgccatcgtgcgcggcaacgagggcgtgttcatcatgggcaagaccatcgagttccacatgggcggcaacatggagctgaaggccgagaacagcatcatcctgaacggcagcgtgatggtgagcaccacccgcctgcccagcagcagcagcggcgaccagctgggcagcggcgactgggtgcgctacaagctgtgcatgtgcgccgacggcaccctgttcaaggtgcaggtgaccagccagaacatgggctgccagatcagcgacaacccctgcggcaacacccac

SEQ ID NO: 328740 - DNA, 747 bp, Artificial Sequence
  derived and/or modified sequence
atggccgccgccgccgccgccgccgccgagcagatcaccctggtgatctgggccgtgatcagaatcggccccaacggctgcgacagcatggagttccacgagagcggcctgctgagattcaagcaggtgagcgacatgggcgtgatccaccccctgtacaagagcaccgtgggcggcagaagaaacgagaacctggtgatcaccggcaacaaccagcccatcgtgttccagcagggcaccaccaagctgagcgtggagaacaacaagaccagcatcaccagcgacatcggcatgcagttcttcgaccccagaacccagaacatcctgttcagcaccgactacgagacccacgagttccacctgcccagcggcgtgaagagcctgaacgtgcagaaggccagcaccgagagaatcaccagcaacgccaccagcgacctgaacatcaaggtggacggcagagccatcgtgagaggcaacgagggcgtgttcatcatgggcaagaccatcgagttccacatgggcggcaacatggagctgaaggccgagaacagcatcatcctgaacggcagcgtgatggtgagcaccaccagactgcccagcagcagcagcggcgaccagctgggcagcggcgactgggtgagatacaagctgtgcatgtgcgccgacggcaccctgttcaaggtgcaggtgaccagccagaacatgggctgccagatcagcgacaacccctgcggcaacacccactag

SEQ ID NO: 328741 - protein, 58 aa, Artificial Sequence
  derived and/or modified sequence
VIEPKCYKYEGKKCPPDINPVCGTDKRTYYNECALCVFIRQSTKKADKAIKIKKWGKC

SEQ ID NO: 328742 - protein, 134 aa, Artificial Sequence
  derived and/or modified sequence
MDFVMKQALGGATKDMGKMLGGEEEKDPDAQKKEEERQEALRQQEEERKAKHARMEAEREKVRQQIRDKYGLKKKEEKEAEEKAALEQPCEGSLTRPKKAIPAGCGDEEEEEEESILDTVLKYLPGPLQDMFKK

SEQ ID NO: 328743 - protein, 184 aa, Artificial Sequence
  derived and/or modified sequence
MDFVMKQALGGATKDMGKMLGGEEEKDPDAQKKEEERQEALRQQEEERKAKHARMEAEREKVRQQIRDKYGLKKKEEKEAEEKAALRGRGGGGRGEHPGHGAQIPARAAAGHVQEVTRPPAPAYSTCYYFFLVLSFLFIRLSLNSEGENLSWPLPLFPGQGLLPLSSPSHLPSSQGIHLHPTPK

SEQ ID NO: 328744 - protein, 77 aa, Artificial Sequence
  derived and/or modified sequence
MDFVMKQALGGATKDMGKMLGGEEEKDPDAQKKEEERQEALRQQEEERKAKHARMEAEREKVRQQIRDKYGLKKKEE

SEQ ID NO: 328745 - protein, 111 aa, Artificial Sequence
  derived and/or modified sequence
MDFVMKQALGGATKDMGKMLGGEEEKDPDAQKKEEERQEALRQQEEERKAKHARMEAEREKVRQQIRDKYGLKKKEEKEAEEKAALEQPCEGSLTRPKKAIPAGCGDEEEE

SEQ ID NO: 328746 - protein, 119 aa, Artificial Sequence
  derived and/or modified sequence
MDFVMKQALGGATKDMGKMLGGEEEKDPDAQKKEEERQEALRQQEEERKAKHARMEAEREKVRQQIRDKYGLKKKEEKEAEEKAALEQPCEGSLTRPKKAIPAGCGDEEEEEEESILDT

SEQ ID NO: 328747 - protein, 37 aa, Artificial Sequence
  derived and/or modified sequence
MDFVMKQALGGATKDMGKMLGGEEEKDPDAQKKEEER

SEQ ID NO: 328748 - DNA, 405 bp, Artificial Sequence
  derived and/or modified sequence
atggacttcgtaatgaagcaggctctgggaggtgctaccaaggatatgggaaaaatgctcggaggggaggaagaaaaggatccagatgcacagaagaaggaggaagagaggcaagaagcccttcggcagcaggaggaagagcgaaaagcaaaacatgcaaggatggaggcagaacgcgaaaaagtacgccagcagattagagataagtacggcctcaagaaaaaggaggagaaggaagcagaggaaaaagcggcactggaacagccctgtgaaggaagcctcacacggcccaaaaaggccattcctgccgggtgcggcgacgaggaggaagaagaagaagagagcatactggacaccgttttgaaatatcttcctggccctctgcaggacatgtttaagaaatag

SEQ ID NO: 328749 - DNA, 405 bp, Artificial Sequence
  derived and/or modified sequence
atggattttgtgatgaagcaggccctaggcggggccaccaaagacatggggaagatgctgggcggagaagaggagaaggatcccgacgcgcaaaagaaggaggaggaaagacaagaagccttacgacagcaagaagaagagagaaaagctaaacatgcgcgaatggaggcagagagggagaaagtaagacagcagatccgtgataagtacggtttgaaaaagaaagaggagaaagaagcggaggagaaggccgctctggagcagccatgcgagggctccttaactaggcccaaaaaagcaattcctgcagggtgtggcgacgaagaagaggaggaagaagagagcatcctcgataccgtcttaaagtatctgcccggaccactgcaagatatgttcaaaaagtag

SEQ ID NO: 328750 - DNA, 555 bp, Artificial Sequence
  derived and/or modified sequence
atggacttcgtgatgaaacaggccctgggcggggccaccaaggatatgggcaagatgctcggtggtgaggaggaaaaggatccagacgcacagaagaaggaagaggaaaggcaggaggcattaagacagcaggaggaggagcgcaaagccaagcacgcccgtatggaagctgaaagagagaaggtgagacagcagatccgagataagtatggactcaagaagaaggaagaaaaagaggccgaagaaaaggcagctctgagaggcaggggcggcggaggtcggggagagcaccctggtcacggtgcccagattccggcccgggccgccgccgggcatgtgcaagaggtgacacgcccccctgcaccagcctactctacctgttactatttcttcctcgttttgtcttttttattcatccgcttatcactgaattctgagggagagaacttaagttggcctctgccgctattccccggccagggtctgcttcccctatcctccccgtcccacctgcctagcagccaggggatacacctacaccccacacctaagtag

SEQ ID NO: 328751 - DNA, 234 bp, Artificial Sequence
  derived and/or modified sequence
atggacttcgttatgaagcaagctttagggggggctactaaagatatgggcaaaatgctcggcggggaggaggagaaggatcctgatgcacaaaagaaggaagaagagcgtcaggaagccctccggcagcaggaagaggaacgaaaggcaaagcatgctcgaatggaggcagagagagagaaggtaaggcagcagatccgggataagtacggactgaaaaaaaaggaagagtag

SEQ ID NO: 328752 - DNA, 336 bp, Artificial Sequence
  derived and/or modified sequence
atggactttgtgatgaagcaagccctgggcggggcaaccaaggatatgggaaagatgctgggtggcgaggaagaaaaagaccccgacgctcagaagaaagaggaggaaaggcaggaggcactgaggcaacaggaggaggaaaggaaagccaagcacgctaggatggaggccgaacgggagaaggttcgccagcagatccgtgacaaatatggcttgaagaaaaaggaggagaaggaagccgaagaaaaggcagcattggagcagccttgcgaggggtctctcactagaccaaaaaaagccattcccgccgggtgtggggatgaggaagaggaatag

SEQ ID NO: 328753 - DNA, 360 bp, Artificial Sequence
  derived and/or modified sequence
atggatttcgtaatgaagcaggccttgggcggagcaaccaaagacatgggcaaaatgcttggaggagaagaggagaaggacccggacgcacagaaaaaagaagaagagcgccaggaagccctgcggcagcaggaagaggaacggaaggctaagcacgctcgtatggaagccgaacgcgaaaaagtccggcagcagattcgagataaatatggtctgaagaagaaggaagagaaggaggccgaagagaaggctgcactggagcaaccctgtgagggtagcctgaccaggcctaaaaaagccattcccgcgggctgcggagatgaggaggaggaagaggaggagagcattctcgacacatag

SEQ ID NO: 328754 - DNA, 114 bp, Artificial Sequence
  derived and/or modified sequence
atggatttcgtcatgaaacaggcactgggaggcgccacaaaagacatgggcaagatgttgggaggagaggaagagaaagaccccgatgcccaaaaaaaggaggaggaacgctag

SEQ ID NO: 328755 - DNA, 405 bp, Artificial Sequence
  derived and/or modified sequence
atggattttgtcatgaaacaggctctcgggggtgctacaaaagatatgggaaaaatgctcggtggagaagaggaaaaggaccccgatgcccagaagaaggaagaggagcggcaagaggctctccgccagcaagaggaagagaggaaggcaaagcacgctagaatggaagccgagagagaaaaggtgaggcagcaaatccgtgacaagtacggcttgaagaagaaagaagagaaggaggctgaggaaaaagccgctctcgagcagccatgcgaaggaagcttgactagacctaagaaggcaatccctgcaggctgcggagacgaagaggaggaggaggaggagtcgatacttgacacagtgttgaagtatctgcccggccctctgcaggacatgttcaagaaatag

SEQ ID NO: 328756 - DNA, 405 bp, Artificial Sequence
  derived and/or modified sequence
atggactttgtgatgaagcaggccctgggcggggccaccaaggacatgggcaagatgctgggcggggaggaggagaaggaccctgatgcccagaagaaggaggaggagcggcaggaggccctgcggcagcaggaggaggagaggaaggccaagcacgccaggatggaggccgagcgggagaaggtgcggcagcagatccgggacaagtatggcctgaagaagaaggaggagaaggaggccgaggagaaggccgccctggagcagccctgtgagggcagcctgacccggcccaagaaggccatcccagctggctgtggagatgaggaggaggaggaggaggagagcatcctggacacagtgctgaagtacctgcccggccccctgcaggacatgttcaagaagtag

SEQ ID NO: 328757 - DNA, 555 bp, Artificial Sequence
  derived and/or modified sequence
atggactttgtgatgaagcaggccctgggcggggccaccaaggacatgggcaagatgctgggcggggaggaggagaaggaccctgatgcccagaagaaggaggaggagcggcaggaggccctgcggcagcaggaggaggagaggaaggccaagcacgccaggatggaggccgagcgggagaaggtgcggcagcagatccgggacaagtatggcctgaagaagaaggaggagaaggaggccgaggagaaggccgccctgcggggccggggcggcggcggccgcggggagcaccctggccacggggcccagatcccagcccgggctgctgctggccacgtgcaggaggtgacccggcccccagccccagcctacagcacctgctactacttcttcctggtgctgtccttcctgttcatccggctgagcctgaacagcgagggggagaacctgtcctggcccctgcccctcttccctggccagggcctgctgcccctgagcagccccagccacctgcccagcagccagggcatccacctgcaccccacccccaagtag

SEQ ID NO: 328758 - DNA, 234 bp, Artificial Sequence
  derived and/or modified sequence
atggactttgtgatgaagcaggccctgggcggggccaccaaggacatgggcaagatgctgggcggggaggaggagaaggaccctgatgcccagaagaaggaggaggagcggcaggaggccctgcggcagcaggaggaggagaggaaggccaagcacgccaggatggaggccgagcgggagaaggtgcggcagcagatccgggacaagtatggcctgaagaagaaggaggagtag

SEQ ID NO: 328759 - DNA, 336 bp, Artificial Sequence
  derived and/or modified sequence
atggactttgtgatgaagcaggccctgggcggggccaccaaggacatgggcaagatgctgggcggggaggaggagaaggaccctgatgcccagaagaaggaggaggagcggcaggaggccctgcggcagcaggaggaggagaggaaggccaagcacgccaggatggaggccgagcgggagaaggtgcggcagcagatccgggacaagtatggcctgaagaagaaggaggagaaggaggccgaggagaaggccgccctggagcagccctgtgagggcagcctgacccggcccaagaaggccatcccagctggctgtggagatgaggaggaggagtag

SEQ ID NO: 328760 - DNA, 360 bp, Artificial Sequence
  derived and/or modified sequence
atggactttgtgatgaagcaggccctgggcggggccaccaaggacatgggcaagatgctgggcggggaggaggagaaggaccctgatgcccagaagaaggaggaggagcggcaggaggccctgcggcagcaggaggaggagaggaaggccaagcacgccaggatggaggccgagcgggagaaggtgcggcagcagatccgggacaagtatggcctgaagaagaaggaggagaaggaggccgaggagaaggccgccctggagcagccctgtgagggcagcctgacccggcccaagaaggccatcccagctggctgtggagatgaggaggaggaggaggaggagagcatcctggacacctag

SEQ ID NO: 328761 - DNA, 114 bp, Artificial Sequence
  derived and/or modified sequence
atggactttgtgatgaagcaggccctgggcggggccaccaaggacatgggcaagatgctgggcggggaggaggagaaggaccctgatgcccagaagaaggaggaggagaggtag

SEQ ID NO: 328762 - DNA, 405 bp, Artificial Sequence
  derived and/or modified sequence
atggacttcgtgatgaagcaggccctgggcggcgccaccaaggacatgggtaagatgctgggcggcgaagaagaaaaggacccagatgctcaaaagaaagaagaagagagacaggaagcgttacggcaacaggaagaagagcgcaaagccaagcacgcgaggatggaagctgaaagagaaaaggtgcgacagcagattagagacaagtatggcctcaagaagaaggaggaaaaagaagccgaagaaaaggcggcccttgaacagccctgcgagggcagtctgacgcggccaaaaaaggccatacctgctgggtgtggggacgaagaagaagaagaggaggaatccatcctggatactgtgcttaaatacttacccgggccactgcaggatatgtttaagaaatag

SEQ ID NO: 328763 - DNA, 405 bp, Artificial Sequence
  derived and/or modified sequence
atggacttcgtgatgaagcaggccctgggcggcgccaccaaggacatgggtaagatgctgggtggtgaggaagagaaggatcctgatgcgcaaaagaaagaggaggagcggcaggaggcactgagacaacaggaggaggaacgcaaggcaaagcacgcccggatggaggcagagcgagagaaagtgcgtcagcaaatacgagacaagtatggccttaaaaaaaaggaggagaaagaagcagaggaaaaggccgccctggaacagccatgcgagggttcccttacaaggcccaagaaggcaattcccgcagggtgtggagacgaggaagaggaagaggaagagtcaatcctggataccgtccttaaatacctcccggggccgcttcaggacatgttcaagaagtag

SEQ ID NO: 328764 - DNA, 555 bp, Artificial Sequence
  derived and/or modified sequence
atggacttcgtgatgaagcaggccctgggcggcgccaccaaggacatggggaagatgctagggggcgaagaagagaaggatcccgatgcacaaaagaaagaggaggagcgtcaagaagcattgcgtcagcaggaggaagaacggaaagctaagcatgcacgcatggaggccgaacgcgagaaggtgaggcaacagatcagagacaagtatgggctcaagaagaaggaggagaaggaggccgaggagaaagctgcgttgagagggaggggtgggggaggccgaggcgagcaccctggacacggtgctcagatccctgcccgcgccgcggccggtcatgtgcaagaagtgacccggccccctgcccccgcgtattccacatgttattactttttcctagtcctgtctttcctgttcatcagattatccttgaattcagaaggcgaaaatctgtcctggccactccccctctttcccggtcaaggactgctccctctatcttccccttcccatctgccctcgtctcagggtatacatctccaccccacacctaaatag

SEQ ID NO: 328765 - DNA, 234 bp, Artificial Sequence
  derived and/or modified sequence
atggacttcgtgatgaagcaggccctgggcggcgccaccaaggacatgggcaagatgctgggcggtgaggaggagaaggaccctgatgcccagaagaaggaggaggagcggcaggaggctttgagacaacaggaagaagaacggaaggctaagcatgccagaatggaagcagagagagagaaggttcggcagcagatccgcgataaatatgggcttaagaagaaggaggagtag

SEQ ID NO: 328766 - DNA, 336 bp, Artificial Sequence
  derived and/or modified sequence
atggacttcgtgatgaagcaggccctgggcggcgccaccaaggacatgggcaaaatgcttggaggcgaggaggaaaaagacccagatgcgcagaaaaaagaggaggagagacaagaagctttgaggcaacaggaggaggagaggaaggccaagcatgccagaatggaggccgagagggaaaaagttcggcagcagatccgggataaatatggcctcaaaaaaaaagaagaaaaagaagcagaagagaaagcagccctcgagcagccatgcgaagggtcccttacccggccgaaaaaagctattccggccgggtgtggcgacgaagaggaggagtag

SEQ ID NO: 328767 - DNA, 360 bp, Artificial Sequence
  derived and/or modified sequence
atggacttcgtgatgaagcaggccctgggcggcgccaccaaggacatgggtaagatgcttggcggggaagaagaaaaggacccagatgcccagaaaaaagaagaggaacgccaggaagcactccgccagcaggaggaagagcggaaggccaaacatgcaagaatggaggccgaaagagaaaaggtgcggcaacaaatccgggacaaatacggcctcaaaaagaaggaagagaaggaggccgaggagaaagccgctcttgaacagccatgcgaaggatcgcttacaaggcccaaaaaggccatcccggccgggtgtggggatgaggaagaagaggaggaagagtctatactcgacacctag

SEQ ID NO: 328768 - DNA, 114 bp, Artificial Sequence
  derived and/or modified sequence
atggacttcgtgatgaagcaggccctgggcggcgccaccaaggacatgggtaaaatgcttggcggcgaggaggagaaagacccagatgctcaaaagaaagaagaagagcgatag

SEQ ID NO: 328769 - DNA, 405 bp, Artificial Sequence
  derived and/or modified sequence
atggacttcgtgatgaagcaggccctgggcggcgccaccaaggacatggggaagatgttggggggggaggaagagaaggatccggacgctcaaaagaaggaggaggaaagacaggaagccctgcgccagcaagaggaggaacgcaaggccaagcatgcacgcatggaggccgagcgggaaaaggtgaggcagcagataagggacaaatacgggctgaagaaaaaagaagagaaagaagcagaagaaaaagccgccttggaacaaccatgcgagggctctctgaccagaccgaaaaaagccatacctgccggctgcggggatgaggaggaggaggaggaggaatccattctggatacagtgttgaaatatttacctggccctttgcaggacatgtttaaaaaatag

SEQ ID NO: 328770 - DNA, 405 bp, Artificial Sequence
  derived and/or modified sequence
atggatttcgtaatgaagcaggccctaggaggagccaccaaagatatgggcaagatgttgggaggcgaggaggaaaaagatcccgacgcacagaagaaagaggaagaacggcaggaagccttgcggcagcaggaggaggagagaaaagccaagcacgctaggatggaggctgaacgggagaaagtccggcagcaaattcgtgacaaatatggtctcaaaaaaaaggaagaaaaagaggcagaggagaaggccgctctagagcagccatgtgagggcagtctgacccgaccaaaaaaggcaatccccgctggatgtggtgacgaagaagaagaagaggaagaatctattctggatacggtacttaaatacctgcctgggcctcttcaggatatgttcaagaagtag

SEQ ID NO: 328771 - DNA, 405 bp, Artificial Sequence
  derived and/or modified sequence
atggattttgtgatgaagcaagctctaggaggcgcaaccaaagacatggggaagatgctcggcggagaagaggaaaaagatccggacgcgcaaaagaaggaggaggaacgccaagaggcactgagacagcaagaggaggagcggaaggccaaacacgcgcgaatggaggctgaaagagagaaagtgagacagcaaatcagggacaagtatggactcaagaagaaggaggagaaagaagccgaggaaaaggcagcattggagcagccatgtgaagggtctctgactcggccaaaaaaggccattcccgctggttgcggtgacgaggaggaggaggaagaggaatctatactcgacactgtgctcaaataccttcctggaccgctacaggacatgtttaaaaaatag

SEQ ID NO: 328772 - DNA, 555 bp, Artificial Sequence
  derived and/or modified sequence
atggactttgttatgaagcaggccctcgggggagccactaaggacatgggaaaaatgctcggaggagaggaggagaaagaccctgatgcccaaaagaaagaggaggagcggcaggaagcactgcggcagcaagaggaggaacggaaggctaaacatgccaggatggaagctgagagagagaaagtgcgccagcagatccgggataagtacggcttgaaaaaaaaggaagagaaagaagctgaggaaaaggctgcattgagagggcgaggcggaggaggcaggggcgagcaccccggacatggggcacaaatcccggcacgcgctgcagccggtcacgttcaggaagtgacgcgaccgccagctcccgcatattcaacttgctattacttcttcctggtgctgtcatttttgtttataaggctttccctcaatagcgagggcgagaacttaagctggcccctgcctctttttcccggtcagggactgctcccgctgtcaagtccatcccacctgccctccagccaagggatccacctccacccgacccctaagtag

SEQ ID NO: 328773 - DNA, 234 bp, Artificial Sequence
  derived and/or modified sequence
atggacttcgtgatgaaacaggccttgggtggagcaaccaaggacatggggaaaatgctcggaggtgaggaagagaaggatccggatgctcagaaaaaagaagaagaacgccaggaagctctgcgacagcaagaagaggagcgcaaagcaaaacacgctcgtatggaggccgagcgagaaaaggtgcgccagcagattcgagataagtacgggttaaaaaagaaagaggagtag

SEQ ID NO: 328774 - DNA, 336 bp, Artificial Sequence
  derived and/or modified sequence
atggatttcgtgatgaaacaggcactgggcggtgcaacaaaagatatggggaagatgctggggggtgaagaggagaaggacccagatgcacagaagaaggaagaggaaagacaagaggctctgcgacagcaggaagaggagcgtaaagcgaagcacgcacgcatggaagctgagcgggagaaggtgcgccagcagattagagataaatacggcctaaagaagaaagaagaaaaagaagcagaagagaaggctgctctggaacagccatgtgagggatccctgacccggcctaaaaaagccatacctgccggatgcggggacgaggaagaggagtag

SEQ ID NO: 328775 - DNA, 360 bp, Artificial Sequence
  derived and/or modified sequence
atggactttgtaatgaaacaggctctaggcggagccacgaaggatatgggaaaaatgttaggaggggaggaggagaaggatcctgatgcgcagaaaaaggaagaagagaggcaggaagcgctgcggcagcaggaagaggagaggaaggcaaagcacgcaagaatggaagcggaacgtgagaaggtgaggcagcaaatacgggataagtatgggcttaaaaagaaagaggagaaggaggcagaggaaaaagccgctttggagcaaccttgtgaggggagcctgacgaggcccaagaaggccatccccgctgggtgtggggacgaggaggaggaagaggaggagtcaatattagatacatag

SEQ ID NO: 328776 - DNA, 114 bp, Artificial Sequence
  derived and/or modified sequence
atggatttcgttatgaaacaggctctgggcggagctacgaaggacatggggaagatgctgggtggcgaagaggagaaggacccagacgctcaaaaaaaggaagaggaacgttag

SEQ ID NO: 328777 - DNA, 405 bp, Artificial Sequence
  derived and/or modified sequence
atggatttcgtaatgaagcaggctttgggcggtgctaccaaagacatggggaagatgctggggggagaagaggagaaagaccccgatgcccaaaaaaaggaggaagaaagacaggaagcacttcgtcagcaggaagaggagcggaaagccaaacacgcaagaatggaggccgagagagagaaagtcagacaacagattagagacaagtacggccttaagaaaaaggaagagaaagaagccgaagagaaagcggcactggaacagccttgtgaaggttcattgactagaccaaaaaaggcgatacctgcagggtgcggcgacgaagaggaagaggaggaggagtctatcctggacaccgttctgaagtacctgcccggtccattacaggatatgttcaaaaagtag

SEQ ID NO: 328778 - DNA, 5023 bp, Artificial Sequence
  derived and/or modified sequence
ggggttggcaacagagcaggtaggtagacctgcatttggttgctggtcacagaaatggagagtgagagatatttctaagtcaggatgccctagtggcagacccccaagtcctcgaacttcagggcagaactgcctgggtgggaactctcccatgtctccttgatttcactgccacctctgctggcgtcctctctcatctccgccgccagcccccgcctcctttctcgggaagcttgggtctccctgggagcgggtctgcccttagggggaggcctctgggctctgtgccctgcagctcggcaggcattcgaggcggacagaaacggggcttggcgccccccgcgtgcacgtgtgctagcccaggcaggagggagcgcctcggcggaggagtcaaggaagagggggagggagaaacgcgccagaacctcggcccgggcgccctcgtcggccgcggaggagctgcagcctccaacaggaaggtgtggtccctgccatgctatctgctctgctcagcgactgaaggtgcccgcatcccagctctgccaggaagcaaaggttgtcacatcttcccaagccaggccagccaggagcgctgcatgcaaattctgccgtgggctaaggcacgctaaccagagccggcggcatggacttcgtcatgaagcaggcccttggaggggccacaaaggacatggggaagatgctggggggagaggaggagaaggaccccgacgcgcagaaaaaggaggaggagcggcaggaggcgctgcggcagcaggaggaggagcgtaaggccaagcacgcgcgcatggaggcggagcgggagaaggtccggcagcagatccgagataagtatgggctgaagaagaaggaggagaaggaagcagaggagaaagcagccctggagcagccctgcgaggggagcctgacccggcccaagaaggccatccctgcgggctgcggggacgaggaggaggaggaagaggagagcatcctggacacggtgctcaaatacctgcccgggccgctgcaggacatgttcaagaagtaaccaggcctcctgccccagcctactccacctgttactacttctttttggttctttcttttctttttattaggttaagtctcaattctgaaggggaaaacctcagttggcctctgcccctcttccctggccaggggcttctccccctcagctctccctcacacctcccttcatcccagggtatccacctgcaccccactcccaagtagcttgaaaaagggaggacagtctttccccagcaggggtcaggggggcccctcaggaagcctaaggtcgtgctagtgtggtgacccccatacattcctccctgctccccactgccaggaggaccactgtccccagccagccaaagtaatgacacattccagccctgcccagcatgctgacctttggcctctaaccctcagtgggcccccaggtcagggcaggggcactgagtggcctggctctgaggaagggagtcaggggaagcctgtcccgggaaggcccaggctgagaggccctggctctggccaggctgggatctgggtgggaggctggggctcttcttcttccatctccttggtgacacccagcccaggggcacccccttccccagcccccacctggagagacatggcccctgccaagctggtcccttcaaatggatcctttgtggactttagctcatttgtggaggaaccccaggtagggacgccccttgttcctcacccccaccccacttaggtcctgggcccccactgccaggctgggcccagcttgctcagtcaaggggctgccaggcccccagaaaacacttggagccatcgggtagcgatggtctatgccatggggaacacctccattggtgtggccaagctgcccccattcctatccacccctctccccaccccgtcctgtccatgcgcttccagggccccacggtccccaggaggacgcttcctggccaaagccccaagcctttggtgagaagccaattcccacttgacagaaggcgtccatccattcatctcattggccaaggacaaactctcctctgggacgtctgggactggcatttgtcccccactcaaattatcaaagctttctgctcagtcagttgtgtggggatggtgagggaagaggggtcacatgagggaggaaactgtatccatgcatgcatgataatgcgtggcagagactgcaacagggattgtgtgttcagagatcatatgcatatgtgtagggctggagcgtgtgtgtgtcttgagattgtgtgtgttgcagtcatcatatctatgtgttacagattgtgtatgttagccttgtgtatgtgtgcttgattgaggtggtgtatttgggttgaaattgtgtcatatgtgtgtgctatccatctcgtgtttagaggctgtatatgttagcttgtgtaagaatgtgttttcaaaacagtgtgtgtattgggagtgatgggtatgtgttaggtatgtgatgggttgtagaagcgtgtgtttgagagaattcagagacatttgaaggctgctgtgtgcatgtttgggggtctgaaaagacagttgtgtgcatggatgtgtgcgtggggagaaagaacgtgggtaagatgtcccttcccagccctgagaccactggtcacagttggccacctccaacgggagaccttgtccttggcctagagtcctcccacccttggggggctcctgcctgaggtcctcagaatcccactgcaatggacccaggcagcgccccaggaagccatgctgggcccccgccagggcctatcccaaaagcaggggccagggagggggcgacttgcctgcccctgaagcccttgttcccattggccccagtttgcattctgcaggttttccattttagtgggttctgcttttatttcagagacagacatgtgtcttctctgtccgtttccaataggtaaagccatatcagttagactgcaatactttaaacacgagacaaaacaatccatatgtttagggaaccagaaaagtcccctggtctgtcccttctttggggagcagggcctcgacagctccagctcccttgacctaccttcctccccgcaccccgcccccaccttgtgcccctgtgtccagccccccagggggcctgtgtctgtgtctgtgcctgtgtctgtgatggggagccgcctcgcacccctgttgtctgcttgtctctttgtgtctgttatcctgggcaggatggtcattctcaaaaaccctggggtcctgggccagagacaggcagggcccagtccaggggccccaggcctccccagtcccagtgtgcgagccccacttggacacaagtgttcagagaggtccccctctgccacttgacagggaccttcaaacctcgacagtgatgcaaggacacagagagtaccagataggtagcagagaccaaggcgcagggtgcttcagatgagcaagagaacccagtcgaaccagataccccaggtgggccggagggaccccagaccttcagagggctgccctggtgttctccacagtgcagtccctctgtattcccagagtgggatcggggctttcagccccaccctgatgcctgccctccaggatggctggtttagtctgggtccatgtcccagacccctctattctgctccaggacagcaggacttcaggtcttcctgggggtggatataggagaaaatttctgcctggcacacacctggctccaaccactgccaagtgatcactcttaggcccaggggaacacaatgactatcattactgatgcagacctggctgtggagagcagctaatgtgtggcccagagagcctgtctgtgtggagcacgtagtgcacagaatacgtgagagttgctctggcaggggcagaatcctcacaggatcgcctgggaggtgaggtgtgtgtgacccactggatgggagggcaatgagtgtgcacatacaaatggggcagtgtgcatgcaacacacttaggggaggagtggccccagaattcagcacgcacacaacacacaagggagagaacccccagatgagaaaataggaaggagcaatcatttgtagatgggtgaaaaaagaatgaggttcaagggagcgtgcaccaggtgaggtgagcgtgtgtgctctcagggaagggcccaggatcccatgcctgggaggagctgccagagagaagcaaaaaggcggctgtggatcgccctgggctgggcaccagtgacaggtcaggatctccaaacatggacgtcctcccctccaaatccagaagctcccagaaggtgtccttaactgcaaagctgtgcagggtactcctccagatggaatcaggaagtcgagacaccatcccaggtgtgtgtaagagagagagagagaacagggaggatacagaagtattgcagcccagatcccctatcagggggacagctggtgggcaaagcagccaccccacagccttgtggctagagtacagtggggtagaccctccagccccaatagccctagtacccagctggcagggttgcccacccctgctgtccacctgctccatcctctagggttccacaggcccctgaccgcacagggaggctggggccagcctggtctcccaggcctgaggacatgcctcccaccaaatgtcccctgctccagtcccactcctgtcaccccacgctctgcactggggagaaaacgggaggtgctcgtgctggccctgggtgggagcggggagtcctggtgagaccccggtgagatggaccatcctgcccccgtgggggatcccctttcccacatccgtgctgtgtcattgttgctctgcttcctttcaatgtgtcagtgcctggggggaggggaggagcaccccctcagcccccctgaacctgaccaaaagccatggctgttgctcccccctttgtatgatgcaaatgctgaaatgtacaaaatcaaccatgacaacaaagaaaaagaccttgtacagc

SEQ ID NO: 328779 - DNA, 826 bp, Artificial Sequence
  derived and/or modified sequence
catctggaaggggagcggtagaacgtcagggcccggctgaggggcgtgattggagggcgccttcggcagccgcccgcggcagaagccgcggctccagctcgcctggcggaattgcacgcggcggcgggagctggaatagcagaaggaaccacctcgtggagtcgggccggagccctgcagtggctcagacggttgcagggaccgccaggttgtcacatcttcccaagccaggccagccaggagcgctgcatgcaaattctgccgtgggctaaggcacgctaaccagagccggcggcatggacttcgtcatgaagcaggcccttggaggggccacaaaggacatggggaagatgctggggggagaggaggagaaggaccccgacgcgcagaaaaaggaggaggagcggcaggaggcgctgcggcagcaggaggaggagcgtaaggccaagcacgcgcgcatggaggcggagcgggagaaggtccggcagcagatccgagataagtatgggctgaagaagaaggaggagaaggaagcagaggagaaagcagccctggagcagccctgcgaggggagcctgacccggcccaagaaggccatccctgcgggctgcggggacgaggaggaggaggaagaggagagcatcctggacacggtgctcaaatacctgcccgggccgctgcaggacatgttcaagaagtaaccaggcctcctgccccagcctactccacctgttactacttctttttggttctttcttttctttttattaggttaagtctcaattctgaaggggaaaacctcagttggcctctgcccctcttccct

SEQ ID NO: 328780 - DNA, 1455 bp, Artificial Sequence
  derived and/or modified sequence
gcggcggcgggagctggaatagcagaaggaaccacctcgtggagtcgggccggagccctgcagtggctcagacggttgcagggaccgccaggttgtcacatcttcccaagccaggccagccaggagcgctgcatgcaaattctgccgtgggctaaggcacgctaaccagagccggcggcatggacttcgtcatgaagcaggcccttggaggggccacaaaggacatggggaagatgctggggggagaggaggagaaggaccccgacgcgcagaaaaaggaggaggagcggcaggaggcgctgcggcagcaggaggaggagcgtaaggccaagcacgcgcgcatggaggcggagcgggagaaggtccggcagcagatccgagataagtatgggctgaagaagaaggaggagaaggaagcagaggagaaagcagccctgcggggacgaggaggaggaggaagaggagagcatcctggacacggtgctcaaatacctgcccgggccgctgcaggacatgttcaagaagtaaccaggcctcctgccccagcctactccacctgttactacttctttttggttctttcttttctttttattaggttaagtctcaattctgaaggggaaaacctcagttggcctctgcccctcttccctggccaggggcttctccccctcagctctccctcacacctcccttcatcccagggtatccacctgcaccccactcccaagtagcttgaaaaagggaggacagtctttccccagcaggggtcaggggggcccctcaggaagcctaaggtcgtgctagtgtggtgacccccatacattcctccctgctccccactgccaggaggaccactgtccccagccagccaaagtaatgacacattccagccctgcccagcatgctgacctttggcctctaaccctcagtgggcccccaggtcagggcaggggcactgagtggcctggctctgaggaagggagtcaggggaagcctgtcccgggaaggcccaggctgagaggccctggctctggccaggctgggatctgggtgggaggctggggctcttcttcttccatctccttggtgacacccagcccaggggcacccccttccccagcccccacctggagagacatggcccctgccaagctggtcccttcaaatggatcctttgtggactttagctcatttgtggaggaaccccaggtagggacgccccttgttcctcacccccaccccacttaggtcctgggcccccactgccaggctgggcccagcttgctcagtcaaggggctgccaggcccccagaaaacacttggagccatcgggtagcgatggtctatgccatggggaacacctccattggtgtggccaagctgcccccattcctatccacccctctccccaccccgtcctgtccatgcgcttccagggccccacggtcccca

SEQ ID NO: 328781 - DNA, 532 bp, Artificial Sequence
  derived and/or modified sequence
agacttgaatcataaaaacagaaaaacggccataaggacaaccactgcaggttacccgagtcagcctgtcagatggcggggcccagtcccgaaaacctctaggggctcagatggtcgagcctgagtcggtgcttgggctgggacgggctcggagggagtcggagaggggaaggaagctgaaggcgcgccctgggtccccggcgcactgaaggttgtcacatcttcccaagccaggccagccaggagcgctgcatgcaaattctgccgtgggctaaggcacgctaaccagagccggcggcatggacttcgtcatgaagcaggcccttggaggggccacaaaggacatggggaagatgctggggggagaggaggagaaggaccccgacgcgcagaaaaaggaggaggagcggcaggaggcgctgcggcagcaggaggaggagcgtaaggccaagcacgcgcgcatggaggcggagcgggagaaggtccggcagcagatccgagataagtatgggctgaagaagaaggaggagaa

SEQ ID NO: 328782 - DNA, 557 bp, Artificial Sequence
  derived and/or modified sequence
agctggaggcggggagagccttgatcaaagtcaggcaggggagcacagcggcttcctgacgctggacccaggtggggacagagcggccctgtgaagtcaaagagaatgttgctttgttcagctctcactgggaaaggttgtcacatcttcccaagccaggccagccaggagcgctgcatgcaaattctgccgtgggctaaggcacgctaaccagagccggcggcatggacttcgtcatgaagcaggcccttggaggggccacaaaggacatggggaagatgctggggggagaggaggagaaggaccccgacgcgcagaaaaaggaggaggagcggcaggaggcgctgcggcagcaggaggaggagcgtaaggccaagcacgcgcgcatggaggcggagcgggagaaggtccggcagcagatccgagataagtatgggctgaagaagaaggaggagaaggaagcagaggagaaagcagccctggagcagccctgcgaggggagcctgacccggcccaagaaggccatccctgcgggctgcggggacgaggaggaggag

SEQ ID NO: 328783 - DNA, 970 bp, Artificial Sequence
  derived and/or modified sequence
agtggctcagacggttgcagggaccgccaggtcggtgctggccgagggccgggagggcggagctgggctgtgggcaacagggtcccggctctcgcctcgaggccttggggcagctcgggaagctggggagcacggctttcggggggacagctccccaaggctgcctgggcaccggatggggactgagaggcggtaaaggggacactcccgggtgcgctctccgtggtgctgaaaggacagctccttgcgaggggccgcgagcaggcagctagctgcgaactaagaggaagcgtgggccctagccggagactccgggcagagcccgaacggccggggtcccggagccaggaccgccccggctgcggcggagactcaagtctgaacccagagaacaactttgagctcgcgggagtgggggacgtcgatctaagctacttctggctgtgcttaacccgaagcccgccggagcacgcttcgccccggaggagggagtcgcccccaggggtacagtgcgcactcccggagttgtcacatcttcccaagccaggccagccaggagcgctgcatgcaaattctgccgtgggctaaggcacgctaaccagagccggcggcatggacttcgtcatgaagcaggcccttggaggggccacaaaggacatggggaagatgctggggggagaggaggagaaggaccccgacgcgcagaaaaaggaggaggagcggcaggaggcgctgcggcagcaggaggaggagcgtaaggccaagcacgcgcgcatggaggcggagcgggagaaggtccggcagcagatccgagataagtatgggctgaagaagaaggaggagaaggaagcagaggagaaagcagccctggagcagccctgcgaggggagcctgacccggcccaagaaggccatccctgcgggctgcggggacgaggaggaggaggaagaggagagcatcctggacacgg

SEQ ID NO: 328784 - DNA, 567 bp, Artificial Sequence
  derived and/or modified sequence
aatctccgccggagccggggaaaggtggcattgccatttctctcttagagaggaggaaactggggactcgagcaggttagggccttgctgaaggtcccatggcaaataaggaaatgacggtggcgttggaaaccagatctgcctgactccaagttccaggctctttccaatgctcctggcttcaatcaaatctgaacaatagggtcaagatgaaggctttaaaatagggaccaaaccgctttcaaaaagctatttggcagcacctacgtgtctgcccagtaaatcgctctcttccatctcctttctcctccagcagggcattgggtcttgacctcagagcgatgggtgcctggtgtctgaaccagggttgtcacatcttcccaagccaggccagccaggagcgctgcatgcaaattctgccgtgggctaaggcacgctaaccagagccggcggcatggacttcgtcatgaagcaggcccttggaggggccacaaaggacatggggaagatgctggggggagaggaggagaaggaccccgacgcgcagaaaaaggaggaggagcggca

SEQ ID NO: 328785 - DNA, 576 bp, Artificial Sequence
  derived and/or modified sequence
aatctccgccggagccggggaaaggtggcattgccatttctctcttagagaggaggaaactggggactcgagcaggttgtcacatcttcccaagccaggccagccaggagcgctgcatgcaaattctgccgtgggctaaggcacgctaaccagagccggcggcatggacttcgtcatgaagcaggcccttggaggggccacaaaggacatggggaagatgctggggggagaggaggagaaggaccccgacgcgcagaaaaaggaggaggagcggcaggaggcgctgcggcagcaggaggaggagcgtaaggccaagcacgcgcgcatggaggcggagcgggagaaggtccggcagcagatccgagataagtatgggctgaagaagaaggaggagaaggaagcagaggagaaagcagccctggagcagccctgcgaggggagcctgacccggcccaagaaggccatccctgcgggctgcggggacgaggaggaggaggaagaggagagcatcctggacacggtgctcaaatacctgcccgggccgctgcaggacatgttcaagaagtaaccaggcct

SEQ ID NO: 328786 - DNA, 405 bp, Artificial Sequence
  derived and/or modified sequence
atggacttcgtgatgaagcaggccctgggcggcgccaccaaggacatgggcaagatgctgggcggcgaggaggagaaggaccccgacgcccagaagaaggaggaggagagacaggaggccctgagacagcaggaggaggagagaaaggccaagcacgccagaatggaggccgagagagagaaggtgagacagcagatcagagacaagtacggcctgaagaagaaggaggagaaggaggccgaggagaaggccgccctggagcagccctgcgagggcagcctgaccagacccaagaaggccatccccgccggctgcggcgacgaggaggaggaggaggaggagagcatcctggacaccgtgctgaagtacctgcccggccccctgcaggacatgttcaagaagtag

SEQ ID NO: 328787 - DNA, 555 bp, Artificial Sequence
  derived and/or modified sequence
atggacttcgtgatgaagcaggccctgggcggcgccaccaaggacatgggcaagatgctgggcggcgaggaggagaaggaccccgacgcccagaagaaggaggaggagagacaggaggccctgagacagcaggaggaggagagaaaggccaagcacgccagaatggaggccgagagagagaaggtgagacagcagatcagagacaagtacggcctgaagaagaaggaggagaaggaggccgaggagaaggccgccctgagaggcagaggcggcggcggcagaggcgagcaccccggccacggcgcccagatccccgccagagccgccgccggccacgtgcaggaggtgaccagaccccccgcccccgcctacagcacctgctactacttcttcctggtgctgagcttcctgttcatcagactgagcctgaacagcgagggcgagaacctgagctggcccctgcccctgttccccggccagggcctgctgcccctgagcagccccagccacctgcccagcagccagggcatccacctgcaccccacccccaagtag

SEQ ID NO: 328788 - DNA, 234 bp, Artificial Sequence
  derived and/or modified sequence
atggacttcgtgatgaagcaggccctgggcggcgccaccaaggacatgggcaagatgctgggcggcgaggaggagaaggaccccgacgcccagaagaaggaggaggagagacaggaggccctgagacagcaggaggaggagagaaaggccaagcacgccagaatggaggccgagagagagaaggtgagacagcagatcagagacaagtacggcctgaagaagaaggaggagtag

SEQ ID NO: 328789 - DNA, 336 bp, Artificial Sequence
  derived and/or modified sequence
atggacttcgtgatgaagcaggccctgggcggcgccaccaaggacatgggcaagatgctgggcggcgaggaggagaaggaccccgacgcccagaagaaggaggaggagagacaggaggccctgagacagcaggaggaggagagaaaggccaagcacgccagaatggaggccgagagagagaaggtgagacagcagatcagagacaagtacggcctgaagaagaaggaggagaaggaggccgaggagaaggccgccctggagcagccctgcgagggcagcctgaccagacccaagaaggccatccccgccggctgcggcgacgaggaggaggagtag

SEQ ID NO: 328790 - DNA, 360 bp, Artificial Sequence
  derived and/or modified sequence
atggacttcgtgatgaagcaggccctgggcggcgccaccaaggacatgggcaagatgctgggcggcgaggaggagaaggaccccgacgcccagaagaaggaggaggagagacaggaggccctgagacagcaggaggaggagagaaaggccaagcacgccagaatggaggccgagagagagaaggtgagacagcagatcagagacaagtacggcctgaagaagaaggaggagaaggaggccgaggagaaggccgccctggagcagccctgcgagggcagcctgaccagacccaagaaggccatccccgccggctgcggcgacgaggaggaggaggaggaggagagcatcctggacacctag

SEQ ID NO: 328791 - DNA, 114 bp, Artificial Sequence
  derived and/or modified sequence
atggacttcgtgatgaagcaggccctgggcggcgccaccaaggacatgggcaagatgctgggcggcgaggaggagaaggaccccgacgcccagaagaaggaggaggagagatag

SEQ ID NO: 328792 - protein, 213 aa, Artificial Sequence
  derived and/or modified sequence
MRRFLSRKKIRHHIYVLNQVDHFRFNRAALINVGFLESSNSTDYIAMHDVDLLPLNEELDYGFPEAGPFHVASPELHPLYHYKTYVGGILLLSKQHYRLCNGMSNRFWGWGREDDEFYRRIKGAGLQLFRPSGITTGYKTFRHLHDPAWRKRDQKRIAAQKQEQFKVDREGGLNTVKYHVASRTALSVGGAPCTVLNIMLDCDKTATPWCTFS

SEQ ID NO: 328793 - DNA, 642 bp, Artificial Sequence
  derived and/or modified sequence
atgagaagattcctgagcagaaagaagatcagacaccacatctacgtgctgaaccaggtggaccacttcagattcaacagagccgccctgatcaacgtgggcttcctggagagcagcaacagcaccgactacatcgccatgcacgacgtggacctgctgcccctgaacgaggagctggactacggcttccccgaggccggccccttccacgtggccagccccgagctgcaccccctgtaccactacaagacctacgtgggcggcatcctgctgctgagcaagcagcactacagactgtgcaacggcatgagcaacagattctggggctggggcagagaggacgacgagttctacagaagaatcaagggcgccggcctgcagctgttcagacccagcggcatcaccaccggctacaagaccttcagacacctgcacgaccccgcctggagaaagagagaccagaagagaatcgccgcccagaagcaggagcagttcaaggtggacagagagggcggcctgaacaccgtgaagtaccacgtggccagcagaaccgccctgagcgtgggcggcgccccctgcaccgtgctgaacatcatgctggactgcgacaagaccgccaccccctggtgcaccttcagctag

SEQ ID NO: 328794 - DNA, 642 bp, Artificial Sequence
  derived and/or modified sequence
atgagaagattcctgtcacgcaagaaaattagacaccacatatacgttctcaaccaggtcgaccatttccgatttaatagagctgctttaatcaatgttggttttcttgaatccagcaatagtacggactacattgccatgcacgacgtcgatctgctccccctgaacgaggaactggattacgggttcccagaggctggaccctttcatgtggccagtcccgagctgcatccactataccactataaaacttatgtcgggggaatcttgcttctatccaaacagcattaccgcctgtgtaatggcatgagtaacagattttggggttggggacgggaagacgatgagttctatcgcagaatcaagggtgccgggcttcagctattcagaccgagcggtataacaacgggttacaaaacatttagacacctgcacgaccccgcatggcggaaaagagaccaaaaaaggattgctgctcagaaacaagaacagtttaaggtcgacagggagggcggccttaacactgtgaagtaccacgtggcatcccgcacagcgctatccgtggggggcgcgccatgtaccgtcctcaacatcatgctcgattgtgacaaaactgctacgccctggtgtacctttagttag

SEQ ID NO: 328795 - DNA, 642 bp, Artificial Sequence
  derived and/or modified sequence
atgaggcgcttcctgagcaggaagaagatccgccaccacatctacgtgctgaaccaggtggaccacttccgcttcaacagagctgccctgatcaacgtgggcttcctggagagcagcaacagcacagactacatcgccatgcatgatgtggacctgctgcccctgaatgaggagctggactatggcttccctgaggccggccccttccacgtggccagccctgagctgcaccccctgtaccactacaagacctacgtgggcggcatcctgctgctgagcaagcagcactaccgcctgtgcaatggcatgagcaaccgcttctggggctggggcagagaagatgatgagttctaccgccgcatcaagggggccggcctgcagctgttccggcccagcggcatcaccaccggctacaagaccttccgccacctgcatgaccctgcctggaggaagagggaccagaagagaattgctgcccagaagcaggagcagttcaaggtggaccgggagggcggcctgaacacagtgaagtaccacgtggccagcaggacagccctgtctgtgggcggggccccctgcaccgtgctgaacatcatgctggactgtgacaagacagccaccccctggtgcaccttctcctag

SEQ ID NO: 328796 - DNA, 642 bp, Artificial Sequence
  derived and/or modified sequence
atgcggcggttcctgagccggaagaagatccggcaccacatctacgtgttgaaccaggtggaccacttcagatttaatcgcgccgccctgatcaacgtaggcttcctcgagagctctaactccacggactacattgccatgcatgatgttgacttgctgcccctgaatgaagagttggactacggcttccccgaggccggcccatttcatgtggcatctcccgagctgcatccactatatcattacaagacttatgtggggggtattctcctcttatcaaaacaacactaccggctgtgcaacggaatgagcaacagattttggggatggggaagggaggacgacgagttttatcggagaatcaaaggcgccggacttcagctctttcgaccgtcagggatcaccactggctacaagacatttcgccaccttcatgaccccgcctggcgcaaacgggatcagaaacgtatcgctgcccagaagcaggaacagtttaaagtggatagagaaggcgggttaaacaccgtgaaataccatgtcgcttccaggacagccctgtccgtggggggagctccttgcacagtgctcaatataatgctggactgtgacaagacggcaaccccttggtgcactttcagctag

SEQ ID NO: 328797 - DNA, 642 bp, Artificial Sequence
  derived and/or modified sequence
atgcgcagattccttagccggaagaagatacggcatcatatctatgtcctcaaccaggtcgaccacttccggtttaacagggcggctctcataaatgtgggcttcttagagtcgtcaaatagtaccgattatatagctatgcacgacgtggacctgctgcctcttaacgaagagctggactatggctttcccgaggccggtccctttcacgtcgcctctcctgaactgcatcccttgtaccactataaaacgtacgtggggggaattctgctgctgagcaagcagcactaccgcctgtgcaacggaatgtccaaccgtttctggggatggggcagggaggacgacgaattctaccggcgaataaaaggggctggactgcagttgtttagaccgagtggtattacaacgggctataagacctttagacacctgcatgatccagcttggcgcaagcgagatcagaagagaatagcggcacagaagcaggagcaattcaaggtggatagagagggtggtttaaacactgtgaaatatcatgtcgcatcccggacagccctgtctgtgggcggagctccatgtacagtgctgaacatcatgctggactgtgacaaaactgccaccccatggtgtactttctcatag

SEQ ID NO: 328798 - protein, 639 aa, Artificial Sequence
  derived and/or modified sequence
MPQPSVSGMDPPFGDAFRSHTFSEQTLMSTDLLANSSDPDFMYELDREMNYQQNPRDNFLSLEDCKDIENLESFTDVLDNEGALTSNWEQWDTYCEDLTKYTKLTSCDIWGTKEVDYLGLDDFSSPYQDEEVISKTPTLAQLNSEDSQSVSDSLYYPDSLFSVKQNPLPSSFPGKKITSRAAAPVCSSKTLQAEVPLSDCVQKASKPTSSTQIMVKTNMYHNEKVNFHVECKDYVKKAKVKINPVQQSRPLLSQIHTDAAKENTCYCGAVAKRQEKKGMEPLQGHATPALPFKETQELLLSPLPQEGPGSLAAGESSSLSASTSVSDSSQKKEEHNYSLFVSDNLGEQPTKCSPEEDEEDEEDVDDEDHDEGFGSEHELSENEEEEEEEEDYEDDKDDDISDTFSEPGYENDSVEDLKEVTSISSRKRGKRRYFWEYSEQLTPSQQERMLRPSEWNRDTLPSNMYQKNGLHHGKYAVKKSRRTDVEDLTPNPKKLLQIGNELRKLNKVISDLTPVSELPLTARPRSRKEKNKLASRACRLKKKAQYEANKVKLWGLNTEYDNLLFVINSIKQEIVNRVQNPRDERGPNMGQKLEILIKDTLGLPVAGQTSEFVNQVLEKTAEGNPTGGLVGLRIPTSKV

SEQ ID NO: 328799 - protein, 639 aa, Artificial Sequence
  derived and/or modified sequence
IPKPSVSGMDPPFGDAFRSHTFSEQTLMSTDLLANSSDPDFMYELDREMNYQQNPRDNFLSLEDCKDIENLESFTDVLDNEGALTSNWEQWDTYCEDLTKYTKLTSCDIWGTKEVDYLGLDDFSSPYQDEEVISKTPTLAQLNSEDSQSVSDSLYYPDSLFSVKQNPLPSSFPGKKITSRAAAPVCSSKTLQAEVPLSDCVQKASKPTSSTQIMVKTNMYHNEKVNFHVECKDYVKKAKVKINPVQQSRPLLSQIHTDAAKENTCYCGAVAKRQEKKGMEPLQGHATPALPFKETQELLLSPLPQEGPGSLAAGESSSLSASTSVSDSSQKKEEHNYSLFVSDNLGEQPTKCSPEEDEEDEEDVDDEDHDEGFGSEHELSENEEEEEEEEDYEDDKDDDISDTFSEPGYENDSVEDLKEVTSISSRKRGKRRYFWEYSEQLTPSQQERMLRPSEWNRDTLPSNMYQKNGLHHGKYAVKKSRRTDVEDLTPNPKKLLQIGNELRKLNKVISDLTPVSELPLTARPRSRKEKNKLASRACRLKKKAQYEANKVKLWGLNTEYDNLLFVINSIKQEIVNRVQNPRDERGPNMGQKLEILIKDTLGLPVAGQTSEFVNQVLEKTAEGNPTGGLVGLRIPTSKV

SEQ ID NO: 328800 - protein, 653 aa, Artificial Sequence
  derived and/or modified sequence
MPQPSVSGMDPPFGDAFRSHTFSEQTLMSTDLLANSSDPDFMYELDREMNYQQNPRDNFLSLEDCKDIENLESFTDVLDNEGALTSNWEQWDTYCEDLTKYTKLTSCDIWGTKEVDYLGLDDFSSPYQDEEVISKTPTLAQLNSEDSQSVSDSLYYPDSLFSVKQNPLPSSFPGKKITSRAAAPVCSSKTLQAEVPLSDCVQKASKPTSSTQIMVKTNMYHNEKVNFHVECKDYVKKAKVKINPVQQSRPLLSQIHTDAAKENTCYCGAVAKRQEKKGMEPLQGHATPALPFKETQELLLSPLPQEGPGSLAAGESSSLSASTSVSDSSQKKEEHNYSLFVSDNLGEQPTKCSPEEDEEDEEDVDDEDHDEGFGSEHELSENEEEEEEEEDYEDDKDDDISDTFSEPGYENDSVEDLKEVTSISSRKRGKRRYFWEYSEQLTPSQQERMLRPSEWNRDTLPSNMYQKNGLHHGKYAVKKSRRTDVEDLTPNPKKLLQIGNELRKLNKVISDLTPVSELPLTARPRSRKEKNKLASRACRLKKKAQYEANKVKLWGLNTEYDNLLFVINSIKQEIVNRVQNPRDERGPNMGQKLEILIKDTLGLPVAGQTSEFVNQVLEKTAEGNPTGGLVFWGNSKTGNILYDENPNEKKQDI

SEQ ID NO: 328801 - protein, 641 aa, Artificial Sequence
  derived and/or modified sequence
MPQPSVSGMDPPFGDAFRSHTFSEQTLMSTDLLANSSDPDFMYELDREMNYQQNPRDNFLSLEDCKDIENLESFTDVLDNEGALTSNWEQWDTYCEDLTKYTKLTSCDIWGTKEVDYLGLDDFSSPYQDEEVISKTPTLAQLNSEDSQSVSDSLYYPDSLFSVKQNPLPSSFPGKKITSRAAAPVCSSKTLQAEVPLSDCVQKASKPTSSTQIMVKTNMYHNEKVNFHVECKDYVKKAKVKINPVQQSRPLLSQIHTDAAKENTCYCGAVAKRQEKKGMEPLQGHATPALPFKETQELLLSPLPQEGPGSLAAGESSSLSASTSVSDSSQKKEEHNYSLFVSDNLGEQPTKCSPEEDEEDEEDVDDEDHDEGFGSEHELSENEEEEEEEEDYEDDKDDDISDTFSEPGYENDSVEDLKEVTSISSRKRGKRRYFWEYSEQLTPSQQERMLRPSEWNRDTLPSNMYQKNGLHHGSGKYAVKKSRRTDVEDLTPNPKKLLQIGNELRKLNKVISDLTPVSELPLTARPRSRKEKNKLASRACRLKKKAQYEANKVKLWGLNTEYDNLLFVINSIKQEIVNRVQNPRDERGPNMGQKLEILIKDTLGLPVAGQTSEFVNQVLEKTAEGNPTGGLVGLRIPTSKV

SEQ ID NO: 328802 - DNA, 7778 bp, Artificial Sequence
  derived and/or modified sequence
gagtcacgcgatttccgggaacccgtcaggaaggacataaacaaaacaaacccgaggcagcatggagaggggccgtggcccctgcagcggaaccggacccagtccctgagccgcccctacacccacagacagcatcgcacagaattattttaaaaaaaagcagtgatccaagcaattgaattggaagcactctggggaaacctgctgtttattgtggaaatcatcttcgatcttggaattgaaagtaaagctggaaaggaatttacaaacaagaaaaaaaagaagtttggaatcggattcacaggatctgggcttggaaatgcctcagcctagtgtaagcggaatggatccgcctttcggggatgcctttcgaagccacaccttttcggaacaaactctgatgagcacagatctcttagcaaacagttcggatccagatttcatgtatgaactggatagagagatgaactaccaacagaatcctagagacaactttctttctttggaggactgcaaagacattgaaaatctggagtctttcacagatgtcctggataatgagggtgctttaacctcaaactgggaacagtgggatacatactgtgaagacctaacgaaatataccaaactaaccagctgtgacatctggggaacaaaagaagtggattacttgggtcttgatgacttttctagtccttaccaagatgaagaggttataagtaaaactccaactttagctcaacttaatagtgaggactcacagtctgtttctgattccctttattaccccgattcacttttcagtgtcaaacaaaatcccttaccctcttcattccctggtaaaaagatcacaagcagagcagctgctcctgtgtgttcttctaagactctgcaggctgaggtccctttgtcagactgtgtccaaaaagcaagtaaacccacttcaagcacacaaatcatggtgaagaccaacatgtatcataatgaaaaggtgaactttcatgttgaatgtaaagactatgtaaaaaaggcaaaggtaaagatcaacccagtgcaacagagccggcccttgttgagccagattcacacagatgcagcaaaggagaacacctgctactgtggtgcagtggcaaagagacaagagaaaaaagggatggagcctcttcaaggtcatgccactcccgctttgccttttaaagaaacccaggaactattactaagtcccctgccccaggaaggtcctgggtcacttgcagcaggagagagcagcagtctttctgccagtacatcagtctcagattcatcccagaaaaaagaagagcacaattattctctttttgtctccgacaacttgggtgaacagccaactaaatgcagtcctgaagaagatgaggaggacgaggaggatgttgatgatgaggaccatgatgaaggattcggcagtgagcatgaactgtctgaaaatgaggaggaggaagaagaggaagaggattatgaagatgacaaggatgatgatattagtgatactttctctgaaccaggctatgaaaatgattctgtagaagacctgaaggaggtgacttcaatatcttcacggaagagaggtaaaagaagatacttctgggagtatagtgaacaacttacaccatcacagcaagagaggatgctgagaccatctgagtggaaccgagatactttgccaagtaatatgtatcagaaaaatggcttacatcatggaaaatatgcagtaaagaagtcacggagaactgatgtagaagacctgactccaaatcctaaaaaactcctccagataggcaatgaacttcggaaactgaataaggtgattagtgacctgactccagtcagtgagcttcccttaacagcccgaccaaggtcaaggaaggaaaaaaataagctggcttccagagcttgtcggttaaagaagaaagcccagtatgaagctaataaagtgaaattatggggcctcaacacagaatatgataatttattgtttgtaatcaactccatcaagcaagagattgtaaaccgggtacagaatccaagagatgagagaggacccaacatggggcagaagcttgaaatcctcattaaagatactctcggtctaccagttgctgggcaaacctcagaatttgttaaccaagtgttagagaagactgcagaagggaatcccactggaggccttgtaggattaaggataccaacatcaaaggtgtaatcagcctcattggaccactggtcagaaatgtctgcgttttgtcacgttatccattgtaaattttcattctgttttgcatgtcagttagcattatgtaaacatttacaattaggttacattgttttaagaactaagtagcataagtgaagcatgatccaaaatacttgattattgcattttcagagcataaaccatgattaaaactgctactggcatcagaattgaaaatcatatgtttaagtaaatgttaggtacagattacaaaaatctgttaaagcaaaacattttggaggagtgaaatagtaaaatgccaagtattgtggcagatttatgctctgaaccacacaaaaaaattgaggaagcatttttttaaacagtcggtttaaattgtttttagaattattgctttttgttctaattttccacaaccattaatctcacttgtatatggcacacccagcacttgtgcctgtgggccatattagatgttcattgtcagagctcaagatgatatatataaatatatatatatatatatatatatacacacacacacacaaatgtctgtgcaagtaagaaaaaaaaagcatattctttgtgccttgtattttggggaaactctaaaactggtaatattttgtatgatgaaaaccctaatgagaaaaaacaagatatatagatggaaaaattatggggtttaaatgtttttttgttccaactctttttcagattttttgaatgtatataggactatgttgaaatgtagatatatgccacagagtctgtgtattgtataaaaaacaaaacaaaaaacaacaaaaaaaagatggctctagaaaactcatatttcggtacttgaccggaagaagacaaatacttgcacattattgcgattgttttattttttgtaccaaagacaaatgcaactgatatggcaaactgccagtctaagtaaagttttgcacagcttacatgatactgtatgaatgtatgaaaaaaaaggagaaaaaaaagaaaaaaaaaggtcagggttagggatcttactgaactgtgaattttatttctgtttgggtccaattatctacagaaggagcatccatacatacaaatattattttgctgttcctctagttcgcttccatagtagataagttggtggccatttagatgtcttttatttctgcacttattgtaggaaattttaatatatttcattttagtaagctattgataaaatagtttttgactttgaaaattaaaatgtttatttagcttattgtagtatacttccaccagacaacaaaatagattatttttattgtattatgtatatatatatatgtaaagaaagaaaaaagctaaaaatatctaattctttagttgccacttttccgattgatgtattattgtgcatgtaatattttcaaagatcaacacaggctaaaacaaaaacaatttatagatttttatatttttgtacaggtattttcaaactagcttcttcaaacttaacatgtgacttattcttctatagtttctagaattgagaaacattaacacatttagtttttaggtgctcttttttgctcatataaaacagcttcattagtcagtgttttaactgtgttcaagctttacctcttgatgagaaatttcttatgtcaaggcagcattataaaccttcccccacagatttttccatcctgtctctcttactgttttattctcaaatcttgtgctttgaactctgaaaactggtggcttaaaaactaaaaaaagaaaaaaagcatatttagcaaggaaaaaaataccaaaaatttcaggcatagctgctggaaaaattatctatttctccattacccactgtaggatttcttttttaattatactttgactataaagtgtcaaagtataatttgttcttttcttttactttgttaccccatttgtaagctatagcatatgaagctatatatatagcttgtgaaggtttgatctagaacacccagtaacaaatgaacaatgttgcttacctgcttctttgacatcttaaaaaagaaatccaaggaggattgtaaggattgtcttaccaccttagctgaactgtgatgcacaagatttttctatgtgtttggtggaaatgtacctggtttgtacattcacgctaaacagatgataagctcaagtctgatggtttaatagaatgtaagttcatcgtttaaagcttttcctttttaggttggagaaggcaaaacacaggcttgcaagttggaagtatatgaagtcttgacagagtgtgtctggtaaattgaaaagtgtttcaaactatggcagttttgcaatcaggtgaaaatcacctcatgatattcagctgataaggtttataaaattgcccctttctagctgctctgttaggaattctggtttttgatacttttttcctgtctgcaaaccagaatttgattttttggtcttgcatttcaaaaaaaaaaagactttgaatctgtttagtagattccatatctttgagtttcagtgttttatatgtactacttaagttaaatagttaaaagcttttaaatagttgagctttttaatgttgacactttattttgtacctatttatatatgtatgtatatcttagaaaagcactttgttaaaaaaaaattgcattttatatgattcctgccatttgctgctaaatctgggctggtcagaatgctgcagcgatacttgatctatataaaaacctggcagtaaaatgtagagtgaaagttaaatcctcttgctgttttaactttatcataaagatgacataggcaagctgtgcagctttacattttaaccaggggactctgtggcatttaaaaccgtctagaaatggttgtactttaatgccagtaataatctgcttcctctattgtcattaaaatatatacgtttagtgtatcacacaaaccaatcttataagggtaatgtaaaaaccccaacaattgtacatgttctgtttttgaaaattgtggcatgtatttttgggtgaagatcattagagaagagttctctaaaggttttctgtgttcatacatggtatacagatagctcataatgaagtccagaatcttacttttaagtgaaggcattgtgaattcacctcaagtaaacccattgttccaaagcaattataaactttgactctagtactactatgatttaaaaaaaaaaaaaaccaacaaaaaccttttttcctagtttcagatacactggattctttatagagtttgtctccatatgaaagcatgctgtccagtcgctcttgttaagatcttgtctgagttttgaattgggtgccacacttttccagtcaatataattgcttgttctactgtaccatgtatgattcttgtcctttcctatatccttcatgacagattatgatgtggctttatattgtgccttacttgtacatttaaaactaaacgtcttcattcccttccacttcctacatctttaactttgacctttttggtaagagaatcagaactattacaaaagcatcatgaaggatttcagatgggtatggtttcaaattccctctctttatagttattttatatttgtatgaaagaccagttttggatggtctttgaatataggggggaaagattagcagtaatttcactacatcccttttctctgactttcatgcatttctcatacatcttctttctgatgcttgactttatttgcttcctagcaatagtctgcatttaaagaaaggtgtgttcaattcatcagcttgaaattgactatttcatttttccaggattttttaggagaagagtacccattttgttttataaaaacagatgacaagtctctttaaaagaaacagaagtacagtacttttgaaatacaatgctgttagtttggatttctttttatatatatatataatattcatacaatgatctgatgtttgccttcattaataaagctgttagtttattcaccaaaatgtcaagaatggatgtgcttttctttattccacacatttaaaaaaatttagctgctaagatttaatgttataagaaatgaattcaagttgccttcagcaagaattaacaaaaacttatgttccctttctttatatagtttcctaaaattctgttcaagtattttctagttaattatgtaacagaatgttagcatctctccatatcttgaaacttgaattttgagaatgcattgaattatgctttcagtgttaaagtaaaaggtttcaattatccttctagtgaagtctgttgtggaataccatttcccatggaactgaggccatttccacaactttgcacagaactgcagtcttgttcttcccttggatcatgacaaataagtctcacacagtgccgtaatacttgtggattcttttgtaatctttgtaatcttaataagggcattatgagaagacgactccatgtttttttaatacttcaaacacattgggatgtaacaatgaatgtcaactgtaggaatggtggtttcgttttaaggaataagcatgttggggaaagatgatgaaaatgtactactgaaagttatacacttccataggcaaatgggattatgtgttgaagcatagtcctcatgcttaataaactgactgaaatcgtagaaattacacctaggaactgagctaggccaaattgccatttttgtttagagagttttggaggtagtagtgaggggacagagccttaaaactacttccaaacagtattttggaattgaagacttggtaactagtgaagaacatcaaagttgggtatttcaatgtgccaagtttgggtgaactaggttcggtttgcctctttcataacaatgtaaacacaatggtgtagttaattaaattctgggtggataggagcaggactgattactatgtcttgcccttcgccctttgtttttttcagaaccaaataacagaaatgtgtatgtgtgtactgtatctgcctttccaccacatttttatgacactgtattccactgcctgcttttttaccttctttccctaggatttgtcctacagcttagtattgtggttgacagcgatactagggctgacagcacagaagtcacaagagaagagtggaagggcaagaattcaaagcatttgttcatacaatgtggcaacctcttttgcatagttgcgtaggatcctgtttgtaatgctatcataaatattctgtagttttttttttttctctcccaactggagctatgacactttttattggattcagtcttgtctcttgtctagaaagaactttatcttgttgacgcatgagctgtttaaaaattatcctattaaatgttggttaatagttgtgcagtttttcatttcagatggaaaggcaatgcaaattttgcctttgttttctgtcaccttccaacccctgagcacttctagtcagatacagattcatcagtgtatgcaacatcctttgtaatttaaaataaaaaaagatgaaaagaaaa

SEQ ID NO: 328803 - DNA, 7463 bp, Artificial Sequence
  derived and/or modified sequence
attcccaagcctagtgtaagcggaatggatccgcctttcggggatgcctttcgaagccacaccttttcggaacaaactctgatgagcacagatctcttagcaaacagttcggatccagatttcatgtatgaactggatagagagatgaactaccaacagaatcctagagacaactttctttctttggaggactgcaaagacattgaaaatctggagtctttcacagatgtcctggataatgagggtgctttaacctcaaactgggaacagtgggatacatactgtgaagacctaacgaaatataccaaactaaccagctgtgacatctggggaacaaaagaagtggattacttgggtcttgatgacttttctagtccttaccaagatgaagaggttataagtaaaactccaactttagctcaacttaatagtgaggactcacagtctgtttctgattccctttattaccccgattcacttttcagtgtcaaacaaaatcccttaccctcttcattccctggtaaaaagatcacaagcagagcagctgctcctgtgtgttcttctaagactctgcaggctgaggtccctttgtcagactgtgtccaaaaagcaagtaaacccacttcaagcacacaaatcatggtgaagaccaacatgtatcataatgaaaaggtgaactttcatgttgaatgtaaagactatgtaaaaaaggcaaaggtaaagatcaacccagtgcaacagagccggcccttgttgagccagattcacacagatgcagcaaaggagaacacctgctactgtggtgcagtggcaaagagacaagagaaaaaagggatggagcctcttcaaggtcatgccactcccgctttgccttttaaagaaacccaggaactattactaagtcccctgccccaggaaggtcctgggtcacttgcagcaggagagagcagcagtctttctgccagtacatcagtctcagattcatcccagaaaaaagaagagcacaattattctctttttgtctccgacaacttgggtgaacagccaactaaatgcagtcctgaagaagatgaggaggacgaggaggatgttgatgatgaggaccatgatgaaggattcggcagtgagcatgaactgtctgaaaatgaggaggaggaagaagaggaagaggattatgaagatgacaaggatgatgatattagtgatactttctctgaaccaggctatgaaaatgattctgtagaagacctgaaggaggtgacttcaatatcttcacggaagagaggtaaaagaagatacttctgggagtatagtgaacaacttacaccatcacagcaagagaggatgctgagaccatctgagtggaaccgagatactttgccaagtaatatgtatcagaaaaatggcttacatcatggaaaatatgcagtaaagaagtcacggagaactgatgtagaagacctgactccaaatcctaaaaaactcctccagataggcaatgaacttcggaaactgaataaggtgattagtgacctgactccagtcagtgagcttcccttaacagcccgaccaaggtcaaggaaggaaaaaaataagctggcttccagagcttgtcggttaaagaagaaagcccagtatgaagctaataaagtgaaattatggggcctcaacacagaatatgataatttattgtttgtaatcaactccatcaagcaagagattgtaaaccgggtacagaatccaagagatgagagaggacccaacatggggcagaagcttgaaatcctcattaaagatactctcggtctaccagttgctgggcaaacctcagaatttgttaaccaagtgttagagaagactgcagaagggaatcccactggaggccttgtaggattaaggataccaacatcaaaggtgtaatcagcctcattggaccactggtcagaaatgtctgcgttttgtcacgttatccattgtaaattttcattctgttttgcatgtcagttagcattatgtaaacatttacaattaggttacattgttttaagaactaagtagcataagtgaagcatgatccaaaatacttgattattgcattttcagagcataaaccatgattaaaactgctactggcatcagaattgaaaatcatatgtttaagtaaatgttaggtacagattacaaaaatctgttaaagcaaaacattttggaggagtgaaatagtaaaatgccaagtattgtggcagatttatgctctgaaccacacaaaaaaattgaggaagcatttttttaaacagtcggtttaaattgtttttagaattattgctttttgttctaattttccacaaccattaatctcacttgtatatggcacacccagcacttgtgcctgtgggccatattagatgttcattgtcagagctcaagatgatatatataaatatatatatatatatatatatatacacacacacacacaaatgtctgtgcaagtaagaaaaaaaaagcatattctttgtgccttgtattttggggaaactctaaaactggtaatattttgtatgatgaaaaccctaatgagaaaaaacaagatatatagatggaaaaattatggggtttaaatgtttttttgttccaactctttttcagattttttgaatgtatataggactatgttgaaatgtagatatatgccacagagtctgtgtattgtataaaaaacaaaacaaaaaacaacaaaaaaaagatggctctagaaaactcatatttcggtacttgaccggaagaagacaaatacttgcacattattgcgattgttttattttttgtaccaaagacaaatgcaactgatatggcaaactgccagtctaagtaaagttttgcacagcttacatgatactgtatgaatgtatgaaaaaaaaggagaaaaaaaagaaaaaaaaaggtcagggttagggatcttactgaactgtgaattttatttctgtttgggtccaattatctacagaaggagcatccatacatacaaatattattttgctgttcctctagttcgcttccatagtagataagttggtggccatttagatgtcttttatttctgcacttattgtaggaaattttaatatatttcattttagtaagctattgataaaatagtttttgactttgaaaattaaaatgtttatttagcttattgtagtatacttccaccagacaacaaaatagattatttttattgtattatgtatatatatatatgtaaagaaagaaaaaagctaaaaatatctaattctttagttgccacttttccgattgatgtattattgtgcatgtaatattttcaaagatcaacacaggctaaaacaaaaacaatttatagatttttatatttttgtacaggtattttcaaactagcttcttcaaacttaacatgtgacttattcttctatagtttctagaattgagaaacattaacacatttagtttttaggtgctcttttttgctcatataaaacagcttcattagtcagtgttttaactgtgttcaagctttacctcttgatgagaaatttcttatgtcaaggcagcattataaaccttcccccacagatttttccatcctgtctctcttactgttttattctcaaatcttgtgctttgaactctgaaaactggtggcttaaaaactaaaaaaagaaaaaaagcatatttagcaaggaaaaaaataccaaaaatttcaggcatagctgctggaaaaattatctatttctccattacccactgtaggatttcttttttaattatactttgactataaagtgtcaaagtataatttgttcttttcttttactttgttaccccatttgtaagctatagcatatgaagctatatatatagcttgtgaaggtttgatctagaacacccagtaacaaatgaacaatgttgcttacctgcttctttgacatcttaaaaaagaaatccaaggaggattgtaaggattgtcttaccaccttagctgaactgtgatgcacaagatttttctatgtgtttggtggaaatgtacctggtttgtacattcacgctaaacagatgataagctcaagtctgatggtttaatagaatgtaagttcatcgtttaaagcttttcctttttaggttggagaaggcaaaacacaggcttgcaagttggaagtatatgaagtcttgacagagtgtgtctggtaaattgaaaagtgtttcaaactatggcagttttgcaatcaggtgaaaatcacctcatgatattcagctgataaggtttataaaattgcccctttctagctgctctgttaggaattctggtttttgatacttttttcctgtctgcaaaccagaatttgattttttggtcttgcatttcaaaaaaaaaaagactttgaatctgtttagtagattccatatctttgagtttcagtgttttatatgtactacttaagttaaatagttaaaagcttttaaatagttgagctttttaatgttgacactttattttgtacctatttatatatgtatgtatatcttagaaaagcactttgttaaaaaaaaattgcattttatatgattcctgccatttgctgctaaatctgggctggtcagaatgctgcagcgatacttgatctatataaaaacctggcagtaaaatgtagagtgaaagttaaatcctcttgctgttttaactttatcataaagatgacataggcaagctgtgcagctttacattttaaccaggggactctgtggcatttaaaaccgtctagaaatggttgtactttaatgccagtaataatctgcttcctctattgtcattaaaatatatacgtttagtgtatcacacaaaccaatcttataagggtaatgtaaaaaccccaacaattgtacatgttctgtttttgaaaattgtggcatgtatttttgggtgaagatcattagagaagagttctctaaaggttttctgtgttcatacatggtatacagatagctcataatgaagtccagaatcttacttttaagtgaaggcattgtgaattcacctcaagtaaacccattgttccaaagcaattataaactttgactctagtactactatgatttaaaaaaaaaaaaaaccaacaaaaaccttttttcctagtttcagatacactggattctttatagagtttgtctccatatgaaagcatgctgtccagtcgctcttgttaagatcttgtctgagttttgaattgggtgccacacttttccagtcaatataattgcttgttctactgtaccatgtatgattcttgtcctttcctatatccttcatgacagattatgatgtggctttatattgtgccttacttgtacatttaaaactaaacgtcttcattcccttccacttcctacatctttaactttgacctttttggtaagagaatcagaactattacaaaagcatcatgaaggatttcagatgggtatggtttcaaattccctctctttatagttattttatatttgtatgaaagaccagttttggatggtctttgaatataggggggaaagattagcagtaatttcactacatcccttttctctgactttcatgcatttctcatacatcttctttctgatgcttgactttatttgcttcctagcaatagtctgcatttaaagaaaggtgtgttcaattcatcagcttgaaattgactatttcatttttccaggattttttaggagaagagtacccattttgttttataaaaacagatgacaagtctctttaaaagaaacagaagtacagtacttttgaaatacaatgctgttagtttggatttctttttatatatatatataatattcatacaatgatctgatgtttgccttcattaataaagctgttagtttattcaccaaaatgtcaagaatggatgtgcttttctttattccacacatttaaaaaaatttagctgctaagatttaatgttataagaaatgaattcaagttgccttcagcaagaattaacaaaaacttatgttccctttctttatatagtttcctaaaattctgttcaagtattttctagttaattatgtaacagaatgttagcatctctccatatcttgaaacttgaattttgagaatgcattgaattatgctttcagtgttaaagtaaaaggtttcaattatccttctagtgaagtctgttgtggaataccatttcccatggaactgaggccatttccacaactttgcacagaactgcagtcttgttcttcccttggatcatgacaaataagtctcacacagtgccgtaatacttgtggattcttttgtaatctttgtaatcttaataagggcattatgagaagacgactccatgtttttttaatacttcaaacacattgggatgtaacaatgaatgtcaactgtaggaatggtggtttcgttttaaggaataagcatgttggggaaagatgatgaaaatgtactactgaaagttatacacttccataggcaaatgggattatgtgttgaagcatagtcctcatgcttaataaactgactgaaatcgtagaaattacacctaggaactgagctaggccaaattgccatttttgtttagagagttttggaggtagtagtgaggggacagagccttaaaactacttccaaacagtattttggaattgaagacttggtaactagtgaagaacatcaaagttgggtatttcaatgtgccaagtttgggtgaactaggttcggtttgcctctttcataacaatgtaaacacaatggtgtagttaattaaattctgggtggataggagcaggactgattactatgtcttgcccttcgccctttgtttttttcagaaccaaataacagaaatgtgtatgtgtgtactgtatctgcctttccaccacatttttatgacactgtattccactgcctgcttttttaccttctttccctaggatttgtcctacagcttagtattgtggttgacagcgatactagggctgacagcacagaagtcacaagagaagagtggaagggcaagaattcaaagcatttgttcatacaatgtggcaacctcttttgcatagttgcgtaggatcctgtttgtaatgctatcataaatattctgtagttttttttttttctctcccaactggagctatgacactttttattggattcagtcttgtctcttgtctagaaagaactttatcttgttgacgcatgagctgtttaaaaattatcctattaaatgttggttaatagttgtgcagtttttcatttcagatggaaaggcaatgcaaattttgcctttgttttctgtcaccttccaacccctgagcacttctagtcagatacagattcatcagtgtatgcaacatcctttgtaatttaaaataaaaaaagatgaaaagaaaacgtt

SEQ ID NO: 328804 - DNA, 2557 bp, Artificial Sequence
  derived and/or modified sequence
gaaggcgagtccgatcggaccaggaagtagctcaggggagcctgacctcgacccgcctttctcctcacacgagctgaggaggcagggaagtaccgagggcagtcaagcctcccctgggggtggttcctgggactagatggagctcagtctctggattctccctctttctcggccctatgcttcctgacagacctggccgccaaaccctgtaatcgccctcctttaacccaagaaagcaagtctttctgccgtttctgagctggcttgagccttaagactaccttaaggagacagcatcgcacagaattattttaaaaaaaagcagtgatccaagcaattgaattggaagcactctggggaaacctgctgtttattgtggaaatcatcttcgatcttggaattgaaagtaaagctggaaaggaatttacaaacaagaaaaaaaagaagtttggaatcggattcacaggatctgggcttggaaatgcctcagcctagtgtaagcggaatggatccgcctttcggggatgcctttcgaagccacaccttttcggaacaaactctgatgagcacagatctcttagcaaacagttcggatccagatttcatgtatgaactggatagagagatgaactaccaacagaatcctagagacaactttctttctttggaggactgcaaagacattgaaaatctggagtctttcacagatgtcctggataatgagggtgctttaacctcaaactgggaacagtgggatacatactgtgaagacctaacgaaatataccaaactaaccagctgtgacatctggggaacaaaagaagtggattacttgggtcttgatgacttttctagtccttaccaagatgaagaggttataagtaaaactccaactttagctcaacttaatagtgaggactcacagtctgtttctgattccctttattaccccgattcacttttcagtgtcaaacaaaatcccttaccctcttcattccctggtaaaaagatcacaagcagagcagctgctcctgtgtgttcttctaagactctgcaggctgaggtccctttgtcagactgtgtccaaaaagcaagtaaacccacttcaagcacacaaatcatggtgaagaccaacatgtatcataatgaaaaggtgaactttcatgttgaatgtaaagactatgtaaaaaaggcaaaggtaaagatcaacccagtgcaacagagccggcccttgttgagccagattcacacagatgcagcaaaggagaacacctgctactgtggtgcagtggcaaagagacaagagaaaaaagggatggagcctcttcaaggtcatgccactcccgctttgccttttaaagaaacccaggaactattactaagtcccctgccccaggaaggtcctgggtcacttgcagcaggagagagcagcagtctttctgccagtacatcagtctcagattcatcccagaaaaaagaagagcacaattattctctttttgtctccgacaacttgggtgaacagccaactaaatgcagtcctgaagaagatgaggaggacgaggaggatgttgatgatgaggaccatgatgaaggattcggcagtgagcatgaactgtctgaaaatgaggaggaggaagaagaggaagaggattatgaagatgacaaggatgatgatattagtgatactttctctgaaccaggctatgaaaatgattctgtagaagacctgaaggaggtgacttcaatatcttcacggaagagaggtaaaagaagatacttctgggagtatagtgaacaacttacaccatcacagcaagagaggatgctgagaccatctgagtggaaccgagatactttgccaagtaatatgtatcagaaaaatggcttacatcatggaaaatatgcagtaaagaagtcacggagaactgatgtagaagacctgactccaaatcctaaaaaactcctccagataggcaatgaacttcggaaactgaataaggtgattagtgacctgactccagtcagtgagcttcccttaacagcccgaccaaggtcaaggaaggaaaaaaataagctggcttccagagcttgtcggttaaagaagaaagcccagtatgaagctaataaagtgaaattatggggcctcaacacagaatatgataatttattgtttgtaatcaactccatcaagcaagagattgtaaaccgggtacagaatccaagagatgagagaggacccaacatggggcagaagcttgaaatcctcattaaagatactctcggtctaccagttgctgggcaaacctcagaatttgttaaccaagtgttagagaagactgcagaagggaatcccactggaggccttgtattttggggaaactctaaaactggtaatattttgtatgatgaaaaccctaatgagaaaaaacaagatatatagatggaaaaattatggggtttaaatgtttttttgttccaactctttttcagattttttgaatgtatataggactatgttgaaatgtagatatatgccacagagtctgtgtattgt

SEQ ID NO: 328805 - DNA, 7788 bp, Artificial Sequence
  derived and/or modified sequence
gagtcacgcgatttccgggaacccgtcaggaaggacataaacaaaacaaacccgaggcagcatggagaggggccgtggcccctgcagcggaaccggacccagtccctgagccgcccctacacccacagacagcatcgcacagaattattttaaaaaaaagcagtgatccaagcaattgaattggaagcactctggggaaacctgctgtttattgtggaaatcatcttcgatcttggaattgaaagtaaagctggaaaggaatttacaaacaagaaaaaaaagaagtttggaatcggattcacaggatctgggcttggaaatgcctcagcctagtgtaagcggaatggatccgcctttcggggatgcctttcgaagccacaccttttcggaacaaactctgatgagcacagatctcttagcaaacagttcggatccagatttcatgtatgaactggatagagagatgaactaccaacagaatcctagagacaactttctttctttggaggactgcaaagacattgaaaatctggagtctttcacagatgtcctggataatgagggtgctttaacctcaaactgggaacagtgggatacatactgtgaagacctaacgaaatataccaaactaaccagctgtgacatctggggaacaaaagaagtggattacttgggtcttgatgacttttctagtccttaccaagatgaagaggttataagtaaaactccaactttagctcaacttaatagtgaggactcacagtctgtttctgattccctttattaccccgattcacttttcagtgtcaaacaaaatcccttaccctcttcattccctggtaaaaagatcacaagcagagcagctgctcctgtgtgttcttctaagactctgcaggctgaggtccctttgtcagactgtgtccaaaaagcaagtaaacccacttcaagcacacaaatcatggtgaagaccaacatgtatcataatgaaaaggtgaactttcatgttgaatgtaaagactatgtaaaaaaggcaaaggtaaagatcaacccagtgcaacagagccggcccttgttgagccagattcacacagatgcagcaaaggagaacacctgctactgtggtgcagtggcaaagagacaagagaaaaaagggatggagcctcttcaaggtcatgccactcccgctttgccttttaaagaaacccaggaactattactaagtcccctgccccaggaaggtcctgggtcacttgcagcaggagagagcagcagtctttctgccagtacatcagtctcagattcatcccagaaaaaagaagagcacaattattctctttttgtctccgacaacttgggtgaacagccaactaaatgcagtcctgaagaagatgaggaggacgaggaggatgttgatgatgaggaccatgatgaaggattcggcagtgagcatgaactgtctgaaaatgaggaggaggaagaagaggaagaggattatgaagatgacaaggatgatgatattagtgatactttctctgaaccaggctatgaaaatgattctgtagaagacctgaaggaggtgacttcaatatcttcacggaagagaggtaaaagaagatacttctgggagtatagtgaacaacttacaccatcacagcaagagaggatgctgagaccatctgagtggaaccgagatactttgccaagtaatatgtatcagaaaaatggcttacatcatggtagtggaaaatatgcagtaaagaagtcacggagaactgatgtagaagacctgactccaaatcctaaaaaactcctccagataggcaatgaacttcggaaactgaataaggtgattagtgacctgactccagtcagtgagcttcccttaacagcccgaccaaggtcaaggaaggaaaaaaataagctggcttccagagcttgtcggttaaagaagaaagcccagtatgaagctaataaagtgaaattatggggcctcaacacagaatatgataatttattgtttgtaatcaactccatcaagcaagagattgtaaaccgggtacagaatccaagagatgagagaggacccaacatggggcagaagcttgaaatcctcattaaagatactctcggtctaccagttgctgggcaaacctcagaatttgttaaccaagtgttagagaagactgcagaagggaatcccactggaggccttgtaggattaaggataccaacatcaaaggtgtaatcagcctcattggaccactggtcagaaatgtctgcgttttgtcacgttatccattgtaaattttcattctgttttgcatgtcagttagcattatgtaaacatttacaattaggttacattgttttaagaactaagtagcataagtgaagcatgatccaaaatacttgattattgcattttcagagcataaaccatgattaaaactgctactggcatcagaattgaaaatcatatgtttaagtaaatgttaggtacagattacaaaaatctgttaaagcaaaacattttggaggagtgaaatagtaaaatgccaagtattgtggcagatttatgctctgaaccacacaaaaaaattgaggaagcatttttttaaacagtcggtttaaattgtttttagaattattgctttttgttctaattttccacaaccattaatctcacttgtatatggcacacccagcacttgtgcctgtgggccatattagatgttcattgtcagagctcaagatgatatatataaatatatatatatatatatatatatacacacacacacacaaatgtctgtgcaagtaagaaaaaaaaagcatattctttgtgccttgtattttggggaaactctaaaactggtaatattttgtatgatgaaaaccctaatgagaaaaaacaagatatatagatggaaaaattatggggtttaaatgtttttttgttccaactctttttcagattttttgaatgtatataggactatgttgaaatgtagatatatgccacagagtctgtgtattgtataaaaaacaaaacaaaaaacaacaaaaaaaagatggctctagaaaactcatatttcggtacttgaccggaagaagacaaatacttgcacattattgcgattgttttattttttgtaccaaagacaaatgcaactgatatggcaaactgccagtctaagtaaagttttgcacagcttacatgatactgtatgaatgtatgaaaaaaaaggagaaaaaaaagaaaaaaaaaggtcagggttagggatcttactgaactgtgaattttatttctgtttgggtccaattatctacagaaggagcatccatacatacaaatattattttgctgttcctctagttcgcttccatagtagataagttggtggccatttagatgtcttttatttctgcacttattgtaggaaattttaatatatttcattttagtaagctattgataaaatagtttttgactttgaaaattaaaatgtttatttagcttattgtagtatacttccaccagacaacaaaatagattatttttattgtattatgtatatatatatatgtaaagaaagaaaaaagctaaaaatatctaattctttagttgccacttttccgattgatgtattattgtgcatgtaatattttcaaagatcaacacaggctaaaacaaaaacaatttatagatttttatatttttgtacaggtattttcaaactagcttcttcaaacttaacatgtgacttattcttctatagtttctagaattgagaaacattaacacatttagtttttaggtgctcttttttgctcatataaaacagcttcattagtcagtgttttaactgtgttcaagctttacctcttgatgagaaatttcttatgtcaaggcagcattataaaccttcccccacagatttttccatcctgtctctcttactgttttattctcaaatcttgtgctttgaactctgaaaactggtggcttaaaaactaaaaaaagaaaaaaagcatatttagcaaggaaaaaaataccaaaaatttcaggcatagctgctggaaaaattatctatttctccattacccactgtaggatttcttttttaattatactttgactataaagtgtcaaagtataatttgttcttttcttttactttgttaccccatttgtaagctatagcatatgaagctatatatatagcttgtgaaggtttgatctagaacacccagtaacaaatgaacaatgttgcttacctgcttctttgacatcttaaaaaagaaatccaaggaggattgtaaggattgtcttaccaccttagctgaactgtgatgcacaagatttttctatgtgtttggtggaaatgtacctggtttgtacattcacgctaaacagatgataagctcaagtctgatggtttaatagaatgtaagttcatcgtttaaagcttttcctttttaggttggagaaggcaaaacacaggcttgcaagttggaagtatatgaagtcttgacagagtgtgtctggtaaattgaaaagtgtttcaaactatggcagttttgcaatcaggtgaaaatcacctcatgatattcagctgataaggtttataaaattgcccctttctagctgctctgttaggaattctggtttttgatacttttttcctgtctgcaaaccagaatttgattttttggtcttgcatttcaaaaaaaaaaagactttgaatctgtttagtagattccatatctttgagtttcagtgttttatatgtactacttaagttaaatagttaaaagcttttaaatagttgagctttttaatgttgacactttattttgtacctatttatatatgtatgtatatcttagaaaagcactttgttaaaaaaaaattgcattttatatgattcctgccatttgctgctaaatctgggctggtcagaatgctgcagcgatacttgatctatataaaaacctggcagtaaaatgtagagtgaaagttaaatcctcttgctgttttaactttatcataaagatgacataggcaagctgtgcagctttacattttaaccaggggactctgtggcatttaaaaccgtctagaaatggttgtactttaatgccagtaataatctgcttcctctattgtcattaaaatatatacgtttagtgtatcacacaaaccaatcttataagggtaatgtaaaaaccccaacaattgtacatgttctgtttttgaaaattgtggcatgtatttttgggtgaagatcattagagaagagttctctaaaggttttctgtgttcatacatggtatacagatagctcataatgaagtccagaatcttacttttaagtgaaggcattgtgaattcacctcaagtaaacccattgttccaaagcaattataaactttgactctagtactactatgatttaaaaaaaaaaaaaaccaacaaaaaccttttttcctagtttcagatacactggattctttatagagtttgtctccatatgaaagcatgctgtccagtcgctcttgttaagatcttgtctgagttttgaattgggtgccacacttttccagtcaatataattgcttgttctactgtaccatgtatgattcttgtcctttcctatatccttcatgacagattatgatgtggctttatattgtgccttacttgtacatttaaaactaaacgtcttcattcccttccacttcctacatctttaactttgacctttttggtaagagaatcagaactattacaaaagcatcatgaaggatttcagatgggtatggtttcaaattccctctctttatagttattttatatttgtatgaaagaccagttttggatggtctttgaatataggggggaaagattagcagtaatttcactacatcccttttctctgactttcatgcatttctcatacatcttctttctgatgcttgactttatttgcttcctagcaatagtctgcatttaaagaaaggtgtgttcaattcatcagcttgaaattgactatttcatttttccaggattttttaggagaagagtacccattttgttttataaaaacagatgacaagtctctttaaaagaaacagaagtacagtacttttgaaatacaatgctgttagtttggatttctttttatatatatatataatattcatacaatgatctgatgtttgccttcattaataaagctgttagtttattcaccaaaatgtcaagaatggatgtgcttttctttattccacacatttaaaaaaatttagctgctaagatttaatgttataagaaatgaattcaagttgccttcagcaagaattaacaaaaacttatgttccctttctttatatagtttcctaaaattctgttcaagtattttctagttaattatgtaacagaatgttagcatctctccatatcttgaaacttgaattttgagaatgcattgaattatgctttcagtgttaaagtaaaaggtttcaattatccttctagtgaagtctgttgtggaataccatttcccatggaactgaggccatttccacaactttgcacagaactgcagtcttgttcttcccttggatcatgacaaataagtctcacacagtgccgtaatacttgtggattcttttgtaatctttgtaatcttaataagggcattatgagaagacgactccatgtttttttaatacttcaaacacattgggatgtaacaatgaatgtcaactgtaggaatggtggtttcgttttaaggaataagcatgttggggaaagatgatgaaaatgtactactgaaagttatacacttccataggcaaatgggattatgtgttgaagcatagtcctcatgcttaataaactgactgaaatcgtagaaattacacctaggaactgagctaggccaaattgccatttttgtttagagagttttggaggtagtagtgaggggacagagccttaaaactacttccaaacagtattttggaattgaagacttggtaactagtgaagaacatcaaagttgggtatttcaatgtgccaagtttgggtgaactaggttcggtttgcctctttcataacaatgtaaacacaatggtgtagttaattaaattctgggtggataggagcaggactgattactatgtcttgcccttcgccctttgtttttttcagaaccaaataacagaaatgtgtatgtgtgtactgtatctgcctttccaccacatttttatgacactgtattccactgcctgcttttttaccttctttccctaggatttgtcctacagcttagtattgtggttgacagcgatactagggctgacagcacagaagtcacaagagaagagtggaagggcaagaattcaaagcatttgttcatacaatgtggcaacctcttttgcatagttgcgtaggatcctgtttgtaatgctatcataaatattctgtagttttttttttttctctcccaactggagctatgacactttttattggattcagtcttgtctcttgtctagaaagaactttatcttgttgacgcatgagctgtttaaaaattatcctattaaatgttggttaatagttgtgcagtttttcatttcagatggaaaggcaatgcaaattttgcctttgttttctgtcaccttccaacccctgagcacttctagtcagatacagattcatcagtgtatgcaacatcctttgtaatttaaaataaaaaaagatgaaaagaaaacgtt

SEQ ID NO: 328806 - DNA, 1920 bp, Artificial Sequence
  derived and/or modified sequence
atgccccagcccagcgtgagcggcatggacccccccttcggcgacgccttcagaagccacaccttcagcgagcagaccctgatgagcaccgacctgctggccaacagcagcgaccccgacttcatgtacgagctggacagagagatgaactaccagcagaaccccagagacaacttcctgagcctggaggactgcaaggacatcgagaacctggagagcttcaccgacgtgctggacaacgagggcgccctgaccagcaactgggagcagtgggacacctactgcgaggacctgaccaagtacaccaagctgaccagctgcgacatctggggcaccaaggaggtggactacctgggcctggacgacttcagcagcccctaccaggacgaggaggtgatcagcaagacccccaccctggcccagctgaacagcgaggacagccagagcgtgagcgacagcctgtactaccccgacagcctgttcagcgtgaagcagaaccccctgcccagcagcttccccggcaagaagatcaccagcagagccgccgcccccgtgtgcagcagcaagaccctgcaggccgaggtgcccctgagcgactgcgtgcagaaggccagcaagcccaccagcagcacccagatcatggtgaagaccaacatgtaccacaacgagaaggtgaacttccacgtggagtgcaaggactacgtgaagaaggccaaggtgaagatcaaccccgtgcagcagagcagacccctgctgagccagatccacaccgacgccgccaaggagaacacctgctactgcggcgccgtggccaagagacaggagaagaagggcatggagcccctgcagggccacgccacccccgccctgcccttcaaggagacccaggagctgctgctgagccccctgccccaggagggccccggcagcctggccgccggcgagagcagcagcctgagcgccagcaccagcgtgagcgacagcagccagaagaaggaggagcacaactacagcctgttcgtgagcgacaacctgggcgagcagcccaccaagtgcagccccgaggaggacgaggaggacgaggaggacgtggacgacgaggaccacgacgagggcttcggcagcgagcacgagctgagcgagaacgaggaggaggaggaggaggaggaggactacgaggacgacaaggacgacgacatcagcgacaccttcagcgagcccggctacgagaacgacagcgtggaggacctgaaggaggtgaccagcatcagcagcagaaagagaggcaagagaagatacttctgggagtacagcgagcagctgacccccagccagcaggagagaatgctgagacccagcgagtggaacagagacaccctgcccagcaacatgtaccagaagaacggcctgcaccacggcaagtacgccgtgaagaagagcagaagaaccgacgtggaggacctgacccccaaccccaagaagctgctgcagatcggcaacgagctgagaaagctgaacaaggtgatcagcgacctgacccccgtgagcgagctgcccctgaccgccagacccagaagcagaaaggagaagaacaagctggccagcagagcctgcagactgaagaagaaggcccagtacgaggccaacaaggtgaagctgtggggcctgaacaccgagtacgacaacctgctgttcgtgatcaacagcatcaagcaggagatcgtgaacagagtgcagaaccccagagacgagagaggccccaacatgggccagaagctggagatcctgatcaaggacaccctgggcctgcccgtggccggccagaccagcgagttcgtgaaccaggtgctggagaagaccgccgagggcaaccccaccggcggcctggtgggcctgagaatccccaccagcaaggtgtag

SEQ ID NO: 328807 - DNA, 1920 bp, Artificial Sequence
  derived and/or modified sequence
atccccaagcccagcgtgagcggcatggacccccccttcggcgacgccttcagaagccacaccttcagcgagcagaccctgatgagcaccgacctgctggccaacagcagcgaccccgacttcatgtacgagctggacagagagatgaactaccagcagaaccccagagacaacttcctgagcctggaggactgcaaggacatcgagaacctggagagcttcaccgacgtgctggacaacgagggcgccctgaccagcaactgggagcagtgggacacctactgcgaggacctgaccaagtacaccaagctgaccagctgcgacatctggggcaccaaggaggtggactacctgggcctggacgacttcagcagcccctaccaggacgaggaggtgatcagcaagacccccaccctggcccagctgaacagcgaggacagccagagcgtgagcgacagcctgtactaccccgacagcctgttcagcgtgaagcagaaccccctgcccagcagcttccccggcaagaagatcaccagcagagccgccgcccccgtgtgcagcagcaagaccctgcaggccgaggtgcccctgagcgactgcgtgcagaaggccagcaagcccaccagcagcacccagatcatggtgaagaccaacatgtaccacaacgagaaggtgaacttccacgtggagtgcaaggactacgtgaagaaggccaaggtgaagatcaaccccgtgcagcagagcagacccctgctgagccagatccacaccgacgccgccaaggagaacacctgctactgcggcgccgtggccaagagacaggagaagaagggcatggagcccctgcagggccacgccacccccgccctgcccttcaaggagacccaggagctgctgctgagccccctgccccaggagggccccggcagcctggccgccggcgagagcagcagcctgagcgccagcaccagcgtgagcgacagcagccagaagaaggaggagcacaactacagcctgttcgtgagcgacaacctgggcgagcagcccaccaagtgcagccccgaggaggacgaggaggacgaggaggacgtggacgacgaggaccacgacgagggcttcggcagcgagcacgagctgagcgagaacgaggaggaggaggaggaggaggaggactacgaggacgacaaggacgacgacatcagcgacaccttcagcgagcccggctacgagaacgacagcgtggaggacctgaaggaggtgaccagcatcagcagcagaaagagaggcaagagaagatacttctgggagtacagcgagcagctgacccccagccagcaggagagaatgctgagacccagcgagtggaacagagacaccctgcccagcaacatgtaccagaagaacggcctgcaccacggcaagtacgccgtgaagaagagcagaagaaccgacgtggaggacctgacccccaaccccaagaagctgctgcagatcggcaacgagctgagaaagctgaacaaggtgatcagcgacctgacccccgtgagcgagctgcccctgaccgccagacccagaagcagaaaggagaagaacaagctggccagcagagcctgcagactgaagaagaaggcccagtacgaggccaacaaggtgaagctgtggggcctgaacaccgagtacgacaacctgctgttcgtgatcaacagcatcaagcaggagatcgtgaacagagtgcagaaccccagagacgagagaggccccaacatgggccagaagctggagatcctgatcaaggacaccctgggcctgcccgtggccggccagaccagcgagttcgtgaaccaggtgctggagaagaccgccgagggcaaccccaccggcggcctggtgggcctgagaatccccaccagcaaggtgtag

SEQ ID NO: 328808 - DNA, 81 bp, Artificial Sequence
  derived and/or modified sequence
atgccccagcccagcgtgagcggcatggacccccccttcggcgacgccttcagaagccacaccttcagcgagcagacctag

SEQ ID NO: 328809 - DNA, 1962 bp, Artificial Sequence
  derived and/or modified sequence
atgccccagcccagcgtgagcggcatggacccccccttcggcgacgccttcagaagccacaccttcagcgagcagaccctgatgagcaccgacctgctggccaacagcagcgaccccgacttcatgtacgagctggacagagagatgaactaccagcagaaccccagagacaacttcctgagcctggaggactgcaaggacatcgagaacctggagagcttcaccgacgtgctggacaacgagggcgccctgaccagcaactgggagcagtgggacacctactgcgaggacctgaccaagtacaccaagctgaccagctgcgacatctggggcaccaaggaggtggactacctgggcctggacgacttcagcagcccctaccaggacgaggaggtgatcagcaagacccccaccctggcccagctgaacagcgaggacagccagagcgtgagcgacagcctgtactaccccgacagcctgttcagcgtgaagcagaaccccctgcccagcagcttccccggcaagaagatcaccagcagagccgccgcccccgtgtgcagcagcaagaccctgcaggccgaggtgcccctgagcgactgcgtgcagaaggccagcaagcccaccagcagcacccagatcatggtgaagaccaacatgtaccacaacgagaaggtgaacttccacgtggagtgcaaggactacgtgaagaaggccaaggtgaagatcaaccccgtgcagcagagcagacccctgctgagccagatccacaccgacgccgccaaggagaacacctgctactgcggcgccgtggccaagagacaggagaagaagggcatggagcccctgcagggccacgccacccccgccctgcccttcaaggagacccaggagctgctgctgagccccctgccccaggagggccccggcagcctggccgccggcgagagcagcagcctgagcgccagcaccagcgtgagcgacagcagccagaagaaggaggagcacaactacagcctgttcgtgagcgacaacctgggcgagcagcccaccaagtgcagccccgaggaggacgaggaggacgaggaggacgtggacgacgaggaccacgacgagggcttcggcagcgagcacgagctgagcgagaacgaggaggaggaggaggaggaggaggactacgaggacgacaaggacgacgacatcagcgacaccttcagcgagcccggctacgagaacgacagcgtggaggacctgaaggaggtgaccagcatcagcagcagaaagagaggcaagagaagatacttctgggagtacagcgagcagctgacccccagccagcaggagagaatgctgagacccagcgagtggaacagagacaccctgcccagcaacatgtaccagaagaacggcctgcaccacggcaagtacgccgtgaagaagagcagaagaaccgacgtggaggacctgacccccaaccccaagaagctgctgcagatcggcaacgagctgagaaagctgaacaaggtgatcagcgacctgacccccgtgagcgagctgcccctgaccgccagacccagaagcagaaaggagaagaacaagctggccagcagagcctgcagactgaagaagaaggcccagtacgaggccaacaaggtgaagctgtggggcctgaacaccgagtacgacaacctgctgttcgtgatcaacagcatcaagcaggagatcgtgaacagagtgcagaaccccagagacgagagaggccccaacatgggccagaagctggagatcctgatcaaggacaccctgggcctgcccgtggccggccagaccagcgagttcgtgaaccaggtgctggagaagaccgccgagggcaaccccaccggcggcctggtgttctggggcaacagcaagaccggcaacatcctgtacgacgagaaccccaacgagaagaagcaggacatctag

SEQ ID NO: 328810 - DNA, 1926 bp, Artificial Sequence
  derived and/or modified sequence
atgccccagcccagcgtgagcggcatggacccccccttcggcgacgccttcagaagccacaccttcagcgagcagaccctgatgagcaccgacctgctggccaacagcagcgaccccgacttcatgtacgagctggacagagagatgaactaccagcagaaccccagagacaacttcctgagcctggaggactgcaaggacatcgagaacctggagagcttcaccgacgtgctggacaacgagggcgccctgaccagcaactgggagcagtgggacacctactgcgaggacctgaccaagtacaccaagctgaccagctgcgacatctggggcaccaaggaggtggactacctgggcctggacgacttcagcagcccctaccaggacgaggaggtgatcagcaagacccccaccctggcccagctgaacagcgaggacagccagagcgtgagcgacagcctgtactaccccgacagcctgttcagcgtgaagcagaaccccctgcccagcagcttccccggcaagaagatcaccagcagagccgccgcccccgtgtgcagcagcaagaccctgcaggccgaggtgcccctgagcgactgcgtgcagaaggccagcaagcccaccagcagcacccagatcatggtgaagaccaacatgtaccacaacgagaaggtgaacttccacgtggagtgcaaggactacgtgaagaaggccaaggtgaagatcaaccccgtgcagcagagcagacccctgctgagccagatccacaccgacgccgccaaggagaacacctgctactgcggcgccgtggccaagagacaggagaagaagggcatggagcccctgcagggccacgccacccccgccctgcccttcaaggagacccaggagctgctgctgagccccctgccccaggagggccccggcagcctggccgccggcgagagcagcagcctgagcgccagcaccagcgtgagcgacagcagccagaagaaggaggagcacaactacagcctgttcgtgagcgacaacctgggcgagcagcccaccaagtgcagccccgaggaggacgaggaggacgaggaggacgtggacgacgaggaccacgacgagggcttcggcagcgagcacgagctgagcgagaacgaggaggaggaggaggaggaggaggactacgaggacgacaaggacgacgacatcagcgacaccttcagcgagcccggctacgagaacgacagcgtggaggacctgaaggaggtgaccagcatcagcagcagaaagagaggcaagagaagatacttctgggagtacagcgagcagctgacccccagccagcaggagagaatgctgagacccagcgagtggaacagagacaccctgcccagcaacatgtaccagaagaacggcctgcaccacggcagcggcaagtacgccgtgaagaagagcagaagaaccgacgtggaggacctgacccccaaccccaagaagctgctgcagatcggcaacgagctgagaaagctgaacaaggtgatcagcgacctgacccccgtgagcgagctgcccctgaccgccagacccagaagcagaaaggagaagaacaagctggccagcagagcctgcagactgaagaagaaggcccagtacgaggccaacaaggtgaagctgtggggcctgaacaccgagtacgacaacctgctgttcgtgatcaacagcatcaagcaggagatcgtgaacagagtgcagaaccccagagacgagagaggccccaacatgggccagaagctggagatcctgatcaaggacaccctgggcctgcccgtggccggccagaccagcgagttcgtgaaccaggtgctggagaagaccgccgagggcaaccccaccggcggcctggtgggcctgagaatccccaccagcaaggtgtag

SEQ ID NO: 328811 - DNA, 1920 bp, Artificial Sequence
  derived and/or modified sequence
atgccgcaaccatccgtgtctgggatggatcctcctttcggagatgcattcaggagccacactttttccgagcagaccctgatgtcgaccgacttactcgcgaattcttcagaccccgacttcatgtacgagctcgaccgcgaaatgaactatcaacagaatccgcgggataacttcctgagtttggaagattgtaaagacattgagaacttagaatcatttaccgacgtgctcgataatgagggcgcacttacgagcaactgggaacagtgggacacatactgcgaggatttgacaaaatataccaagcttacctcgtgcgacatttggggaaccaaggaggtcgattacctggggcttgatgattttagctccccttaccaggatgaggaggtgattagcaaaacaccgaccctggcacagctcaacagtgaggactcccaatcagtaagcgacagcttgtactatcctgatagtttattcagcgtgaagcagaacccactaccaagtagcttcccagggaagaaaatcaccagcagggccgccgccccagtatgttccagcaagacacttcaagcagaggttccgctcagcgattgtgtacagaaggcttccaaaccgacctccagtacccagataatggtcaaaactaacatgtaccataatgaaaaagtgaattttcacgtcgaatgcaaggactacgtgaaaaaagcgaaggtgaaaataaacccagtgcaacagtctagacctctcctcagtcagattcacaccgacgccgctaaggaaaacacctgttactgtggcgcggtagccaagcgccaggagaagaagggcatggagcctctgcagggccacgccactcccgccctgcccttcaaagagacccaggaattactcttgtcaccacttccgcaggagggcccaggatccctggcggctggggagagcagttctctctcggcctccacctccgtatccgactcatcacagaaaaaggaggagcacaactacagcctctttgtgtccgacaacctgggcgaacagcctaccaagtgcagccccgaagaggacgaggaagatgaggaggacgtggacgatgaggaccacgatgaggggtttggctctgagcacgaattaagtgagaacgaggaggaagaagaggaagaagaagactacgaggacgataaggacgacgacatctcagacacattttcagagcctgggtacgaaaatgacagtgtggaggacctaaaggaagtcaccagtatcagctcaagaaaacggggtaagaggaggtatttctgggagtactccgagcagctgacgccttcacaacaggagagaatgctaaggccctcagagtggaaccgggatacactgccaagcaatatgtatcagaagaacgggctccatcacggaaagtacgccgtcaaaaagtctagacgcacggatgtggaagacttaacacctaatccaaaaaagctgttgcagattggcaatgaactgcggaaactcaacaaggtcatcagtgacctgactccggtgagcgaactgccccttacagctagaccaaggtctcgaaaggagaagaataaattagcttcacgcgcctgccgtctgaaaaagaaagcccagtacgaggctaacaaggtaaagctctgggggctgaacacggagtacgacaatcttctatttgtaattaacagtattaagcaggagattgttaacagggttcagaatccacgtgacgagcgagggccaaacatgggccagaagttagagatactgattaaagataccctgggtctgcctgtggccggacagacttcggagtttgtgaatcaggtactggaaaaaaccgcggaaggcaacccaaccggggggcttgtgggccttcgcatcccaaccagcaaagtgtag

SEQ ID NO: 328812 - DNA, 1920 bp, Artificial Sequence
  derived and/or modified sequence
attcccaagccatcagtgtctggtatggatcctccctttggagacgcctttcgttcccatacgttctctgagcagactctgatgagcacagaccttctcgcgaactcatctgacccagattttatgtacgagctcgacagggagatgaactaccaacagaatccgagagataattttctgagcctagaggactgcaaagacattgagaacctggagtcatttacagacgtgcttgacaacgaaggtgccctgaccagcaactgggaacagtgggatacctactgcgaggatctgacaaagtataccaaacttacatcctgcgatatttggggcacaaaggaggtggattatctcggtctggacgatttctccagtccatatcaggacgaagaagttataagcaaaacgccgacgttagcacagctaaatagcgaggatagccagagcgtgtccgactcactttactatcccgatagccttttctcggtaaagcagaacccgttaccctccagtttccctggtaaaaaaattacttcccgggcggcggcaccggtgtgctccagcaagacactacaggccgaagtccctctaagcgactgcgtacagaaagcaagcaagcccacgtcttccacacagataatggtgaagacgaacatgtaccacaatgaaaaggtgaatttccacgtcgagtgcaaggattacgtcaaaaaagccaaagtaaaaatcaatcctgtgcagcagtcacgccccctgctgtcgcagattcatacagacgccgctaaggagaacacctgttattgcggagccgtagctaaacgccaggaaaaaaagggcatggagcccctgcagggtcacgccactcccgcgctacctttcaaggaaacacaggaactgcttctgtctcccctccctcaagaaggacccggcagcctggccgctggcgagagttcaagcctgtcagctagtacctcggtttctgactcttcccagaaaaaggaggagcacaattatagtttgttcgtgtccgataatctaggcgagcagcccaccaagtgttcgcctgaagaagacgaggaggacgaggaagacgtcgatgacgaagaccacgatgaagggttcgggagcgagcacgagctctctgaaaatgaggaggaagaagaggaagaagaggattatgaggatgacaaggacgatgacatctctgacacatttagcgaaccaggctacgaaaacgacagcgtcgaagatctcaaggaggtgacatcaatatcaagcaggaaacgtggtaagcggcggtacttctgggagtacagcgaacagctgacacccagccaacaggagagaatgcttaggccctcggagtggaatcgcgatacactgcccagcaacatgtaccagaagaatggcctgcatcacgggaagtacgccgtgaagaagagtagacgtacagatgtggaagatctaacgcctaatccgaagaagctactgcagatcggaaacgagttgcgcaagctcaacaaggtgatcagtgatcttaccccggtatccgagcttccgctaaccgctcgtcctcggtcccgaaaagagaagaataaactcgcctctcgcgcttgcaggcttaaaaaaaaagcccagtacgaagcaaataaagtgaagctgtggggactgaacaccgaatatgataacctgcttttcgtcattaatagcataaaacaagaaatcgtcaaccgtgtgcagaaccctcgggacgagcggggcccaaatatgggtcagaagctggagattttgattaaagatacactcgggttacccgtcgctggtcagacctccgaattcgtcaatcaggtcctggagaaaaccgcggaggggaaccccacaggtgggctggtgggactgcgtattcctacgagcaaggtgtag

SEQ ID NO: 328813 - DNA, 81 bp, Artificial Sequence
  derived and/or modified sequence
atgccacaaccaagtgtttctggcatggaccccccttttggggatgcctttagaagccatacattttcagagcaaacctag

SEQ ID NO: 328814 - DNA, 1962 bp, Artificial Sequence
  derived and/or modified sequence
atgccacagccttctgtgtctggaatggatcctccctttggagacgcatttaggagtcacacattcagtgagcagactttgatgtctaccgacctgctggctaatagctccgacccagacttcatgtatgaactggacagagagatgaattatcagcagaatccccgggataattttctttcgctcgaggactgtaaggacatcgagaatctggagagttttactgatgtgctggataacgagggagccctgaccagcaattgggagcaatgggacacctactgcgaggacttgacaaaatacacgaaactgacgtcctgtgacatatggggcacaaaggaagttgattatttggggttggacgattttagctccccttatcaggacgaggaggtcatatcaaagacccccactctggctcagctgaattcagaggatagtcaaagtgtgtccgattctttgtactatccagatagtctgttttctgtcaaacagaacccactaccatcaagtttcccgggcaaaaagattaccagccgagccgctgctccagtctgctccagcaagaccctgcaggccgaggtacccctgtccgactgtgtgcagaaggctagcaagcccacttcaagtacgcagatcatggtcaagaccaatatgtatcataatgaaaaggtcaactttcatgttgagtgtaaggactatgtaaaaaaggctaaggtgaaaatcaaccctgtgcaacaatctcgacccctgctgtcccagatacacacagacgcggctaaggaaaatacatgttactgtggagccgtggcaaagaggcaggaaaaaaagggcatggaaccattacagggccatgccacgcctgccctgcctttcaaggaaactcaagagttgctgctctccccccttccacaggaagggcccgggagtctggctgcaggcgagtcttcgtcattaagcgcttctacctcggtgagtgactctagccagaagaaagaagaacacaattatagcctgttcgtctccgataacctgggcgaacagccaacaaagtgtagcccggaggaagatgaagaggatgaagaggacgtggatgacgaggaccacgacgaaggctttggatccgagcatgagctatctgaaaacgaagaggaggaggaggaggaggaggattacgaagatgacaaagacgacgatatctctgatacattcagtgaaccggggtacgaaaatgatagcgtggaagacctgaaagaggtgaccagcatctcttcaaggaagcgggggaaacggcggtacttttgggaatactctgagcagctaactccgtcacaacaggagcggatgctgcgtccctcagaatggaacagggacacccttcccagtaacatgtaccaaaagaacggcctgcaccacgggaaatatgccgtgaagaaaagtcgaaggaccgacgtggaggacttaacaccaaaccccaagaaactgctccagattggaaacgagctgcggaagctgaataaagtcatctcagacctaacccctgtgagcgagctgccactaaccgcccggcccaggagtaggaaagaaaaaaataagttggcatctcgcgcgtgccgcttgaagaagaaggctcaatacgaagccaacaaggtgaaactgtgggggctgaatacggagtacgataacctcctttttgtgatcaactccattaaacaagagattgtaaacagagtgcagaatccccgcgatgagcgcgggcctaacatgggacagaagctggagatacttataaaggacaccttaggcctccccgtggcaggccagactagcgaatttgtcaaccaggtccttgagaagaccgccgaaggcaatcctaccggaggactggtcttttggggcaatagcaagacaggtaatattctttatgatgagaatcctaacgagaagaagcaagacatttag

SEQ ID NO: 328815 - DNA, 1926 bp, Artificial Sequence
  derived and/or modified sequence
atgccccagcctagcgtatcaggtatggacccaccattcggcgacgctttccggtcccacaccttcagcgaacagaccctaatgtcaacagatctgcttgccaattcctctgatccagactttatgtatgagcttgacagagaaatgaattatcaacagaatccacgggataattttctgtctttagaagattgcaaagatattgagaatctggaatctttcactgacgttctagataatgaaggcgctctcacatccaattgggagcaatgggacacttattgtgaagatctaaccaaatacactaagctaaccagttgtgacatctgggggactaaggaagtggactatctgggtctggacgacttttcttcaccctaccaggacgaggaggtcatttctaaaacaccaacactcgctcagcttaactccgaggactctcagtctgtgtctgacagcctatactacccagactccctcttctctgtgaagcaaaatcccctgccatcctccttccctggaaagaaaattaccagcagggccgccgccccagtgtgttctagtaagaccctgcaggccgaggtgcccctctcagactgtgtgcagaaggcgagtaagcctacctccagtacgcaaatcatggtgaaaacaaacatgtaccataacgagaaagtgaattttcacgttgaatgtaaagattatgtgaaaaaggccaaggttaaaattaaccccgtgcagcagtctagacctctgctttcacagattcatactgatgcagccaaggaaaatacttgctactgcggcgcagtggccaagcgacaagaaaagaaggggatggaaccgctgcaaggacatgcaactcccgccttgccttttaaggaaacacaggagttactcctcagccctttgccccaggaaggcccaggctcactggccgcgggagagagtagctctctgagtgcatctacctcggtgagtgactcctcacagaaaaaggaagagcacaattactctctgttcgtctccgataatctgggtgagcagccgactaaatgcagtccagaagaagatgaagaggatgaggaggatgtagacgatgaagaccacgatgaaggcttcggatccgagcatgaactctccgagaacgaggaggaggaagaggaagaagaagactatgaggatgataaggatgatgacatctctgatactttctcagaacctggatacgagaatgattctgtggaggatcttaaagaagttacctctatctcttctagaaaacgcggcaaacggcgctacttctgggaatacagcgagcagctgacacctagccagcaggaacgcatgctacgcccatctgaatggaacagggataccctgccaagtaatatgtaccagaagaatggcctacaccacggttccggaaaatacgccgtcaaaaaaagcaggcgcaccgatgttgaggatttgactccaaatcccaagaagctgttgcagatcggaaacgaactgcggaaactgaataaggtgatctctgacctgacccccgtgagcgaattgcctctgaccgccagaccaagatcccggaaggaaaaaaacaaactggcgtcaagggcctgtaggctgaagaagaaagctcagtacgaggccaacaaagtgaagttatggggtctaaatacagagtacgacaaccttctatttgtaatcaattctatcaaacaggaaattgtaaatagggtgcaaaatccccgtgacgagcgggggccaaacatgggtcagaaattggagattttgattaaagatacactggggctgcctgttgctggtcagacatctgaatttgtaaaccaggtgcttgagaagaccgccgaaggcaaccctactggtggcctcgtaggtcttagaataccaacaagtaaagtgtag

SEQ ID NO: 328816 - DNA, 1920 bp, Artificial Sequence
  derived and/or modified sequence
atgccccagcccagcgtgtctggcatggaccccccatttggagatgccttccgcagccacaccttcagcgagcagaccctgatgagcacagacctgctggccaacagcagtgaccctgacttcatgtatgagctggaccgggagatgaactaccagcagaacccccgggacaacttcctgagcctggaggactgcaaggacatcgagaacctggagagcttcacagatgtgctggacaatgaaggagccctgaccagcaactgggagcagtgggacacctactgtgaggacctgaccaagtacaccaagctgaccagctgtgacatctggggcaccaaggaggtggactacctgggcctggatgacttcagcagcccctaccaggatgaggaggtgatcagcaagacccccaccctggcccagctgaacagcgaggacagccagagcgtgtctgacagcctgtactacccagacagcctcttctctgtgaagcagaaccccctgcccagcagcttccctgggaagaagatcaccagcagagctgctgcccctgtgtgcagcagcaagaccctgcaggccgaggtgcccctgagtgactgtgtgcagaaggccagcaagcccaccagcagcacccagatcatggtgaagaccaacatgtaccacaatgagaaggtgaacttccacgtggagtgcaaggactatgtgaagaaggccaaggtgaagatcaaccctgtgcagcagagccggcccctgctgagccagatccacacagatgctgccaaggagaacacctgctactgtggggctgtggccaagaggcaggagaagaagggcatggagcccctgcagggccacgccaccccagccctgcccttcaaggagacccaggagctgctgctgagccccctgccccaggagggccctggcagcctggccgccggggagagcagcagcctgagcgccagcacctctgtgtctgacagcagccagaagaaggaggagcacaactacagcctgtttgtgtctgacaacctgggggagcagcccaccaagtgcagccctgaggaggatgaagaagatgaggaggatgtggatgatgaagatcatgatgagggctttggaagtgaacatgagctgtctgaaaatgaggaggaggaggaggaggaggaggactatgaagatgacaaggatgatgacatcagtgacaccttcagcgagcccggctatgaaaatgattctgtggaggacctgaaggaggtgaccagcatcagcagcaggaagaggggcaagaggcgctacttctgggagtacagcgagcagctgacccccagccagcaggagaggatgctgcggcccagcgagtggaacagagacaccctgcccagcaacatgtaccagaagaatggcctgcaccacggcaagtatgctgtgaagaagagcagaagaacagatgtggaggacctgacccccaaccccaagaagctgctgcagattggaaatgagctgaggaagctgaacaaggtgatcagtgacctgacccctgtgtctgagctgcccctgacagcccggcccaggagcaggaaggagaagaacaagctggccagccgggcctgccgcctgaagaagaaggcccagtatgaggccaacaaggtgaagctgtggggcctgaacacagaatatgacaacctgctgtttgtgatcaacagcatcaagcaggagatcgtgaacagagtgcagaaccccagagatgagcggggccccaacatgggccagaagctggagatcctgatcaaggacaccctgggcctgcctgtggccggccagaccagcgagtttgtgaaccaggtgctggagaagacagctgagggcaaccccaccggcggcctggtgggcctgcgcatccccaccagcaaggtgtag

SEQ ID NO: 328817 - DNA, 1920 bp, Artificial Sequence
  derived and/or modified sequence
atccccaagcccagcgtgtctggcatggaccccccatttggagatgccttccgcagccacaccttcagcgagcagaccctgatgagcacagacctgctggccaacagcagtgaccctgacttcatgtatgagctggaccgggagatgaactaccagcagaacccccgggacaacttcctgagcctggaggactgcaaggacatcgagaacctggagagcttcacagatgtgctggacaatgaaggagccctgaccagcaactgggagcagtgggacacctactgtgaggacctgaccaagtacaccaagctgaccagctgtgacatctggggcaccaaggaggtggactacctgggcctggatgacttcagcagcccctaccaggatgaggaggtgatcagcaagacccccaccctggcccagctgaacagcgaggacagccagagcgtgtctgacagcctgtactacccagacagcctcttctctgtgaagcagaaccccctgcccagcagcttccctgggaagaagatcaccagcagagctgctgcccctgtgtgcagcagcaagaccctgcaggccgaggtgcccctgagtgactgtgtgcagaaggccagcaagcccaccagcagcacccagatcatggtgaagaccaacatgtaccacaatgagaaggtgaacttccacgtggagtgcaaggactatgtgaagaaggccaaggtgaagatcaaccctgtgcagcagagccggcccctgctgagccagatccacacagatgctgccaaggagaacacctgctactgtggggctgtggccaagaggcaggagaagaagggcatggagcccctgcagggccacgccaccccagccctgcccttcaaggagacccaggagctgctgctgagccccctgccccaggagggccctggcagcctggccgccggggagagcagcagcctgagcgccagcacctctgtgtctgacagcagccagaagaaggaggagcacaactacagcctgtttgtgtctgacaacctgggggagcagcccaccaagtgcagccctgaggaggatgaagaagatgaggaggatgtggatgatgaagatcatgatgagggctttggaagtgaacatgagctgtctgaaaatgaggaggaggaggaggaggaggaggactatgaagatgacaaggatgatgacatcagtgacaccttcagcgagcccggctatgaaaatgattctgtggaggacctgaaggaggtgaccagcatcagcagcaggaagaggggcaagaggcgctacttctgggagtacagcgagcagctgacccccagccagcaggagaggatgctgcggcccagcgagtggaacagagacaccctgcccagcaacatgtaccagaagaatggcctgcaccacggcaagtatgctgtgaagaagagcagaagaacagatgtggaggacctgacccccaaccccaagaagctgctgcagattggaaatgagctgaggaagctgaacaaggtgatcagtgacctgacccctgtgtctgagctgcccctgacagcccggcccaggagcaggaaggagaagaacaagctggccagccgggcctgccgcctgaagaagaaggcccagtatgaggccaacaaggtgaagctgtggggcctgaacacagaatatgacaacctgctgtttgtgatcaacagcatcaagcaggagatcgtgaacagagtgcagaaccccagagatgagcggggccccaacatgggccagaagctggagatcctgatcaaggacaccctgggcctgcctgtggccggccagaccagcgagtttgtgaaccaggtgctggagaagacagctgagggcaaccccaccggcggcctggtgggcctgcgcatccccaccagcaaggtgtag

SEQ ID NO: 328818 - DNA, 81 bp, Artificial Sequence
  derived and/or modified sequence
atgccccagcccagcgtgtctggcatggaccccccatttggagatgccttccgcagccacaccttcagcgagcagacctag

SEQ ID NO: 328819 - DNA, 1962 bp, Artificial Sequence
  derived and/or modified sequence
atgccccagcccagcgtgtctggcatggaccccccatttggagatgccttccgcagccacaccttcagcgagcagaccctgatgagcacagacctgctggccaacagcagtgaccctgacttcatgtatgagctggaccgggagatgaactaccagcagaacccccgggacaacttcctgagcctggaggactgcaaggacatcgagaacctggagagcttcacagatgtgctggacaatgaaggagccctgaccagcaactgggagcagtgggacacctactgtgaggacctgaccaagtacaccaagctgaccagctgtgacatctggggcaccaaggaggtggactacctgggcctggatgacttcagcagcccctaccaggatgaggaggtgatcagcaagacccccaccctggcccagctgaacagcgaggacagccagagcgtgtctgacagcctgtactacccagacagcctcttctctgtgaagcagaaccccctgcccagcagcttccctgggaagaagatcaccagcagagctgctgcccctgtgtgcagcagcaagaccctgcaggccgaggtgcccctgagtgactgtgtgcagaaggccagcaagcccaccagcagcacccagatcatggtgaagaccaacatgtaccacaatgagaaggtgaacttccacgtggagtgcaaggactatgtgaagaaggccaaggtgaagatcaaccctgtgcagcagagccggcccctgctgagccagatccacacagatgctgccaaggagaacacctgctactgtggggctgtggccaagaggcaggagaagaagggcatggagcccctgcagggccacgccaccccagccctgcccttcaaggagacccaggagctgctgctgagccccctgccccaggagggccctggcagcctggccgccggggagagcagcagcctgagcgccagcacctctgtgtctgacagcagccagaagaaggaggagcacaactacagcctgtttgtgtctgacaacctgggggagcagcccaccaagtgcagccctgaggaggatgaagaagatgaggaggatgtggatgatgaagatcatgatgagggctttggaagtgaacatgagctgtctgaaaatgaggaggaggaggaggaggaggaggactatgaagatgacaaggatgatgacatcagtgacaccttcagcgagcccggctatgaaaatgattctgtggaggacctgaaggaggtgaccagcatcagcagcaggaagaggggcaagaggcgctacttctgggagtacagcgagcagctgacccccagccagcaggagaggatgctgcggcccagcgagtggaacagagacaccctgcccagcaacatgtaccagaagaatggcctgcaccacggcaagtatgctgtgaagaagagcagaagaacagatgtggaggacctgacccccaaccccaagaagctgctgcagattggaaatgagctgaggaagctgaacaaggtgatcagtgacctgacccctgtgtctgagctgcccctgacagcccggcccaggagcaggaaggagaagaacaagctggccagccgggcctgccgcctgaagaagaaggcccagtatgaggccaacaaggtgaagctgtggggcctgaacacagaatatgacaacctgctgtttgtgatcaacagcatcaagcaggagatcgtgaacagagtgcagaaccccagagatgagcggggccccaacatgggccagaagctggagatcctgatcaaggacaccctgggcctgcctgtggccggccagaccagcgagtttgtgaaccaggtgctggagaagacagctgagggcaaccccaccggcggcctggtgttctggggcaacagcaagacaggcaacatcctgtatgatgagaaccccaatgagaagaagcaggacatctag

SEQ ID NO: 328820 - DNA, 1926 bp, Artificial Sequence
  derived and/or modified sequence
atgccccagcccagcgtgtctggcatggaccccccatttggagatgccttccgcagccacaccttcagcgagcagaccctgatgagcacagacctgctggccaacagcagtgaccctgacttcatgtatgagctggaccgggagatgaactaccagcagaacccccgggacaacttcctgagcctggaggactgcaaggacatcgagaacctggagagcttcacagatgtgctggacaatgaaggagccctgaccagcaactgggagcagtgggacacctactgtgaggacctgaccaagtacaccaagctgaccagctgtgacatctggggcaccaaggaggtggactacctgggcctggatgacttcagcagcccctaccaggatgaggaggtgatcagcaagacccccaccctggcccagctgaacagcgaggacagccagagcgtgtctgacagcctgtactacccagacagcctcttctctgtgaagcagaaccccctgcccagcagcttccctgggaagaagatcaccagcagagctgctgcccctgtgtgcagcagcaagaccctgcaggccgaggtgcccctgagtgactgtgtgcagaaggccagcaagcccaccagcagcacccagatcatggtgaagaccaacatgtaccacaatgagaaggtgaacttccacgtggagtgcaaggactatgtgaagaaggccaaggtgaagatcaaccctgtgcagcagagccggcccctgctgagccagatccacacagatgctgccaaggagaacacctgctactgtggggctgtggccaagaggcaggagaagaagggcatggagcccctgcagggccacgccaccccagccctgcccttcaaggagacccaggagctgctgctgagccccctgccccaggagggccctggcagcctggccgccggggagagcagcagcctgagcgccagcacctctgtgtctgacagcagccagaagaaggaggagcacaactacagcctgtttgtgtctgacaacctgggggagcagcccaccaagtgcagccctgaggaggatgaagaagatgaggaggatgtggatgatgaagatcatgatgagggctttggaagtgaacatgagctgtctgaaaatgaggaggaggaggaggaggaggaggactatgaagatgacaaggatgatgacatcagtgacaccttcagcgagcccggctatgaaaatgattctgtggaggacctgaaggaggtgaccagcatcagcagcaggaagaggggcaagaggcgctacttctgggagtacagcgagcagctgacccccagccagcaggagaggatgctgcggcccagcgagtggaacagagacaccctgcccagcaacatgtaccagaagaatggcctgcaccacggcagcggcaagtatgctgtgaagaagagcagaagaacagatgtggaggacctgacccccaaccccaagaagctgctgcagattggaaatgagctgaggaagctgaacaaggtgatcagtgacctgacccctgtgtctgagctgcccctgacagcccggcccaggagcaggaaggagaagaacaagctggccagccgggcctgccgcctgaagaagaaggcccagtatgaggccaacaaggtgaagctgtggggcctgaacacagaatatgacaacctgctgtttgtgatcaacagcatcaagcaggagatcgtgaacagagtgcagaaccccagagatgagcggggccccaacatgggccagaagctggagatcctgatcaaggacaccctgggcctgcctgtggccggccagaccagcgagtttgtgaaccaggtgctggagaagacagctgagggcaaccccaccggcggcctggtgggcctgcgcatccccaccagcaaggtgtag

SEQ ID NO: 328821 - DNA, 1920 bp, Artificial Sequence
  derived and/or modified sequence
atgccccagcccagcgtgagcggcatggacccccccttcggcgacgccttcagatctcacactttcagtgagcagacacttatgtcgacagatctactggctaattccagtgatccagacttcatgtatgagctggaccgggaaatgaactatcagcaaaacccacgcgacaattttctgtcattagaggactgtaaagacatcgagaatttagaatctttcacagacgtgctggacaatgagggagctctcacttccaattgggagcagtgggacacatactgtgaagatctgactaagtacaccaaattgaccagctgtgacatttggggaaccaaggaagtggactatctaggcctcgacgatttttctagcccttatcaggacgaagaagtgataagcaagactccaacactcgcccagctgaatagtgaggattcacagagcgtgagcgacagcctctactacccagactccctcttcagtgttaagcagaatccacttccttcctcattccccgggaaaaagattacttcaagagccgctgctcccgtctgttcatcaaagaccctgcaggcagaagtgcctctgagcgactgcgtgcagaaggcgtcaaagccaaccagcagcacacaaattatggtcaagacaaatatgtaccacaacgaaaaggtgaactttcacgttgagtgtaaggattacgtgaagaaagccaaggttaagattaatccagtccagcaaagccggccactcctgagtcagatccacacggatgcagctaaagagaatacatgctattgtggcgccgttgccaaacgccaggaaaaaaagggtatggagcccctgcagggtcacgctacacccgctcttcctttcaaggaaacccaagaactattgctttcccctctaccacaagaaggacctggcagtctcgcagccggagaatcttcgagcctgagcgctagtacatctgtgtcggactcctctcagaagaaggaagagcacaattactccctgtttgtgtctgacaatctcggggaacagccaacaaagtgctcacctgaagaggatgaagaagatgaggaggatgtggacgacgaggaccacgacgagggatttggttctgagcacgagctctccgaaaacgaagaggaagaggaggaggaggaggattacgaggacgacaaggatgatgatatttccgatactttctcagaacctggttatgagaatgactccgtggaagatttgaaggaggtcacatcaatttcgtcaaggaaaagaggcaaaagaaggtacttctgggaatactctgaacagctaacgccatcacagcaggagaggatgttacggccctctgagtggaaccgcgacactctgcccagcaatatgtatcagaagaatggcctgcaccatggcaagtatgctgttaaaaagtctagaagaacagatgtggaagatcttaccccaaaccccaagaagctattgcagattggtaacgagctgcggaaattgaacaaggtcatcagtgacttgactccagtttccgaactcccgctcactgcgaggcctagaagtcgcaaggagaagaataagctggcatccagggcctgtaggttgaagaagaaggcccagtacgaggcaaacaaggtcaaattatggggccttaacacagagtatgacaacctgctatttgtcatcaatagtatcaagcaagagatcgtgaaccgcgtgcaaaacccacgggacgagagagggccgaatatgggccaaaaactcgaaattctgatcaaggatacacttgggctgcccgtcgccggtcagacgagcgaatttgtgaatcaagtgctcgagaaaaccgccgaaggaaaccctactggaggtcttgtgggccttagaatccccacttcgaaagtatag

SEQ ID NO: 328822 - DNA, 1920 bp, Artificial Sequence
  derived and/or modified sequence
atccccaagcccagcgtgagcggcatggacccccccttcggcgacgccttcagaagtcacaccttctctgagcagaccctcatgtctactgacctgctggctaactcatctgaccctgatttcatgtatgaattagatagagagatgaattaccagcagaaccctcgagataacttcctgtctctggaggattgtaaagacatcgaaaatctggaaagcttcaccgatgttctagataacgagggcgctctgacgtctaattgggaacagtgggacacatactgtgaagacctgactaaatacacaaagttgactagctgtgacatctgggggaccaaagaggtggattatctgggactggatgatttttcttcgccctaccaggatgaggaagtgatttctaagacacccacattagctcaactcaattccgaggactcacaaagcgtcagcgacagcttgtattatccagacagcctgttctccgtaaagcaaaatccactaccaagctcgttcccgggaaaaaagatcacaagccgcgctgccgcccccgtctgcagctccaaaaccttgcaagcagaagtacctctaagcgactgcgtgcaaaaagcatccaaacccaccagctcaacacagattatggtcaaaacaaatatgtatcacaacgaaaaggttaactttcacgtcgaatgcaaagattatgtaaaaaaggccaaggtcaagatcaacccagtgcaacagtcgagacctctcctttctcagatccacacagacgccgcgaaggagaatacttgctactgcggagcagtggcgaaaaggcaagagaaaaaaggtatggagccattgcagggacacgccacccccgccctgccctttaaagagacccaggagctgctcttgtcgcccctgcctcaggagggaccaggtagtttggcagctggggaatcgtcatccttgtctgctagcacgagcgtgagtgatagcagccagaaaaaagaagaacacaactacagcctttttgtgtcagacaatctgggggagcagcctacaaagtgctcaccagaagaagacgaggaagacgaagaggacgtggatgacgaggaccacgacgagggctttggctctgaacatgaactgtcagagaatgaagaagaggaagaggaagaggaagactacgaggacgacaaggatgacgacatttctgatacattttctgaaccaggttatgaaaacgattccgtagaggatcttaaggaggtcacatccattagtagtaggaagcgcggaaaaagacgatatttctgggaatatagcgaacaacttaccccatcgcagcaggagcggatgctgagacccagcgaatggaacagagatacactgccatcgaatatgtatcaaaagaacgggttacaccatggtaaatatgctgtaaaaaaatcccgcaggaccgacgtcgaggatctgaccccaaatcctaaaaagctgctgcagataggcaacgagctgcggaaactgaacaaggtcatctccgacctgaccccagtcagcgagcttccactcaccgcccgtcctcgttcaagaaaggagaaaaataagttagctagccgagcttgccgcttgaagaagaaggcccagtacgaggccaacaaggtgaagctgtggggactaaatacggaatacgataatctgctgttcgtgatcaatagtattaagcaggaaatcgttaatcgggtccagaaccctagggacgaaaggggccccaatatggggcagaagctcgagatcctgattaaggacaccctaggactgccggtggcaggtcagacctctgaatttgtgaatcaggtgctggagaagactgccgaggggaaccctaccggagggttagtcggcctgagaatccccacttcaaaggtgtag

SEQ ID NO: 328823 - DNA, 81 bp, Artificial Sequence
  derived and/or modified sequence
atgccccagcccagcgtgagcggcatggacccccccttcggcgacgccttccgctcccacaccttctcggaacaaacctag

SEQ ID NO: 328824 - DNA, 1962 bp, Artificial Sequence
  derived and/or modified sequence
atgccccagcccagcgtgagcggcatggacccccccttcggcgacgcctttcgctcacatactttcagtgaacagacgctcatgtccactgacttactggccaactcttcagatcccgactttatgtacgagctcgacagagaaatgaactatcagcaaaacccacgcgataattttttaagcttagaagactgtaaagacatcgaaaacctcgagtccttcacggacgtcttagacaatgagggcgccttgacctctaattgggagcagtgggacacatattgcgaggacctcaccaagtacaccaagcttacctcctgcgatatctgggggacaaaggaggtcgattatctgggacttgacgactttagcagcccgtaccaggacgaagaagtgatatctaagacgcccactcttgcccagctgaattctgaggattcacagtcagtgagtgattctctatattatcccgacagcctgttcagcgtgaagcagaacccactcccatcctcattccctgggaagaagattaccagccgagcagccgcccctgtgtgtagtagcaaaacccttcaagctgaggtaccactcagcgactgcgtgcagaaagcatccaagccgacatcatcgactcagattatggttaagacgaacatgtaccataacgagaaggtcaatttccacgtcgagtgtaaggactacgttaaaaaagccaaagttaaaatcaacccagtgcagcagagtcgccccttgctttcccagatccacactgatgctgcgaaggaaaacacttgttactgcggcgctgtggccaaaagacaggaaaagaagggcatggagccactgcagggtcatgctaccccagcactaccatttaaggagacccaggaactgctccttagccctctgccccaggaaggccccggaagtttggccgcaggcgagtcttcaagtttatctgcctctacttccgtatccgattcatcgcagaaaaaagaggagcacaactacagcttgttcgttagtgacaatctgggagaacaacccacgaagtgcagccccgaagaggatgaagaggacgaggaggacgtcgatgacgaagaccacgacgagggattcggatccgaacacgagttaagcgagaacgaggaggaggaagaggaggaggaagattatgaagacgataaagatgacgatatttccgacacttttagtgaacctggttatgagaatgattcggtggaagatcttaaggaggtaacctcaatctcttctcggaagcggggaaagagacgatacttttgggaatatagtgagcaactcacaccatcccagcaggaaaggatgctgagacccagtgaatggaatcgtgacaccttgccgtcaaatatgtatcagaagaacggcctgcatcacggaaagtatgctgtgaagaagtcccgacggactgatgtggaggatctgactccgaacccgaagaaacttctccagatcggcaatgaattgcggaaacttaataaagtcatttcagatctgactccagtctccgaactccccctgactgccagaccccggagtaggaaggagaaaaacaagttagcctccagagcttgcagactgaagaagaaagctcagtatgaggcgaataaggtaaaattgtgggggcttaacactgaatacgacaacttattgtttgtgataaactccataaagcaggagattgtgaatcgcgtccaaaatccaagagacgaacggggaccgaacatgggccagaagctggaaatcctgatcaaggatacattaggcctgcccgtcgcaggtcagactagcgagtttgttaaccaagttctggagaagaccgctgagggcaatccaaccgggggcctggttttctggggcaactcaaagaccgggaacattctatacgatgagaatccaaatgagaaaaaacaggatatttag

SEQ ID NO: 328825 - DNA, 1926 bp, Artificial Sequence
  derived and/or modified sequence
atgccccagcccagcgtgagcggcatggacccccccttcggcgacgcctttcgttctcataccttctcagagcaaacattaatgtcaacagacttgctcgccaatagctccgaccccgatttcatgtacgaattagatagagagatgaattatcaacagaatccacgggacaattttctgagcctcgaggactgtaaggacatcgagaacctggaaagcttcactgacgtgttggacaatgaaggcgctcttacctcaaattgggagcaatgggatacctactgcgaagacctgactaaatatactaaactcacttcttgcgacatctggggaactaaggaggttgactacctaggtctggatgatttctcaagcccctatcaggacgaagaagtgatctcaaaaactcctacattagcccagctcaatagcgaggactcccaatccgtcagcgactctttatactatccagactcgctttttagtgttaagcaaaacccgctaccaagcagtttccccgggaaaaaaataacctctcgtgctgccgcaccagtctgtagctcaaaaaccctgcaggctgaagtccctctgtccgactgcgtacagaaggcatctaagccaacgagctcgacacagataatggtgaagaccaatatgtaccacaatgagaaggtgaactttcacgtagaatgcaaggactacgttaagaaagcaaaggtgaagatcaatccagtgcagcagtcccgccctctgctctcccagatacacaccgatgcggctaaagagaacacatgctactgcggtgctgtagctaagagacaggaaaagaaggggatggaacctctacagggtcacgccactccagcgctgccgttcaaggaaacccaggaactgctgctgtctcccttgccccaagagggccccggctccctggccgccggtgagtcaagctcccttagcgcatcgacctccgtatccgattctagccagaaaaaagaggaacacaattactcactctttgtttctgacaacctgggcgagcaaccaactaagtgtagcccggaggaggacgaggaagatgaggaagacgtggatgatgaggatcacgacgagggtttcggcagtgaacatgaattgagtgagaacgaggaggaggaggaggaagaggaggattatgaggacgataaagatgatgacatcagtgacactttcagtgagccaggctacgagaatgattccgtggaggatctgaaagaggtgaccagcatctccagtcgcaagagggggaagaggaggtacttttgggagtactccgagcaattgacccccagccagcaggaacgcatgctcagacctagtgagtggaacagggacactctgccgtctaatatgtaccagaaaaacggtctccatcatggcagcggcaaatacgctgttaagaaatccaggcgcaccgacgtcgaggacctaacaccaaatccaaagaagctgctgcaaatagggaacgaattgcgcaaattaaacaaggttatctccgaccttacaccggtgtctgagcttcccctcactgcacgaccgagatcaaggaaggagaagaacaagctagcgtctcgggcctgccgcctaaaaaagaaggctcagtatgaggcaaacaaagtaaaactttggggactgaatacagaatatgataatctgctcttcgtgattaattcaatcaaacaagagattgttaatagggtccagaatccacgagacgaaaggggccccaacatgggtcaaaaactagagatccttattaaagacacccttggcctgccagttgccgggcagacaagcgagttcgtgaaccaggtcctcgagaagacagccgaagggaatcctacaggaggcctggtgggacttcggataccaacttccaaagtctag

SEQ ID NO: 328826 - DNA, 1920 bp, Artificial Sequence
  derived and/or modified sequence
atgccacagccgtccgtgtctgggatggatcccccttttggggacgcattccgttcacatactttttcagagcaaaccctgatgtcaactgacctgctggccaactcttcagaccctgatttcatgtacgaactggaccgcgagatgaattaccagcagaaccccagagataatttcctgtcactggaggactgcaaggacattgagaatctggaatctttcaccgacgtgctggacaacgagggtgccctgacctcaaactgggaacagtgggatacatattgcgaagatctgacaaagtataccaaactcacctcctgtgacatctgggggacaaaggaagtggactacctgggactggacgattttagtagcccttaccaagatgaggaagttatctcgaaaactcctaccctggcccagttgaattccgaggactcccagtccgtgagcgattccttatactatcctgattcccttttcagcgtgaaacagaatccactgcccagctcctttcctgggaagaagatcacctcccgcgcagccgcacccgtgtgctcttccaagacccttcaggcagaggtgcccctgagcgactgcgtccagaaggcttccaaaccaacttcatccacacagatcatggtaaaaaccaatatgtaccacaatgagaaggtgaattttcacgttgagtgtaaagattacgtaaagaaagcgaaagtgaagataaatccagtccagcagtccagacccctgttgtcacaaattcacactgatgcagctaaagaaaacacgtgttactgcggggctgttgcaaagagacaggaaaagaagggaatggaaccactgcaggggcatgctacgcctgcccttcccttcaaagaaacacaagagctgttactgagtcccctgcctcaggagggccctggatcgctggctgccggtgagtctagcagtctgtctgcatctacttccgtttcagacagctcccagaagaaggaagagcacaattatagtcttttcgtgtcagacaacttgggcgagcagcctacaaagtgttctcccgaggaggacgaggaagacgaggaagacgtggatgacgaagaccacgacgagggattcggctctgagcacgaattgtctgaaaatgaggaggaagaggaagaggaagaagactatgaagatgataaagatgatgacatctctgataccttcagcgaacctgggtacgaaaacgatagcgttgaagatctgaaagaagtcacatctataagctctcggaagaggggaaagcggagatacttttgggagtacagtgagcaactcacaccttcgcagcaggaaaggatgttacgcccttcagaatggaaccgtgatactctcccttccaacatgtaccagaaaaacgggttgcatcacggcaaatatgcagtaaagaaaagtagacgcaccgatgtcgaggacctgactcccaatcccaagaagctccttcagattggaaatgagctgcgaaaactcaataaggtcattagcgacctaaccccagtgtcggaactgccactgactgcccgaccacgaagtcgcaaagagaaaaataagctggctagcagggcttgccgactgaaaaagaaggctcagtacgaggccaacaaggtgaaattgtgggggctgaacaccgagtacgacaacttgctgttcgtcataaactccatcaagcaggagattgtgaacagagtccagaatccaagggacgaacggggtccaaatatgggccaaaaactcgagatccttattaaggataccctgggactgcccgttgccggtcagaccagcgaattcgtgaatcaagtcctggaaaaaacagctgagggtaatcctacaggtgggctggtcggacttaggatccctactagcaaagtctag

SEQ ID NO: 328827 - DNA, 1920 bp, Artificial Sequence
  derived and/or modified sequence
attcctaaaccttctgtgtctgggatggatcccccatttggcgatgcttttaggtctcacaccttctcagagcagaccctgatgtctacggacctcttggctaactcaagtgatccagatttcatgtacgaactcgacagggagatgaactaccagcagaacccccgagataattttctgtcattagaagactgcaaggatatcgaaaacctggaatctttcacagacgtgctagacaacgagggcgcactcacgagcaactgggaacagtgggatacatattgcgaggacttaactaaatacaccaaactgacgtcctgcgatatctggggcactaaggaagtagactatctgggcctagacgacttttcctccccctaccaggatgaggaagtaatctcaaagacgcctactctcgcccagctgaactccgaggactcacagagcgtttcagattcgctctattaccccgacagcttattctctgttaagcagaatccactgcccagttccttcccagggaagaagataacatctcgcgcagctgctccagtgtgttctagcaagaccctgcaagccgaagttcccttgagcgattgtgtgcagaaggcaagcaaaccgacctcgtccacgcagattatggtcaaaactaatatgtatcacaatgaaaaagtcaatttccatgtcgaatgcaaggattatgttaagaaagcgaaagttaaaataaaccccgttcaacaaagtagacctttgcttagtcaaattcacaccgacgccgctaaagagaacacctgttattgcggggcagtagcaaagcggcaggagaagaaaggcatggaacctcttcagggtcacgcaacgcctgctctcccctttaaggagacgcaggaactccttttgtctccactcccccaggaaggtcccggatcgctcgctgccggagagtccagtagcctttcggcctcgacaagcgtttccgattcttctcagaaaaaagaggagcacaattatagtttgttcgtgtccgacaacttgggggagcagcccaccaaatgttctcccgaggaagatgaggaggatgaggaagatgtggatgatgaggatcacgacgaaggatttggcagcgagcacgaactctccgagaacgaggaagaggaggaggaggaggaggattacgaggacgataaagacgacgatatcagcgacactttctcagagccgggttacgagaacgatagcgttgaggatcttaaagaagtgaccagtattagctctaggaagcgcggtaagcgcagatatttttgggagtactccgagcagcttactccgtctcagcaggagcggatgcttcggccaagcgagtggaatagggatacacttcccagcaatatgtatcaaaagaacggcctgcaccacggtaagtatgccgttaaaaagagccggagaaccgacgtggaggatcttacgccaaaccccaaaaagttactccaaattggcaacgaattacgaaaacttaataaggtgatttcagacttgacacctgtgtccgagctgcctctgacagcacgaccccgaagtcgaaaggagaagaacaagcttgcctcccgggcatgcagattgaagaaaaaagcgcaatatgaggctaataaggttaagctgtggggactaaacactgaatatgacaacctactctttgtgataaattccatcaagcaggaaattgttaaccgggtgcaaaacccccgagatgagaggggtcctaatatgggacagaagctggagatattgattaaggacacactgggattgccagtcgccggacagacatctgagtttgtgaatcaggtcttagaaaaaacagccgaaggcaatcccaccggcggacttgtgggattgcgtataccaactagcaaagtttag

SEQ ID NO: 328828 - DNA, 81 bp, Artificial Sequence
  derived and/or modified sequence
atgcctcagcctagtgtgtctggaatggatcctccattcggcgacgctttccggtcccacacctttagcgagcagacatag

SEQ ID NO: 328829 - DNA, 1962 bp, Artificial Sequence
  derived and/or modified sequence
atgccccagccttctgtgtccgggatggacccgcctttcggagacgcatttagatcccacactttctctgagcagactctgatgtctacggatctgctcgcaaactcaagcgatcccgatttcatgtatgagctggatcgggagatgaattatcaacaaaaccccagggataactttctcagcctggaggactgcaaggacattgagaatttggagagctttacagacgttctcgataatgagggagccctgacttccaattgggaacagtgggatacatactgtgaggacctgaccaaatacaccaagctgacgagctgtgacatctggggcacgaaggaggtggactatttaggcctggacgacttcagcagcccttaccaagacgaggaggtgatctcaaaaacaccaactctagctcaactcaactcagaggactcccagagcgtgagcgactccctgtactacccagattcactgtttagcgttaaacagaatccgctcccgtcctcattccccggtaagaagattacctctagagccgctgctccggtctgctcatccaagaccttacaggccgaagtgcccctctctgactgcgtccagaaggcgtctaagccaacttcttcaacacaaatcatggttaagacaaacatgtaccacaatgagaaagtgaactttcacgtcgaatgtaaggattatgtgaaaaaggctaaagtgaagatcaatcccgtgcaacaatctcgcccactactttcacagatccacactgatgctgccaaagagaacacttgctattgcggtgccgtcgctaaacgccaagaaaagaagggtatggagcctctccagggtcacgcgacccccgctttacccttcaaggagacgcaggaacttctgttaagcccactgccccaggagggcccaggcagtctggctgctggtgaaagctccagcttaagcgcctccacatctgtgagcgactcctcccagaaaaaagaggaacacaattacagcctgttcgtttcagacaatctaggcgagcagcctacaaagtgctcccccgaagaggatgaagaggacgaggaggatgtggatgatgaagatcatgatgaaggttttgggagcgagcacgagctctccgagaacgaagaggaagaagaagaggaggaggactacgaagacgataaagacgatgatataagtgacacgttcagtgagccaggctacgagaacgatagcgtggaggacctgaaagaagtgacatccatctcctcacgcaaacgtggaaaaagacggtacttctgggaatactcagagcagctcaccccaagtcagcaggagagaatgctgaggccgtccgagtggaaccgggatacgcttcctagcaacatgtaccaaaagaatggcctgcaccacgggaaatacgcagtcaagaagtcccgccgtactgacgtggaggacctcacccccaatccaaagaagctgctgcagataggaaatgagctgcgcaagttaaacaaagtcatctccgatctgacccctgtgagcgagcttcccctgactgccagacctcgctctcgcaaggaaaaaaacaagctggcgtctcgggcatgcagactgaaaaaaaaagcgcagtatgaagcaaataaggtgaagctgtgggggctgaacaccgagtatgacaacttactctttgtgatcaattctattaagcaggaaatagtgaatagggtccaaaatccccgagatgagaggggccctaacatgggccaaaagcttgagatcctgattaaagacactctcggccttccagtggcaggacagacgagtgagtttgtcaatcaggtgctagaaaagactgccgaagggaacccaaccggcggactggttttctggggaaacagcaaaactggcaacatcctttacgacgagaacccgaacgagaaaaagcaggatatttag

SEQ ID NO: 328830 - DNA, 1926 bp, Artificial Sequence
  derived and/or modified sequence
atgcctcagcctagtgtgtctgggatggatccacccttcggcgacgctttcaggagtcatacctttagtgagcagacactgatgagtaccgatctgcttgcaaattctagcgatccagactttatgtacgagctggaccgcgaaatgaactatcaacaaaatccacgtgacaatttcttgtcactggaagactgtaaggatatcgagaacctagagtcctttacagatgtcttggataacgagggggcactgacttccaactgggagcaatgggatacctattgtgaagacctcaccaagtatacaaaacttacatcctgcgatatttggggcaccaaggaggttgattatttgggactggatgatttttctagcccgtaccaggacgaagaggtcataagcaagacccctacactggctcagctgaactctgaggactctcagtccgtcagcgattcgctgtactatcccgacagtctgttcagcgtgaaacaaaaccctctcccgtcctcttttcctggtaagaagattacctcgcgcgctgccgcacctgtgtgtagttcaaaaaccctacaggctgaagttcccctgtcagactgtgtgcagaaggcctcaaaaccgacttcgtccactcagattatggtgaagaccaacatgtatcacaacgagaaagttaattttcacgtagagtgcaaggactatgtcaagaaggctaaggtgaaaatcaaccccgtgcagcaatctcgcccattgctcagccaaatccataccgacgccgcaaaagaaaacacttgttactgcggagcagtcgcgaagcggcaagaaaagaagggcatggaacctctccagggtcacgccactcccgctctaccatttaaggaaacccaggagttgcttctctcaccactcccacaagagggcccaggcagcctcgctgctggagagtcaagcagtcttagtgcatctacttcagtgtccgatagctcccaaaagaaagaggaacacaactacagcctgttcgtgagcgacaacctgggcgagcagccgaccaaatgcagtcctgaggaggatgaggaggatgaggaggacgttgatgacgaggatcacgacgagggattcggtagcgagcatgaattatcggaaaacgaagaggaagaggaggaggaggaggattacgaggatgacaaggacgacgatatctctgacaccttctcagaaccaggctatgagaatgattctgtcgaggacctgaaggaggtcacatcgatttcgagccgaaagaggggcaaacgcagatacttctgggaatattccgaacagttgactcctagccagcaggaacggatgctgagaccatcagagtggaatagagacacacttccttctaatatgtaccagaagaacgggctccatcacgggtcaggaaaatacgctgtgaaaaagagccgcaggaccgatgtggaggacctgacacccaaccctaaaaaactgctgcagatcggaaatgagctgaggaagctgaataaggtgattagcgatctgacccctgtgagcgagttgcctcttacagccagaccacggtctagaaaggagaaaaacaagttggctagtcgtgcctgccgtctcaaaaagaaggcacagtatgaggccaacaaagtaaaactctggggattgaacactgagtatgataatctgttgttcgtcattaattctattaagcaggaaattgtcaaccgggtgcagaaccctcgggacgagcgcggtccaaatatgggccagaagctggaaatactcattaaagatacgttgggtctgccagtcgctggccagacgtccgaatttgtgaaccaagtgctggagaaaaccgccgagggaaaccccactgggggattagtgggtctgaggattcctacgtcaaaagtgtag

SEQ ID NO: 328831 - protein, 336 aa, Artificial Sequence
  derived and/or modified sequence
MCVCAEDGKTLPVAVPIEDMQRIHLRFMFRHRSSLESKDKGEKNFAMSYVKLMKEDGTTLHDGFHDLVVLKGDSKKMEDASAYLTLPSYRHHVENKGATLSRSSSSVGGLSVSSRDVFSISTLVCSTKLTQNVGLLGLLKWRMKPQLEESMRRLFESINNLMKSQYKTTILLQVAALKYIPSVLHDVEMVFDAKLLSQLLYEFYTCIPPVKLQKQKVQSMNEIVQSNLFKKQECRDILLPVITKELKELLEQKDDMQHQVLERKYCVELLNSILEVLSYQDAAFTYHHIQEIMVQLLRTVNRTVITMGRDHILIGACCNCGFPSSTPHSLIQWLWG

SEQ ID NO: 328832 - DNA, 1011 bp, Artificial Sequence
  derived and/or modified sequence
atgtgtgtgtgcgctgaggacggtaagaccctgcccgtcgcagtgccaatcgaggacatgcagcgaatccacctgcgttttatgttccgtcacagaagctctctggaatccaaggacaagggtgagaaaaatttcgcaatgtcttacgtaaaattaatgaaagaggacggaacaacattacatgatggcttccacgacttagtggtcttgaaaggcgactccaagaagatggaggatgccagcgcatacctaactctcccttcttatagacatcacgttgagaataaaggggccactctgagtaggtcatccagctccgtgggaggactgtccgttagctcacgcgatgtcttctctatctcaactctggtgtgctccaccaagctgacacagaacgtgggcctcctcgggttgctcaaatggcggatgaagccccagttggaggagtctatgaggcgcctattcgaaagcatcaacaatctgatgaagagccagtataagacgaccatcctcctgcaggtcgcagcactgaaatacattccatcggtgctgcatgacgtggagatggtgtttgacgcaaaactgctcagccagcttttatatgaattttatacatgcattccaccagtgaagcttcaaaagcagaaggtccagagcatgaacgagatcgtgcaatctaatttgttcaagaaacaagagtgcagggatatcttactgccagtcatcactaaagagcttaaagaacttttggaacagaaggacgacatgcagcaccaagtgctggagaggaagtactgcgtcgaattgcttaattctattctcgaggtcctctcctatcaagatgccgcttttacctatcaccacattcaggaaatcatggtgcagcttctgcgcactgttaaccgaactgtcatcaccatgggccgcgaccatatcctcattggggcgtgttgcaattgcggctttccctctagtacacctcactcactaattcagtggctttggggctag

SEQ ID NO: 328833 - DNA, 1011 bp, Artificial Sequence
  derived and/or modified sequence
atgtgtgtgtgtgccgaggatggcaagaccctgcctgtggccgtgcccatcgaggacatgcagaggatccacctgcgcttcatgttccgccacaggagcagcctggagagcaaggacaagggggagaagaactttgccatgtcctatgtgaagctgatgaaggaggatggcaccaccctgcatgatggcttccatgacctggtggtgctgaagggggacagcaagaagatggaggatgccagcgcctacctgaccctgcccagctaccgccaccacgtggagaacaagggggccaccctgagccgcagcagcagctctgtgggcggcctgtctgtgagcagcagagatgtgttcagcatcagcaccctggtgtgcagcaccaagctgacccagaatgtgggcctgctgggcctgctgaagtggaggatgaagccccagctggaggagagcatgaggcggctgtttgagagcatcaacaacctgatgaagagccagtacaagaccaccatcctgctgcaggtggccgccctgaagtacatccccagcgtgctgcatgatgtggagatggtgtttgatgccaagctgctgagccagctgctgtatgagttctacacctgcatcccccctgtgaagctgcagaagcagaaggtgcagagcatgaatgaaattgtgcagagcaacctcttcaagaagcaggagtgccgggacatcctgctgcccgtcatcaccaaggagctgaaggagctgctggagcagaaggatgacatgcagcaccaggtgctggagaggaagtactgtgtggagctgctgaacagcatcctggaggtgctgagctaccaggatgctgccttcacctaccaccacatccaggagatcatggtgcagctgctgaggacagtgaacagaactgtcatcaccatgggccgggaccacatcctgattggagcctgctgcaactgtggcttccccagcagcaccccccacagcctcatccagtggctgtggggctag

SEQ ID NO: 328834 - DNA, 1011 bp, Artificial Sequence
  derived and/or modified sequence
atgtgcgtgtgcgccgaggacggcaagaccctgcccgtggccgtgccaatagaggatatgcagagaatacacctgagattcatgtttagacatagatcaagccttgaatccaaggataagggagagaagaactttgcaatgtcatacgtgaagctgatgaaagaagacggtaccaccctccatgacgggtttcatgacctagtcgtgttaaaaggcgactccaagaagatggaggacgcctctgcctatcttacattacccagctacagacaccatgtagagaacaaaggggccactctgtcacgatcgtcctctagtgttggaggccttagcgtcagctccagagacgttttctccatttctacccttgtatgcagcacaaaacttacccagaacgtaggtctccttggtctgctgaaatggcggatgaagccacagctggaagagtccatgcggcgtctcttcgaatctattaacaacttgatgaaatcccagtataagacaacaatcctgctgcaggtagcggctttaaagtatatcccatccgtactccacgacgtcgagatggtgttcgatgccaaacttctgtcccagcttctctacgagttctatacctgcatccctcccgtgaagctgcagaaacagaaggttcaaagcatgaatgagattgtgcaatctaatctgtttaagaagcaggagtgcagggacattttgctgcccgtcatcacgaaagagctgaaagagctgctcgagcaaaaggacgacatgcagcaccaggtcctggagcggaagtattgcgtcgagctgctgaatagtatcctagaggttctctcttaccaggatgcggctttcacgtatcatcacatccaagaaataatggtgcaactgctgaggacagtgaaccggaccgtgatcacaatgggcagggaccatatcttgattggcgcttgttgcaattgtggattcccctcatctaccccgcattcacttatacaatggctgtgggggtag

SEQ ID NO: 328835 - DNA, 1011 bp, Artificial Sequence
  derived and/or modified sequence
atgtgcgtctgtgcagaggatggaaagacactgccggttgcagtccctatagaggatatgcaacgaattcacttgagatttatgtttcgccaccgctcgtcactggagtccaaggataaaggcgaaaagaattttgcgatgagttacgtgaaactcatgaaggaagatgggaccaccctccatgacggatttcacgatttagtggtcctgaagggtgattccaaaaaaatggaggatgccagcgcctatctgactcttcctagctaccgccatcatgtcgagaataaaggagctaccctctctagatccagttcttcagtcggagggctttctgtgtccagtagggacgtattctcaatcagtacacttgtgtgtagtaccaaattaacccaaaatgtcggacttctcgggctgctcaaatggcgcatgaaaccccagctcgaggagtccatgagaagactcttcgagagtattaacaatctcatgaaaagccagtacaaaacaactattcttctacaagtcgccgcacttaaatacattccaagcgtgctgcacgatgtggaaatggtgttcgatgcaaagttgctgagccagctgctgtatgagttctacacgtgtatccctccggtgaaactgcagaagcagaaggtgcaatctatgaatgaaatagtccagagcaatttatttaagaaacaggaatgccgggacatcctgctacccgtgatcactaaagagctgaaagagctgctcgaacagaaagacgacatgcaacatcaagtcttggaaagaaaatactgcgtggaattgcttaatagcattctggaggtgctgtcttaccaggatgccgcttttacttaccatcacatccaggagatcatggtccagctgttgcgcactgtgaacaggaccgttatcacaatgggaagagatcacatactcatcggagcttgctgtaattgcgggttcccctcttccactccccactcacttattcagtggctgtggggctag

SEQ ID NO: 328836 - DNA, 1011 bp, Artificial Sequence
  derived and/or modified sequence
atgtgcgtgtgcgccgaggacggcaagaccctgcccgtggccgtgcccatcgaggacatgcagagaatccacctgagattcatgttcagacacagaagcagcctggagagcaaggacaagggcgagaagaacttcgccatgagctacgtgaagctgatgaaggaggacggcaccaccctgcacgacggcttccacgacctggtggtgctgaagggcgacagcaagaagatggaggacgccagcgcctacctgaccctgcccagctacagacaccacgtggagaacaagggcgccaccctgagcagaagcagcagcagcgtgggcggcctgagcgtgagcagcagagacgtgttcagcatcagcaccctggtgtgcagcaccaagctgacccagaacgtgggcctgctgggcctgctgaagtggagaatgaagccccagctggaggagagcatgagaagactgttcgagagcatcaacaacctgatgaagagccagtacaagaccaccatcctgctgcaggtggccgccctgaagtacatccccagcgtgctgcacgacgtggagatggtgttcgacgccaagctgctgagccagctgctgtacgagttctacacctgcatcccccccgtgaagctgcagaagcagaaggtgcagagcatgaacgagatcgtgcagagcaacctgttcaagaagcaggagtgcagagacatcctgctgcccgtgatcaccaaggagctgaaggagctgctggagcagaaggacgacatgcagcaccaggtgctggagagaaagtactgcgtggagctgctgaacagcatcctggaggtgctgagctaccaggacgccgccttcacctaccaccacatccaggagatcatggtgcagctgctgagaaccgtgaacagaaccgtgatcaccatgggcagagaccacatcctgatcggcgcctgctgcaactgcggcttccccagcagcaccccccacagcctgatccagtggctgtggggctag

SEQ ID NO: 328837 - DNA, 3122 bp, Artificial Sequence
  derived and/or modified sequence
cgctcgcggccacgccgccgtcgcgggtacattcctcgctcccggccgaggagcgctcgggctgtctgcggaccctgccgcgtgcaggggtcgcggccggctggagctgggagtgaggcggcggaggagccaggtgaggaggagccaggtgagcaggaccctgtgctgggcgcggagtcacgcaggctcgaggaaggcagttggtgggaagtccagcttgggtccctgagagctgtgagaaggagatgcggctgctgctggccctgttgggggtcctgctgagtgtgcctgggcctccagtcttgtccctggaggcctctgaggaagtggagcttgagccctgcctggctcccagcctggagcagcaagagcaggagctgacagtagcccttgggcagcctgtgcgtctgtgctgtgggcgggctgagcgtggtggccactggtacaaggagggcagtcgcctggcacctgctggccgtgtacggggctggaggggccgcctagagattgccagcttcctacctgaggatgctggccgctacctctgcctggcacgaggctccatgatcgtcctgcagaatctcaccttgattacaggtgactccttgacctccagcaacgatgatgaggaccccaagtcccatagggacccctcgaataggcacagttacccccagcaagcaccctactggacacacccccagcgcatggagaagaaactgcatgcagtacctgcggggaacaccgtcaagttccgctgtccagctgcaggcaaccccacgcccaccatccgctggcttaaggatggacaggcctttcatggggagaaccgcattggaggcattcggctgcgccatcagcactggagtctcgtgatggagagcgtggtgccctcggaccgcggcacatacacctgcctggtagagaacgctgtgggcagcatccgctataactacctgctagatgtgctggagcggtccccgcaccggcccatcctgcaggccgggctcccggccaacaccacagccgtggtgggcagcgacgtggagctgctgtgcaaggtgtacagcgatgcccagccccacatccagtggctgaagcacatcgtcatcaacggcagcagcttcggagccgacggtttcccctatgtgcaagtcctaaagactgcagacatcaatagctcagaggtggaggtcctgtacctgcggaacgtgtcagccgaggacgcaggcgagtacacctgcctcgcaggcaattccatcggcctctcctaccagtctgcctggctcacggtgctgccagaggaggaccccacatggaccgcagcagcgcccgaggccaggtatacggacatcatcctgtacgcgtcgggctccctggccttggctgtgctcctgctgctggccgggctgtatcgagggcaggcgctccacggccggcacccccgcccgcccgccactgtgcagaagctctcccgcttccctctggcccgacagttctccctggagtcaggctcttccggcaagtcaagctcatccctggtacgaggcgtgcgtctctcctccagcggccccgccttgctcgccggcctcgtgagtctagatctacctctcgacccactatgggagttcccccgggacaggctggtgcttgggaagcccctaggcgagggctgctttggccaggtagtacgtgcagaggcctttggcatggaccctgcccggcctgaccaagccagcactgtggccgtcaagatgctcaaagacaacgcctctgacaaggacctggccgacctggtctcggagatggaggtgatgaagctgatcggccgacacaagaacatcatcaacctgcttggtgtctgcacccaggaagggcccctgtacgtgatcgtggagtgcgccgccaagggaaacctgcgggagttcctgcgggcccggcgccccccaggccccgacctcagccccgacggtcctcggagcagtgaggggccgctctccttcccagtcctggtctcctgcgcctaccaggtggcccgaggcatgcagtatctggagtcccggaagtgtatccaccgggacctggctgcccgcaatgtgctggtgactgaggacaatgtgatgaagattgctgactttgggctggcccgcggcgtccaccacattgactactataagaaaaccagcaacggccgcctgcctgtgaagtggatggcgcccgaggccttgtttgaccgggtgtacacacaccagagtgacgtgtggtcttttgggatcctgctatgggagatcttcaccctcgggggctccccgtatcctggcatcccggtggaggagctgttctcgctgctgcgggagggacatcggatggaccgacccccacactgccccccagagctgtacgggctgatgcgtgagtgctggcacgcagcgccctcccagaggcctaccttcaagcagctggtggaggcgctggacaaggtcctgctggccgtctctgaggagtacctcgacctccgcctgaccttcggaccctattccccctctggtggggacgccagcagcacctgctcctccagcgattctgtcttcagccacgaccccctgccattgggatccagctccttccccttcgggtctggggtgcagacatgagcaaggctcaaggctgtgcaggcacataggctggtggccttgggccttggggctcagccacagcctgacacagtgctcgaccttgatagcatggggcccctggcccagagttgctgtgccgtgtccaagggccgtgcccttgcccttggagctgccgtgcctgtgtcctgatggcccaaatgtcagggttctgctcggcttcttggaccttggcgcttagtccccatcccgggtttggctgagcctggctggagagctgctatgctaaacctcctgcctcccaataccagcaggaggttctgggcctctgaaccccctttccccacacctccccctgctgctgctgccccagcgtcttgacgggagcattggcccctgagcccagagaagctggaagcctgccgaaaacaggagcaaatggcgttttataaattatttttttgaaataaagctctgtgtgcctgggtc

SEQ ID NO: 328838 - DNA, 2638 bp, Artificial Sequence
  derived and/or modified sequence
acattcctcgctcccggccgaggagcgctcgggctgtctgcggaccctgccgcgtgcaggggtcgcggccggctggagctgggagtgaggcggcggaggagccaggtgaggaggagccaggaaggcagttggtgggaagtccagcttgggtccctgagagctgtgagaaggagatgcggctgctgctggccctgttgggggtcctgctgagtgtgcctgggcctccagtcttgtccctggaggcctctgaggaagtggagcttgagccctgcctggctcccagcctggagcagcaagagcaggagctgacagtagcccttgggcagcctgtgcgtctgtgctgtgggcgggctgagcgtggtggccactggtacaaggagggcagtcgcctggcacctgctggccgtgtacggggctggaggggccgcctagagattgccagcttcctacctgaggatgctggccgctacctctgcctggcacgaggctccatgatcgtcctgcagaatctcaccttgattacaggtgactccttgacctccagcaacgatgatgaggaccccaagtcccatagggacccctcgaataggcacagttacccccagcaagcaccctactggacacacccccagcgcatggagaagaaactgcatgcagtacctgcggggaacaccgtcaagttccgctgtccagctgcaggcaaccccacgcccaccatccgctggcttaaggatggacaggcctttcatggggagaaccgcattggaggcattcggctgcgccatcagcactggagtctcgtgatggagagcgtggtgccctcggaccgcggcacatacacctgcctggtagagaacgctgtgggcagcatccgctataactacctgctagatgtgctggagcggtccccgcaccggcccatcctgcaggccgggctcccggccaacaccacagccgtggtgggcagcgacgtggagctgctgtgcaaggtgtacagcgatgcccagccccacatccagtggctgaagcacatcgtcatcaacggcagcagcttcggagccgacggtttcccctatgtgcaagtcctaaagactgcagacatcaatagctcagaggtggaggtcctgtacctgcggaacgtgtcagccgaggacgcaggcgagtacacctgcctcgcaggcaattccatcggcctctcctaccagtctgcctggctcacggtgctgccagaggaggaccccacatggaccgcagcagcgcccgaggccaggtatacggacatcatcctgtacgcgtcgggctccctggccttggctgtgctcctgctgctggccgggctgtatcgagggcaggcgctccacggccggcacccccgcccgcccgccactgtgcagaagctctcccgcttccctctggcccgacagttctccctggagtcaggctcttccggcaagtcaagctcatccctggtacgaggcgtgcgtctctcctccagcggccccgccttgctcgccggcctcgtgagtctagatctacctctcgacccactatgggagttcccccgggacaggctggtgcttgggaagcccctaggcgagggctgctttggccaggtagtacgtgcagaggcctttggcatggaccctgcccggcctgaccaagccagcactgtggccgtcaagatgctcaaagacaacgcctctgacaaggacctggccgacctggtctcggagatggaggtgatgaagctgatcggccgacacaagaacatcatcaacctgcttggtgtctgcacccaggaagggcccctgtacgtgatcgtggagtgcgccgccaagggaaacctgcgggagttcctgcgggcccggcgccccccaggccccgacctcagccccgacggtcctcggagcagtgaggggccgctctccttcccagtcctggtctcctgcgcctaccaggtggcccgaggcatgcagtatctggagtcccggaagtgtatccaccgggacctggctgcccgcaatgtgctggtgactgaggacaatgtgatgaagattgctgactttgggctggcccgcggcgtccaccacattgactactataagaaaaccagcaacggccgcctgcctgtgaagtggatggcgcccgaggccttgtttgaccgggtgtacacacaccagagtgacgtgtggtcttttgggatcctgctatgggagatcttcaccctcgggggctccccgtatcctggcatcccggtggaggagctgttctcgctgctgcgggagggacatcggatggaccgacccccacactgccccccagagctgtacgggctgatgcgtgagtgctggcacgcagcgccctcccagaggcctaccttcaagcagctggtggaggcgctggacaaggtcctgctggccgtctctgaggagtacctcgacctccgcctgaccttcggaccctattccccctctggtggggacgccagcagcacctgctcctccagcgattctgtcttcagccacgaccccctgccattgggatccagctccttccccttcgggtctggggtgcagacatgagcaaggctcaaggctgtgcaggcacataggctggtggccttgggccttggggctca

SEQ ID NO: 328839 - DNA, 770 bp, Artificial Sequence
  derived and/or modified sequence
gtcgcgggtacattcctcgctcccggccgaggagcgctcgggctgtctgcggaccctgccgcgtgcaggggtcgcggccggctggagctgggagtgaggcggcggaggagccaggaaggcagttggtgggaagtccagcttgggtccctgagagctgtgagaaggagatgcggctgctgctggccctgttgggggtcctgctgagtgtgcctgggcctccagtcttgtccctggaggcctctgaggaagtggagcttgagccctgcctggctcccagcctggagcagcaagagcaggagctgacagtagcccttgggcagcctgtgcgtctgtgctgtgggcgggctgagcgtggtggccactggtacaaggagggcagtcgcctggcacctgctggccgtgtacggggctggaggggccgcctagagattgccagcttcctacctgaggatgctggccgctacctctgcctggcacgaggctccatgatcgtcctgcagaatctcaccttgattacaggtgactccttgacctccagcaacgatgatgaggaccccaagtcccatagggacccctcgaataggcacagttacccccagcaagcaccctactggacacacccccagcgcatggagaagaaactgcatgcagtacctgcggggaacaccgtcaagttccgctgtccagctgcaggcaaccccacgcccaccatccgctggcttaaggatggacaggcctttcatggggagaaccgcattggaggcattcgg

SEQ ID NO: 328840 - DNA, 709 bp, Artificial Sequence
  derived and/or modified sequence
attcctcgctcccggccgaggagcgctcgggctgtctgcggaccctgccgcgtgcaggggtcgcggccggctggagctgggagtgaggcggcggaggagccaggtgaggaggagccagagacggggtttcaccgtgttagccaggatgttctcgatctcctgacctcgtgatccgcccacctcggcctcccaaagtgctgggattacaggtgtgaaccatcgcgcccagccgacttgtagttttttaaaactctgctggaagatgaaggttgaagagccgagggagaggatgtttccagaggcccatgcaagagatggccatgacctgccttgagaaggggcaggggaagccagatggactggaagtggagtggcagtgaccaaggaggaggaggaaggcagttggtgggaagtccagcttgggtccctgagagctgtgagaaggagatgcggctgctgctggccctgttgggggtcctgctgagtgtgcctgggcctccagtcttgtccctggaggcctctgaggaagtggagcttgagccctgcctggctcccagcctggagcagcaagagcaggagctgacagtagcccttgggcagcctgtgcgtctgtgctgtgggcgggctgagcgtggtggccactggtacaaggagggcagtcgcctggcacctgctggccgtgtacggggctggaggggccgcctagaga

SEQ ID NO: 328841 - DNA, 594 bp, Artificial Sequence
  derived and/or modified sequence
tcttcgcgccggcggcagagatgagggacctgaggccccgaaaagttcagtcacttagtgcccgggggcctccagcgcgagtgcgggaggctgaaggagaacccaggactgtctgatgcctaaggcaggccctccattcccacgtggggggtggtcggtcagcggtcagcagccatgggtgactcgactaaggactctgatatcagggcagcctggggaaggcagttggtgggaagtccagcttgggtccctgagagctgtgagaaggagatgcggctgctgctggccctgttgggggtcctgctgagtgtgcctgggcctccagtcttgtccctggaggcctctgaggaagtggagcttgagccctgcctggctcccagcctggagcagcaagagcaggagctgacagtagcccttgggcagcctgtgcgtctgtgctgtgggcgggctgagcgtggtggccactggtacaaggagggcagtcgcctggcacctgctggccgtgtacggggctggaggggccgcctagagattgccagcttcctacctgaggatgctggccgctacctctgcctggcacgaggctccatgatc

SEQ ID NO: 328842 - DNA, 552 bp, Artificial Sequence
  derived and/or modified sequence
acattcctcgctcccggccgaggagcgctcgggctgtctgcggaccctgccgcgtgcaggggtcgcggccggctggagctgggagtgaggcggcggaggagccaggtgaggaggagccaggtgagcaggaccctgtgctgggcgcggagtcacgcaggctcgagttggtgggaagtccagcttgggtccctgagagctgtgagaaggagatgcggctgctgctggccctgttgggggtcctgctgagtgtgcctgggcctccagtcttgtccctggaggcctctgaggaagtggagcttgagccctgcctggctcccagcctggagcagcaagagcaggagctgacagtagcccttgggcagcctgtgcgtctgtgctgtgggcgggctgagcgtggtggccactggtacaaggagggcagtcgcctggcacctgctggccgtgtacggggctggaggggccgcctagagattgccagcttcctacctgaggatgctggccgctacctctgcctggcacgaggctccatgatcgtcctgcagaatctcacct

SEQ ID NO: 328843 - protein, 1030 aa, Artificial Sequence
  derived and/or modified sequence
PCMWHQQHVPCVCVCPYVCVCMRVCVCVCWPLSCALNAVCVTCPKSVAFALGVASAACGCVGVKEWWLLQHALQSACALHVRCVLCTQEAASDGAAGSADLCPLPTEPCLAPSLEQQEQELTVALGQPVRLCCGRAERGGHWYKEGSRLAPAGRVRGWRGRLEIASFLPEDAGRYLCLARGSMIVLQNLTLITGDSPPATMMRTPSPIGTPRIGTVTPSKVSRSPRTCVPAAAHLITEKRRPVWEHTVILGAFPCPPAPYWTHPQRMEKKLHAVPAGNTVKFRCPAAGNPTPTIRWLKDGQAFHGENRIGGIRLRHQHWSLVMESVVPSDRGTYTCLVENAVGSIRYNYLLDVLERSPHRPILQAGLPANTTAVVGSDVELLCKVYSDAQPHIQWLKHIVINGSSFGADGFPYVQVLKTADINSSEVEVLYLRNVSAEDAGEYTCLAGNSIGLSYQSAWLTVLPGEHLKGQEMLRDAPLGQQWGLWPVGWSVSVGLWGLAWGAVCGFVGLSCMTAPLCLSTRGRPCDRLLRCGCLGLGITTASSVCVPTYVGSWEGLGCTGRPVSPLTSLSVCVCPCARAEEDPTWTAAAPEARYTDIILYASGSLALAVLLLLAGLYRGQALHGRHPRPPATVQKLSRFPLARQFSLESGSSGKSSSSLVRGVRLSSSGPALLAGLVSLDLPLDPLWEFPRDRLVLGKPLGEGCFGQVVRAEAFGMDPARPDQASTVAVKMLKDNASDKDLADLVSEMEVMKLIGRHKNIINLLGVCTQEGPLYVIVECAAKGNLREFLRARRPPGPDLSPDGPRSSEGPLSFPVLVSCAYQVARGMQYLESRKCIHRDLAARNVLVTEDNVMKIADFGLARGVHHIDYYKKTSNGRLPVKWMAPEALFDRVYTHQSDVWSFGILLWEIFTLGGSPYPGIPVEELFSLLREGHRMDRPPHCPPELYGLMRECWHAAPSQRPTFKQLVEALDKVLLAVSEEYLDLRLTFGPYSPSGGDASSTCSSSDSVFSHDPLPLGSSSFPFGSGVQT

SEQ ID NO: 328844 - DNA, 3093 bp, Artificial Sequence
  derived and/or modified sequence
ccctgcatgtggcaccagcagcacgtgccctgcgtgtgcgtgtgcccctacgtgtgcgtgtgcatgagagtgtgcgtgtgcgtgtgctggcccctgagctgcgccctgaacgccgtgtgcgtgacctgccccaagagcgtggccttcgccctgggcgtggccagcgccgcctgcggctgcgtgggcgtgaaggagtggtggctgctgcagcacgccctgcagagcgcctgcgccctgcacgtgagatgcgtgctgtgcacccaggaggccgccagcgacggcgccgccggcagcgccgacctgtgccccctgcccaccgagccctgcctggcccccagcctggagcagcaggagcaggagctgaccgtggccctgggccagcccgtgagactgtgctgcggcagagccgagagaggcggccactggtacaaggagggcagcagactggcccccgccggcagagtgagaggctggagaggcagactggagatcgccagcttcctgcccgaggacgccggcagatacctgtgcctggccagaggcagcatgatcgtgctgcagaacctgaccctgatcaccggcgacagcccccccgccaccatgatgagaacccccagccccatcggcacccccagaatcggcaccgtgacccccagcaaggtgagcagaagccccagaacctgcgtgcccgccgccgcccacctgatcaccgagaagagaagacccgtgtgggagcacaccgtgatcctgggcgccttcccctgcccccccgccccctactggacccacccccagagaatggagaagaagctgcacgccgtgcccgccggcaacaccgtgaagttcagatgccccgccgccggcaaccccacccccaccatcagatggctgaaggacggccaggccttccacggcgagaacagaatcggcggcatcagactgagacaccagcactggagcctggtgatggagagcgtggtgcccagcgacagaggcacctacacctgcctggtggagaacgccgtgggcagcatcagatacaactacctgctggacgtgctggagagaagcccccacagacccatcctgcaggccggcctgcccgccaacaccaccgccgtggtgggcagcgacgtggagctgctgtgcaaggtgtacagcgacgcccagccccacatccagtggctgaagcacatcgtgatcaacggcagcagcttcggcgccgacggcttcccctacgtgcaggtgctgaagaccgccgacatcaacagcagcgaggtggaggtgctgtacctgagaaacgtgagcgccgaggacgccggcgagtacacctgcctggccggcaacagcatcggcctgagctaccagagcgcctggctgaccgtgctgcccggcgagcacctgaagggccaggagatgctgagagacgcccccctgggccagcagtggggcctgtggcccgtgggctggagcgtgagcgtgggcctgtggggcctggcctggggcgccgtgtgcggcttcgtgggcctgagctgcatgaccgcccccctgtgcctgagcaccagaggcagaccctgcgacagactgctgagatgcggctgcctgggcctgggcatcaccaccgccagcagcgtgtgcgtgcccacctacgtgggcagctgggagggcctgggctgcaccggcagacccgtgagccccctgaccagcctgagcgtgtgcgtgtgcccctgcgccagagccgaggaggaccccacctggaccgccgccgcccccgaggccagatacaccgacatcatcctgtacgccagcggcagcctggccctggccgtgctgctgctgctggccggcctgtacagaggccaggccctgcacggcagacaccccagaccccccgccaccgtgcagaagctgagcagattccccctggccagacagttcagcctggagagcggcagcagcggcaagagcagcagcagcctggtgagaggcgtgagactgagcagcagcggccccgccctgctggccggcctggtgagcctggacctgcccctggaccccctgtgggagttccccagagacagactggtgctgggcaagcccctgggcgagggctgcttcggccaggtggtgagagccgaggccttcggcatggaccccgccagacccgaccaggccagcaccgtggccgtgaagatgctgaaggacaacgccagcgacaaggacctggccgacctggtgagcgagatggaggtgatgaagctgatcggcagacacaagaacatcatcaacctgctgggcgtgtgcacccaggagggccccctgtacgtgatcgtggagtgcgccgccaagggcaacctgagagagttcctgagagccagaagaccccccggccccgacctgagccccgacggccccagaagcagcgagggccccctgagcttccccgtgctggtgagctgcgcctaccaggtggccagaggcatgcagtacctggagagcagaaagtgcatccacagagacctggccgccagaaacgtgctggtgaccgaggacaacgtgatgaagatcgccgacttcggcctggccagaggcgtgcaccacatcgactactacaagaagaccagcaacggcagactgcccgtgaagtggatggcccccgaggccctgttcgacagagtgtacacccaccagagcgacgtgtggagcttcggcatcctgctgtgggagatcttcaccctgggcggcagcccctaccccggcatccccgtggaggagctgttcagcctgctgagagagggccacagaatggacagacccccccactgcccccccgagctgtacggcctgatgagagagtgctggcacgccgcccccagccagagacccaccttcaagcagctggtggaggccctggacaaggtgctgctggccgtgagcgaggagtacctggacctgagactgaccttcggcccctacagccccagcggcggcgacgccagcagcacctgcagcagcagcgacagcgtgttcagccacgaccccctgcccctgggcagcagcagcttccccttcggcagcggcgtgcagacctag

SEQ ID NO: 328845 - DNA, 3093 bp, Artificial Sequence
  derived and/or modified sequence
ccatgcatgtggcaccagcagcacgtgccctgcgtctgcgtttgtccatatgtgtgtgtctgtatgagggtatgtgtttgcgtatgctggcctctcagttgcgccctaaacgcggtatgcgtgacgtgtcctaagtccgtggcctttgcacttggtgtcgccagcgcagcctgcggctgtgtcggtgtcaaagaatggtggctcctgcagcacgccttgcaatctgcctgcgcattgcacgtccgctgcgtgctgtgtacacaagaagccgcaagcgacggcgctgccgggtcggccgacctgtgccctctacccacggaaccgtgtcttgctcctagtttggagcaacaggaacaggagttgactgtggcattgggccagcctgtacgtctatgctgtggccgtgcagagcgtggcggccattggtataaagaaggtagccgtctagctcccgctggtagagttcgagggtggagaggacggctagagattgcaagctttttacctgaggacgcggggaggtatctgtgccttgcccgcggttccatgatcgtactccagaatctgactcttatcacaggggacagtcctcctgcgaccatgatgaggaccccttcccctataggaacaccccgaatcggcactgtaacgccgagcaaagtgtcacgttctcccaggacctgcgttcctgctgctgcccacctcatcactgagaagagaagaccagtctgggagcatacagttatactcggtgccttcccttgcccacctgcgccatactggacccatcctcaaagaatggagaaaaaactacatgcagttcctgcagggaacactgtgaagttcagatgtcccgctgctggaaatccgactcctactataagatggctcaaagatggtcaggcgttccacggggaaaaccggatcggagggatccggttacgtcatcagcattggtcgctcgtgatggagtccgtggtcccttccgaccgcgggacgtatacgtgcctggtggagaacgccgtgggttctatcaggtacaactatctccttgacgtgttggaaaggtcacctcaccgtcccatactccaggctggcctacctgctaacacaaccgccgttgtcgggtccgatgtggaactcctttgtaaagtctactctgatgctcaaccccacattcagtggttaaagcacattgtgattaatggatcttcctttggagccgatgggttcccctacgtgcaagtgctgaagacagccgacattaactcttccgaggtggaagtgttgtatttaagaaatgtgtctgctgaggatgcaggggaatacacatgtctggcaggcaacagcattggcctgtcttaccagagcgcatggttgaccgtactaccaggcgaacatctgaagggacaggagatgctacgggacgcaccacttgggcagcagtgggggctgtggcccgtgggatggtcagtttccgtcggcctgtggggtctcgcctggggggcagtgtgcggtttcgtaggactgagctgtatgacagcccccctctgcctcagtactcgagggcggccctgcgacagacttctgcggtgtgggtgccttggcttggggatcaccaccgcctcttcagtgtgtgtgccgacttacgtgggctcttgggaaggcctggggtgcaccggccgccccgtcagccccttaacttcactgagtgtgtgtgtgtgcccatgcgctcgggccgaggaagatccaacatggaccgccgccgccccggaagcacgttatacagatataattctatacgcttccggttccctggcccttgccgtactgcttctactcgctggtctataccggggtcaggctctccatggaagacacccaagacctccagccactgtgcagaagctcagtaggttcccacttgcgcgtcagttctctcttgagtcgggatcatccggcaagagttcctcctccctggttcggggagtgcggttgagctcatctggaccagcactgctggctggtctcgtgtccctggatctgcccctcgaccctttgtgggaattccctagggaccgattggtgctgggcaagcccctaggcgagggctgcttcgggcaggtggtgcgagcagaagctttcggtatggatccagctcgtcctgatcaggcctccaccgtcgctgtgaagatgctgaaggacaacgcatctgataaagaccttgctgatctcgtttccgagatggaggtgatgaagctgattggcaggcacaaaaatattataaacctgctgggcgtgtgcactcaggaagggcccctctatgtgatcgtagaatgcgcggcgaaaggaaacctccgcgagttccttagggcccggcggccaccaggaccggatctcagccccgatggcccccgaagttccgaaggaccgctgagcttccctgtgctggtaagctgtgcttatcaggtcgccagaggcatgcagtatctagagagcaggaagtgcatccaccgcgatctggcagctagaaatgtgctggtgactgaagataatgtcatgaagattgccgacttcgggctggcaagaggcgtccatcatattgactactacaagaagaccagcaatggacggcttcctgttaaatggatggctcctgaggctctgttcgatcgagtctatacccatcaaagtgacgtgtggagcttcggcatcctgctctgggagatctttacactgggaggcagcccttacccgggcattcctgtcgaggaacttttttcgctgttgagagaaggacacagaatggacaggccaccgcattgtccacccgagctctacggacttatgcgtgagtgctggcacgcagcgccctcacagcgccctacattcaagcagcttgtggaggccctggacaaagttctgctggctgtgtcagaggagtatctcgacctgcggctgacttttggcccttattccccatctgggggcgacgcaagctccacttgcagtagttcagatagcgtgttctcccatgaccctctcccattaggaagctcatctttcccattcggctctggagtccagacatag

SEQ ID NO: 328846 - DNA, 3559 bp, Artificial Sequence
  derived and/or modified sequence
ccctgtatgtggcaccaacagcatgtgccttgtgtgtgtgtgtgtccgtatgtgtgtgtgtgtatgcgtgtgtgtgtgtgtgtgtgttggccactgtcgtgtgcactaaatgctgtgtgtgtgacatgccccaagagtgtggcatttgccctgggtgtggcatccgcagcatgtggctgtgtgggtgtcaaggagtggtggctccttcagcatgcgttgcaaagtgcttgtgccctgcatgtgcggtgtgttctttgtacacaggaggctgcctcagatggggctgcggggtctgctgacctctgccctctgcccacagagccctgcctggctcccagcctggagcagcaagagcaggagctgacagtagcccttgggcagcctgtgcgtctgtgctgtgggcgggctgagcgtggtggccactggtacaaggagggcagtcgcctggcacctgctggccgtgtacggggctggaggggccgcctagagattgccagcttcctacctgaggatgctggccgctacctctgcctggcacgaggctccatgatcgtcctgcagaatctcaccttgattacaggtgactcccctccagcaacgatgatgaggaccccaagtcccatagggacccctcgaataggcacagttacccccagcaaggtcagtaggtctccaaggacttgtgtccccgctgctgctcatctgatcactgagaagaggaggcctgtgtgggaacacacggtcattctaggggccttcccctgccctccagcaccctactggacacacccccagcgcatggagaagaaactgcatgcagtacctgcggggaacaccgtcaagttccgctgtccagctgcaggcaaccccacgcccaccatccgctggcttaaggatggacaggcctttcatggggagaaccgcattggaggcattcggctgcgccatcagcactggagtctcgtgatggagagcgtggtgccctcggaccgcggcacatacacctgcctggtagagaacgctgtgggcagcatccgctataactacctgctagatgtgctggagcggtccccgcaccggcccatcctgcaggccgggctcccggccaacaccacagccgtggtgggcagcgacgtggagctgctgtgcaaggtgtacagcgatgcccagccccacatccagtggctgaagcacatcgtcatcaacggcagcagcttcggagccgacggtttcccctatgtgcaagtcctaaagactgcagacatcaatagctcagaggtggaggtcctgtacctgcggaacgtgtcagccgaggacgcaggcgagtacacctgcctcgcaggcaattccatcggcctctcctaccagtctgcctggctcacggtgctgccaggtgagcacctgaagggccaggagatgctgcgagatgcccctctgggccagcagtgggggctgtggcctgttgggtggtcagtctctgttggcctgtggggtctggcctggggggcagtgtgtggatttgtgggtttgagctgtatgacagcccctctgtgcctctccacacgtggccgtccatgtgaccgtctgctgaggtgtgggtgcctgggactgggcataactacagcttcctccgtgtgtgtccccacatatgttgggagctgggagggactggggtgcacggggcggccagtctcaccactgaccagtttgtctgtctgtgtgtgtccatgtgcgagggcagaggaggaccccacatggaccgcagcagcgcccgaggccaggtatacggacatcatcctgtacgcgtcgggctccctggccttggctgtgctcctgctgctggccgggctgtatcgagggcaggcgctccacggccggcacccccgcccgcccgccactgtgcagaagctctcccgcttccctctggcccgacagttctccctggagtcaggctcttccggcaagtcaagctcatccctggtacgaggcgtgcgtctctcctccagcggccccgccttgctcgccggcctcgtgagtctagatctacctctcgacccactatgggagttcccccgggacaggctggtgcttgggaagcccctaggcgagggctgctttggccaggtagtacgtgcagaggcctttggcatggaccctgcccggcctgaccaagccagcactgtggccgtcaagatgctcaaagacaacgcctctgacaaggacctggccgacctggtctcggagatggaggtgatgaagctgatcggccgacacaagaacatcatcaacctgcttggtgtctgcacccaggaagggcccctgtacgtgatcgtggagtgcgccgccaagggaaacctgcgggagttcctgcgggcccggcgccccccaggccccgacctcagccccgacggtcctcggagcagtgaggggccgctctccttcccagtcctggtctcctgcgcctaccaggtggcccgaggcatgcagtatctggagtcccggaagtgtatccaccgggacctggctgcccgcaatgtgctggtgactgaggacaatgtgatgaagattgctgactttgggctggcccgcggcgtccaccacattgactactataagaaaaccagcaacggccgcctgcctgtgaagtggatggcgcccgaggccttgtttgaccgggtgtacacacaccagagtgacgtgtggtcttttgggatcctgctatgggagatcttcaccctcgggggctccccgtatcctggcatcccggtggaggagctgttctcgctgctgcgggagggacatcggatggaccgacccccacactgccccccagagctgtacgggctgatgcgtgagtgctggcacgcagcgccctcccagaggcctaccttcaagcagctggtggaggcgctggacaaggtcctgctggccgtctctgaggagtacctcgacctccgcctgaccttcggaccctattccccctctggtggggacgccagcagcacctgctcctccagcgattctgtcttcagccacgaccccctgccattgggatccagctccttccccttcgggtctggggtgcagacatgagcaaggctcaaggctgtgcaggcacataggctggtggccttgggccttggggctcagccacagcctgacacagtgctcgaccttgatagcatggggcccctggcccagagttgctgtgccgtgtccaagggccgtgcccttgcccttggagctgccgtgcctgtgtcctgatggcccaaatgtcagggttctgctcggcttcttggaccttggcgcttagtccccatcccgggtttggctgagcctggctggagagctgctatgctaaacctcctgcctcccaataccagcaggaggttctgggcctctgaaccccctttccccacacctccccctgctgctgctgccccagcgtcttgacgggagcattggcccctgagcccagagaagctggaagcctgccgaaaacaggagcaaatggcgttttataaattatttttttgaaataaagctctgtgtgcctggg

SEQ ID NO: 328847 - DNA, 3093 bp, Artificial Sequence
  derived and/or modified sequence
ccctgcatgtggcaccagcagcacgtgccctgtgtgtgtgtgtgcccctacgtgtgtgtgtgcatgagggtgtgtgtgtgtgtgtgctggcccctgagctgtgccctgaatgctgtgtgtgtgacctgccccaagtctgtggcctttgccctgggcgtggccagcgctgcctgtggctgtgtgggcgtgaaggagtggtggctgctgcagcacgccctgcagagcgcctgtgccctgcacgtgcgctgtgtgctgtgcacccaggaggccgccagtgatggagctgctggcagcgctgacctgtgccccctgcccacagagccctgcctggcccccagcctggagcagcaggagcaggagctgactgtggccctgggccagcctgtgcggctgtgctgcggccgggcagagcggggcggccactggtacaaggagggcagccggctggccccagctggccgggtgcggggctggaggggccgcctggagatcgccagcttcctgcctgaagatgctggccgctacctgtgcctggcccggggctccatgattgtgctgcagaacctgaccctcatcactggagacagccccccagccaccatgatgaggacccccagccccatcggcaccccaagaattggaacagtgacccccagcaaggtgagccgcagccccaggacctgtgtgcctgctgctgcccacctgatcacagagaagaggaggcctgtgtgggagcacacagtcatcctgggcgccttcccctgccccccagccccctactggacccacccccagaggatggagaagaagctgcatgctgtgcctgctggcaacacagtgaagttccgctgcccagctgctggcaaccccacccccaccatccgctggctgaaggatggccaggccttccacggggagaacagaattggaggcatccggctgcggcaccagcactggagcctggtgatggagagcgtggtgcccagcgaccggggcacctacacctgcctggtggagaatgctgtgggcagcatccgctacaactacctgctggatgtgctggagaggagcccccaccggcccatcctgcaggccggcctgcctgccaacaccacagctgtggtgggcagtgatgtggagctgctgtgcaaggtgtacagtgatgcccagccccacatccagtggctgaagcacatcgtcatcaatggcagcagctttggagcagatggcttcccctacgtgcaggtgctgaagacagctgacatcaacagcagcgaggtggaggtgctgtacctgagaaatgtgtctgcagaagatgctggggagtacacctgcctggccggcaacagcatcggcctgagctaccagagcgcctggctgactgtgctgcccggggagcacctgaagggccaggagatgctgagagatgcccccctgggccagcagtggggcctgtggcctgtgggctggagcgtgtctgtgggcctgtggggcctggcctggggcgctgtgtgtggctttgtgggcctgagctgcatgacagcccccctgtgcctgagcacccggggccggccctgtgaccggctgctgcgctgtggctgcctgggcctgggcatcaccacagccagctctgtgtgtgtgcccacctacgtgggctcctgggagggcctgggctgcaccggccggcctgtgagccccctgaccagcctgtctgtgtgtgtgtgcccctgtgcccgggcagaggaggaccccacctggacagctgctgcccctgaggcccgctacacagacatcatcctgtatgccagcggcagcctggccctggccgtgctgctgctgctggccggcctgtaccggggccaggccctgcacggccgccacccccggcccccagccaccgtgcagaagctgagccgcttccccctggcccggcagttcagcctggagagcggcagcagcggcaagagcagcagcagcctggtgcggggcgtgcggctgagcagcagcggccctgccctgctggccggcctggtgtccctggacctgcccctggaccccctgtgggagttcccccgggaccggctggtgctgggcaagcccctgggggagggctgcttcggccaggtggtgcgggcagaggccttcggcatggaccctgcccggccagaccaggccagcacagtggccgtgaagatgctgaaggacaatgccagtgacaaggacctggccgacctggtgtctgagatggaggtgatgaagctgattggccgccacaagaacatcatcaacctgctgggcgtgtgcacccaggagggccccctgtatgtgattgtggagtgtgccgccaagggcaacctgcgggagttcctgcgggcccggcggcccccaggccctgacctgagcccagatggccccaggagcagcgagggccccctgtccttccctgtgctggtgtcctgtgcctaccaggtggcccggggcatgcagtacctggagagcaggaagtgcatccaccgggacctggccgccagaaatgtgctggtgacagaggacaacgtgatgaagattgctgactttggcctggcccggggcgtgcaccacatcgactactacaagaagaccagcaatggccgcctgcctgtgaagtggatggcccctgaggccctgtttgacagagtgtacacccaccagagtgatgtgtggagctttggcatcctgctgtgggagatcttcaccctgggcggcagcccctacccaggcatccctgtggaggagctgttcagcctgctgcgggagggccacaggatggacaggcctccccactgccccccagagctgtatggcctgatgagggagtgctggcacgccgcccccagccagaggcccaccttcaagcagctggtggaggccctggacaaggtgctgctggccgtgtctgaggagtacctggacctgcggctgaccttcggcccctacagccccagcggaggagatgccagcagcacctgcagcagcagtgacagcgtcttcagccatgaccccctgcccctgggcagcagcagcttccccttcggcagcggcgtgcagacctag

SEQ ID NO: 328848 - DNA, 3093 bp, Artificial Sequence
  derived and/or modified sequence
ccctgcatgtggcaccagcagcacgtgccctgcgtgtgcgtgtgcccctacgtgtgcgtctgtatgagagtgtgcgtgtgcgtctgctggccccttagctgcgctcttaacgccgtgtgtgttacctgtccaaagagcgtggctttcgccttgggcgtcgctagtgctgcgtgcgggtgcgtgggcgtgaaagaatggtggctgcttcagcacgccctgcagtctgcatgtgccctgcatgtgaggtgcgttttgtgcactcaggaggcagctagcgacggagccgcgggatctgccgacctctgtcctctcccgaccgaaccgtgtctggctcctagtctggaacaacaggaacaggaactcaccgtcgcactgggccagcccgtgcgattatgctgcggcagagctgaacgggggggtcattggtacaaagagggtagccggctcgcacccgcggggcgggtacggggctggagaggccgactggagattgcttccttcctccctgaggacgccggcaggtatctgtgcttagccagaggatccatgatcgtgctccagaatctgaccttgataactggagattcccccccagccaccatgatgcgcaccccttcccctataggcactcctaggatcggcacggtcacaccaagtaaggttagccggtccccccggacttgtgtccctgccgcagcacaccttattaccgagaaaaggaggcccgtgtgggagcatacagtgatattgggagcttttccatgccccccagccccctattggacccacccgcagcgcatggagaagaagctccacgctgtccccgcaggaaatactgtcaaatttagatgtccggctgctgggaacccaactcccaccatccgatggcttaaagacggtcaggcgtttcacggtgagaaccggataggtggaatccgcctccgtcaccagcactggagcctggtcatggagtccgtggtcccatcagaccgcggaacatacacatgcttggtcgagaatgcagtgggatccatccgatataattatttgctagatgtgttggaaaggagcccacaccgacctatcctgcaggctggcctgcccgcaaataccacagccgttgttggctccgatgtggagctgctgtgcaaagtatattccgatgctcagccacacatccagtggctgaaacatattgtgatcaatgggagctcctttggggctgacggattcccgtacgtccaagtgctaaagacagcagatataaatagtagcgaagtggaggttctctatttgcgcaacgtgtccgctgaagacgcaggagagtacacatgtctggccgggaatagtataggtctgtcctatcaaagcgcatggctgaccgtcctccccggcgagcatctcaagggacaggagatgctgcgcgatgctcccctgggccagcagtggggcctgtggcctgtgggctggtccgtcagtgtgggtctgtggggattggcctggggggccgtctgtgggtttgtgggcctgtcctgtatgacggcaccgttgtgtctcagcacccgcggtcgcccgtgcgataggctgctccgatgtggttgcctaggactcggcatcaccaccgcgagttctgtgtgtgtccccacatatgtggggtcttgggagggcctaggttgtactgggcgtcctgtgtcccccttgacatcactgtcagtctgcgtgtgcccttgcgctcgagcggaggaagaccctacctggaccgccgcggcccccgaggcaagatatactgacatcatcctgtacgccagcgggtccttggccttagcggtactgctgctgcttgccgggttgtatcgcggacaagcactgcatggccgccaccctagaccgccagccacagtgcagaaactgagccgctttcctctggcaagacagttcagtctggagagtgggagctcaggaaagtcgagctcctccctggtccgaggggtccgactcagcagcagcggccctgccttgctggctgggctcgtctcattggacctcccgctcgacccgctctgggaattccctcgcgaccgcttagtactgggaaaacccctcggagaggggtgttttggacaggtggtcagagcagaggcgtttgggatggatcctgctcgccccgaccaggccagcactgtggcggtaaaaatgcttaaggataatgcgagcgacaaagatctagcggacctggtttcagaaatggaggtgatgaagctaataggcaggcataagaatattattaacttgctcggcgtttgtacccaggaaggacccctgtacgtgattgtggaatgtgccgccaaggggaacctacgcgagtttctgagagcccggagacctccgggcccggacctatcacctgatggcccccggtcgtccgaggggccactgtcatttccagtgctggtctcttgtgcttatcaggtggcccgcggcatgcagtacctggagagccgaaaatgtattcatcgcgatctggcagcgcgcaacgtactagtgaccgaggacaacgttatgaagattgccgattttgggctggcacgtggggtgcaccatatagactactacaaaaagacttcaaatggtagactccctgtgaagtggatggcaccggaagccctttttgaccgcgtctacacacaccagagcgacgtttggtcctttggcatccttctgtgggaaattttcaccttgggagggagcccttaccctgggatcccagtcgaggagcttttctccctccttcgcgaagggcataggatggataggcccccccattgtccacctgagctctacgggctcatgcgggagtgctggcacgctgcccccagtcaacggccaactttcaagcagctggttgaagcgttggacaaggtgctgctggccgtgtcagaggaatacctggatctgcgtctcaccttcggcccttatagcccctctggtggagacgcctcaagtacttgttcttcctcagacagtgtgttttctcacgaccctctcccactcgggagctcatcattccccttcggctctggagtgcagacatag

SEQ ID NO: 328849 - DNA, 3093 bp, Artificial Sequence
  derived and/or modified sequence
ccttgcatgtggcatcaacagcatgtgccctgtgtgtgcgtgtgcccttacgtctgtgtgtgtatgagggtttgcgtttgtgtatgctggcccctgtcctgcgccttgaatgcagtgtgtgtcacatgccctaagtccgtggccttcgcattgggcgtggcatctgccgcatgcggatgcgtgggtgtcaaagagtggtggctcctgcaacacgcacttcaatcggcttgtgccctgcatgtgcgttgtgttctctgtactcaggaggctgcttctgacggggcagcaggcagtgctgatttatgtcctcttcccaccgagccgtgtctcgctccatccctcgaacaacaggagcaggagctcactgtggctctggggcagcccgtaaggctttgttgtggacgcgcagaaaggggtgggcattggtacaaggagggatccagactggcacccgctggtcgggttcgcggatggaggggacgactggaaatcgcctccttccttcccgaggacgcgggacggtatctgtgccttgcaaggggatccatgatcgtgctgcaaaacctcactttaataaccggcgattcccctcctgctactatgatgaggacgccatcccctatcggcactcccagaatcggtactgtcaccccttccaaagtttcacgctcacctcgcacctgtgtcccagccgcagcccacctgatcaccgagaagagacgccctgtctgggagcataccgtgatactcggggctttcccttgccccccagctccttattggactcacccacagagaatggaaaaaaagttgcatgcagtgccagctggtaacacagtgaaattccgatgccctgccgcaggcaaccccacacctaccatccggtggctcaaggacgggcaggcttttcacggcgaaaaccgtatcggcggaatacgcctacgtcaccagcattggagtcttgtgatggagtctgtggtcccgagcgaccgaggaacatatacctgcctcgtagagaatgcagtaggaagcatcagatacaattaccttctagatgttttggagcgcagtcctcaccgtcctatactgcaagctggactgccggctaataccacagccgtggtgggcagcgatgtcgagctcctctgcaaggtgtattctgatgcgcagcctcatatccagtggctcaagcacatcgtcatcaatggatcgtcgtttggggctgatggcttcccgtacgttcaagtgctgaagaccgcagatattaacagctctgaggtcgaggtactctacctccggaatgtctcggctgaagatgccggagaatacacatgtctcgcaggcaactccatcgggcttagttatcagagcgcgtggcttaccgttctgcccggagagcacctgaagggccaagagatgctgagggacgcaccactcggtcaacagtggggtctctggcctgtggggtggtccgtgagtgtcggcctctggggactggcatggggagcagtctgtggctttgtcggtctatcttgcatgacagctcccctctgtctcagcacgcgagggaggccttgtgacaggcttctcaggtgcgggtgtcttggccttggtattacgacagcgagctctgtttgcgttcctacatatgtgggaagctgggaagggctagggtgtaccggaagaccagtgtcccccctgacctccctgtcagtctgtgtctgcccatgtgccagggcggaggaagacccaacttggactgctgccgcacccgaggccagatataccgacattatcctctatgcgtcaggcagtctggcattagccgtgctgcttctgcttgctggattgtaccggggtcaagccctgcacgggagacaccccaggccccctgccactgtgcagaagctgtctagattcccactggctcgccagttcagcctagagtccggaagctccggaaaaagcagcagtagcctggtccggggagtcaggcttagcagtagcggcccagcactgttggcgggtctggtgtcccttgatttacctctcgacccactctgggagttcccaagggatcgcctggttttgggcaagccgctcggagagggatgcttcgggcaggtggtgcgcgctgaagccttcggaatggaccctgcaagacccgaccaagcctctacagttgccgtgaaaatgctgaaggataatgcttccgacaaagatctcgcagatctggtctctgagatggaggtgatgaagctcatcggacgccataagaacatcatcaacttactcggagtctgtacacaggagggcccactgtacgtgattgttgaatgtgctgctaaaggtaacttgcgcgagttcctaagggcccgtcgaccaccaggacctgatttatcccctgatggtccaagaagttcagaaggccctttgagtttccccgtgctggtcagttgcgcctatcaggtcgcacgcggtatgcagtacctcgagtctcgcaaatgtatccatcgagatttggccgcaaggaacgtcttggtgactgaggataacgtcatgaagattgccgactttggactcgccagaggagtccaccacattgactactacaagaagacctccaacgggcgtctgcccgtaaaatggatggcgcctgaggcactgtttgatagggtgtacactcaccagtccgatgtctggtccttcggcattctcttatgggaaatcttcactctcggcggaagtccatatcccggaatcccagtcgaggagttgttttctctgctgcgggagggccaccgtatggatagacctccgcactgtccaccagagctgtacgggctgatgagggaatgttggcatgcagccccttctcagagaccgacctttaagcagttagttgaagccctggataaagttcttttggccgtcagcgaagagtacctcgatctgagactgaccttcggcccttacagcccctccggcggagatgccagcagtacatgttcaagttcagatagtgtgttctcccacgatccactccccttgggttcctcttcctttcccttcggatccggggtgcaaacatag

SEQ ID NO: 328850 - protein, 432 aa, Artificial Sequence
  derived and/or modified sequence
MRPWALAVTRWPPSAPVGQRRFSAGPGSTPGQLWGSPGLEGPLASPPARDERLPSQQPPSRPPHLPVEERRASAPAGGSPRMLHPATQQSPFMVDLHEQVHQGPVPLSYTVTTVTTQGFPLPTGQHIPGCSAQQLPACSVMFSGQHYPLCCLPPPLIQACTMQQLPVPYQAYPHLISSDHYILHPPPPAPPPQPTHMAPLGQFVSLQTQHPRMPLQRLDNDVDLRGDQPSLGSFTYSTSAPGPALSPSVPLHYLPHDPLHQELSFGVPYSHMMPRRLSTQRYRLQQPLPPPPPPPPPPPYYPSFLPYFLSMLPMSPTAMGPTISLDLDVDDVEMENYEALLNLAERLGDAKPRGLTKADIEQLPSYRFNPDSHQSEQTLCVVCFSDFEARQLLRVLPCNHEFHTKCVDKWLKANRTCPICRADASEVPREAE

SEQ ID NO: 328851 - protein, 351 aa, Artificial Sequence
  derived and/or modified sequence
MLHPATQQSPFMVDLHEQVHQGPVPLSYTVTTVTTQGFPLPTGQHIPGCSAQQLPACSVMFSGQHYPLCCLPPPLIQACTMQQLPVPYQAYPHLISSDHYILHPPPPAPPPQPTHMAPLGQFVSLQTQHPRMPLQRLDNDVDLRGDQPSLGSFTYSTSAPGPALSPSVPLHYLPHDPLHQELSFGVPYSHMMPRRLSTQRYRLQQPLPPPPPPPPPPPYYPSFLPYFLSMLPMSPTAMGPTISLDLDVDDVEMENYEALLNLAERLGDAKPRGLTKADIEQLPSYRFNPDSHQSEQTLCVVCFSDFEARQLLRVLPCNHEFHTKCVDKWLKANRTCPICRADASEVPREAE

SEQ ID NO: 328852 - DNA, 1299 bp, Artificial Sequence
  derived and/or modified sequence
atgagaccctgggccctggccgtgaccagatggccccccagcgcccccgtgggccagagaagattcagcgccggccccggcagcacccccggccagctgtggggcagccccggcctggagggccccctggccagcccccccgccagagacgagagactgcccagccagcagccccccagcagacccccccacctgcccgtggaggagagaagagccagcgcccccgccggcggcagccccagaatgctgcaccccgccacccagcagagccccttcatggtggacctgcacgagcaggtgcaccagggccccgtgcccctgagctacaccgtgaccaccgtgaccacccagggcttccccctgcccaccggccagcacatccccggctgcagcgcccagcagctgcccgcctgcagcgtgatgttcagcggccagcactaccccctgtgctgcctgcccccccccctgatccaggcctgcaccatgcagcagctgcccgtgccctaccaggcctacccccacctgatcagcagcgaccactacatcctgcacccccccccccccgccccccccccccagcccacccacatggcccccctgggccagttcgtgagcctgcagacccagcaccccagaatgcccctgcagagactggacaacgacgtggacctgagaggcgaccagcccagcctgggcagcttcacctacagcaccagcgcccccggccccgccctgagccccagcgtgcccctgcactacctgccccacgaccccctgcaccaggagctgagcttcggcgtgccctacagccacatgatgcccagaagactgagcacccagagatacagactgcagcagcccctgccccccccccccccccccccccccccccccccctactaccccagcttcctgccctacttcctgagcatgctgcccatgagccccaccgccatgggccccaccatcagcctggacctggacgtggacgacgtggagatggagaactacgaggccctgctgaacctggccgagagactgggcgacgccaagcccagaggcctgaccaaggccgacatcgagcagctgcccagctacagattcaaccccgacagccaccagagcgagcagaccctgtgcgtggtgtgcttcagcgacttcgaggccagacagctgctgagagtgctgccctgcaaccacgagttccacaccaagtgcgtggacaagtggctgaaggccaacagaacctgccccatctgcagagccgacgccagcgaggtgcccagagaggccgagtag

SEQ ID NO: 328853 - DNA, 1299 bp, Artificial Sequence
  derived and/or modified sequence
atgcggccctgggccctggccgtcacacggtggcctccatccgccccagtgggccagagacggtttagcgccgggcccggaagcactccaggacagctttggggaagtccaggcctggaggggccccttgcctcccccccagctcgagatgaacggctcccgtcgcaacagccaccatcaagacctccccacctacccgttgaggaaagaagggcctcagcgcccgccggtggcagcccaaggatgctccaccccgccactcagcagtctcccttcatggtcgacctgcacgagcaagtccatcagggtcctgtacccctctcttatactgtgactaccgtcaccacccagggtttcccattgcctaccgggcagcacatcccaggatgttccgcccagcagcttcccgcttgtagcgtgatgttctctggccagcactaccccctgtgctgccttccaccgccacttattcaggcatgcaccatgcagcagttacctgtgccctaccaagcctatccacatctcatcagcagcgaccactacattctccaccctccgccacccgctcccccccctcagcctacacacatggctccactcggccaatttgtttctctgcagactcaacaccctcgcatgcccctgcagcggctggacaatgatgtggacttacggggagaccagccttctttggggtcatttacctattccacatcagctcccggtccagctctctccccatctgtgccgctgcattatctgccccatgacccattgcaccaggaactgagcttcggggttccctactcccacatgatgcccagaaggttatcaactcagagataccgtctgcaacaaccattgcccccacctcccccccctcctccgcctccaccatactaccccagttttttgccgtactttctgagtatgctcccaatgagcccaactgctatgggccccacaatttccctggacctggatgtggacgacgtggagatggagaactatgaagctctcttgaacctggccgagagacttggagacgcaaagcctcgtggactaacaaaggcagacatagagcagctgccgtcttaccgctttaaccccgattctcatcagagcgagcagacactatgtgttgtctgtttcagtgattttgaagcaaggcagctccttcgcgtcctgccatgcaaccatgagtttcacacaaagtgcgtggacaaatggctgaaagcaaacaggacatgccccatttgtcgggccgacgccagtgaagtgcctcgggaagccgagtag

SEQ ID NO: 328854 - DNA, 1299 bp, Artificial Sequence
  derived and/or modified sequence
atgaggccctgggccctggccgtgacccgctggccacccagcgcccctgtgggccagaggcgcttctctgctggccctggcagcaccccaggccagctgtggggcagccctggcctggagggccccctggccagccccccagccagagatgagcggctgcccagccagcagccccccagccggcccccccacctgcctgtggaggagcggcgggccagcgccccagctgggggcagccccaggatgctgcacccagccacccagcagagccccttcatggtggacctgcacgagcaggtgcaccagggccctgtgcccctgagctacacagtgaccaccgtgaccacccagggcttccccctgcccaccggccagcacatccctggctgcagcgcccagcagctgcctgcctgcagcgtgatgttttctggccagcactaccccctgtgctgcctgcccccacccctcatccaggcctgcaccatgcagcagctgcctgtgccctaccaggcctacccccacctgatcagcagtgaccactacatcctgcaccccccacctccagcccccccaccccagcccacccacatggcccccctgggccagtttgtgtccctgcagacccagcaccccaggatgcccctgcagaggctggacaatgatgtggacctgcggggggaccagcccagcctgggcagcttcacctacagcaccagcgcccctggccctgccctgagccccagcgtgcccctgcactacctgccccatgaccccctgcaccaggagctgagctttggagtgccctacagccacatgatgccccggcggctgagcacccagcgctaccgcctgcagcagcccctgcccccacctcctcctcctcctcctcctccaccctactaccccagcttcctgccctacttcctgtccatgctgcccatgagccccacagccatgggccccaccatcagcctggacctggatgtggatgatgtggagatggagaactatgaggccctgctgaacctggccgagcggctgggagatgccaagccccggggcctgaccaaggctgacatcgagcagctgcccagctaccgcttcaacccagacagccaccagagcgagcagaccctgtgtgtggtgtgcttcagtgactttgaggcccggcagctgctgcgggtgctgccctgcaaccacgagttccacaccaagtgtgtggacaagtggctgaaggccaacagaacctgccccatctgcagagcagatgccagcgaggtgccccgggaggccgagtag

SEQ ID NO: 328855 - DNA, 1299 bp, Artificial Sequence
  derived and/or modified sequence
atgcggccctgggccctggccgtgacccggtggccccccagcgccccagtgggccagcggcggttttccgctgggccagggtcgacccccggccagctgtggggtagtcctggccttgaggggcctctcgcgtcacccccagcccgggacgagaggttaccaagccagcagcctcctagccgtccaccgcacctgccagttgaggaacggcgagctagtgcccctgccggaggttcccctcgaatgctccacccggccacacagcagtcacctttcatggttgatctccacgagcaagtccaccagggacccgtgcctctttcttacactgttacaaccgtcacgacccaggggtttccattacccacagggcaacacatccccggctgttccgcccaacagctgccggcctgttcagttatgttctccggccagcattatccactctgttgtcttccccctcctctgattcaggcatgtacaatgcaacagctgcccgttccctatcaggcataccctcacctcataagttccgatcactatatcctgcatccccctccacctgctccccctccccaaccaacccatatggcgcctctagggcagttcgtgtctttacagactcagcaccctcgcatgcctttgcagcggctggataacgatgtggatcttagaggcgaccagccttcgctcggatccttcacttattctacaagtgcccctgggcctgcattatcaccttccgtaccattgcactacctgccccatgacccactgcatcaggagctgtcattcggagtcccttactcccatatgatgccacggcgcctttccacacagcggtaccgcctccagcagccattgcctccaccacccccaccccccccaccccccccatactacccatctttcttgccttactttttgagcatgttgcctatgtctccaaccgccatggggcccaccataagcctcgacctggacgtggacgatgttgaaatggagaactacgaggcccttctgaatctggctgagcgcttaggggacgccaagcctcgtgggctgactaaggccgatatagaacagctgcctagctatagattcaatcccgacagtcatcagtctgagcagacactgtgtgtggtatgcttttccgactttgaagcccgccagctgcttagagtgctcccatgtaaccatgaatttcacaccaaatgtgtggataagtggcttaaggcaaaccggacttgccccatctgtcgggccgatgcgtcagaagtccccagggaggccgaatag

SEQ ID NO: 328856 - DNA, 1299 bp, Artificial Sequence
  derived and/or modified sequence
atgcggccttgggctttagcagttactcggtggccgccaagtgcgcctgtaggacaacggaggttcagcgcaggccctggatccacaccgggtcagctctggggctcacctggcttggaaggccctttggcctctcctcctgcacgcgacgagcgactcccctcccagcaaccccctagcagaccacctcacctccccgtcgaggaacgtcgtgcttcggcccctgcaggcggaagccctaggatgctccaccccgcaacccagcagagtcccttcatggtggatcttcacgagcaggttcatcagggtcctgtgccactgagctacaccgtcactacagtgaccacccagggatttccgcttcccactgggcaacatatcccaggctgtagtgcccagcagttaccagcttgctccgtgatgttcagtgggcagcattacccattgtgctgcctgccccctccactgattcaagcctgtacaatgcagcaactgccggtgccataccaggcctatcctcatctgatctccagtgaccactacattttacatccaccaccacccgcacctcccccacagcctacacacatggcgccactgggacaattcgtgtcacttcagacccaacatcccagaatgccattgcagcggttagataatgatgtcgatcttagaggggaccaaccatccctaggttcttttacttattccaccagtgcccctggacccgcattgtccccatccgtcccacttcactatctcccacatgatccgctgcaccaggagctgtctttcggggttccttacagtcacatgatgcccagacgtttgtctacccagcggtacagattgcagcagcctttgccacctccacctccccctccacctcccccaccttactacccatctttcctcccttacttcctttctatgctcccgatgtcccctaccgctatgggcccaacaatatcgctggatttggatgtagatgatgtggaaatggagaattacgaggctctgctgaacttggccgagcgcttgggggatgccaagcctcggggactcacaaaggctgatatcgagcagctcccttcctaccggtttaatcccgactcccatcaaagtgaacaaactctttgcgtggtgtgcttctcagactttgaggcacgccagttgctgcgagtcctcccctgtaatcacgaattccatacaaagtgcgttgacaaatggctcaaggccaatagaacatgcccaatctgccgagctgacgccagtgaagtgccaagagaggccgagtag

SEQ ID NO: 328857 - DNA, 4155 bp, Artificial Sequence
  derived and/or modified sequence
gcggggcggggcccctgcgggcttgcagcgggctactgtttgccggagcctcccggcgcgcccccgcgagccccctcccgtctggcgcgcgaccccgccgcttcgaatgttgtgaatcaaatgtggggtttgttacattccgctgccgccgcggacagttcttaaagggccagccgccggctgccgcgcagacccagctgcgtcctgcgccgcctcccgctccctgagggcctgggccgagagagactgatcgcgcgtgggcctcgcgaggcagacgccgtcgggcggacaacaaagagagaggccccggaaggagccgggctgcccccggacccgggggtggggaggggagcacattgttccgcagggcgggagctcttaaaggatccagacaggcaccccccccctcccccgccccctgcccagtttggccgtcctagatcgggaacaaaggagtcaacgtgtggccgggcggccaaagggttgtgagtcccggcccagcccctccacccccctgcccccccgatgcgaccatgggctctggcagtgactaggtggccaccctccgcccccgtgggccagcggcgattctctgcgggacctggcagcaccccgggccagctctggggaagccctggcctcgagggccccctggccagcccgcctgcccgggatgagcgcttaccctcccagcagccgccgtcccgacctccacacctccccgtagaggagcgccgagcctcggctcctgccggcgggagcccccgaatgctgcacccagccacccagcagagcccgttcatggttgatctccacgagcaggtgcaccagggacctgtccctctgtcctacacggtcaccacagtgacgacccaaggcttccccttgcctacaggccagcacatccctggctgcagtgcccagcagctcccagcatgctccgtgatgttcagtgggcagcattaccccctctgctgcctcccgcccccgcttatccaggcgtgcaccatgcagcagctgcctgtgccctatcaggcctacccccacctcatctccagtgaccactacatcctgcaccccccaccaccggccccacccccccagcccacccacatggcgcccctggggcagtttgtgtctctgcagacccagcaccctcggatgcccctccagcggctcgacaacgacgtggacctgcgtggggaccagccctccctgggcagcttcacctactccacctctgcgcctggcccagccctttccccgtcggtgcccctgcactacctgccccacgatccgctgcaccaggagctgtcctttggtgtgccatattctcacatgatgccacggagactgagcacccagagataccgcctgcagcagccactgcccccgccgcccccacccccacccccaccaccctactaccccagcttcctgccctacttcctctcgatgctgccaatgtcaccaacagcaatggggcccaccatcagcctggacctggacgtggatgatgtggagatggagaactatgaggccctcctgaacctggccgagcggctgggagatgccaagccccggggtctcaccaaagcagacatagagcagctcccgtcgtaccgctttaacccggacagccatcagtcggagcagacgctgtgtgtggtctgcttcagtgacttcgaggcgcggcagctgctccgagtcctcccctgcaaccatgagttccacaccaagtgtgttgacaagtggttgaaggccaaccggacgtgtcccatctgccgggccgacgcctccgaggtgcccagggaggctgagtgaggccacgcagccgcctgcccgggagaaccctgcctgaagctctggaaacttgtgggtggggcccagggaggatggggagggagtggcccaggcctgccccttcgctcctgcctgcatttccagagctggtgccagggtcagcccagcgaggagtccctgcaataagcccctgcatttgccaagctccaaagactccctccctagtctgcctgcctgcccgcccgccacggagctgcctgagtgtccctgatcgggtctccctcctgtgcaccctcaggtccctccttttcctgctggcactgagtgccaggggtccgctccctcagtggggccggtggagatccttggccccaggatgggcagacagagcaccatcctgggtcagaaggtctcatgctctgaaatggcgtgccctctgcccaggtggcactgccaggtgcgtagacagacggtgtcacgagccatttcctgagccccagggctgaatcccccctccttgaccccgaacagtgaactcaggcagctggctctgtgttggctgctgtgagggctgagtctggttccctaggggaccctcatcccaggaacaacattccagccccaccctcaggctggagggcgtcccagcctaatcccgagctggggcacacgtatcctgaggggcttgggccatacggggagagggagccctgtgttcccggtggttgtccctcccagggatgcagccagacccgtgcccaatctcctctccctctgttgttttgcatgaacgtgaggagcagcagtttttgttcattcatttggcccaaaatcacgtgtaggatttggggatgtggatatttaagacaatttcttttttcttttggtttaataggggcgggtatagggaccaactgggaccgagtgcccagggggccgagcacggtcatgctggccggcctgcatgcatgcgtgtgccgggctgggctgggcggccggcggtcgtggggcagggttgggggtctgtgctcagctgataactgccatgcactgtactgcacacgtccctagagcctaccgggacccgacgcttttcagggcatttctccctccagccagggcccaactcccacctgcctgggcgaatctcctccaaggaagtcccaggaggatggggaccaggaaggctgtggacccccatctccagggggccttcccagcctgatccctgtcctccaagttctggaggaggccgctgtagggtctggctgagcttcccacccactttccctggtcccaatcctttcttgtcctatacccagctggggttgctgccctgaacgaactgcgtgtggggccggcacatcctagcaggcagcccctggcgcctgctgcctcagggatgctccaaccaccctcgttctcctcgcagtggccctggctcccacctcccgccccagcctgccgtggggcccgtcagcctggtcccacccccatggagaacccaaagtcttactgtatataactccaggtgacgtttctatatttatagcagtgttgaaaacccacgtgttttacacagaaccaccctctccaacccctcccttcccgaccccaacaaaacgttttcaaaccccttacagttcctggggcaggcggaaacaggctcacagattgtgtgtcggctgcagcagtgattccaacaagcagctattgggggggaaacacagcatttaaaaagatcatcattaaaaaacaagatttatacaacaattacttaggatgtttgtgatctgccgaccttgctatagatgccatgttaccaatgatttcctgtggtgggggcttgccattgtttactctcttatttaccaacttctggcctaggcatgacagtgggcaccttcccccagccctggctgggcccagcgcctgtgttctgtgttagaaaggttttatatatatataaaattacatatatatgtagaaatatatgtaattttgggggccctgttccttgcacattttacagttacctcatttttcccatgtatgtatttgagaaaatgctaatatatagagaaaaaaatggttcttaaagcttaaatgtgtggttttttccattccatgggattcacattggtttgtagcatttaacataactagtatgttgtattatatatatgtgtatactgattgaaatttttaacagatttgtactttttttaaaatgaaagttgctagttctgcttgaccaagtagtgcaatcattattttttttaatattgttgctgatttcagagggatattcactaataaatgtatgatgtataccaacgaccgcccacgctg

SEQ ID NO: 328858 - DNA, 1647 bp, Artificial Sequence
  derived and/or modified sequence
agacgttagctcgtttgcatgggtggtccgccattggtctgttgggcaatctgggccgtaccagctttttaaagacgccgtgtagtataaacaaggagaagtggggcggccgggccatgatgtcagcgcggtgctgcagctcttgggggtgacgtcatctccgggaaggtggccggcccagggttgttagagccagcataaccacttgggccgctctcgccccgtcagaggtcagacccattgcacttcagtatctcaggcggcaccctgtccccgaggaggggaccatgacacaggttgtgagtcccggcccagcccctccacccccctgcccccccgatgcgaccatgggctctggcagtgactaggtggccaccctccgcccccgtgggccagcggcgattctctgcgggacctggcagcaccccgggccagctctggggaagcagccgccgtcccgacctccacacctccccgtagaggagcgccgagcctcggctcctgccggcgggagcccccgaatgctgcacccagccacccagcagagcccgttcatggttgatctccacgagcaggtgcaccagggacctgtccctctgtcctacacggtcaccacagtgacgacccaaggcttccccttgcctacaggccagcacatccctggctgcagtgcccagcagctcccagcatgctccgtgatgttcagtgggcagcattaccccctctgctgcctcccgcccccgcttatccaggcgtgcaccatgcagcagctgcctgtgccctatcaggcctacccccacctcatctccagtgaccactacatcctgcaccccccaccaccggccccacccccccagcccacccacatggcgcccctggggcagtttgtgtctctgcagacccagcaccctcggatgcccctccagcggctcgacaacgacgtggacctgcgtggggaccagccctccctgggcagcttcacctactccacctctgcgcctggcccagccctttccccgtcggtgcccctgcactacctgccccacgatccgctgcaccaggagctgtcctttggtgtgccatattctcacatgatgccacggagactgagcacccagagataccgcctgcagcagccactgcccccgccgcccccacccccacccccaccaccctactaccccagcttcctgccctacttcctctcgatgctgccaatgtcaccaacagcaatggggcccaccatcagcctggacctggacgtggatgatgtggagatggagaactatgaggccctcctgaacctggccgagcggctgggagatgccaagccccggggtctcaccaaagcagacatagagcagctcccgtcgtaccgctttaacccggacagccatcagtcggagcagacgctgtgtgtggtctgcttcagtgacttcgaggcgcggcagctgctccgagtcctcccctgcaaccatgagttccacaccaagtgtgttgacaagtggttgaaggccaaccggacgtgtcccatctgccgggccgacgcctccgaggtgcccagggaggctgagtgaggccacgcagccgcctgcccgggagaaccctgcctgaagctctggaaacttgtgggtggggcccagggag

SEQ ID NO: 328859 - DNA, 639 bp, Artificial Sequence
  derived and/or modified sequence
atggccgcccccgaggagagagacctgacccaggagcagaccgagaagctgctgcagttccaggacctgaccggcatcgagagcatggaccagtgcagacacaccctggagcagcacaactggaacatcgaggccgccgtgcaggacagactgaacgagcaggagggcgtgcccagcgtgttcaaccccccccccagcagacccctgcaggtgaacaccgccgaccacagaatctacagctacgtggtgagcagaccccagcccagaggcctgctgggctggggctactacctgatcatgctgcccttcagattcacctactacaccatcctggacatcttcagattcgccctgagattcatcagacccgaccccagaagcagagtgaccgaccccgtgggcgacatcgtgagcttcatgcacagcttcgaggagaagtacggcagagcccaccccgtgttctaccagggcacctacagccaggccctgaacgacgccaagagagagctgagattcctgctggtgtacctgcacggcgacgaccaccaggacagcgacgagttctgcagaaacaccctgtgcgcccccgaggtgatcagcctgatcaacaccagcagccacagcttcctgctgctgtag

SEQ ID NO: 328860 - DNA, 639 bp, Artificial Sequence
  derived and/or modified sequence
atggcagcgccggaggagcgagatttaactcaggagcagactgaaaaactgctgcagtttcaggacttaacaggaatagaaagcatggaccagtgccggcacacactggaacaacataattggaacatcgaagccgccgttcaggatcggcttaacgagcaggaaggagtgccgagcgtgttcaatcctcctccttcgagaccccttcaggtaaatacagctgaccaccgtatctacagctacgttgtatcgcgcccacaaccaagaggactgttgggctggggctattatctgattatgttgccctttcgattcacctattacacaattctggatatctttaggttcgcacttagattcatacgccccgacccacgttcccgggtcacagaccctgtgggagacatcgtaagctttatgcatagttttgaagaaaagtacggtcgtgcccaccccgtcttctaccaaggcacatacagccaggccttgaatgatgccaagcgggagttgagatttcttctcgtctatctccatggcgatgatcatcaggacagcgacgagttttgcaggaataccctttgcgctcccgaggtaatcagtctgataaacacaagttcgcattccttcctgctgctttag

SEQ ID NO: 328861 - DNA, 639 bp, Artificial Sequence
  derived and/or modified sequence
atggccgcccctgaggagcgggacctgacccaggagcagacagagaagctgctgcagttccaggacctgaccggcatcgagagcatggaccagtgccgccacaccctggagcagcacaactggaacattgaagctgctgtgcaggaccggctgaatgagcaggagggcgtgcccagcgtcttcaaccccccacccagccggcccctgcaggtgaacacagctgaccaccgcatctacagctatgtggtgtcccggccccagccccggggcctgctgggctggggctactacctgatcatgctgcccttccgcttcacctactacaccatcctggacatcttccgctttgccctgcgcttcatccggccagaccccaggagccgggtgacagatcctgtgggggacatcgtgtccttcatgcacagctttgaggagaagtatggccgggcccaccctgtgttctaccagggcacctacagccaggccctgaatgatgccaagcgggagctgcgcttcctgctggtgtacctgcatggagatgaccaccaggacagtgatgagttctgcaggaacaccctgtgtgcccctgaggtgatcagcctcatcaacaccagcagccacagcttcctgctgctgtag

SEQ ID NO: 328862 - DNA, 639 bp, Artificial Sequence
  derived and/or modified sequence
atggccgcccccgaggagcgggacctgacccaggagcagaccgagaaattactgcagtttcaggatttgacaggtattgagtctatggatcagtgtagacatactttagagcagcacaattggaacattgaggctgcagtccaggacagactcaacgagcaggagggggtaccatccgtgttcaatccccccccctcacggccgctccaagtgaatacggctgaccacagaatatactcatatgtggtcagtaggcctcagcctagagggctgctcggatggggctactacctaatcatgctgccgttcagatttacatactatactatattggacatcttccgcttcgcgcttcgcttcatcagacccgatcccagatcgagagtgacagacccggtgggtgatatcgtatctttcatgcacagcttcgaggaaaaatacgggagggcgcaccccgtgttttatcagggaacgtactctcaggcactgaacgatgccaagagggagctgcggtttctgctggtgtatctccacggggatgatcatcaggacagtgacgagttttgtcggaataccctctgtgcccctgaggtgattagtttaattaatacttccagtcacagcttcttgttactgtag

SEQ ID NO: 328863 - DNA, 639 bp, Artificial Sequence
  derived and/or modified sequence
atggccgctccagaagaaagggacttaacccaagagcagacagagaaactcttgcagtttcaggacctgacaggaatcgagtcaatggatcagtgccgacacaccctggaacagcacaactggaacatagaggcagctgtccaggataggttgaatgagcaggaaggagtaccatctgtatttaatcccccacctagccgacccctgcaggtgaataccgccgatcacaggatttatagctatgttgtgtcacgcccacaaccgcgaggcctcctggggtggggttactatctcattatgctgcctttccgctttacttattatacaatactcgatattttccgcttcgcactgcgctttattaggcctgatccgaggtctagagtcacagatcccgtcggggacatcgtgtccttcatgcactcattcgaggaaaagtatggcagggctcaccccgtgttctaccagggcacctatagccaggctctgaatgacgctaaacgggaacttcggttcttgttggtgtatctgcacggcgatgatcatcaggatagtgatgaattttgtaggaacaccctgtgtgcccctgaggtcatttccctcattaatacttcttctcacagtttccttcttctttag

SEQ ID NO: 328864 - DNA, 912 bp, Artificial Sequence
  derived and/or modified sequence
aggagcgtagaggcggcggcaaaatggcggcgcctgaggagcgggatctaacccaggagcagacagagaagctgctgcagtttcaggatctcactggcatcgaatctatggatcagtgtcgccataccttggaacagcataactggaacatagaggctgctgtacaggacagattgaatgagcaagagggcgtacctagtgttttcaacccacctccatcacgacccctgcaggttaatacagctgaccacaggatctacagctatgttgtctcaagacctcaaccaagggggctgcttggatggggttattacttgataatgcttccattccggtttacctattacacgatacttgatatatttaggtttgctcttcgttttatacggcctgaccctcgcagccgggtcactgaccccgttggggacattgtttcatttatgcactcttttgaagagaaatatgggagggcacaccctgtcttctaccagggaacgtacagccaggcacttaacgatgccaaaagggagcttcgctttcttttggtttatcttcatggagatgatcaccaggactctgatgagttttgtcgcaacacactctgtgcacctgaagttatttcactaataaacactagttctcattcattcttgcttttatgaaaaataaaagtgaaaaacctccatcaaccagctacttgcagcatctcctgaggacttgcttctcctgcctctggggaagagagggaagagaaagcacagagcagagaagcagagatgttccttgaactgcccacaagttttcaataacttttatttctgttttgtaatgaccaaaggaatgaggctgacataggtatatatatatatttttttcctttatttgataaagagccaattctttaaacccatg

SEQ ID NO: 328865 - protein, 760 aa, Artificial Sequence
  derived and/or modified sequence
MLVSTPLLHDALYLQCETTWGDQDFLSNPFLVHITGNELYDIQLLPRKSLELLVGEKLVLNCTVWAEFNSGVTFDWDYPGKQAERGKWVPERRSQQTHTELSSILTIHNVSQHDLGSYVCKANNGIQRFRESTEVIVHENPFISVEWLKGPILEATAGDELVKLPVKLAAYPPPEFQWYKDGKALSGRHSPHALVLKEVTEASTGTYTLALWNSAAGLRRNISLELVVNVPPQIHEKEASSPSIYSRHSRQALTCTAYGVPLPLSIQWHWRPWTPCKMFAQRSLRRRQQQDLMPQCRDWRAVTTQDAVNPIESLDTWTEFVEGKNKTVSKLVIQNANVSAMYKCVVSNKVGQDERLIYFYVTTIPDGFTIESKPSEELLEGQPVLLSCQADSYKYEHLRWYRLNLSTLHDAHGNPLLLDCKNVHLFATPLAASLEEVAPGARHATLSLSIPRVAPEHEGHYVCEVQDRRSHDKHCHKKYLSVQALEAPRLTQNLTDLLVNVSDSLEMQCLVAGAHAPSIVWYKDERLLEEKSGVDLADSNQKLSIQRVREEDAGRYLCSVCNAKGCVNSSASVAVEGSEDKGSMEIVILVGTGVIAVFFWVLLLLIFCNMRRPAHADIKTGYLSIIMDPGEVPLEEQCEYLSYDASQWEFPRERLHLGRVLGYGAFGKVVEASAFGIHKGSSCDTVAVKMLKGVGSAGGRGSLAGEEQQLGVGRWDGNSGRETEAGSQSHPRFYREAAGFRAEGPPEPPSVGPAGCPGGP

SEQ ID NO: 328866 - protein, 440 aa, Artificial Sequence
  derived and/or modified sequence
MNYSLHLAFVCLSLFTERMCIQGSQFNVEVGRSDKLSLPGFENLTAGYNKFLRPNFGGEPVQIALTLDIASISSISESNMDYTATIYLRQRWMDQRLVFEGNKSFTLDARLVEFLWVPDTYIVESKKSFLHEVTVGNRLIRLFSNGTVLYALRITTTVACNMDLSKYPMDTQTCKLQLESWGYDGNDVEFTWLRGNDSVRGLEHLRLAQYTIERYFTLVTRSQQETGNYTRLVLQFELRRNVLYFILETYVPSTFLVVLSWVSFWISLDSVPARTCIGVTTVLSMTTLMIGSRTSLPNTNCFIKAIDVYLGICFSFVFGALLEYAVAHYSSLQQMAAKDRGTTKEVEEVSITNIINSSISSFKRKISFASIEISSDNVDYSDLTMKTSDKFKFVFREKMGRIVDYFTIQNPSNVDHYSKLLFPLIFMLANVFYWAYYMYF

SEQ ID NO: 328867 - protein, 52 aa, Artificial Sequence
  derived and/or modified sequence
MNYSLHLAFVCLSLFTERMCIQGSQFNVEVGRSDKLSLPGFENLTAGYNKFL

SEQ ID NO: 328868 - protein, 59 aa, Artificial Sequence
  derived and/or modified sequence
MNYSLHLAFVCLSLFTERMCIQGSQFNVEVGRSDKLSLPGFENLTAGYNKFLRPNFGGE

SEQ ID NO: 328869 - protein, 92 aa, Artificial Sequence
  derived and/or modified sequence
MNYSLHLAFVCLSLFTERMCIQGSQFNVEVGRSDKLSLPGFENLTAGYNKFLRPNFGGEPVQIALTLDIASISSISESNMDYTATIYLRQRW

SEQ ID NO: 328870 - protein, 171 aa, Artificial Sequence
  derived and/or modified sequence
MNYSLHLAFVCLSLFTERMCIQGSQFNVEVGRSDKLSLPGFENLTAGYNKFLRPNFGGEPVQIALTLDIASISSISESNMDYTATIYLRQRWMDQRLVFEGNKSFTLDARLVEFLWVPDTYIVESKKSFLHEVTVGNRLIRLFSNGTVLYALRITTTVACNMDLSKYPMDT

SEQ ID NO: 328871 - protein, 189 aa, Artificial Sequence
  derived and/or modified sequence
MNYSLHLAFVCLSLFTERMCIQGSQFNVEVGRSDKLSLPGFENLTAGYNKFLRPNFGGEPVQIALTLDIASISSISESNMDYTATIYLRQRWMDQRLVFEGNKSFTLDARLVEFLWVPDTYIVESKKSFLHEVTVGNRLIRLFSNGTVLYALRITTTVACNMDLSKYPMDTQTCKLQLESWGYDGNDVE

SEQ ID NO: 328872 - DNA, 1323 bp, Artificial Sequence
  derived and/or modified sequence
atgaattactcactgcatctcgcattcgtgtgtttgagtttgtttacggaacgtatgtgtatccaaggatcccaatttaacgtcgaagtggggagatctgacaaactctctctcccaggattcgagaatctcaccgctgggtataacaagttcctgagacccaatttcgggggcgagccagtgcagattgccctaacactcgacattgcgagcatttcatccatatctgagagtaacatggactataccgcaacaatttatctcagacagcgctggatggaccagcggctcgtgttcgaggggaataagagtttcacactggacgctcgcttggtggagttcctctgggtgccagacacatatattgtggaaagcaaaaagagcttcctgcatgaagtgactgtgggtaatagactaatccgcctattctcaaacggtaccgtactgtacgccttacgcatcacgacgaccgttgcgtgcaatatggatttatccaagtaccctatggacacccagacctgtaagcttcagctggagagttggggctatgacggcaacgatgtagaattcacttggctccgagggaacgattccgtgcggggcctggagcatttacgtctggctcaatacaccatcgagagatatttcacgctcgtaactcggagccagcaagaaacaggcaattacacccggcttgttcttcaattcgaactgcggcgaaatgtgttatatttcatacttgagacgtacgtccccagtacattcctggttgtcttgagttgggtgagcttttggatctcactagactcggtaccagcacggacatgcataggagtcacaactgttctgtccatgacaaccctcatgatcggctcgcggacatccctacctaacactaactgtttcattaaagccatcgacgtgtatctcggcatatgtttttctttcgtctttggggcgctactggagtacgccgtggcacattactcttcgcttcagcagatggccgctaaggacagagggacaactaaggaggttgaggaggtgtctataactaacattattaacagcagcattagttcgttcaagagaaaaatctcctttgcctccatcgaaatttcgtccgacaacgtggactactctgacctgaccatgaagactagcgacaaatttaagtttgtctttcgtgaaaagatgggcagaattgtggactattttactattcaaaaccctagcaatgtagatcactatagtaaattgctgtttccgctgatttttatgctggccaatgtcttttactgggcctattacatgtatttttag

SEQ ID NO: 328873 - DNA, 1323 bp, Artificial Sequence
  derived and/or modified sequence
atgaactattccctgcatctggcctttgtatgcctgtctctatttaccgaacgcatgtgcattcagggatcacagttcaacgtggaagtaggcagatccgataaactttctttaccgggtttcgagaacctgaccgctgggtataacaagttccttcgcccgaattttggcggcgagcccgttcagattgccctgaccctagatatcgcatctatcagctctatcagtgaatcgaatatggactatacagcaactatttatctgcgccaaaggtggatggaccagcggttggtgttcgaagggaataagagtttcacactggacgcccgactggtggagttcctgtgggttcctgatacctacatcgttgagagtaaaaaatctttcctacacgaagtcaccgtgggcaaccggctgataaggctcttttcgaatgggacagtcctttacgccctgagaatcactacaaccgtggcatgtaatatggatctcagcaaatatccgatggatacccagacctgcaagctgcagctcgagtcctggggttacgacgggaatgatgtggagtttacttggctccgcgggaacgatagcgtgcgcggactcgagcatctgcgtcttgctcagtacactattgagaggtactttacattggtcaccagaagccagcaagagactgggaattacacaagactggtgctccagtttgaacttcggcgcaacgtgctgtatttcatattagaaacttatgtgccctcaactttcctggtagtgctgagctgggtcagcttctggatctccctggacagtgttccagcgcgcacatgcattggagtgacaacagttctctctatgaccactctgatgatcggatcacgaacaagcctccctaacacaaactgcttcattaaggcaatcgacgtttatctgggcatctgcttctcattcgtttttggtgcactgctggagtatgcagtcgcccactattcatctttgcagcagatggcagcaaaagaccgaggaaccaccaaagaagtggaggaggtctcaatcaccaatatcattaatagtagtataagttccttcaagaggaagatcagtttcgccagcattgaaatcagttctgataacgtcgattacagtgatctgacgatgaaaaccagcgataaatttaagtttgtttttagagaaaaaatgggccgtatcgtggactatttcaccatccaaaatccgagtaacgtggaccactactcaaaacttctgtttccccttatcttcatgctggctaatgtcttttattgggcatactatatgtatttctag

SEQ ID NO: 328874 - DNA, 3310 bp, Artificial Sequence
  derived and/or modified sequence
agagccactccatctgagggtggctgcgtgtccacatacgaggggacagggctgaggatgaggagaaccctggggacccagaagaccgtgccttgcctggaagtcctgcctgtaggcctgaaggacttgccctaacagagcctcaacaactacctggtgattcctacttcagccccttggtgtgagcagcttctcaacatgaactacagcctccacttggccttcgtgtgtctgagtctcttcactgagaggatgtgcatccaggggagtcagttcaacgtcgaggtcggcagaagtgacaagctttccctgcctggctttgagaacctcacagcaggatataacaaatttctcaggcccaattttggtggagaacccgtacagatagcgctgactctggacattgcaagtatctctagcatttcagagagtaacatggactacacagccaccatatacctccgacagcgctggatggaccagcggctggtgtttgaaggcaacaagagcttcactctggatgcccgcctcgtggagttcctctgggtgccagatacttacattgtggagtccaagaagtccttcctccatgaagtcactgtgggaaacaggctcatccgcctcttctccaatggcacggtcctgtatgccctcagaatcacgacaactgttgcatgtaacatggatctgtctaaataccccatggacacacagacatgcaagttgcagctggaaagctggggctatgatggaaatgatgtggagttcacctggctgagagggaacgactctgtgcgtggactggaacacctgcggcttgctcagtacaccatagagcggtatttcaccttagtcaccagatcgcagcaggagacaggaaattacactagattggtcttacagtttgagcttcggaggaatgttctgtatttcattttggaaacctacgttccttccactttcctggtggtgttgtcctgggtttcattttggatctctctcgattcagtccctgcaagaacctgcattggagtgacgaccgtgttatcaatgaccacactgatgatcgggtcccgcacttctcttcccaacaccaactgcttcatcaaggccatcgatgtgtacctggggatctgctttagctttgtgtttggggccttgctagaatatgcagttgctcactacagttccttacagcagatggcagccaaagatagggggacaacaaaggaagtagaagaagtcagtattactaatatcatcaacagctccatctccagctttaaacggaagatcagctttgccagcattgaaatttccagcgacaacgttgactacagtgacttgacaatgaaaaccagcgacaagttcaagtttgtcttccgagaaaagatgggcaggattgttgattatttcacaattcaaaaccccagtaatgttgatcactattccaaactactgtttcctttgatttttatgctagccaatgtattttactgggcatactacatgtatttttgagtcaatgttaaatttcttgcatgccataggtcttcaacaggacaagataatgatgtaaatggtattttaggccaagtgtgcacccacatccaatggtgctacaagtgactgaaataatatttgagtctttctgctcaaagaatgaagctccaaccattgttctaagctgtgtagaagtcctagcattataggatcttgtaatagaaacatcagtccattcctctttcatcttaatcaaggacattcccatggagcccaagattacaaatgtactcagggctgtttattcggtggctccctggtttgcatttacctcatataaagaatgggaaggagaccattgggtaaccctcaagtgtcagaagttgtttctaaagtaactatacatgttttttactaaatctctgcagtgcttataaaatacattgttgcctatttagggagtaacattttctagtttttgtttctggttaaaatgaaatatgggcttatgtcaattcattggaagtcaatgcactaactcaataccaagatgagtttttaaataatgaatattatttaataccacaacagaattatccccaatttccaataagtcctatcattgaaaattcaaatataagtgaagaaaaaattagtagatcaacaatctaaacaaatccctcggttctaagatacaatggattccccatactggaaggactctgaggctttattcccccactatgcatatcttatcattttattattatacacacatccatcctaaactatactaaagcccttttcccatgcatggatggaaatggaagatttttttttaacttgttctagaagtcttaatatgggctgttgccatgaaggcttgcagaattgagtccattttctagctgcctttattcacatagtgatggggtactaaaagtactgggttgactcagagagtcgctgtcattctgtcattgctgctactctaacactgagcaacactctcccagtggcagatcccctgtatcattccaagaggagcattcatccctttgctctaatgatcaggaatgatgcttattagaaaacaaactgcttgacccaggaacaagtggcttagcttaagtaaacttggctttgctcagatccctgatccttccagctggtctgctatgagtggcttatcccgcatgagcaggagcgtgctggccctgagtactgaactttctgagtaacaatgagatacgttacagaacctatgttcaggttgcgggtgagctgccctctccaaatccagccagagatgcacattcctcggccagtctcagccaacagtaccaaaagtgatttttgagtgtgccagggtaaaggcttccagttcagcctcagttattttagacaatctcgccatctttaatttcttagcttcctgttctaataaatgcacggctttacctttcctgtcagaaataaaccaaggctctaaaagatgatttcccttctgtaactccctagagccacaggttctcattccttttcccattatacttctcacaattcagtttctatgagtttgatcacctgatttttttaacaaaatatttctaacgggaatgggtgggagtgctggtgaaaagaggtgaaatgtggttgtatgagccaatcatatttgtgattttttaaaaaaagtttaaaaggaaatatctgttctgaaaccccacttaagcattgtttttatataaaaacaatgataaagatgtgaaactgtgaaataaatataccatattagctacccaccaaa

SEQ ID NO: 328875 - DNA, 3576 bp, Artificial Sequence
  derived and/or modified sequence
ctgcccctccatttgctccccttcctttctctctctcccttcccggctcctagactgggtctaggcaggagcttcgccatgatgtcaggagggaaggagatgcctctgggcctcgtaccacagcctcagctctctctctgcccctccatctgagtccctcctggctcccagctccctcagggtgcaaggccaagcctccaaggaatccctccccttacctgcatggctggagccaagacaggtttagcagctccattcttccccagagagccactccatctgagggtggctgcgtgtccacatacgaggggacagggctgaggatgaggagaaccctggggacccagaagaccgtgccttgcctggaagtcctgcctgtaggcctgaaggacttgccctaacagagcctcaacaactacctggtgattcctacttcagccccttggtgtgagcagcttctcaacatgaactacagcctccacttggccttcgtgtgtctgagtctcttcactgagaggatgtgcatccaggggagtcagttcaacgtcgaggtcggcagaagtgacaagctttccctgcctggctttgagaacctcacagcaggatataacaaatttctcaggcccaattttggtggagaacccgtacagatagcgctgactctggacattgcaagtatctctagcatttcagagagtaacatggactacacagccaccatatacctccgacagcgctggatggaccagcggctggtgtttgaaggcaacaagagcttcactctggatgcccgcctcgtggagttcctctgggtgccagatacttacattgtggagtccaagaagtccttcctccatgaagtcactgtgggaaacaggctcatccgcctcttctccaatggcacggtcctgtatgccctcagaatcacgacaactgttgcatgtaacatggatctgtctaaataccccatggacacacagacatgcaagttgcagctggaaagctggggctatgatggaaatgatgtggagttcacctggctgagagggaacgactctgtgcgtggactggaacacctgcggcttgctcagtacaccatagagcggtatttcaccttagtcaccagatcgcagcaggagacaggaaattacactagattggtcttacagtttgagcttcggaggaatgttctgtatttcattttggaaacctacgttccttccactttcctggtggtgttgtcctgggtttcattttggatctctctcgattcagtccctgcaagaacctgcattggagtgacgaccgtgttatcaatgaccacactgatgatcgggtcccgcacttctcttcccaacaccaactgcttcatcaaggccatcgatgtgtacctggggatctgctttagctttgtgtttggggccttgctagaatatgcagttgctcactacagttccttacagcagatggcagccaaagatagggggacaacaaaggaagtagaagaagtcagtattactaatatcatcaacagctccatctccagctttaaacggaagatcagctttgccagcattgaaatttccagcgacaacgttgactacagtgacttgacaatgaaaaccagcgacaagttcaagtttgtcttccgagaaaagatgggcaggattgttgattatttcacaattcaaaaccccagtaatgttgatcactattccaaactactgtttcctttgatttttatgctagccaatgtattttactgggcatactacatgtatttttgagtcaatgttaaatttcttgcatgccataggtcttcaacaggacaagataatgatgtaaatggtattttaggccaagtgtgcacccacatccaatggtgctacaagtgactgaaataatatttgagtctttctgctcaaagaatgaagctccaaccattgttctaagctgtgtagaagtcctagcattataggatcttgtaatagaaacatcagtccattcctctttcatcttaatcaaggacattcccatggagcccaagattacaaatgtactcagggctgtttattcggtggctccctggtttgcatttacctcatataaagaatgggaaggagaccattgggtaaccctcaagtgtcagaagttgtttctaaagtaactatacatgttttttactaaatctctgcagtgcttataaaatacattgttgcctatttagggagtaacattttctagtttttgtttctggttaaaatgaaatatgggcttatgtcaattcattggaagtcaatgcactaactcaataccaagatgagtttttaaataatgaatattatttaataccacaacagaattatccccaatttccaataagtcctatcattgaaaattcaaatataagtgaagaaaaaattagtagatcaacaatctaaacaaatccctcggttctaagatacaatggattccccatactggaaggactctgaggctttattcccccactatgcatatcttatcattttattattatacacacatccatcctaaactatactaaagcccttttcccatgcatggatggaaatggaagatttttttttaacttgttctagaagtcttaatatgggctgttgccatgaaggcttgcagaattgagtccattttctagctgcctttattcacatagtgatggggtactaaaagtactgggttgactcagagagtcgctgtcattctgtcattgctgctactctaacactgagcaacactctcccagtggcagatcccctgtatcattccaagaggagcattcatccctttgctctaatgatcaggaatgatgcttattagaaaacaaactgcttgacccaggaacaagtggcttagcttaagtaaacttggctttgctcagatccctgatccttccagctggtctgctatgagtggcttatcccgcatgagcaggagcgtgctggccctgagtactgaactttctgagtaacaatgagatacgttacagaacctatgttcaggttgcgggtgagctgccctctccaaatccagccagagatgcacattcctcggccagtctcagccaacagtaccaaaagtgatttttgagtgtgccagggtaaaggcttccagttcagcctcagttattttagacaatctcgccatctttaatttcttagcttcctgttctaataaatgcacggctttacctttcctgtcagaaataaaccaaggctctaaaagatgatttcccttctgtaactccctagagccacaggttctcattccttttcccattatacttctcacaattcagtttctatgagtttgatcacctgatttttttaacaaaatatttctaacgggaatgggtgggagtgctggtgaaaagaggtgaaatgtggttgtatgagccaatcatatttgtgattttttaaaaaaagtttaaaaggaaatatctgttctgaaaccccacttaagcattgtttttatataaaaacaatgataaagatgtgaaactgtgaaataaatataccatattagctacccaccaaa

SEQ ID NO: 328876 - DNA, 1323 bp, Artificial Sequence
  derived and/or modified sequence
atgaactacagcctgcacctggcctttgtgtgcctgagcctcttcacagagaggatgtgcatccagggcagccagttcaacgtggaggtgggccgcagtgacaagctgagcctgcccggctttgagaacctgacagctggctacaacaagttcctgcggcccaactttggaggagagcctgtgcagatcgccctgaccctggacatcgccagcatcagcagcatcagcgagagcaacatggactacacagccaccatctacctgcggcagcgctggatggaccagaggctggtgtttgagggcaacaagagcttcaccctggatgcccggctggtggagttcctgtgggtgcctgacacctacatcgtggagagcaagaagagcttcctgcacgaggtgacagtgggcaacagactcatccgcctcttcagcaatggaacagtgctgtatgccctgcgcatcaccaccaccgtggcctgcaacatggacctgagcaagtaccccatggacacccagacctgcaagctgcagctggagagctggggctatgatggaaatgatgtggagttcacctggctgcggggaaatgacagcgtgcggggcctggagcacctgcggctggcccagtacaccatcgagcgctacttcaccctggtgaccaggagccagcaggagaccggcaactacacccggctggtgctgcagtttgagctgcggagaaatgtgctgtacttcatcctggagacctacgtgcccagcaccttcctggtggtgctgtcctgggtgtccttctggatcagcctggacagcgtgcctgcccggacctgcattggagtgaccaccgtgctgtccatgaccaccctgatgattggcagcaggaccagcctgcccaacaccaactgcttcatcaaggccattgatgtgtacctgggcatctgcttctcctttgtgtttggagccctgctggagtatgctgtggcccactacagcagcctgcagcagatggccgccaaggaccggggcaccaccaaggaggtggaggaggtgtccatcaccaacatcatcaacagcagcatcagcagcttcaagaggaagatcagctttgccagcattgagatcagcagtgacaacgtggactacagcgacctgaccatgaagaccagtgacaagttcaagtttgtgttccgggagaagatgggccgcatcgtggactacttcaccatccagaaccccagcaatgtggaccactacagcaagctgctcttccccctcatcttcatgctggccaacgtgttctactgggcctactacatgtacttctag

SEQ ID NO: 328877 - DNA, 1323 bp, Artificial Sequence
  derived and/or modified sequence
atgaactacagcctgcacctggccttcgtgtgcctgagcctgttcaccgagagaatgtgcatccaggggtcccagttcaatgtcgaggtgggacggtccgacaaactctctcttcctggctttgaaaacctgactgcaggttacaacaagttcctgaggcctaacttcgggggcgagcctgtacagatcgctctgacccttgacattgcttctattagttcgatatccgaatctaacatggactacacagcaactatatacctccgtcagcgatggatggaccagcgactcgtgttcgagggcaacaaatcatttaccctggatgctcggctggtcgagttcctttgggtgcctgatacctatattgtggagtcaaagaagagcttcctgcacgaagttacagtcggaaacagactgataaggctattttcaaacggtactgtgctctacgctctgcggatcacgacaactgtcgcctgtaacatggatctcagtaagtatcccatggatacccagacttgcaagctgcaactggaaagctggggctatgacggcaatgacgtcgaatttacctggctacgcggaaatgacagtgtaaggggactggaacacctgaggctggcacagtacaccatagaacgctactttacgctcgtaacaaggtcccagcaggagacaggcaattacacccgtctcgtgcttcaatttgagctcaggaggaacgtgctatatttcatactagagacctacgttccaagcactttccttgtagtgctgagttgggtctcattttggatcagtcttgacagcgtccccgcgagaacttgcattggtgtgacgaccgttctctccatgactactcttatgatcggatctaggacctccctccccaacactaactgctttatcaaagctatcgatgtgtatcttggcatttgtttttctttcgtgtttggggctctcctggagtacgcagtggctcattacagctccctgcagcagatggccgcgaaagacaggggaactacaaaagaggtagaggaagtctcaataacgaacatcatcaattcttcgatctcttcctttaagcgcaagatttccttcgccagtatcgagatcagttctgataacgtagactactctgaccttaccatgaaaacctccgacaagtttaagttcgtgtttcgcgagaaaatgggccgcatagtggattatttcacgatacagaatccatctaacgtagaccactactcaaaattgctgttccctctgatctttatgctggctaacgtcttttactgggcttattatatgtacttttag

SEQ ID NO: 328878 - DNA, 1323 bp, Artificial Sequence
  derived and/or modified sequence
atgaactacagcctgcacctggccttcgtgtgcctgagcctgttcaccgagcgcatgtgcatccagggaagccagtttaatgtggaagtggggaggagtgataaactgtcgctcccaggatttgagaatctcactgccggttacaacaaattcctgcgcccaaactttggcggcgaacccgtgcaaatcgcacttaccctggacattgctagcattagctccatcagcgaatcaaatatggactatacagccacgatatatttacgacaacggtggatggatcagaggcttgtgtttgagggcaacaagagttttacgttggatgcccgactggttgaatttctgtgggtgcccgatacttacatcgtggaatccaaaaagtcctttctacacgaagttaccgtgggaaacaggctcattcgccttttcagcaacggcactgtgctttacgctttgcgtatcactacaaccgtggcttgtaacatggatctgagcaagtaccccatggatacacagacatgcaaactccagctggagtcatggggatacgacggcaatgacgtcgagttcacttggctcagaggaaacgactcagtgcgcggtctggaacacctgaggctcgctcagtacactatcgaaaggtattttactcttgtcactcgatctcagcaggaaactggaaactatactcggctggtgctgcaattcgagctgaggcgcaatgtactgtactttattctagagacttacgtgccttccacctttttggtggttttgtcttgggtttctttctggatttccctggacagtgtgccggccaggacgtgtatcggagttaccacagtgctgtcgatgactactctgatgatcggctccaggacctcacttcccaacaccaactgcttcattaaggcgatcgatgtgtacttaggcatttgtttttctttcgtttttggcgccctattggaatatgctgtggcacactacagtagccttcagcaaatggccgctaaagatcgagggactactaaggaggttgaggaggtgtcaattaccaacattattaattcttctatcagttcattcaaacgaaagatttcttttgcaagcattgagatatcaagcgataacgtggattatagtgacctcacaatgaaaacatctgacaagttcaaattcgtgttcagggaaaaaatgggcaggatcgttgactatttcacgatacagaacccctctaacgtggatcactacagcaagctgctgttccctctgattttcatgttggctaacgttttctattgggcgtattacatgtacttctag

SEQ ID NO: 328879 - DNA, 1323 bp, Artificial Sequence
  derived and/or modified sequence
atgaattactctctgcatctcgcctttgtatgcctttccttgtttaccgaacgcatgtgcatccaaggaagtcagttcaatgtcgaagttggaaggagtgacaaattgagcctccccggattcgagaacctaaccgccggatataacaaattcctcagacctaatttcggtggagaacccgtacaaatcgcattgacgttggacatcgcttccatttcttctatcagcgagtctaatatggactataccgccactatttatctccgccaaagatggatggatcagaggttggtgttcgagggaaacaagagcttcaccttagacgctcgcctggtcgagtttctgtgggttccagatacctacattgtcgaatcgaaaaaaagttttttgcatgaagtgaccgtgggaaatcgccttattcggttattcagtaatgggacagtcctctacgccctccggatcaccactacagtggcttgtaatatggacctatccaagtacccaatggacacccaaacttgtaaacttcagctggagtcctgggggtatgacggcaacgatgtggaatttacatggctccggggaaatgatagcgtgcgcggactggagcacctcagacttgctcaatatacaattgagcggtactttacactcgtgactagaagccagcaggagacgggaaactacacccgacttgtgctgcaatttgaactgcgtcggaacgtcctatactttatccttgaaacatatgtgccttctacatttcttgtggttctgagctgggtgtctttctggatttccctggatagcgtaccggctagaacatgcattggagtcactaccgttctgtctatgactaccctgatgatcgggagccgtacctcactgccaaatacaaattgttttatcaaagcaattgatgtctatttgggcatttgttttagctttgtttttggcgcattactcgaatatgccgtagcacactatagtagcctgcagcagatggcggctaaggatagaggcacgacaaaggaagtagaggaagtgtctatcactaatatcattaacagtagcatctccagtttcaagaggaaaatttcctttgctagcatcgagatctccagcgataatgtggactactccgatttgaccatgaagactagtgataaatttaagttcgtgttccgtgaaaagatgggcaggatcgtggactatttcaccattcagaatccaagtaacgtggatcactattctaagctgctcttcccattgatttttatgctggcaaacgttttttattgggcctattatatgtacttttag

SEQ ID NO: 328880 - DNA, 1323 bp, Artificial Sequence
  derived and/or modified sequence
atgaactatagtttacatctggccttcgtctgcctgagtttgtttaccgagcgcatgtgcattcaggggtcacaatttaatgtcgaggtcgggagatctgacaagttgtccctgcctggattcgaaaatctcactgctggttacaacaaattcttacggcctaatttcggaggtgaacccgtacaaatagcccttacactcgatatagcctccattagctcaatttctgaatccaatatggactacaccgcgactatctacctgagacagcgatggatggatcagcgtctggtgtttgagggaaacaaatctttcacactggacgccaggctcgtggaattcctgtgggtccccgacacatatatcgtagaaagtaagaagagctttctgcacgaagttaccgtgggtaatcgcctcatccggctgttttctaatggcacagtgctgtacgccctgcggatcaccaccaccgtagcgtgcaacatggatctgagtaaatatccaatggacacgcaaacctgcaagcttcagctggagtcatggggctacgacggtaacgacgtcgagttcacatggctgcgcggtaacgactccgtcagggggctggagcacctgcgcttagcacagtatactatcgagaggtattttactctcgtgacccgcagccagcaggaaacgggcaactacaccaggctagttcttcagtttgaactccgcagaaacgttctatactttatattagagacttacgtcccctcaacgtttttggtggtcttatcatgggtaagcttctggatttccttggattccgttcctgccaggacctgcattggtgtgactacagtcctgtccatgaccacattgatgatcggtagcaggacaagccttccaaacactaattgcttcattaaggccattgatgtgtacctcggaatctgcttttcctttgtgtttggggcactgttggaatacgctgtggcacattacagttccctgcaacagatggcagcgaaggaccgcggaacaaccaaggaagtggaggaggtttctatcactaacataatcaactcttctatttcttctttcaagcgcaaaattagcttcgcctcaatcgaaatttcctctgacaatgtcgattattcggatttaacgatgaagacatccgacaaattcaaatttgtgttcagagagaaaatgggccgaatcgtagattatttcaccattcagaatccatcaaacgtggaccactatagcaaattactgtttccactgattttcatgctcgccaatgtcttttactgggcttattatatgtacttctag

SEQ ID NO: 328881 - DNA, 1323 bp, Artificial Sequence
  derived and/or modified sequence
atgaactacagcctgcacctggccttcgtgtgcctgagcctgttcaccgagagaatgtgcatccagggcagccagttcaacgtggaggtgggcagaagcgacaagctgagcctgcccggcttcgagaacctgaccgccggctacaacaagttcctgagacccaacttcggcggcgagcccgtgcagatcgccctgaccctggacatcgccagcatcagcagcatcagcgagagcaacatggactacaccgccaccatctacctgagacagagatggatggaccagagactggtgttcgagggcaacaagagcttcaccctggacgccagactggtggagttcctgtgggtgcccgacacctacatcgtggagagcaagaagagcttcctgcacgaggtgaccgtgggcaacagactgatcagactgttcagcaacggcaccgtgctgtacgccctgagaatcaccaccaccgtggcctgcaacatggacctgagcaagtaccccatggacacccagacctgcaagctgcagctggagagctggggctacgacggcaacgacgtggagttcacctggctgagaggcaacgacagcgtgagaggcctggagcacctgagactggcccagtacaccatcgagagatacttcaccctggtgaccagaagccagcaggagaccggcaactacaccagactggtgctgcagttcgagctgagaagaaacgtgctgtacttcatcctggagacctacgtgcccagcaccttcctggtggtgctgagctgggtgagcttctggatcagcctggacagcgtgcccgccagaacctgcatcggcgtgaccaccgtgctgagcatgaccaccctgatgatcggcagcagaaccagcctgcccaacaccaactgcttcatcaaggccatcgacgtgtacctgggcatctgcttcagcttcgtgttcggcgccctgctggagtacgccgtggcccactacagcagcctgcagcagatggccgccaaggacagaggcaccaccaaggaggtggaggaggtgagcatcaccaacatcatcaacagcagcatcagcagcttcaagagaaagatcagcttcgccagcatcgagatcagcagcgacaacgtggactacagcgacctgaccatgaagaccagcgacaagttcaagttcgtgttcagagagaagatgggcagaatcgtggactacttcaccatccagaaccccagcaacgtggaccactacagcaagctgctgttccccctgatcttcatgctggccaacgtgttctactgggcctactacatgtacttctag

SEQ ID NO: 328882 - protein, 187 aa, Artificial Sequence
  derived and/or modified sequence
MDYTATIYLRQRWMDQRLVFEGNKSFTLDEVTVGNRLIRLFSNGTVLYALRITTTVACNMDLSKYPMDTQTCKLQLESWGYDGNDVEFTWLRGNDSVRGLEHLRLAQYTIERYFTLVTRSQQETGNYTRLVLQFELRRNVLYFILETYVPSTFLVVLSWVSFWISLDSVPARTCIGDNKGSRRSQYY

SEQ ID NO: 328883 - DNA, 159 bp, Artificial Sequence
  derived and/or modified sequence
atgaattattcgttacacttggcttttgtttgtctgtccttgttcacagaaagaatgtgcatccaaggaagccaatttaatgttgaggtcggaaggtctgataagttaagcctacccgggttcgagaatttgaccgccggttataacaaattcctctag

SEQ ID NO: 328884 - DNA, 180 bp, Artificial Sequence
  derived and/or modified sequence
atgaactattcacttcacctcgcctttgtgtgtctctctctattcactgaacgtatgtgtatccagggatctcagtttaatgttgaagtcggcagaagtgacaagctgtcccttccagggttcgagaatttgacagcaggttataacaagttcttgcgcccaaacttcggtggtgaatag

SEQ ID NO: 328885 - DNA, 279 bp, Artificial Sequence
  derived and/or modified sequence
atgaattattcactccatctggcttttgtctgcctgtccctcttcacggaacgcatgtgcatccaaggatcccagtttaatgtggaggtagggagatcagataagctcagcttacctggattcgaaaacctaacagcagggtataataagtttcttcgtcccaactttggaggtgagcctgtgcagattgcactcactttggacatcgcaagtatctcctccattagtgaatccaacatggactataccgccactatctatctgagacagcgctggtag

SEQ ID NO: 328886 - DNA, 516 bp, Artificial Sequence
  derived and/or modified sequence
atgaattatagcttgcacctggctttcgtgtgtctgtcactctttacagaacgcatgtgcatccaggggtcccagtttaatgtcgaagtgggaaggtcggataagctgtccctgcctggattcgagaatctgaccgcggggtataataaatttctgcgcccaaactttggcggggaacccgtccagatcgctctgactctggacattgctagtattagttccatctctgagagtaacatggattatacagcaactatttacctgagacagcggtggatggaccagcggctcgttttcgagggcaacaagtccttcacacttgacgcccggctagtcgaatttctgtgggtgcctgacacatatattgttgagagcaagaagtctttcctgcatgaggtgactgtcgggaacaggctcatccgtctgttctcaaatggtaccgttctttacgccctgagaattacaacaactgtggcctgcaacatggacttgtcaaagtacccaatggacacgtag

SEQ ID NO: 328887 - DNA, 570 bp, Artificial Sequence
  derived and/or modified sequence
atgaattacagcctccatttggctttcgtctgtttaagcctcttcaccgaacggatgtgtatccaaggttctcaattcaacgtggaagtgggacgtagcgacaaactcagcttacccggctttgaaaacctgacggcagggtacaacaagtttctgagacccaactttgggggcgagccagtgcagatagccctgacgctggacatagcaagtataagctcaatttctgagtctaatatggactacaccgctaccatatatttacgtcagcggtggatggatcaacggttggtattcgagggcaataagtctttcactctagacgctaggctcgtggagttcctgtgggttcccgatacttacatcgtggaatccaaaaagtcttttctgcatgaagtgaccgtgggaaataggcttattcggctgtttagtaatggtacagtcctatacgctttgcgaattacaaccaccgtcgcctgcaacatggatctgagcaaatatccaatggatacgcagacctgcaaattacaactcgagtcttggggttatgatgggaatgatgtggagtag

SEQ ID NO: 328888 - DNA, 564 bp, Artificial Sequence
  derived and/or modified sequence
atggattataccgctacaatttacctccggcaacggtggatggaccaaaggctggtgtttgagggtaacaagtccttcaccctggacgaagtgacggtggggaatagattgatacgcctattctctaacgggacggtcctgtacgccttgaggatcaccactaccgtagcctgcaatatggacttatctaaatatcccatggacactcagacctgcaagctgcaattggagagttgggggtatgatggtaatgatgttgaattcacttggttacggggaaatgactccgttaggggcctcgaacacttacgacttgctcagtacaccatcgaacggtatttcaccttagtcactagatcgcaacaggagaccggaaactacactaggctcgtgctccaattcgagctgagacgcaatgtactctattttatcctggaaacctatgttccttccacctttctggtggtactctcgtgggtgtctttttggatttcacttgattctgtgcctgcccggacctgtatcggtgataataagggaagtcgacgatctcaatactattag

SEQ ID NO: 328889 - DNA, 582 bp, Artificial Sequence
  derived and/or modified sequence
tttgctccccttcctttctctctctcccttcccggctcctagactgggtctaggcaggagcttcgccatgatgtcaggagggaaggagatgcctctgggcctcgtaccacagcctcagctctctctctgcccctccatctgagtccctcctggctcccagctccctcagggtgcaaggccaagcctccaaggaatccctccccttacctgcatggctggagccaagaagagccactccatctgagggtggctgcgtgtccacatacgaggggacagggctgaggatgaggagaaccctggggacccagaagaccgtgccttgcctggaagtcctgcctgtaggcctgaaggacttgccctaacagagcctcaacaactacctggtgattcctacttcagccccttggtgtgagcagcttctcaacatgaactacagcctccacttggccttcgtgtgtctgagtctcttcactgagaggatgtgcatccaggggagtcagttcaacgtcgaggtcggcagaagtgacaagctttccctgcctggctttgagaacctcacagcaggatataacaaatttctca

SEQ ID NO: 328890 - DNA, 689 bp, Artificial Sequence
  derived and/or modified sequence
agacgcgaaggaggctttgggttggggagaagggcagcaatgagatgcggctgcagtccaggaatagtcagggaaacagataatttggttaaaatatctcagcctaataagggaactgggcaggtggggataactaaaaaagagtgcataaaagagtgttgtccaagttggcaccagagtcggggagttttcaggggtttagaagcctggccgtcaatacccacaacagttatggaggcaagggaaacaggcccttgaaaagaaggtaatgtggagtgggtagcctccgtattgactaaggggacggacttaccttccactgtgagagttacccgaagctcggagtccgtgatggtctacggagcttccgaggcgatcgggcagcatcagtcttcagctgctaagccgagaaggagtcagtcagagagccttgggccagagttccaggggctctgggagtggctgccaggtgattcctacttcagccccttggtgtgagcagcttctcaacatgaactacagcctccacttggccttcgtgtgtctgagtctcttcactgagaggatgtgcatccaggggagtcagttcaacgtcgaggtcggcagaagtgacaagctttccctgcctggctttgagaacctcacagcaggatataacaaatttctcaggcccaattttggtggagaac

SEQ ID NO: 328891 - DNA, 456 bp, Artificial Sequence
  derived and/or modified sequence
aatcggacacgatcagcagggagaacacatgtgtttttatgagaattacgctgagataggtaacagatgaggatgaaatttgggcttgactgaagtaatgggggctgtctgtgaagccttgcggcagtacagcccaggtgattcctacttcagccccttggtgtgagcagcttctcaacatgaactacagcctccacttggccttcgtgtgtctgagtctcttcactgagaggatgtgcatccaggggagtcagttcaacgtcgaggtcggcagaagtgacaagctttccctgcctggctttgagaacctcacagcaggatataacaaatttctcaggcccaattttggtggagaacccgtacagatagcgctgactctggacattgcaagtatctctagcatttcagagagtaacatggactacacagccaccatatacctccgacagcgctgga

SEQ ID NO: 328892 - DNA, 721 bp, Artificial Sequence
  derived and/or modified sequence
aggtgggaaggctaaactgaggaattatgtctgacagaagggaatgacaaggctaaactgaagaattatgtctgacagaagggaagaaatgactgcagtggccttctcagaccctgtaggaaaggactctacttatccggtgaaagtgtctacctagactaagaggtgattcctacttcagccccttggtgtgagcagcttctcaacatgaactacagcctccacttggccttcgtgtgtctgagtctcttcactgagaggatgtgcatccaggggagtcagttcaacgtcgaggtcggcagaagtgacaagctttccctgcctggctttgagaacctcacagcaggatataacaaatttctcaggcccaattttggtggagaacccgtacagatagcgctgactctggacattgcaagtatctctagcatttcagagagtaacatggactacacagccaccatatacctccgacagcgctggatggaccagcggctggtgtttgaaggcaacaagagcttcactctggatgcccgcctcgtggagttcctctgggtgccagatacttacattgtggagtccaagaagtccttcctccatgaagtcactgtgggaaacaggctcatccgcctcttctccaatggcacggtcctgtatgccctcagaatcacgacaactgttgcatgtaacatggatctgtctaaataccccatggacacac

SEQ ID NO: 328893 - DNA, 700 bp, Artificial Sequence
  derived and/or modified sequence
agtcaaggagtgagggacagggaatgaacatgccatggcacagggcaggacctgctgaaagacagacaggcccagcagcgtagagaagcggtgattcctacttcagccccttggtgtgagcagcttctcaacatgaactacagcctccacttggccttcgtgtgtctgagtctcttcactgagaggatgtgcatccaggggagtcagttcaacgtcgaggtcggcagaagtgacaagctttccctgcctggctttgagaacctcacagcaggatataacaaatttctcaggcccaattttggtggagaacccgtacagatagcgctgactctggacattgcaagtatctctagcatttcagagagtaacatggactacacagccaccatatacctccgacagcgctggatggaccagcggctggtgtttgaaggcaacaagagcttcactctggatgcccgcctcgtggagttcctctgggtgccagatacttacattgtggagtccaagaagtccttcctccatgaagtcactgtgggaaacaggctcatccgcctcttctccaatggcacggtcctgtatgccctcagaatcacgacaactgttgcatgtaacatggatctgtctaaataccccatggacacacagacatgcaagttgcagctggaaagctggggctatgatggaaatgatgtggagt

SEQ ID NO: 328894 - DNA, 2942 bp, Artificial Sequence
  derived and/or modified sequence
ttcttccccagagagccactccatctgagggtggctgcgtgtccacatacgaggggacagggctgaggatgaggagaaccctggggacccagaagaccgtgccttgcctggaagtcctgcctgtaggcctgaaggacttgccctaacagagcctcaacaactacctggtgattcctacttcagccccttggtgtgagcagcttctcaacatgaactacagcctccacttggccttcgtgtgtctgagtctcttcactgagaggagaacccgtacagatagcgctgactctggacattgcaagtatctctagcatttcagagagtaacatggactacacagccaccatatacctccgacagcgctggatggaccagcggctggtgtttgaaggcaacaagagcttcactctggatgaagtcactgtgggaaacaggctcatccgcctcttctccaatggcacggtcctgtatgccctcagaatcacgacaactgttgcatgtaacatggatctgtctaaataccccatggacacacagacatgcaagttgcagctggaaagctggggctatgatggaaatgatgtggagttcacctggctgagagggaacgactctgtgcgtggactggaacacctgcggcttgctcagtacaccatagagcggtatttcaccttagtcaccagatcgcagcaggagacaggaaattacactagattggtcttacagtttgagcttcggaggaatgttctgtatttcattttggaaacctacgttccttccactttcctggtggtgttgtcctgggtttcattttggatctctctcgattcagtccctgcaagaacctgcattggggacaacaaaggaagtagaagaagtcagtattactaatatcatcaacagctccatctccagctttaaacggaagatcagctttgccagcattgaaatttccagcgacaacgttgactacagtgacttgacaatgaaaaccagcgacaagttcaagtttgtcttccgagaaaagatgggcaggattgttgattatttcacaattcaaaaccccagtaatgttgatcactattccaaactactgtttcctttgatttttatgctagccaatgtattttactgggcatactacatgtatttttgagtcaatgttaaatttcttgcatgccataggtcttcaacaggacaagataatgatgtaaatggtattttaggccaagtgtgcacccacatccaatggtgctacaagtgactgaaataatatttgagtctttctgctcaaagaatgaagctccaaccattgttctaagctgtgtagaagtcctagcattataggatcttgtaatagaaacatcagtccattcctctttcatcttaatcaaggacattcccatggagcccaagattacaaatgtactcagggctgtttattcggtggctccctggtttgcatttacctcatataaagaatgggaaggagaccattgggtaaccctcaagtgtcagaagttgtttctaaagtaactatacatgttttttactaaatctctgcagtgcttataaaatacattgttgcctatttagggagtaacattttctagtttttgtttctggttaaaatgaaatatgggcttatgtcaattcattggaagtcaatgcactaactcaataccaagatgagtttttaaataatgaatattatttaataccacaacagaattatccccaatttccaataagtcctatcattgaaaattcaaatataagtgaagaaaaaattagtagatcaacaatctaaacaaatccctcggttctaagatacaatggattccccatactggaaggactctgaggctttattcccccactatgcatatcttatcattttattattatacacacatccatcctaaactatactaaagcccttttcccatgcatggatggaaatggaagatttttttttaacttgttctagaagtcttaatatgggctgttgccatgaaggcttgcagaattgagtccattttctagctgcctttattcacatagtgatggggtactaaaagtactgggttgactcagagagtcgctgtcattctgtcattgctgctactctaacactgagcaacactctcccagtggcagatcccctgtatcattccaagaggagcattcatccctttgctctaatgatcaggaatgatgcttattagaaaacaaactgcttgacccaggaacaagtggcttagcttaagtaaacttggctttgctcagatccctgatccttccagctggtctgctatgagtggcttatcccgcatgagcaggagcgtgctggccctgagtactgaactttctgagtaacaatgagatacgttacagaacctatgttcaggttgcgggtgagctgccctctccaaatccagccagagatgcacattcctcggccagtctcagccaacagtaccaaaagtgatttttgagtgtgccagggtaaaggcttccagttcagcctcagttattttagacaatctcgccatctttaatttcttagcttcctgttctaataaatgcacggctttacctttcctgtcagaaataaaccaaggctctaaaagatgatttcccttctgtaactccctagagccacaggttctcattccttttcccattatacttctcacaattcagtttctatgagtttgatcacctgatttttttaacaaaatatttctaacgggaatgggtgggagtgctggtgaaaagaggtgaaatgtggttgtatgagccaatcatatttgtgattttttaaaaaaagtttaaaaggaaatatctgttctgaaaccccacttaagcattgtttttatataaaaacaatgataaagatgtgaaactgtgaaataaatataccatattagctacccacc

SEQ ID NO: 328895 - DNA, 159 bp, Artificial Sequence
  derived and/or modified sequence
atgaactacagcctgcacctggcctttgtgtgcctgagcctcttcacagagaggatgtgcatccagggcagccagttcaacgtggaggtgggccgcagtgacaagctgagcctgcccggctttgagaacctgacagctggctacaacaagttcctgtag

SEQ ID NO: 328896 - DNA, 180 bp, Artificial Sequence
  derived and/or modified sequence
atgaactacagcctgcacctggcctttgtgtgcctgagcctcttcacagagaggatgtgcatccagggcagccagttcaacgtggaggtgggccgcagtgacaagctgagcctgcccggctttgagaacctgacagctggctacaacaagttcctgcggcccaactttggaggagagtag

SEQ ID NO: 328897 - DNA, 279 bp, Artificial Sequence
  derived and/or modified sequence
atgaactacagcctgcacctggcctttgtgtgcctgagcctcttcacagagaggatgtgcatccagggcagccagttcaacgtggaggtgggccgcagtgacaagctgagcctgcccggctttgagaacctgacagctggctacaacaagttcctgcggcccaactttggaggagagcctgtgcagatcgccctgaccctggacatcgccagcatcagcagcatcagcgagagcaacatggactacacagccaccatctacctgcggcagcgctggtag

SEQ ID NO: 328898 - DNA, 516 bp, Artificial Sequence
  derived and/or modified sequence
atgaactacagcctgcacctggcctttgtgtgcctgagcctcttcacagagaggatgtgcatccagggcagccagttcaacgtggaggtgggccgcagtgacaagctgagcctgcccggctttgagaacctgacagctggctacaacaagttcctgcggcccaactttggaggagagcctgtgcagatcgccctgaccctggacatcgccagcatcagcagcatcagcgagagcaacatggactacacagccaccatctacctgcggcagcgctggatggaccagaggctggtgtttgagggcaacaagagcttcaccctggatgcccggctggtggagttcctgtgggtgcctgacacctacatcgtggagagcaagaagagcttcctgcacgaggtgacagtgggcaacagactcatccgcctcttcagcaatggaacagtgctgtatgccctgcgcatcaccaccaccgtggcctgcaacatggacctgagcaagtaccccatggacacctag

SEQ ID NO: 328899 - DNA, 570 bp, Artificial Sequence
  derived and/or modified sequence
atgaactacagcctgcacctggcctttgtgtgcctgagcctcttcacagagaggatgtgcatccagggcagccagttcaacgtggaggtgggccgcagtgacaagctgagcctgcccggctttgagaacctgacagctggctacaacaagttcctgcggcccaactttggaggagagcctgtgcagatcgccctgaccctggacatcgccagcatcagcagcatcagcgagagcaacatggactacacagccaccatctacctgcggcagcgctggatggaccagaggctggtgtttgagggcaacaagagcttcaccctggatgcccggctggtggagttcctgtgggtgcctgacacctacatcgtggagagcaagaagagcttcctgcacgaggtgacagtgggcaacagactcatccgcctcttcagcaatggaacagtgctgtatgccctgcgcatcaccaccaccgtggcctgcaacatggacctgagcaagtaccccatggacacccagacctgcaagctgcagctggagagctggggctatgatggaaatgatgtggagtag

SEQ ID NO: 328900 - DNA, 564 bp, Artificial Sequence
  derived and/or modified sequence
atggactacacagccaccatctacctgcggcagcgctggatggaccagaggctggtgtttgagggcaacaagagcttcaccctggatgaggtgacagtgggcaacagactcatccgcctcttcagcaatggaacagtgctgtatgccctgcgcatcaccaccaccgtggcctgcaacatggacctgagcaagtaccccatggacacccagacctgcaagctgcagctggagagctggggctatgatggaaatgatgtggagttcacctggctgcggggaaatgacagcgtgcggggcctggagcacctgcggctggcccagtacaccatcgagcgctacttcaccctggtgaccaggagccagcaggagaccggcaactacacccggctggtgctgcagtttgagctgcggagaaatgtgctgtacttcatcctggagacctacgtgcccagcaccttcctggtggtgctgtcctgggtgtccttctggatcagcctggacagcgtgcctgcccggacctgcattggagacaacaagggcagccgccgcagccagtactactag

SEQ ID NO: 328901 - DNA, 159 bp, Artificial Sequence
  derived and/or modified sequence
atgaactacagcctgcacctggccttcgtgtgcctgagcctgttcaccgaaaggatgtgtattcagggatcacagttcaacgttgaagtgggcaggagcgataagctttcattgccaggcttcgaaaacctgactgctgggtataacaagttcctctag

SEQ ID NO: 328902 - DNA, 180 bp, Artificial Sequence
  derived and/or modified sequence
atgaactacagcctgcacctggccttcgtgtgcctgagcctgttcacagaacggatgtgcatccagggctcccagtttaacgtagaggtgggtcggtcagacaaattgtcactccccggatttgaaaaccttacggcaggatataacaagttcctccgccccaactttgggggcgaatag

SEQ ID NO: 328903 - DNA, 279 bp, Artificial Sequence
  derived and/or modified sequence
atgaactacagcctgcacctggccttcgtgtgcctgagcctgttcacagagaggatgtgtattcagggctctcagttcaatgtggaggtaggtcgttcggataaactgtcacttcccggcttcgagaacttgaccgcaggttacaacaagttcctcagacctaattttggcggggaacctgtccagatcgcactgacgctcgatatcgcctcgattagctcaatttcagagagcaacatggattacaccgctactatctacctgaggcagaggtggtag

SEQ ID NO: 328904 - DNA, 516 bp, Artificial Sequence
  derived and/or modified sequence
atgaactacagcctgcacctggccttcgtgtgcctgagcctgttcaccgaacgtatgtgcatccagggatcccagttcaacgtcgaggttggaaggagtgacaaactgagtcttccaggttttgagaatctgactgcgggctataacaagttcctgcggcccaatttcggtggggagcctgtgcagattgctctcactctcgatattgctagcatcagcagcatctccgagtctaacatggactacaccgccactatctacctgcgacagagatggatggaccaaagactggtgtttgaagggaataaaagttttactctggacgctcgactggtcgagtttctctgggttccagatacatacattgtggagagcaagaaaagctttctgcacgaggttacggttggcaacagactgattcgcctctttagcaatggcacagtcctctatgccctcagaatcacaaccacagtggcgtgtaatatggacctcagcaagtaccctatggatacatag

SEQ ID NO: 328905 - DNA, 570 bp, Artificial Sequence
  derived and/or modified sequence
atgaactacagcctgcacctggccttcgtgtgcctgagcctgttcacagaacggatgtgtatccagggatcccagtttaatgtggaagttggccgttccgacaaactgtccctccccgggtttgagaatttgacggccgggtataacaaattccttcgtccgaactttggaggcgaacccgttcaaatcgcactgacactcgacattgcttctatttcctcgatttcagagtcaaatatggactataccgccaccatctacttgagacagcgctggatggatcaacgactggtttttgaaggcaacaaatccttcactcttgatgcccgcttggtagagtttttatgggttcccgacacttacattgtagaaagtaagaaaagcttcctacacgaggtgacggtaggtaaccgtctgattcgtctttttagcaacggcactgtcttgtacgcactacgaattaccaccacagtggcctgcaatatggatctgtcaaagtacccgatggatacccagacttgtaagctccagctcgaatcatggggttatgatggcaatgatgttgaatag

SEQ ID NO: 328906 - DNA, 564 bp, Artificial Sequence
  derived and/or modified sequence
atggactacaccgccaccatctacctgcggcagcggtggatggaccagaggcttgtttttgagggaaataagtccttcacactagatgaggtcaccgtgggcaaccgactgatccgcttatttagcaatggcaccgtcctttacgcccttaggatcacgactactgtggcctgcaatatggatcttagcaaatatccaatggatacacagacctgcaagctccagctcgagtcttgggggtacgacgggaatgatgtcgaatttacctggctgagaggtaatgatagcgtgagagggctagaacacctgcgtctcgctcagtacaccattgagcggtacttcacacttgtgactaggagtcaacaagaaaccggtaattatactagattagtactgcagttcgaactccggaggaacgtcctttacttcatcctcgagacttatgtccccagcacatttcttgtggtgctatcctgggtatccttctggatcagtttagacagtgtgcccgctcggacctgcatcggagacaacaagggaagtaggaggtcacagtattactag

SEQ ID NO: 328907 - DNA, 159 bp, Artificial Sequence
  derived and/or modified sequence
atgaactatagtctacacttggcttttgtgtgcctgtcgctgtttaccgagcggatgtgtatccagggatcacagttcaatgtcgaggtcggccgatcagacaagctttccctccccggattcgaaaacctgactgccggatataataaattcctgtag

SEQ ID NO: 328908 - DNA, 180 bp, Artificial Sequence
  derived and/or modified sequence
atgaactacagcttgcacctggcgtttgtatgcctctccctcttcaccgaaagaatgtgtatccagggaagtcaattcaacgtggaagtggggcgttccgacaagctgagtctccccggtttcgagaatctcaccgccggatacaacaaatttctgcgtcctaattttggtggggagtag

SEQ ID NO: 328909 - DNA, 279 bp, Artificial Sequence
  derived and/or modified sequence
atgaattactctttgcatctggcctttgtgtgcctgagtctttttacggaacgtatgtgcatacagggatcccagtttaacgtggaagtgggtagatcagacaaactatctctacctggattcgagaaccttacagcagggtacaacaagttcctcagacctaactttggaggagaaccagtccaaattgccttgactctagacatagccagtatctcgagtatttctgagtccaacatggattatactgcaaccatttaccttaggcagcgatggtag

SEQ ID NO: 328910 - DNA, 516 bp, Artificial Sequence
  derived and/or modified sequence
atgaattatagcctacacctcgcattcgtgtgtctatccctgtttacagaaaggatgtgtatccagggttcccagtttaatgtggaggtggggaggagtgacaaactaagtctacccggtttcgagaatctcacagcaggttacaacaaattcttgagaccgaatttcggcggtgagccagttcagatagccctgacactggacatcgctagcatttctagtataagtgagtccaacatggattacacggccacaatctatctgcgacaacgctggatggaccagcggttggtttttgagggtaacaagtctttcacactcgacgcccgactggttgagttcctgtgggtgcccgacacctatattgtggagtcaaagaaaagcttccttcacgaagtgactgttggcaaccgtctgatccggctgttcagcaatggaacggttttgtacgcacttcgcataacaacaactgtggcatgtaatatggacctgtccaaatatcctatggacacttag

SEQ ID NO: 328911 - DNA, 570 bp, Artificial Sequence
  derived and/or modified sequence
atgaactacagcctgcatctggcctttgtctgccttagccttttcacagagagaatgtgtatccaggggagccagttcaatgtggaggtaggcaggagcgacaaattgtccctgcccggtttcgaaaacttgacagctggctacaacaagttccttaggcccaatttcggaggcgaaccagtgcagattgcattaacgttggatattgcatctatcagttctatctcagaatctaacatggactacaccgctactatctacctccgacagaggtggatggaccagcgtttggtcttcgaaggtaataaatcgtttacactggacgctaggctggtcgagtttctctgggtccctgacacatatatcgtggaatcaaaaaagtccttcttacacgaagtgactgtgggcaatcggctgatccgcttgttttctaatgggaccgtcctgtacgcattgcgcatcaccacgacagtggcctgcaacatggatctttccaaatatccaatggatacccagacctgtaaactacagctcgagagctggggctatgatggcaacgatgttgagtag

SEQ ID NO: 328912 - DNA, 564 bp, Artificial Sequence
  derived and/or modified sequence
atggattatactgccacaatttacctgagacagcgttggatggatcaacgactggtctttgaaggaaacaaaagcttcactctggatgaggtgactgtaggtaatcgactcatccggctgttcagtaatgggaccgttttgtacgccctgagaatcactaccaccgtggcttgtaacatggatctttccaaatatcccatggacacgcagacgtgcaagctgcagctagaatcatggggatatgacggtaacgatgttgagttcacttggctgaggggcaatgattccgtccggggtctggaacacctgcgactcgcacagtatacaattgagagatactttaccctggtgactcgctctcagcaggagactggcaactacaccaggctggtgctgcagttcgagctgcgtcgcaacgtactgtacttcatcctggaaacatatgtccccagcacatttttggtggtgctcagctgggttagtttttggatctccctggacagcgtcccagccaggacctgcataggagacaacaaaggtagtcggaggagccagtattattag

SEQ ID NO: 328913 - DNA, 159 bp, Artificial Sequence
  derived and/or modified sequence
atgaactacagcctgcacctggccttcgtgtgcctgagcctgttcaccgagagaatgtgcatccagggcagccagttcaacgtggaggtgggcagaagcgacaagctgagcctgcccggcttcgagaacctgaccgccggctacaacaagttcctgtag

SEQ ID NO: 328914 - DNA, 180 bp, Artificial Sequence
  derived and/or modified sequence
atgaactacagcctgcacctggccttcgtgtgcctgagcctgttcaccgagagaatgtgcatccagggcagccagttcaacgtggaggtgggcagaagcgacaagctgagcctgcccggcttcgagaacctgaccgccggctacaacaagttcctgagacccaacttcggcggcgagtag

SEQ ID NO: 328915 - DNA, 279 bp, Artificial Sequence
  derived and/or modified sequence
atgaactacagcctgcacctggccttcgtgtgcctgagcctgttcaccgagagaatgtgcatccagggcagccagttcaacgtggaggtgggcagaagcgacaagctgagcctgcccggcttcgagaacctgaccgccggctacaacaagttcctgagacccaacttcggcggcgagcccgtgcagatcgccctgaccctggacatcgccagcatcagcagcatcagcgagagcaacatggactacaccgccaccatctacctgagacagagatggtag

SEQ ID NO: 328916 - DNA, 516 bp, Artificial Sequence
  derived and/or modified sequence
atgaactacagcctgcacctggccttcgtgtgcctgagcctgttcaccgagagaatgtgcatccagggcagccagttcaacgtggaggtgggcagaagcgacaagctgagcctgcccggcttcgagaacctgaccgccggctacaacaagttcctgagacccaacttcggcggcgagcccgtgcagatcgccctgaccctggacatcgccagcatcagcagcatcagcgagagcaacatggactacaccgccaccatctacctgagacagagatggatggaccagagactggtgttcgagggcaacaagagcttcaccctggacgccagactggtggagttcctgtgggtgcccgacacctacatcgtggagagcaagaagagcttcctgcacgaggtgaccgtgggcaacagactgatcagactgttcagcaacggcaccgtgctgtacgccctgagaatcaccaccaccgtggcctgcaacatggacctgagcaagtaccccatggacacctag

SEQ ID NO: 328917 - DNA, 570 bp, Artificial Sequence
  derived and/or modified sequence
atgaactacagcctgcacctggccttcgtgtgcctgagcctgttcaccgagagaatgtgcatccagggcagccagttcaacgtggaggtgggcagaagcgacaagctgagcctgcccggcttcgagaacctgaccgccggctacaacaagttcctgagacccaacttcggcggcgagcccgtgcagatcgccctgaccctggacatcgccagcatcagcagcatcagcgagagcaacatggactacaccgccaccatctacctgagacagagatggatggaccagagactggtgttcgagggcaacaagagcttcaccctggacgccagactggtggagttcctgtgggtgcccgacacctacatcgtggagagcaagaagagcttcctgcacgaggtgaccgtgggcaacagactgatcagactgttcagcaacggcaccgtgctgtacgccctgagaatcaccaccaccgtggcctgcaacatggacctgagcaagtaccccatggacacccagacctgcaagctgcagctggagagctggggctacgacggcaacgacgtggagtag

SEQ ID NO: 328918 - DNA, 564 bp, Artificial Sequence
  derived and/or modified sequence
atggactacaccgccaccatctacctgagacagagatggatggaccagagactggtgttcgagggcaacaagagcttcaccctggacgaggtgaccgtgggcaacagactgatcagactgttcagcaacggcaccgtgctgtacgccctgagaatcaccaccaccgtggcctgcaacatggacctgagcaagtaccccatggacacccagacctgcaagctgcagctggagagctggggctacgacggcaacgacgtggagttcacctggctgagaggcaacgacagcgtgagaggcctggagcacctgagactggcccagtacaccatcgagagatacttcaccctggtgaccagaagccagcaggagaccggcaactacaccagactggtgctgcagttcgagctgagaagaaacgtgctgtacttcatcctggagacctacgtgcccagcaccttcctggtggtgctgagctgggtgagcttctggatcagcctggacagcgtgcccgccagaacctgcatcggcgacaacaagggcagcagaagaagccagtactactag

SEQ ID NO: 328919 - DNA, 222 bp, Artificial Sequence
  derived and/or modified sequence
atgtcctatcagcagcagcaatgtaagcagccatgtcagccgcctccacccgtgtgccgactgcccaagcgtccagaaccatgtccaccactcaagtgtccggagccatgcccacctcctaagtgcccccagccttgtcccccacaacagtgtcagcaaaagtaccccttagtgacacctagtcccccatgtcagcccaaatgtcccccaaaatccaagtag

SEQ ID NO: 328920 - DNA, 1095 bp, Artificial Sequence
  derived and/or modified sequence
atgcatccccaggtggtgatcctaagcctgatcttgcacctggctgacagcgtggcaggtagtgttaaggtgggcggcgaggccggtccaagcgtgacattgccttgccactattccggcgcggtgacctctatgtgttggaatagaggtagctgtagcctgtttacatgtcaaaacggcattgtgtggactaacggcactcacgtgacttacagaaaggacacacgctataaactcctcggagacctcagtcggagagatgtatcactgaccattgagaacactgcagtgtctgactccggtgtgtactgctgcagagtcgagcaccgcggatggttcaatgacatgaagatcaccgtgagtctggagatcgtcccacccaaagtgaccactacccccattgttactacagttccgacggttacaaccgttaggacttcaacgaccgtccctacaactaccaccgtgccaatgaccaccgttcccacaaccacagtacccaccacaatgagcatccccacgaccacaacagtcctcaccactatgaccgtgtcaacgacgacgtcggtgccgaccacgacttctatacctactaccacatccgtgcccgtgaccaccactgtgtcaacctttgtcccgcccatgccattgcccagacagaatcacgagcccgttgccacatcaccgagtagtcctcaaccggctgaaactcacccaacgacattgcagggggctattcggcgcgagccgaccagttccccattgtacagttacaccactgatggaaatgacaccgtgacagagtcgagtgacggcctgtggaataataatcagactcagctcttcctggaacacagtcttctgactgccaatacgacgaaaggcatctacgctggagtctgcatttctgttctggtcctgctcgcactactcggtgttatcattgctaagaagtatttctttaagaaggaggtgcagcaactgtcggtctccttttccagcctccagattaaggcccttcagaacgccgtggaaaaagaagtgcaagcagaggacaatatatacatcgaaaacagtctgtacgccaccgattag

SEQ ID NO: 328921 - DNA, 672 bp, Artificial Sequence
  derived and/or modified sequence
atgcatccccaggtggtgatcctaagtctgattcttcacctagcagacagcgtggccgggtctgttaaggtgggaggggaggcagggcctagtgtaaccttaccttgtcactattctggcgccgtcacatctatgtgctggaacagggggtcctgctctcttttcacctgccagaatggcattgtgtggacgaatggcactcacgtaacatataggaaggacacccgatataagctcctcggcgacctcagtcggcgtgacgtcagcctgactatcgaaaatacagccgtgtcagatagcggcgtgtattgttgtcgcgtcgaacaccgcggatggtttaatgacatgaagattaccgtgtccttagagattgtgccacctaaggttactactacccccatcgttactacagtcccaactgtcaccacggtaaggacttcaacaactgtacccaccaccactacggtgcccatgaccacggtgcccacgacaaccgttcccacgacaatgagcatccccaccacaaccaccgtgctcactacaatgaccgttagcactaccacttctgtccctaccaccacctccatcccaacaacaacctccgtccccgtcacgactaccgtcagcacttttgtgcccccgatgccccttcctcgtcagaatcatgaatag

SEQ ID NO: 328922 - DNA, 1095 bp, Artificial Sequence
  derived and/or modified sequence
atgcatccacaggtggtcattctgagcctgattctccacttagccgattcggtcgctgggtcagttaaggtgggcggagaggcgggtcccagcgtgaccctcccttgccactactctggggccgtcacgagtatgtgttggaatcgcgggtcttgtagcctattcacctgccagaacggcatcgtgtggacgaacggcactcatgttacatacagaaaagacacccggtacaagctgttgggagatctatcccgaagagatgtgtcccttacaattgagaatactgccgtctctgactcgggggtatattgttgccgagtggagcacagaggttggtttaacgatatgaagattactgtgtcactggagatagtgccgcctaaggtgacaacaacccccatcgttactacagtgcctaccgtgaccaccgtgagaaccagtaccacagtcccaactaccactaccgtacccatgacaactgtccccactactactgttccaacaactatgtctatcccaactacaactacagtccttacaaccatgactgtaagtaccactacttcagtccccactacaacttctattcctaccacaacaagcgtcccggttaccaccacagtctcgacttttgtgccaccaatgccactgccacggcaaaatcatgaacccgtggccacaagcccatcttccccccaaccagcagaaacgcatccgactacccttcaaggagctatccgccgcgaaccaacctcgtccccgctgtattcttacacaacagatgggaatgacactgttacggagagcagtgacggactttggaacaacaaccagactcagttattcttggagcacagcctgttaacagcgaacaccaccaaggggatatacgcgggtgtatgcatttccgtactggtgttattagccctcctcggcgttatcattgccaaaaagtatttcttcaaaaaagaagtccaacagctctccgtgtcgttctcctctctgcagataaaagccctgcagaatgcagtggagaaggaggtgcaggctgaggacaatatatatatagagaatagtctctacgctaccgactag

SEQ ID NO: 328923 - DNA, 1095 bp, Artificial Sequence
  derived and/or modified sequence
atgcatccacaggtggtgatcctgagcctaatcttgcatctggcagattctgtcgccggttccgtgaaagtcggcggcgaggccggacccagtgtcaccctcccctgccattacagcggagctgtaacatctatgtgctggaatcgcggcagctgctccctctttacttgccagaatggcattgtatggaccaacggaacgcatgtgacctataggaaagacacacggtacaaactgctgggggacctgtcaagaagggatgtgagtctcacgatcgagaacactgccgtttctgattcaggcgtatattgctgtcgggtcgagcatagaggatggtttaatgacatgaagattaccgtgtcccttgagatcgtgcctcccaaagtgactacaacgccaatcgtcacgacagtgcctaccgttaccactgtacgcacgagtacaacggttcccactaccacaacagtgccgatgaccaccgtgcctacgacgaccgtccctaccacaatgtcgatacccaccacaactacagttctcacaaccatgaccgtgagcacaacgacaagtgttccaactacgacctcgattcctaccaccacttctgtgcccgtaactaccaccgtctcgactttcgtaccacctatgccactaccgagacagaaccatgagccagtggctaccagcccatcatctccgcaacctgcagaaacccacccgacgacattgcaaggtgcgattagacgggaacccactagctcccccttatacagctatactacagacggaaatgataccgtaacagaatcaagtgacggcctatggaacaacaatcaaactcagctatttctggaacacagtctgctcacagcaaatactacgaaggggatttacgctggagtttgcattagtgtcctagtgctgttagccttgcttggggtcatcattgctaaaaagtacttcttcaagaaggaagtccaacagctgtccgtttccttttcttcgcttcaaattaaggccttgcagaacgccgttgaaaaggaggtgcaggccgaggacaacatatatatcgaaaatagcctgtacgccaccgattag

SEQ ID NO: 328924 - DNA, 774 bp, Artificial Sequence
  derived and/or modified sequence
agagacggggtttcacccttttagccaggatggtctcgatctcctgacttcgtgatctgcccgccttggcctcccaaagtgctaggattacaggctgatcccataatgcatcctcaagtggtcatcttaagcctcatcctacatctggcagattctgtagctggttctgtaaaggttggtggagaggcaggtccatctgtcacactaccctgccactacagtggagctgtcacatccatgtgctggaatagaggctcatgttctctattcacatgccaaaatggcattgtctggaccaatggaacccacgtcacctatcggaaggacacacgctataagctattgggggacctttcaagaagggatgtctctttgaccatagaaaatacagctgtgtctgacagtggcgtatattgttgccgtgttgagcaccgtgggtggttcaatgacatgaaaatcaccgtatcattggagattgtgccacccaaggtcacgactactccaattgtcacaactgttccaaccgtcacgactgttcgaacgagcaccactgttccaacgacaacgactgttccaatgacgactgttccaacgacaactgttccaacaacaatgagcattccaacgacaacgactgttctgacgacaatgactgtttcaacgacaacgagcgttccaacgacaacgagcattccaacaacaacaagtgttccagtgacaacaactgtctctacctttgttcctccaatgcctttgcccaggcagaaccatgaa

SEQ ID NO: 328925 - DNA, 1095 bp, Artificial Sequence
  derived and/or modified sequence
atgcacccccaggtggtgatcctgagcctcatcctgcacctggccgacagcgtggccggctctgtgaaggtgggcggggaggccggccccagcgtgaccctgccctgccactacagcggggctgtgacctccatgtgctggaacagaggcagctgcagcctcttcacctgccagaatggaattgtgtggaccaacggcacccacgtgacctacaggaaggacacccgctacaagctgctgggggacctgagcagaagagatgtgtccctgaccattgaaaatacagctgtgtctgacagcggcgtgtactgctgccgggtggagcaccggggctggttcaatgacatgaagatcaccgtgtccctggagatcgtgccccccaaggtgaccaccacccccatcgtgaccaccgtgcccaccgtgaccaccgtgaggaccagcaccaccgtgcccaccaccaccaccgtgcccatgaccaccgtgcccaccaccaccgtgcccaccaccatgagcatccccaccaccaccaccgtgctgaccaccatgacagtgtccaccaccacctctgtgcccaccaccaccagcatccccaccaccacctctgtgcctgtgaccaccaccgtgtccacctttgtgccccccatgcccctgccccggcagaaccacgagcctgtggccaccagccccagcagcccccagcctgctgagacccaccccaccaccctgcagggcgccatcagaagagagcccaccagcagccccctgtacagctacaccacagatggaaatgacacagtgacagagagcagtgatggcctgtggaacaacaaccagacccagctgttcctggagcacagcctgctgacagccaacaccaccaagggcatctatgctggggtgtgcatctctgtgctggtgctgctggccctgctgggcgtcatcatcgccaagaagtacttcttcaagaaggaggtgcagcagctgtctgtgtccttcagcagcctgcagatcaaggccctgcagaatgctgtggagaaggaggtgcaggccgaggacaacatctacatcgagaacagcctgtatgccacagactag

SEQ ID NO: 328926 - DNA, 672 bp, Artificial Sequence
  derived and/or modified sequence
atgcacccccaggtggtgatcctgagcctcatcctgcacctggccgacagcgtggccggctctgtgaaggtgggcggggaggccggccccagcgtgaccctgccctgccactacagcggggctgtgacctccatgtgctggaacagaggcagctgcagcctcttcacctgccagaatggaattgtgtggaccaacggcacccacgtgacctacaggaaggacacccgctacaagctgctgggggacctgagcagaagagatgtgtccctgaccattgaaaatacagctgtgtctgacagcggcgtgtactgctgccgggtggagcaccggggctggttcaatgacatgaagatcaccgtgtccctggagatcgtgccccccaaggtgaccaccacccccatcgtgaccaccgtgcccaccgtgaccaccgtgaggaccagcaccaccgtgcccaccaccaccaccgtgcccatgaccaccgtgcccaccaccaccgtgcccaccaccatgagcatccccaccaccaccaccgtgctgaccaccatgacagtgtccaccaccacctctgtgcccaccaccaccagcatccccaccaccacctctgtgcctgtgaccaccaccgtgtccacctttgtgccccccatgcccctgccccggcagaaccacgagtag

SEQ ID NO: 328927 - DNA, 1095 bp, Artificial Sequence
  derived and/or modified sequence
atgcacccccaggtggtgatcctgagcctgatcctgcacctggccgactcagtagcggggagtgttaaggtcggaggtgaggctggcccgtccgttactcttccctgtcactactcaggggctgtgacatccatgtgttggaacagaggctcatgtagcctctttacatgtcagaacggcattgtctggacgaatgggactcatgttacatatcggaaggacacaaggtataagctgctcggcgacctgtccagacgtgatgtcagccttactatcgagaacactgccgtaagcgactcaggggtgtactgttgcagagtcgagcatcggggctggttcaacgatatgaagataaccgtctcattggaaatcgttccacccaaagtcaccaccacccctatcgtcacaaccgtccccaccgttacaacagtgcggacatccaccacagtgcctactaccacaaccgtccctatgactacggtacctacaactaccgtgccaaccacaatgagcatccccacaactactacagtgctgaccactatgactgtgagtaccacaacatcggtaccaactacaacttctattcctaccaccaccagcgtcccagttacaaccacagtatccaccttcgttcccccaatgcctctcccccgccaaaaccatgaacctgtggctaccagccctagttcgcctcagcctgctgaaacgcatcctaccaccctccagggagctattcgtagggagcctacttcctctccactgtactcctacacgaccgatggaaacgataccgtcactgaatcatcagacggactttggaacaacaatcaaacccagctcttcctagagcattccttattaacggccaacaccaccaaaggcatctatgcaggggtgtgcatttcagtgctcgtgctcttagctttattgggagtgatcatcgccaaaaaatacttcttcaagaaggaggtccagcagcttagcgtgtcattcagtagccttcagattaaagccctgcaaaatgcggtggagaaggaggtgcaggccgaagacaacatttatattgaaaattccctgtacgccaccgattag

SEQ ID NO: 328928 - DNA, 672 bp, Artificial Sequence
  derived and/or modified sequence
atgcacccccaggtggtgatcctgagcctgatcctgcacctggccgattctgttgccggctccgtcaaggtggggggcgaggccgggcccagtgttacgcttccttgtcactactctggcgctgtcacttctatgtgctggaaccgaggaagctgctcgctcttcacttgccagaacgggatagtgtggaccaacggaactcacgttacctacaggaaggatactcggtataaactcttgggagacctctcccgaagagacgtgtctctgacaattgaaaacacagcagtgtctgactctggcgtttactgttgcagggtggagcaccgcggctggttcaacgacatgaagatcaccgtctccttggagattgttcctcctaaagtgaccaccactcccatcgtcacgacagttcccactgtgactaccgtgcggactagcaccaccgtgccaacaacaacgactgtcccaatgacaaccgtgcccacaaccacagttcctactacaatgagcattcctaccaccacaactgttctgacgacgatgactgtgtcaaccactacgtccgtgccaaccaccactagtatcccaaccaccacatcagtgccagtgactacaactgtgtccaccttcgtgcctcccatgcccctgccaaggcagaatcacgagtag

SEQ ID NO: 328929 - DNA, 1095 bp, Artificial Sequence
  derived and/or modified sequence
atgcacccccaggtggtgatcctgagcctgatcctgcacctggccgacagtgtggccggcagtgtgaaagtcggcggcgaagccggaccttctgtcactctcccatgtcattactcaggggctgttacctccatgtgttggaaccgcggatcctgctccctgttcacctgccagaacggcatcgtctggacaaatggcactcacgtgacctatagaaaggacactagatacaagttactcggcgatctgagccgccgcgacgtgtctctgaccatcgagaataccgctgtctcagactcaggcgtttactgctgtagagtagaacatagaggctggttcaacgacatgaaaattaccgtgtctcttgagattgtgccacctaaggtgacaaccactcccatcgtgactacagtgccaacagtcaccacagtccgcacatccacgaccgtgcccaccaccactaccgtccccatgaccacagtcccaacaactaccgtgccgactactatgtctatcccaactacaacgacagtgctgacaacaatgactgttagtacaactacctcagtgcccactactacaagcattccaaccactacatccgtgcccgtgaccaccacagtttccaccttcgtacccccaatgccattacctaggcagaatcatgaacctgttgctacatctccatctagtccacagcccgccgagacccacccaaccaccttgcagggcgctatccgtcgcgagcccacctcctcaccgctgtattcgtacaccactgatggtaatgacacagtaaccgaatcctccgacggtctatggaataataaccaaactcaactgtttttggaacattccctcctgactgctaacaccaccaagggtatctacgccggagtatgcattagtgtactagtactgctcgctctgttgggggttatcattgccaagaaatacttcttcaaaaaggaggtgcagcagctttcagtgagtttcagtagtctgcagatcaaagccctccagaatgccgtggaaaaagaggtccaagcggaggacaacatttacatcgaaaacagcttgtacgcaacagattag

SEQ ID NO: 328930 - DNA, 1095 bp, Artificial Sequence
  derived and/or modified sequence
atgcacccccaggtggtgatcctgagcctgatcctgcacctggccgatagtgttgctggttctgtcaaggtgggcggtgaagcggggcccagcgtgacactgccctgtcactattctggcgcagtgacttccatgtgttggaaccgtggctcgtgctccctgtttacctgccagaacgggattgtctggactaacggaacccatgttacctacaggaaagatactagatacaaactgctgggcgacttatcccggcgcgatgtgagtttgactatcgaaaatactgccgtttccgattccggagtttactgttgtcgcgtagagcacagaggatggtttaatgatatgaagatcacagtaagcctcgagatcgtgccgcccaaggtaactaccacaccgatcgttacgacagtccccacggtaacgacagtgcgcacgagtaccacggtgcccacaaccaccaccgtccctatgacgacagtcccaaccacgacagttcctacaaccatgtctatacccactactacaactgtgctgacaacgatgaccgtgagtaccacaacaagtgtgccgacaaccacctcgattcccactaccacttccgttcccgtgacaaccacagtttccaccttcgtaccacctatgcccttgccccgccagaatcacgaacccgtcgccacctccccatcaagcccccagccggcggagacccatccaacaactctccaaggagctattcgcagagagccaacttcgtcacccttatatagctacaccacagatggtaacgacaccgtcactgaaagtagtgacggcctgtggaacaacaaccagacccaattatttctcgaacattcgctattaactgctaatacaaccaaaggcatttatgccggagtgtgcatttctgtcctggttttgttggctcttctgggcgtgattattgccaagaagtacttcttcaaaaaggaggtgcagcaactgtcggtgtccttctcttctctgcagattaaagcattacaaaatgcagttgagaaagaggtacaagctgaagacaacatttatatcgagaactccttatacgctactgactag

SEQ ID NO: 328931 - DNA, 1095 bp, Artificial Sequence
  derived and/or modified sequence
atgcaccctcaggttgtgattctttccctgatcctacatctagccgattccgttgccggtagcgtcaaggtgggaggcgaagctgggccttccgtgaccctcccctgtcattatagcggagccgtcacaagcatgtgctggaatcggggatcatgctcactgtttacttgtcagaacggcatcgtttggaccaacgggactcacgtgacataccgcaaagatacacgctataaactgctcggagacttgagtcgcagggatgtgagcctcacaatcgaaaacacagcagtgagcgattccggcgtgtattgctgccgcgtggaacatcgtggttggtttaatgatatgaaaatcaccgtcagtcttgagatagtgcctcccaaggtgaccactacccctattgtgaccacagtgcccactgtgacgactgtacgtacgtccaccactgttcctactaccaccaccgttcccatgacaacggtccctaccacgactgttcccaccacaatgtctataccaacaaccacaaccgttttgacaactatgaccgttagcacgacgactagtgttcctactaccactagcatccccaccactacaagcgtaccggtcacaacgaccgtatcaacctttgtgcctccgatgcctctgcctcgacagaaccacgagccagttgcaacctccccttcatcccctcaacccgcagaaactcatcctacaaccctgcagggggctatacgtcgtgagcccacctcaagtcctttgtactcttacacaaccgacggcaacgacaccgttactgagtccagcgatgggctctggaacaacaatcaaactcagctttttctcgaacattcgctgctgacagctaacacgaccaaagggatctatgcaggagtgtgcatttccgtcttggtgctgttagccctgcttggtgtgataatcgcaaagaaatactttttcaaaaaggaagtgcaacagcttagcgtgagcttttccagtctccagatcaaagccttacagaatgcagtggaaaaggaagtgcaggctgaggacaatatttacatcgagaactctctatacgcgaccgactag

SEQ ID NO: 328932 - DNA, 672 bp, Artificial Sequence
  derived and/or modified sequence
atgcatccccaggtagtgatccttagtctgattttacaccttgccgatagtgtcgccggttctgtcaaggtggggggtgaggccggaccttctgtgactcttccctgtcactactcaggcgcagtgaccagtatgtgctggaacaggggttcctgttccctctttacctgccagaacggtatagtgtggaccaatggtactcatgtcacctatcggaaggacactagatacaagcttctgggagatctgtcccgcagggacgtgtcgctcactattgagaataccgctgtgtctgatagcggggtctattgctgcagagttgaacacagaggatggtttaatgatatgaaaatcacagtgtctctggaaatcgtgccacctaaggtaactaccaccccaatcgtaacaaccgtccccaccgtgaccactgtgcggacatccactaccgtccctaccacaaccacagttcctatgacgaccgtgccgaccacgactgtgcccacgacaatgtcaattcccacaactacaacggtgttgaccactatgacagtgtcgacgacaacatctgtccctactaccacaagcatccccactactacaagtgttccagttactaccacagtcagtactttcgttcctccaatgccactgcctagacaaaatcatgagtag

SEQ ID NO: 328933 - DNA, 1095 bp, Artificial Sequence
  derived and/or modified sequence
atgcacccgcaggtggtaattctgagtctcattttgcacctcgcggattccgttgcaggctctgtgaaggtgggcggagaagctggtccaagcgtcacactgccttgccattatagtggagcggtaacaagtatgtgctggaatagaggaagttgcagtctgtttacctgccagaatggtatagtttggaccaatggaacccacgtgacttacaggaaggacactcgctacaaactattaggcgacttgagcagacgggacgtgtcactgacaattgagaatactgcagtcagtgactcaggggtgtactgttgcagggtcgagcaccgcggttggttcaacgatatgaagataactgtaagcctggagatcgtccccccaaaagtgaccaccactcctatcgtgactacagtccctaccgtcaccacggtgagaaccagcaccactgtgcccactacgaccactgtgcccatgacaacagtcccgacaacaacagttccaacgacaatgtcaatccccactaccactactgttctgaccacgatgactgttagcaccacaacatccgtccccactactacctccatccctacaacgacgtcggtgcccgtgactacgaccgtgagcacatttgttcctccaatgcccctccctcggcagaaccacgagcccgtggccacaagtccgtcctctccacaacctgcagaaacacaccccactactctacaaggcgcaatcagacgggaaccaacttcttccccattgtattcttacacgaccgatggaaacgacacagtgacagagtcttccgacggactctggaataataatcaaacacagctatttcttgaacattctttgctcacagccaataccaccaaggggatttatgctggcgtgtgtatcagcgttctcgtgttgttggctctgctcggcgtcattatcgcgaagaaatacttcttcaagaaggaggtgcaacagttaagcgttagtttttcatccctgcaaataaaagcgttgcagaacgccgtggagaaagaggttcaggccgaagataacatttacattgaaaatagcctgtatgctactgactag

SEQ ID NO: 328934 - DNA, 1095 bp, Artificial Sequence
  derived and/or modified sequence
atgcatccacaagtcgtgattctgagcttgatactccatctcgcagacagcgttgctggctcagtgaaggtggggggtgaggccggaccctcagtcacgttgccctgtcactattcaggggctgtaacttctatgtgctggaaccgcggatcctgcagcctctttacttgtcagaatggcatagtatggactaacggcacccacgttacatataggaaagacactcggtataagctactgggagacctctccaggagagacgttagcttaaccatcgaaaatactgctgtaagtgactccggagtttattgctgccgggtggaacacagggggtggttcaatgacatgaagattaccgtgtcccttgaaattgtgcctcccaaagtgactacaactccaattgttaccaccgttcctaccgtgacaacagtgaggacctcgactacagtgcccacgactacgactgttcccatgaccaccgtcccaactaccactgtcccaactactatgtcaattccaaccacaacaactgtgcttaccaccatgaccgtgtctactaccacatcagtgccgaccaccaccagcatccccacaaccacctccgtgccagtaacaaccacagtatccacgttcgtccccccaatgcccttgccacgacagaaccatgaacccgtcgctactagcccctcctccccacagccggcagaaactcatcctaccactctccagggggctattcggagagagcccacaagctcacccctgtactcctacacgactgacggcaacgacaccgtgactgagagttcggacggactgtggaacaacaaccagacacagttgttcctagagcatagtctgcttactgcaaacactacaaagggcatctatgcaggagtgtgcatctcagtgctcgtgctcctggctttgcttggcgtgataatagccaagaagtatttttttaagaaagaggtgcagcagctgagcgtatccttttcctccttacaaatcaaggccctccagaacgcagtagaaaaggaagtccaggccgaggataacatttacattgagaattcattgtacgcaaccgactag

SEQ ID NO: 328935 - DNA, 1095 bp, Artificial Sequence
  derived and/or modified sequence
atgcacccccaggtggtgatcctgagcctgatcctgcacctggccgacagcgtggccggcagcgtgaaggtgggcggcgaggccggccccagcgtgaccctgccctgccactacagcggcgccgtgaccagcatgtgctggaacagaggcagctgcagcctgttcacctgccagaacggcatcgtgtggaccaacggcacccacgtgacctacagaaaggacaccagatacaagctgctgggcgacctgagcagaagagacgtgagcctgaccatcgagaacaccgccgtgagcgacagcggcgtgtactgctgcagagtggagcacagaggctggttcaacgacatgaagatcaccgtgagcctggagatcgtgccccccaaggtgaccaccacccccatcgtgaccaccgtgcccaccgtgaccaccgtgagaaccagcaccaccgtgcccaccaccaccaccgtgcccatgaccaccgtgcccaccaccaccgtgcccaccaccatgagcatccccaccaccaccaccgtgctgaccaccatgaccgtgagcaccaccaccagcgtgcccaccaccaccagcatccccaccaccaccagcgtgcccgtgaccaccaccgtgagcaccttcgtgccccccatgcccctgcccagacagaaccacgagcccgtggccaccagccccagcagcccccagcccgccgagacccaccccaccaccctgcagggcgccatcagaagagagcccaccagcagccccctgtacagctacaccaccgacggcaacgacaccgtgaccgagagcagcgacggcctgtggaacaacaaccagacccagctgttcctggagcacagcctgctgaccgccaacaccaccaagggcatctacgccggcgtgtgcatcagcgtgctggtgctgctggccctgctgggcgtgatcatcgccaagaagtacttcttcaagaaggaggtgcagcagctgagcgtgagcttcagcagcctgcagatcaaggccctgcagaacgccgtggagaaggaggtgcaggccgaggacaacatctacatcgagaacagcctgtacgccaccgactag

SEQ ID NO: 328936 - DNA, 672 bp, Artificial Sequence
  derived and/or modified sequence
atgcacccccaggtggtgatcctgagcctgatcctgcacctggccgacagcgtggccggcagcgtgaaggtgggcggcgaggccggccccagcgtgaccctgccctgccactacagcggcgccgtgaccagcatgtgctggaacagaggcagctgcagcctgttcacctgccagaacggcatcgtgtggaccaacggcacccacgtgacctacagaaaggacaccagatacaagctgctgggcgacctgagcagaagagacgtgagcctgaccatcgagaacaccgccgtgagcgacagcggcgtgtactgctgcagagtggagcacagaggctggttcaacgacatgaagatcaccgtgagcctggagatcgtgccccccaaggtgaccaccacccccatcgtgaccaccgtgcccaccgtgaccaccgtgagaaccagcaccaccgtgcccaccaccaccaccgtgcccatgaccaccgtgcccaccaccaccgtgcccaccaccatgagcatccccaccaccaccaccgtgctgaccaccatgaccgtgagcaccaccaccagcgtgcccaccaccaccagcatccccaccaccaccagcgtgcccgtgaccaccaccgtgagcaccttcgtgccccccatgcccctgcccagacagaaccacgagtag

SEQ ID NO: 328937 - DNA, 1206 bp, Artificial Sequence
  derived and/or modified sequence
atgcaccctcaggtggtgattctgagcctgatccttcatctggcagatagtgttgccgggtccgtgaaagtggggggagaagccggcccatctgttacactcccatgccactacagcggcgcggtaacctccatgtgctggaatagaggttcctgcagcctctttacatgccagaacggcatcgtgtggacgaacgggacacacgttacgtaccgaaaggacactcgttacaagctccttggcgatctgagtcgacgtgacgtgtccctgacaattgagaatactgctgttagcgatagcggagtgtactgctgtagggtcgaacaccgcggttggttcaacgatatgaagatcacagtttctctggagatagtgccccctaaggtcacaacaacgcctattgtgaccactgttcctacagtaacaacagtgcgtacctctaccaccgtaccaacaacaacaactgttcctatgacgaccgttcccactacaaccgtgccaacaactatgtccattcctactaccaccactgtcctgacaaccatgactgtgagcaccaccacgtccgttccaaccacaacgtccatccccacgacgacttcagttcccgttaccactacagtctctacattcgtgccccccatgcctttgccaagacaaaatcacgagccggttgcgacctcaccatctagcccacagcctgctgaaacccaccctaccactctgcagggggcaatcaggagggaacccaccagcagccctctttacagttataccactgatgggaatgacactgtgactgagtcttccgatggtctgtggaataacaaccagactcaactttttttagagcatagtctgctgaccgcaaatacgactaagggtatttacgctggcgtctgcatatccgtcctggtacttctggccctactcggtgtaatcattgctaagatgtttcacctggcagcatttaaacttaaattgtgcaagatgcaactgaagagaaagtccaaacagaaaaccattagcacactgaggattgtgttcatgcccaggaccaagacacagtggtgtagtctccgggtgtatgcccatgaatgccggcgcctgaacaggcaccaacatattaggcgtctcctggaccctaagaccatctttctgtttcagtttcatttggcattccagcacgtgagtgatactggctag

SEQ ID NO: 328938 - DNA, 1807 bp, Artificial Sequence
  derived and/or modified sequence
attctcctgcctcagcctcccgagtagctgggactacaggcgccagtgaccacgcccggctaattttttgtatttttagtagagacggggtttcacccttttagccaggatggtctcgatctcctgacttcgtgatctgcccgccttggcctcccaaagtgctaggattacaggtttgagccaccgcgcccggccctgtttcctttttgtttgttcccctgataccctgtatcaggaccaggagtcagtttggcggttatgtgtggggaagaagctgggaagtcaggggctgtttctgtggacagctttccctgtcctttggaaggcacagagctctcagctgcagggaactaacagagctctgaagccgttatatgtggtcttctctcatttccagcagagcaggctcatatgaatcaaccaactgggtgaaaagataagttgcaatctgagatttaagacttgatcagataccatctggtggagggtaccaaccagcctgtctgctcattttccttcaggctgatcccataatgcatcctcaagtggtcatcttaagcctcatcctacatctggcagattctgtagctggttctgtaaaggttggtggagaggcaggtccatctgtcacactaccctgccactacagtggagctgtcacatccatgtgctggaatagaggctcatgttctctattcacatgccaaaatggcattgtctggaccaatggaacccacgtcacctatcggaaggacacacgctataagctattgggggacctttcaagaagggatgtctctttgaccatagaaaatacagctgtgtctgacagtggcgtatattgttgccgtgttgagcaccgtgggtggttcaatgacatgaaaatcaccgtatcattggagattgtgccacccaaggtcacgactactccaattgtcacaactgttccaaccgtcacgactgttcgaacgagcaccactgttccaacgacaacgactgttccaatgacgactgttccaacgacaactgttccaacaacaatgagcattccaacgacaacgactgttctgacgacaatgactgtttcaacgacaacgagcgttccaacgacaacgagcattccaacaacaacaagtgttccagtgacaacaactgtctctacctttgttcctccaatgcctttgcccaggcagaaccatgaaccagtagccacttcaccatcttcacctcagccagcagaaacccaccctacgacactgcagggagcaataaggagagaacccaccagctcaccattgtactcttacacaacagatgggaatgacaccgtgacagagtcttcagatggcctttggaataacaatcaaactcaactgttcctagaacatagtctactgacggccaataccactaaaggaatctatgctggagtctgtatttctgtcttggtgcttcttgctcttttgggtgtcatcattgccaaaatgtttcatttagcagccttcaaattaaagctttgcaaaatgcagttgaaaaggaagtccaagcagaagacaatatctacattgagaatagtctttatgccacggactaagacccagtggtgctctttgagagtttacgcccatgagtgcagaagactgaacagacatcagcacatcagacgtcttttagaccccaagacaatttttctgtttcagtttcatctggcattccaacatgtcagtgatactgggtagagtaactctctcactccaaactgtgtatagtcaacctcatcattaatgtagtcctaattttttatgct

SEQ ID NO: 328939 - DNA, 1206 bp, Artificial Sequence
  derived and/or modified sequence
atgcacccccaggtggtgatcctgagcctcatcctgcacctggccgacagcgtggccggctctgtgaaggtgggcggggaggccggccccagcgtgaccctgccctgccactacagcggggctgtgacctccatgtgctggaacagaggcagctgcagcctcttcacctgccagaatggaattgtgtggaccaacggcacccacgtgacctacaggaaggacacccgctacaagctgctgggggacctgagcagaagagatgtgtccctgaccattgaaaatacagctgtgtctgacagcggcgtgtactgctgccgggtggagcaccggggctggttcaatgacatgaagatcaccgtgtccctggagatcgtgccccccaaggtgaccaccacccccatcgtgaccaccgtgcccaccgtgaccaccgtgaggaccagcaccaccgtgcccaccaccaccaccgtgcccatgaccaccgtgcccaccaccaccgtgcccaccaccatgagcatccccaccaccaccaccgtgctgaccaccatgacagtgtccaccaccacctctgtgcccaccaccaccagcatccccaccaccacctctgtgcctgtgaccaccaccgtgtccacctttgtgccccccatgcccctgccccggcagaaccacgagcctgtggccaccagccccagcagcccccagcctgctgagacccaccccaccaccctgcagggcgccatcagaagagagcccaccagcagccccctgtacagctacaccacagatggaaatgacacagtgacagagagcagtgatggcctgtggaacaacaaccagacccagctgttcctggagcacagcctgctgacagccaacaccaccaagggcatctatgctggggtgtgcatctctgtgctggtgctgctggccctgctgggcgtcatcatcgccaagatgttccacctggccgccttcaagctgaagctgtgcaagatgcagctgaagaggaagagcaagcagaagaccatcagcaccctgagaattgtgttcatgcccaggaccaagacccagtggtgcagcctgcgggtgtatgcccacgagtgccggcggctgaacagacaccagcacatccggcggctgctggaccccaagaccatcttcctgttccagttccacctggccttccagcacgtgtctgacaccggctag

SEQ ID NO: 328940 - DNA, 1206 bp, Artificial Sequence
  derived and/or modified sequence
atgcacccccaggtggtgatcctgagcctgatcctgcacctggccgattccgtggctgggtcagtgaaagtgggtggagaggctggcccaagcgttacactcccttgccattattctggcgcggtgacttcaatgtgctggaaccggggctcctgctctttgtttacatgtcaaaacggcatcgtgtggaccaacgggactcatgtgacatacaggaaggatacccgctataaactgctcggggacctcagtaggcgcgacgtgtccctgacaatcgaaaatacagcggtgagcgacagcggcgtctattgttgccgggtcgagcaccgcggctggttcaatgatatgaaaattaccgtgagcttagaaatagtgcctccaaaggtaaccactactcctatcgtcaccacagtgccaactgtcaccaccgttagaaccagtacaacagtacccaccacgacgaccgtaccgatgacaacagtgcctacaaccacagtacctaccaccatgtccatccccactaccacaacagtgctgaccaccatgaccgtgtccacaaccacatctgttcctacgacaactagcatccctacgactacatcagttcctgtgacgactaccgtgtccacctttgtcccccccatgccactgcccaggcagaatcatgaaccagtggctacatcaccatcatccccgcagcccgctgagacccacccaacaaccctgcaaggggccattcggagggagccaacctctagtcccctctactcttacactaccgacggaaacgacacagtgaccgagagtagcgacggcctgtggaacaataaccagactcagttattcctggagcattcactattaactgctaatacgacgaaaggaatttacgccggcgtgtgtatctctgtgctcgtactgctcgctctcttgggcgttattattgcaaaaatgttccaccttgcagcgttcaagctcaagctgtgtaaaatgcaactgaagaggaaaagtaaacaaaagaccatctcgaccttgcggattgtatttatgccacggacgaagacgcagtggtgttcacttagagtgtacgcccatgaatgtaggagattgaacaggcaccaacatattcgacgactcctggatccaaagaccattttcttgtttcagttccatctagcctttcagcacgtcagcgacacgggatag

SEQ ID NO: 328941 - DNA, 1206 bp, Artificial Sequence
  derived and/or modified sequence
atgcacccgcaggtagttatactcagccttatcttgcaccttgccgatagtgtagctggctccgtaaaagtaggtggagaggctggtccctcggtcactctgccatgtcactattccggtgcggtaacaagtatgtgttggaatcgtggctcttgctcactcttcacatgccaaaacggaatcgtctggactaatgggacacatgtcacataccgtaaagatacacgctataagctgctaggtgacctctctaggagggacgttagtttgacaatcgaaaacacggccgttagtgacagcggagtttattgttgccgggtcgaacatcgcggttggttcaacgatatgaagatcacagtctccctggagatcgttccccctaaggtgaccacaacccccatcgtcacgacagtgcctaccgttaccacagtgaggacaagcactacagtgcccacaaccactaccgtgcctatgactaccgttcccaccaccacagtccctacaaccatgtcaatacctaccaccaccaccgtgcttacgacaatgacagtatccaccacaacgagtgtccccacgacaacgtctatccccaccaccacatcagtgccggtcaccaccacagtgtccacctttgtgcccccaatgccgctgccgaggcagaatcatgaaccagtggcaacaagtccaagttcaccacagccagctgagacacatcccacaacactccagggagccatcagaagggagcctactagctctcctctgtactcatatactacagacggcaatgatactgttactgaatcctccgacggattgtggaataataatcagacccaactgttcctcgagcacagcctcttaacagctaataccacaaagggaatttacgccggagtctgcattagcgtgttggttttactcgcattgctgggggtcattattgctaagatgtttcatctcgccgcattcaagttgaaactgtgtaaaatgcaactaaagcgtaaaagcaagcagaagaccatttcaactcttagaatcgtctttatgccacgaactaaaacccagtggtgctcactgagagtctacgcacacgagtgccgtagactcaacagacaccagcacatccggaggctattagaccccaagacaatctttctgtttcaatttcatcttgcattccaacacgtctcagacaccggctag

SEQ ID NO: 328942 - DNA, 1206 bp, Artificial Sequence
  derived and/or modified sequence
atgcacccccaggtggtgatcctgagcctgatcctgcacctggccgacagcgtggccggcagcgtgaaggtgggcggcgaggccggccccagcgtgaccctgccctgccactacagcggcgccgtgaccagcatgtgctggaacagaggcagctgcagcctgttcacctgccagaacggcatcgtgtggaccaacggcacccacgtgacctacagaaaggacaccagatacaagctgctgggcgacctgagcagaagagacgtgagcctgaccatcgagaacaccgccgtgagcgacagcggcgtgtactgctgcagagtggagcacagaggctggttcaacgacatgaagatcaccgtgagcctggagatcgtgccccccaaggtgaccaccacccccatcgtgaccaccgtgcccaccgtgaccaccgtgagaaccagcaccaccgtgcccaccaccaccaccgtgcccatgaccaccgtgcccaccaccaccgtgcccaccaccatgagcatccccaccaccaccaccgtgctgaccaccatgaccgtgagcaccaccaccagcgtgcccaccaccaccagcatccccaccaccaccagcgtgcccgtgaccaccaccgtgagcaccttcgtgccccccatgcccctgcccagacagaaccacgagcccgtggccaccagccccagcagcccccagcccgccgagacccaccccaccaccctgcagggcgccatcagaagagagcccaccagcagccccctgtacagctacaccaccgacggcaacgacaccgtgaccgagagcagcgacggcctgtggaacaacaaccagacccagctgttcctggagcacagcctgctgaccgccaacaccaccaagggcatctacgccggcgtgtgcatcagcgtgctggtgctgctggccctgctgggcgtgatcatcgccaagatgttccacctggccgccttcaagctgaagctgtgcaagatgcagctgaagagaaagagcaagcagaagaccatcagcaccctgagaatcgtgttcatgcccagaaccaagacccagtggtgcagcctgagagtgtacgcccacgagtgcagaagactgaacagacaccagcacatcagaagactgctggaccccaagaccatcttcctgttccagttccacctggccttccagcacgtgagcgacaccggctag

SEQ ID NO: 328943 - protein, 1253 aa, Artificial Sequence
  derived and/or modified sequence
MTTHVTLEDALSNVDLLEELPLPDQQPCIEPPPSSIMYQANFDTNFEDRNAFVTGIARYIEQATVHSSMNEMLEEGHEYAVMLYTWRSCSRAIPKVKCNEQPNRVEIYEKTVEVLEPEVTKLMKFMYFQRKAIERFCSEVKRLCHAERRKDFVSEAYLLTLGKFINMFAVLDELKNMKCSVKNDHSAYKRAAQFLRKMADPQSIQESQNLSMFLANHNRITQCLHQQLEVIPGYEELLADIVNICVDYYENKMYLTPSEKHMLLKVMGFGLYLMDGNVSNIYKLDAKKRINLSKIDKFFKQLQVVPLFGDMQIELARYIKTSAHYEENKSKWTCTQSSISPQYNICEQMVQIRDDHIRFISELARYSNSEVVTGSGLDSQKSDEEYRELFDLALRGLQLLSKWSAHVMEVYSWKLVHPTDKFCNKDCPGTAEEYERATRYNYTSEEKFAFVEVIAMIKGLQVLMGRMESVFNQAIRNTIYAALQDFAQVTLREPLRQAVRKKKNVLISVLQAIRKTICDWEGGREPPNDPCLRGEKDPKGGFDIKVPRRAVGPSSTQLYMVRTMLESLIADKSGSKKTLRSSLDGPIVLAIEDFHKQSFFFTHLLNISEALQQCCDLSQLWFREFFLELTMGRRIQFPIEMSMPWILTDHILETKEPSMMEYVLYPLDLYNDSAYYALTKFKKQFLYDEIEAEVNLCFDQFVYKLADQIFAYYKAMAGSVLLDKRFRAECKNYGVIIPYPPSNRYETLLKQRHVQLLGRSIDLNRLITQRISAAMYKSLDQAISRFESEDLTSIVELEWLLEINRLTHRLLCKHMTLDSFDAMFREANHNVSAPYGRITLHVFWELNFDFLPNYCYNGSTNRFVRTAIPFTQEPQRDKPANVQPYYLYGSKPLNIAYSHIYSSYRNFVGPPHFKTICRLLGYQGIAVVMEELLKIVKSLLQGTILQYVKTLIEVMPKICRLPRHEYGSPGILEFFHHQLKDIIEYAELKTDVFQSLREVGNAILFCLLIEQALSQEEVCDLLHAAPFQNILPRVYIKEGERLEVRMKRLEAKYAPLHLVPLIERLGTPQQIAIAREGDLLTKERLCCGLSMFEVILTRIRSYLQDPIWRGPPPTNGVMHVDECVEFHRLWSAMQFVYCIPVGTNEFTAEQCFGDGLNWAGCSIIVLLGQQRRFDLFDFCYHLLKVQRQDGKDEIIKNVPLKKMADRIRKYQILNNEVFAILNKYMKSVETDSSTVEHVRCFQPPIHQSLATTC

SEQ ID NO: 328944 - DNA, 3762 bp, Artificial Sequence
  derived and/or modified sequence
atgaccacccatgtcacactggaggatgcgctgtcaaatgtcgatctgctggaagagctccccctccccgaccagcagccatgtattgaaccgccgccatcatcaatcatgtaccaggccaattttgacacaaacttcgaggacagaaatgcattcgtgacagggatagcgcgctatattgagcaggccacagtccatagttctatgaacgagatgttagaggagggccacgagtatgcagtgatgctgtacacatggagatcatgttcccgggctatccctaaggtgaagtgtaacgagcagccaaatcgagttgaaatctatgaaaagaccgtggaagtgttggaaccggaggtgaccaagctgatgaagtttatgtactttcagaggaaagctatcgagcggttttgctcagaagttaagagactgtgccacgctgagcgtagaaaggacttcgtgtcggaggcatatctgctcactttgggcaagttcatcaatatgttcgccgtactggacgaactgaaaaacatgaagtgttcagtcaagaatgaccattccgcatacaaaagagccgcacagtttctccgcaagatggcggacccccaaagtattcaggagagccaaaacctttctatgtttctggcgaaccacaacagaattacccagtgcttgcaccagcagcttgaagtgatacccggttacgaggagctcctggcggatatagtcaacatctgcgtcgactactatgaaaataaaatgtacttgaccccttcagaaaagcacatgctgttaaaggtgatgggctttggcctgtatttgatggatggaaatgtctccaacatttacaagcttgacgcaaagaaaaggattaacctgtcgaagatcgacaaatttttcaagcagttacaggtagtgcccttatttggtgacatgcagatcgaactcgctcgctacatcaagacctctgcccattacgaggagaataagagtaagtggacctgtactcagtcttcgatctccccacaatacaacatctgcgagcagatggtgcagattcgtgacgaccatatcaggttcatttccgaactcgccaggtatagcaactccgaagtggtgactggatccgggctggactcccaaaagagcgacgaagaatacagagagctttttgatctagctcttcgcggattgcaactgctcagcaaatggtctgcacatgtgatggaagtatattcctggaagctcgtccatcctactgacaagttctgcaataaagattgccctgggactgccgaggaatatgagcgggccacccgctacaattacacgagcgaggagaagtttgctttcgttgaggtgattgccatgatcaaaggcctgcaggtgctaatgggaagaatggagtcagtattcaaccaagcaattcgtaataccatttacgcggctcttcaggatttcgctcaagtgacgctccgggaacctctgaggcaagctgtgaggaagaagaagaatgtgttgattagtgtgcttcaggctattaggaaaacaatctgcgactgggagggcggcagggagccccctaatgacccttgtctgaggggggaaaaagatccaaagggcgggttcgacatcaaggtcccccggcgtgcggtcggcccaagctctacacagctgtacatggtaaggaccatgctcgagagcctcatcgctgacaagtcaggctctaagaaaaccctgcgcagcagtttggatggacccatcgtgctggccatcgaagattttcataagcagtcatttttttttacacatttgctgaatatttcggaggccctccagcaatgctgtgacctctctcagctgtggttccgggaatttttcttagaattaactatgggccggcggattcaattccccatcgaaatgtccatgccgtggatcctcactgaccatatcttagagaccaaagagccatctatgatggaatacgtgctctatccactggacctgtacaacgatagcgcgtattatgctctaaccaaattcaaaaagcagttcctctatgacgagatcgaagctgaagtaaacttatgttttgatcagtttgtgtacaagctggccgatcagattttcgcctactacaaggccatggcaggtagcgtgctgttagataagaggtttagggcagagtgtaagaattacggagtgattataccataccccccttccaacaggtacgagaccctgttaaagcagaggcacgtgcagctccttggtcgatccatagacctcaaccgactgatcacacagcgtatttccgcagccatgtataaatccctcgaccaagccattagtcgcttcgagtccgaagacctgacatcgatcgtggagctggagtggctgctcgaaatcaaccgcctgactcaccggttgttatgcaagcacatgactctggatagcttcgacgccatgtttcgggaggcaaatcataatgtatccgccccctacggtcgcataacactgcacgtcttttgggagctcaacttcgactttttgccaaattattgttataatggttcaacaaaccggtttgttcgcaccgccataccatttactcaggaaccccaaagagataagcctgccaatgtccagccctattatctttacggctcaaagccccttaatattgcttactctcacatctacagtagctatcggaactttgtcgggccgccccactttaaaactatctgtcgcttgctgggctatcagggaatcgcagtcgtgatggaggagcttctgaagattgtgaaatctctactccagggcaccattctgcagtacgtaaagactcttatcgaggtaatgcctaagatatgtaggctgccaaggcatgagtacgggtccccaggaatcctggaatttttccaccaccagctcaaggacattattgagtacgcggagctaaagactgacgttttccaaagccttcgcgaagtgggaaatgccatcctgttttgccttctgatagaacaggcactttcccaagaggaagtgtgtgatctgttgcacgctgcaccttttcagaacattttgcccagggtgtatattaaagagggggagaggcttgaggtgcggatgaaacggctggaagcaaagtacgctccacttcatttagtaccactgatagaacgccttggaacgcctcagcagattgctatagcacgagagggagacctgttgaccaaagaacgcctttgttgtggcctttctatgtttgaggttatccttactaggatacgctcctatctgcaagaccccatctggaggggaccaccacctacgaacggggtaatgcacgtcgatgagtgtgtggagtttcatagactgtggagcgccatgcagttcgtgtactgcataccggttggaaccaatgagtttaccgctgaacagtgttttggtgatgggctgaactgggctggttgttccatcattgttttgctgggtcaacaacggaggttcgacttgtttgatttttgttatcatttacttaaagtgcagagacaggatggcaaagatgaaatcatcaagaatgtgccactgaagaagatggcagaccggattcggaagtatcagatcctcaataatgaagtcttcgccattcttaacaagtacatgaaatccgttgagactgactcatctactgtcgaacacgtgagatgttttcagcctccaatacaccagtctctggctaccacctgctag

SEQ ID NO: 328945 - DNA, 3762 bp, Artificial Sequence
  derived and/or modified sequence
atgaccacacatgtcactctagaggacgccttgtccaatgttgacttgctagaagagctgccgctccctgatcagcagccctgcattgaaccacccccgtccagtattatgtatcaggcaaattttgacaccaatttcgaggatagaaatgccttcgtaacaggcatcgcgcggtacatagagcaagccactgtacactcctcgatgaacgagatgcttgaggaagggcacgagtatgcagttatgctctacacgtggcgatcctgttccagggctatccccaaggttaagtgtaatgaacaacccaatcgtgttgaaatctatgaaaagacagtcgaggtactcgaaccagaggtgaccaaactgatgaagtttatgtattttcagcggaaggccatcgaaaggttctgcagtgaagtcaagcgcctgtgtcatgcggaacggcggaaggattttgtgagcgaagcctatctgttgacacttggaaagttcattaacatgttcgctgtactggatgaactcaaaaatatgaagtgctcagttaaaaacgaccatagcgcatacaagcgggcggcacagttcctccgcaagatggccgaccctcaatctatccaagagagtcagaatcttagcatgttcttagctaaccacaacaggatcactcagtgtctacatcagcagctggaagtaattccagggtatgaggagctcctggccgatatcgtgaacatttgtgtggactactacgaaaacaaaatgtacctgactccgtcagagaagcatatgctgcttaaggtgatgggctttggcttgtatctgatggatggcaacgtctccaacatctacaagctggatgcaaaaaagcggatcaacctgtcaaagatagataagttcttcaagcagctgcaagtcgttcccttgtttggagacatgcaaatcgaactcgcccggtacataaagacgagcgcacattacgaagaaaacaagagtaagtggacctgcacccaaagcagtatatctccccaatacaacatctgcgaacaaatggtgcagatccgagacgaccacatacgctttatctccgagttggccagatactccaacagcgaggtggtgacgggcagcggtctggactctcaaaagtccgatgaggagtacagagaactttttgacttggccctgagaggcctgcaactgctgagcaagtggagcgctcacgtgatggaggtttactcatggaaactggtgcacccgaccgataaattctgcaacaaagactgtcctggcacagcagaagagtacgagcgggcgacacgatacaattatacctcggaagagaagttcgcttttgtcgaggtgatcgcgatgatcaagggactacaggtcttaatggggcggatggaatctgtatttaaccaggcgattcggaacacaatctatgcggccctgcaagattttgcacaggttaccctgcgggaacctctcaggcaggccgtacgcaagaagaagaatgtactaatctcagtgctgcaggctatccgcaagactatctgcgattgggaaggcggtcgtgaaccaccgaacgatccctgtctgaggggcgaaaaagaccctaaaggggggttcgacattaaggtccctaggagggcggttggacctagctctacacagctgtatatggttaggactatgctggagtctttgatcgcggataagtctggatccaagaagactctccggagctcactcgacggtccaattgtgctggccattgaagattttcacaaacagtccttcttctttacacatttgctgaatatatcagaagccctccagcagtgttgcgatctgagccagctttggttccgcgaattttttttggagctcaccatgggaagacggatacaatttcctattgaaatgagtatgccttggatcctaacggatcacatcctggagacaaaggagccttcaatgatggagtatgtgctctatccactggacctttacaatgattcagcatactacgctctgactaagtttaagaaacagtttctttacgacgagatcgaggcagaagtgaatctgtgcttcgaccaatttgtgtataagctggcagaccagatattcgcctactacaaggcgatggccggaagcgtactacttgataagcgctttcgcgcagagtgcaagaactacggcgtaattattccctaccctccatccaatagatacgagacactgctgaaacagaggcatgtgcagctcctgggccgtagcattgacctcaatcggctgatcacccagcgaataagcgcagctatgtacaagtctctcgaccaggcaattagccgatttgagagcgaggacctcacaagcatcgtagagttggagtggttgctggagataaaccgacttacccacaggctgctctgcaagcacatgacactcgattcattcgatgccatgttcagagaggccaatcacaatgtaagcgcaccttacggaaggataacactccacgtattttgggagctgaattttgactttctgcccaactactgttataatgggagcacaaatagattcgtgcgcaccgccatccccttcacccaggaaccacagcgagataagccagccaacgtacaaccctattacctgtatggtagtaagcctctgaacatagcctattctcacatttatagctcttaccgcaacttcgtgggccctcctcattttaaaaccatttgccgactactgggctaccaaggcattgcggtcgtgatggaggagttgctgaagatcgtgaaatctctgctgcagggcaccattttgcagtacgtgaagaccctgattgaagtgatgcctaagatctgtagactgccaaggcatgagtacggcagccccggaatccttgagttcttccatcatcagctcaaagatatcattgagtacgccgagttgaaaacagacgtattccagtctcttcgagaggtcggcaatgcaattctgttctgcttacttatcgaacaggctctgagccaagaggaggtgtgcgatctcttgcatgccgcccccttccaaaacatcctcccgagagtgtacatcaaagagggtgagcgcctggaggtgaggatgaagaggctggaggccaaatacgctcctttacatttggtaccgctgattgaaagattaggtacaccacagcagatagcaatcgcaagggagggggatctgttgacaaaggagagactgtgctgcggtctgagtatgttcgaggtgatccttacaaggatccgcagctatctccaggaccccatttggcgcggccccccaccaacaaatggagtgatgcacgttgatgagtgcgtggagtttcatcgactgtggagcgctatgcagttcgtgtactgtatccctgttgggacaaacgaatttacagctgagcagtgcttcggagatggacttaactgggccggctgctccatcattgtgctgctgggtcagcagagacggtttgatttgtttgacttctgctatcatctgctgaaagtacagcgccaggatggaaaagatgaaattatcaaaaacgtacctctcaagaagatggctgacaggattcgtaaataccagatcctgaacaatgaggtcttcgcgatactcaacaagtatatgaaaagcgttgagaccgacagcagcaccgtggaacatgtgagatgcttccaaccccctatccaccagagcctcgctacaacttgttag

SEQ ID NO: 328946 - DNA, 3762 bp, Artificial Sequence
  derived and/or modified sequence
atgaccacccacgtgaccctggaggatgccctgagcaatgtggacctgctggaggagctgcccctgcctgaccagcagccctgcatcgagcccccacccagcagcatcatgtaccaggccaactttgacaccaactttgaagatagaaatgcctttgtgacaggcatcgcccgctacatcgagcaggccaccgtgcacagctccatgaatgagatgctggaggagggccatgaatatgctgtgatgctgtacacctggaggagctgcagccgggccatccccaaggtgaagtgcaatgagcagcccaacagagtggagatctatgagaagacagtggaggtgctggagcctgaggtgaccaagctgatgaagttcatgtacttccagaggaaggccatcgagcgcttctgcagcgaggtgaagaggctgtgccacgccgagaggaggaaggactttgtgtctgaggcctacctgctgaccctgggcaagttcatcaacatgtttgctgtgctggatgagctgaagaacatgaagtgcagcgtgaagaatgaccacagcgcctacaagagagctgcccagttcctgaggaagatggctgacccccagagcatccaggagagccagaacctgtccatgttcctggccaaccacaaccgcatcacccagtgcctgcaccagcagctggaggtgattcctggctatgaggagctgctggccgacatcgtgaacatctgtgtggactactatgagaacaagatgtacctgacccccagcgagaagcacatgctgctgaaggtgatgggcttcggcctgtacctgatggatggaaatgtgagcaacatctacaagctggatgccaagaagaggatcaacctgagcaagattgacaagttcttcaagcagctgcaggtggtgcccctgtttggagacatgcagatcgagctggcccgctacatcaagaccagcgcccactatgaggagaacaagagcaagtggacctgcacccagagcagcatcagcccccagtacaacatctgtgagcagatggtgcagatcagagatgaccacatccgcttcatcagcgagctggcccgctacagcaacagcgaggtggtgactggaagtggcctggacagccagaagagtgatgaggagtaccgggagctgtttgacctggccctgcggggcctgcagctgctgagcaagtggagcgcccacgtgatggaggtgtacagctggaagctggtgcaccccacagacaagttctgcaacaaggactgccccggcacagctgaggagtatgaaagagccacccgctacaactacaccagcgaggagaagtttgcctttgtggaggtgattgccatgatcaagggcctgcaggtgctgatgggccgcatggagagcgtcttcaaccaggccatccggaacaccatctatgctgccctgcaggactttgcccaggtgaccctgcgggagcccctgcggcaggccgtgaggaagaagaagaatgtgctgatctctgtgctgcaggccatcaggaagaccatctgtgactgggagggcggccgggagcccccaaatgacccctgcctgcggggggagaaggaccccaagggcggctttgacatcaaggtgccccggcgggctgtgggccccagcagcacccagctgtacatggtgaggaccatgctggagagcctgattgctgacaagagcggcagcaagaagaccctgcggagcagcctggatggccccatcgtgctggccatcgaggacttccacaagcagagcttcttcttcacccacctgctgaacatcagcgaggccctgcagcagtgctgtgacctgagccagctgtggttccgggagttcttcctggagctgaccatgggccgccgcatccagttccccatcgagatgtccatgccctggatcctgacagaccacatcctggagaccaaggagcccagcatgatggagtatgtgctgtaccccctggacctgtacaatgattctgcctactatgccctgaccaagttcaagaagcagttcctgtatgatgaaattgaggccgaggtgaacctgtgctttgaccagtttgtgtacaagctggccgaccagatctttgcctactacaaggccatggccggctctgtgctgctggacaagcgcttccgggcagagtgcaagaactatggagtcatcatcccctacccacccagcaacagatatgagaccctgctgaagcagagacatgtgcagctgctgggccgcagcattgacctgaacagactcatcacccagaggatctctgctgccatgtacaagagcctggaccaggccatcagcagatttgaaagtgaggacctgaccagcatcgtggagctggagtggctgctggagatcaaccggctgacccaccggctgctgtgcaagcacatgaccctggacagctttgatgccatgttccgggaggccaaccacaacgtgtctgccccctacggccgcatcaccctgcacgtgttctgggagctgaactttgacttcctgcccaactactgctacaacggcagcaccaacagatttgtgaggacagccatccccttcacccaggagccccagagggacaagccagccaacgtgcagccctactacctgtatggcagcaagcccctgaacatcgcctacagccacatctacagcagctacagaaactttgtgggccccccccacttcaagaccatctgccgcctgctgggctaccagggcattgctgtggtgatggaggagctgctgaagatcgtgaagagcctgctgcagggcaccatcctgcagtatgtgaagaccctcatcgaggtgatgcccaagatctgccgcctgcccaggcatgaatatggcagccctggcatcctggagttcttccaccaccagctgaaggacatcattgaatatgcagagctgaagacagatgtgttccagagcctgcgggaggtgggcaatgccatcctcttctgcctgctgattgagcaggccctgagccaggaggaggtgtgtgacctgctgcacgccgcccccttccagaacatcctgccccgggtgtacatcaaggagggggagcggctggaggtgaggatgaagaggctggaggccaagtatgcccccctgcacctggtgcccctcatcgagcggctgggcaccccccagcagatcgccatcgcccgggagggggacctgctgaccaaggagcggctgtgctgcggcctgtccatgtttgaggtgatcctgacccgcatccgcagctacctgcaggaccccatctggaggggccccccacccaccaatggagtgatgcacgtggatgaatgtgtggagttccaccggctgtggagcgccatgcagtttgtgtactgcatccctgtgggcaccaatgagttcaccgctgagcagtgctttggagatggcctgaactgggccggctgcagcatcatcgtgctgctgggccagcagaggagatttgacctgtttgacttctgctaccacctgctgaaggtgcagaggcaggacggcaaggatgagatcatcaagaatgtgcccctgaagaagatggctgaccgcatcaggaagtaccagatcctgaacaatgaggtgtttgccatcctgaacaagtacatgaagtctgtggagacagacagcagcacagtggagcacgtgcgctgcttccagccccccatccaccagagcctggccaccacctgctag

SEQ ID NO: 328947 - DNA, 3762 bp, Artificial Sequence
  derived and/or modified sequence
atgaccacccacgtgaccctggaggacgccctgagcaacgtggacttgctagaggagctcccactgccagaccagcagccatgtatcgagccaccaccgtccagcataatgtatcaggctaacttcgatactaacttcgaggaccgcaacgccttcgtgactggaatcgctcgctacatcgaacaggccacagtgcatagtagcatgaacgagatgctggaggaaggccacgagtacgccgtgatgttatacacatggaggagttgctctagggcaattcctaaggttaagtgtaacgaacaaccaaaccgcgtggagatctatgagaaaaccgtcgaggtccttgaacctgaagtcaccaagcttatgaagtttatgtatttccagcgaaaagccatcgagagattctgttctgaagtgaagagactttgccacgctgagagacgcaaagactttgttagtgaggcctatcttttaacactcggaaaattcatcaacatgttcgcagtgctggacgaactcaagaacatgaagtgttcggtgaaaaacgaccactctgcctacaagcgggctgcccaattccttcgtaaaatggccgaccctcagtctatacaggaaagccagaatctgagcatgtttctggctaatcataataggatcacacagtgtctgcaccaacagctggaggtcattcccggatatgaagagctgctggcggatattgtgaatatttgcgttgattactacgagaataaaatgtacctcacgccctctgagaaacatatgctcctgaaagttatgggcttcggcttgtatctcatggacgggaatgtgtccaatatttataagctggacgcaaagaaaaggattaatctgtctaagattgataaattctttaagcagctccaagtcgttcctctctttggcgacatgcaaattgagctggcccgttatattaaaacaagtgctcactacgaagagaacaaatctaagtggacttgcacccagtcctcaattagcccacagtataacatttgtgagcagatggtacaaattcgggacgaccacattagattcatcagcgagctcgcacgctatagtaattccgaggtggttaccggcagcggactcgattcccaaaaatcagatgaggaataccgggagttgttcgatttagccctgaggggactgcagctgctctctaagtggtctgctcacgtgatggaagtgtacagttggaagcttgtgcaccccacagacaaattctgtaacaaagattgcccgggaacagcagaggaatatgagcgggcaacaaggtataactacacaagcgaggagaagtttgctttcgtcgaagtgatcgctatgatcaagggactgcaggtgctgatggggcggatggagtcagtcttcaatcaggccatccgcaacacaatatatgccgcactgcaggacttcgcacaagtgacactgagggagcctctaaggcaagctgtcagaaaaaagaagaatgtcctcatttctgtcctgcaggccataagaaagacaatatgcgattgggaggggggtcgcgaaccccctaacgatccgtgcctgcgtggcgaaaaagaccctaagggggggtttgatattaaggtgcctagacgcgccgtcgggccttcctcgacccagctgtacatggtgcgaacaatgttagagagcctgatcgctgataaatctggatccaaaaagaccctgagatcctccctcgacggtcctatcgtcctggctatcgaggacttccataagcagtctttcttttttactcatctgctcaacatctcggaagctctgcagcaatgttgtgatttgtcacagctctggtttcgggagtttttcctggagctgactatggggaggagaatacagtttccaattgagatgtcgatgccatggatattaaccgatcatatcctggagactaaagagccctccatgatggagtatgtgctctatccccttgatttatacaatgactcagcttattatgccctcacaaagttcaaaaaacagtttctctacgatgagatagaagccgaagttaatttatgctttgatcagttcgtatataagctagccgatcagatattcgcctattacaaggctatggctggatccgtcttgttagacaagaggttccgtgcagagtgtaagaactatggcgtgatcattccatatccacccagcaatagatatgagactctgctcaagcagagacatgtccagctcctcggtaggagtatcgacctaaatagactgattacacagagaatatccgccgctatgtataaatcactggatcaggctattagccgttttgaatccgaggatctgacttcaattgtagaattagaatggcttctcgaaatcaacagactaacacaccgattactgtgtaaacacatgaccctggatagttttgacgcaatgttcagggaagctaaccacaacgtgagtgccccctatggcaggataaccttacatgtgttctgggagctgaactttgactttctgccgaactattgctataatggatctacaaaccgatttgtacgtacagccattccttttacacaggagccacaaagggacaaacccgccaacgtgcagccttactacctctatggatctaagccgttgaacatcgcctactcccatatctattccagttatcggaacttcgtgggtcctccacactttaagacaatatgtaggcttctgggctaccaaggaatcgctgtcgtcatggaagaacttttgaaaatcgtgaagtctctcctccaggggaccatcctgcagtacgtgaaaacattgattgaagtgatgcctaaaatttgtcgcttgcctcgacatgaatatgggagccccggtattctcgaattctttcaccaccagttgaaggacatcattgaatacgcagaactcaagaccgatgtgttccaatctctgcgggaggtggggaatgctattctgttctgtttactcatcgagcaagccctgtcacaggaagaagtgtgtgacctgctgcacgctgccccattccaaaatatactgccgcgcgtctacattaaagaaggggagagactggaagtgagaatgaaacggctggaggcgaagtacgcccccctacatctggtgcctcttattgagagactgggcaccccccaacagattgccatcgcccgcgaaggggacctgctgacgaaggaacgcttatgttgcgggctatccatgttcgaagtgatcctgactcgtatacgatcttacttacaggatcccatctggcggggacctccacccactaacggcgttatgcacgttgacgaatgcgttgagttccaccgcttgtggagcgctatgcagttcgtatactgcatccccgttggcaccaacgagttcaccgctgagcagtgcttcggagatggcctgaattgggctgggtgctcaatcatcgtgcttctgggacagcagcgtcgctttgatctgttcgacttttgttatcatctcctaaaggtgcagcgccaggacgggaaagatgaaattattaaaaacgtccctctgaagaaaatggcagaccggattcggaaataccagatcctgaacaacgaggtgttcgcaatcttgaacaagtatatgaagagcgtagagacagactcatccactgtcgaacatgtcaggtgctttcagccgcccatccaccagtccctcgctactacttgttag

SEQ ID NO: 328948 - DNA, 3762 bp, Artificial Sequence
  derived and/or modified sequence
atgaccacccacgtgaccctggaggacgccctgagcaacgtggaccttctggaggagcttcctctccccgatcagcaaccatgtatcgagcccccaccaagttccattatgtaccaggccaatttcgataccaatttcgaagatcgtaacgcttttgtgacgggcatagcccgatatatcgaacaggctaccgtacatagctccatgaatgaaatgcttgaagaaggtcatgaatatgcagttatgctgtacacgtggcggtcctgttcaagggccattcccaaagttaagtgcaacgaacagccaaatcgcgtcgagatatacgaaaagaccgtggaagtccttgagccagaagttacgaaactgatgaagttcatgtactttcagaggaaagccattgaacggttctgcagtgaagtcaagcgactctgccacgctgaaaggcgcaaggacttcgtttcggaggcttacctgctgacgctaggaaaatttattaacatgttcgccgtgctggatgagttaaagaacatgaagtgctcagtcaaaaacgatcattcagcctataagagggctgcacagtttctccgcaagatggctgatccccaatctattcaagagtcacagaaccttagcatgttcttagcgaaccacaatcggattactcaatgccttcaccagcaactggaagtgattcctggatatgaagagctgctggctgatattgttaacatatgtgtggattattacgagaacaaaatgtatcttacgcctagcgaaaagcacatgttgctaaaggttatgggctttggcctgtacctcatggacggtaatgtgtcaaacatttataagcttgatgccaagaaaagaatcaatttaagcaagatcgataagtttttcaagcaactgcaagttgtgcctctgtttggagatatgcagattgagctcgcgcgctacattaagactagcgcccattatgaggaaaacaagagcaagtggacctgtactcaatcttctatttctccccagtacaacatttgtgaacagatggtgcagatcagagacgaccatatccggtttattagtgaacttgcgcggtattccaactccgaagtagtgacaggttctggactggatagtcagaagagcgacgaggaatatagagagctgtttgacttggctctgagaggcctccagctcctgtccaagtggagcgcccacgtgatggaagtttacagctggaagctggtgcaccccactgacaaattctgcaataaagactgcccaggaacagctgaagaatacgagagagctaccagatacaattatacctccgaagagaaatttgccttcgtcgaagtgatcgctatgataaaaggattacaagtgcttatgggaaggatggaatctgttttcaaccaggctatacgaaatactatctacgctgccctccaggacttcgcacaggtgacgttacgagagcccttgcggcaagcagtgcgtaaaaaaaaaaatgtgcttatatccgtgctgcaggctatccgcaaaacaatttgtgactgggaaggcgggcgggaacctccaaacgatccctgcctgaggggagagaaggatcctaagggcggattcgacatcaaggttccacgccgggctgtgggcccctcatctacccagctgtacatggttcggaccatgttagaatccttaattgctgacaaatcgggttccaagaaaactctccgttcctcactcgatgggcctatagtattagcgatcgaggactttcataagcagtctttcttcttcactcatctcctgaatatctcagaagcgctgcagcaatgttgtgacctcagccagctttggttccgggaattcttcttagaacttaccatgggtcgtcgtatacagtttcccatcgaaatgtctatgccctggatcctgactgatcacattctcgaaacaaaagagccctctatgatggaatacgtactatatcctttggacttatacaatgatagtgcctactatgcgcttaccaaatttaagaagcagtttctttacgatgagatcgaggctgaggtgaatttgtgcttcgaccagttcgtctacaaactggcagatcaaatctttgcttattacaaggccatggctggttctgtcctgctagataagcgctttagggctgagtgcaaaaattatggagttataatcccatatcctccctctaatcgctacgagaccctgctgaaacagaggcacgtccagttgctcgggcggtccatcgacctcaataggctcatcacccagcgaatctcagctgccatgtataagtctctggaccaggcaatcagtcgatttgaaagtgaggacttgacaagcattgtcgagcttgaatggttgctagaaatcaaccgactgactcaccgcctgctgtgtaagcacatgactctggacagttttgatgccatgttcagagaggctaatcacaacgtgtcagccccgtacggacgtatcactttacatgtgttctgggaactgaatttcgactttttacctaattactgttataacggctctacgaataggtttgtgaggaccgccatccccttcacacaggaaccccagagggataaaccagcaaacgtacagccatattacctctatggatctaagcctcttaatatagcctattcccacatttattcctcttacagaaacttcgtgggcccaccccatttcaagacaatatgtaggctgttgggctatcagggcattgccgtggtgatggaagagcttcttaaaattgtcaaatccctgttacaggggacaatattgcaatatgtgaagacgctaattgaggtgatgcctaagatatgtcgactccctaggcatgaatacggttcccccggtatactggagttttttcaccatcagctgaaagatatcatagagtatgcggaacttaagacggacgtatttcagtctctgcgagaggtgggaaatgcaatcctcttttgcctcctgatcgagcaggccctaagccaggaagaggtctgcgacttattgcatgcagcaccgtttcagaatattctccctagggtctatatcaaagagggagagcggctggaagtgaggatgaaaaggttggaggcgaaatacgctccactgcacttggtgcctctgatagagagactgggcacaccccaacagatcgcaatcgcacgagagggcgaccttctgactaaggagagattgtgttgtggtctgtccatgtttgaggtgattcttacaaggatccgtagctacctgcaggaccctatctggagagggcccccacctactaacggcgttatgcacgtggatgagtgcgtggaattccatcggctctggtccgccatgcagtttgtgtattgtatccccgtcggtacgaatgagttcaccgcagaacagtgttttggggacggacttaactgggccggttgcagtatcatcgtgctgcttggtcagcagagacgcttcgatctcttcgacttctgttatcatttacttaaagttcaaaggcaggacgggaaggatgaaattattaaaaacgtaccactgaagaagatggcagatcgcataaggaaataccaaatcctgaataatgaggtgtttgcaattctgaataaatacatgaagtctgtggaaacagacagcagtaccgtagagcacgttaggtgtttccagcctcctatccaccaaagcctcgcaacgacttgttag

SEQ ID NO: 328949 - DNA, 3762 bp, Artificial Sequence
  derived and/or modified sequence
atgacaacccacgtgactctagaggacgccctgtcgaacgttgacctgctggaagaactaccgctgccagaccagcaaccctgcatcgagccaccaccttccagtataatgtatcaggcaaattttgacactaactttgaggaccgcaatgcatttgtaactgggatagcccgatatatcgagcaagcaacggtgcatagctctatgaacgagatgctggaggagggtcatgagtacgccgtcatgctgtacacctggagatcgtgttcccgtgccattcctaaagtgaaatgtaatgaacagccaaatcgagtcgagatatacgaaaagacagttgaggtactagaacctgaggtgaccaagctcatgaaatttatgtactttcagcggaaagctatagagcggttttgcagcgaggtgaaacgcctgtgccatgccgagcgcaggaaagatttcgtaagtgaggcctacctcctcacgctgggcaaatttataaatatgtttgcagtgttagacgaactgaagaacatgaagtgttcggtcaagaacgaccattcagcctataaacgagccgcacagtttcttcgcaaaatggctgacccccagtccatacaggagtcccagaatctctcgatgtttctggccaaccacaatcgcataacacaatgcctgcaccagcaactcgaggtgatcccaggttatgaagaactccttgctgacatagtgaacatatgcgtggattattatgagaataaaatgtacctaaccccctccgagaaacacatgcttctcaaagtaatgggattcggcttatacttaatggacggcaacgtttctaacatatacaaactggatgccaaaaaaagaataaatcttagcaagattgataagttcttcaagcagctgcaggtggtcccgttattcggagacatgcagattgagctggcaaggtacatcaagacttccgcccactacgaggaaaataagtctaagtggacctgcacacagagttcgatatctccacaatacaatatctgtgagcagatggtacaaattcgtgacgaccacatccgattcatctcagagctagcgaggtactctaactccgaagtggtgactgggtctggactggactctcaaaaatctgacgaggagtaccgggagctttttgatttggcactgcgcggattacagctgctctcaaaatggtcagcgcacgttatggaggtctattcttggaaactcgtgcatccaacggacaagttctgtaataaagattgtccaggaaccgcagaggagtatgaacgggctactaggtacaattatacatcagaggaaaaattcgcctttgtcgaggtgattgctatgatcaaaggcttgcaggtactgatgggcagaatggaatctgtatttaatcaagctatccgcaacaccatctatgcagccctgcaggatttcgcacaggtaacattacgagaacctctgcgccaggctgtgagaaagaagaagaatgtcctgatatctgtgctgcaagccatcagaaagaccatttgtgactgggaagggggacgcgaacctcctaatgacccatgtttgcgcggagaaaaagatccgaagggaggcttcgatatcaaagtaccacgcagagcagtgggtcccagcagcacccagctctacatggttcggactatgctcgaaagcctcattgccgacaagagtgggtccaaaaagaccttaagaagctcccttgatggtcctatagtgctggccatcgaggattttcacaagcagagcttttttttcacacatctgctcaacatctcggaagccctccaacagtgttgcgacctgagtcagctgtggttcagagagtttttcttggaattaaccatgggcagacggatacaattccctatcgagatgtctatgccttggattctaactgatcatatcttggaaaccaaggagccctccatgatggagtacgtgctgtaccctctggatctctacaatgactccgcctactatgctctgaccaaattcaagaagcagttcctctacgatgaaatcgaagccgaggtgaacctgtgttttgaccagttcgtgtataaacttgccgaccagattttcgcttattataaagctatggcgggaagcgtcctactcgataaaaggtttcgggcagaatgtaaaaactacggtgtgattatcccgtatcctcccagcaatcggtatgaaaccctcctgaagcagaggcacgtacagcttttagggaggagtattgatctgaaccggctcatcacacagcgcattagcgccgcaatgtacaagtccctggaccaggccatcagtagatttgagagcgaggacttaacatctatcgtggagcttgagtggctcctcgagattaataggctcactcacagattgttgtgcaaacacatgacactagactcgtttgacgcgatgtttcgtgaggctaatcacaacgtttccgctccatacggacgcatcacactacatgtgttctgggaacttaactttgacttcctacctaattactgctataacggatccaccaacaggtttgttaggaccgcgataccctttacacaagaaccgcaacgggataaaccggcaaacgtgcaaccttattacctttacgggagtaaacctcttaacattgcatactcgcacatttattcttcttacagaaacttcgttggccctccccatttcaaaaccatctgtcggttgctgggctaccaggggattgcagtagtaatggaagaattattgaagatagtgaaaagtctgctgcaagggacaatcctgcagtacgttaagacattgatcgaagtgatgcctaagatctgcagattgcccagacacgagtacggctctccaggtatcctcgagtttttccaccaccaactgaaagatattattgagtatgccgagctgaagaccgatgtgtttcagtcactgagagaggtagggaacgctattttgttctgcctccttatagagcaggccttgtcacaggaggaagtttgcgacctgctgcacgccgcaccattccaaaatatcttgccacgcgtgtatattaaagaaggtgaaaggctggaggtccgtatgaaacgccttgaagcaaagtacgccccactacaccttgtcccattgattgaacggctggggactccgcagcagatagctatcgctcgagagggcgacttgctcaccaaagagcggttatgttgtggtctctcgatgttcgaggtcatacttacacggattagatcttatttgcaggatcccatctggcggggtcccccaccgacaaatggcgtaatgcatgtggacgagtgcgttgagtttcatagactctggagcgctatgcagttcgtgtactgcatccccgtgggaactaacgaatttaccgcagaacagtgctttggagatggcctcaattgggcaggctgcagtatcattgttttgttgggtcagcaacgaagatttgacctgttcgacttctgttaccatctgttaaaggtccaacggcaggacgggaaagatgagatcattaaaaacgtgcctctgaagaagatggctgaccggatccgtaagtaccaaatcctgaacaacgaggtatttgcaattctgaacaaatacatgaaatcagtggagactgattcgagtaccgtggaacacgtgcgatgtttccagccaccgatccaccaatccttagctaccacatgctag

SEQ ID NO: 328950 - DNA, 3762 bp, Artificial Sequence
  derived and/or modified sequence
atgaccactcatgtcaccctggaagacgctctcagcaatgtggatctgctcgaggagctgcctctcccagatcagcaaccttgcatcgagcccccaccttcttccatcatgtaccaggccaattttgacaccaactttgaagaccggaacgcctttgtgaccggaattgctaggtatattgaacaggcaacggtccattccagtatgaacgagatgctggaggaaggacacgagtacgccgtgatgctgtacacctggaggagttgtagtagagctattcccaaagttaaatgcaacgagcaaccgaacagagtggaaatctacgagaagacagtcgaagtgctggaaccagaggtgacgaagctaatgaaatttatgtactttcagcgcaaagctatcgagaggttctgtagtgaagtcaagagattgtgtcatgctgagagacggaaagatttcgtgtccgaagcatatctactgaccctagggaaatttataaatatgtttgctgtactcgatgaactcaagaacatgaaatgctctgtgaaaaatgatcactcagcgtacaagcgagctgcccagttcctgcgtaagatggctgacccccaaagcatccaggaatcacaaaatctttctatgttcctcgcaaatcataatcggatcactcagtgtctccaccagcagttagaggtgattcccggatacgaggagctcttggctgatattgttaacatatgcgtggactactacgagaacaagatgtatctcaccccatcagagaaacacatgttactgaaagttatggggtttggcctgtacctcatggatggcaacgtgagcaatatttacaagctggatgccaagaagcggattaacctgtccaaaatcgacaaattttttaagcagctacaggtagtgccattatttggggatatgcagatagagctggcacgttatattaagacgagtgctcactatgaggagaacaagtcgaagtggacgtgtacacagtcatccatctcaccgcagtacaacatttgtgaacagatggtccagattagggacgatcatatccggttcatctccgagctggcccgatactcgaattctgaagtggtcacgggatccggcctggacagccagaaatcggatgaagaatatcgagagctgtttgatctcgcgctcagagggcttcagctgctgagcaagtggtctgctcacgtcatggaggtctactcctggaaattggtacatcccactgacaagttttgtaataaagactgccctggtacggcagaggagtacgagagagctactcgatacaattacaccagcgaagaaaagtttgcgtttgtggaagtgatagcaatgatcaagggactgcaagttttgatgggacgtatggagagcgtattcaatcaggccatccgtaacaccatatacgccgcactgcaggatttcgcccaggtgacactgcgggaaccattgcgccaagccgtgcgcaaaaaaaagaatgtactgatctcagtgctccaggccatacgaaagaccatctgcgattgggaggggggtcgagaaccccctaacgatccgtgccttaggggtgagaaggatccaaagggaggctttgatataaaggttcccagaagggcggtgggaccctcgtccactcagctgtacatggtccggaccatgcttgagagtcttatcgctgacaagtcaggatctaaaaagacgctccggagctcgctggatgggcctatagtgctcgcgatcgaagattttcataagcagtcctttttctttacccatctgctgaacattagcgaggcgctgcaacagtgttgtgatctaagccagctttggtttcgcgagttcttcctcgagcttacaatggggcgtaggatccagtttcccattgaaatgagcatgccttggatactcaccgaccatattttggaaacaaaggaaccaagtatgatggaatacgtcctctatccattggacttatacaacgatagtgcctattacgccttaaccaaatttaagaagcagttcctttacgatgagatcgaggcagaagtgaacctgtgcttcgaccagttcgtttacaagctcgctgatcagattttcgcgtactataaggccatggccggttcagtcttgcttgataagaggttccgcgcagaatgcaagaactatggcgtgatcatcccctatccaccatcaaatcggtatgagactttgcttaaacaacgacacgttcaacttctcggacggagcatcgacttgaatcgcctcattacccagcgaattagcgcagccatgtacaagagcctggatcaagcaatttctagatttgagtcagaagatctgacgtctatagtagagctggaatggctgctggaaatcaatcgactgacccaccggctgttgtgtaagcatatgacgttagactcttttgacgcaatgttccgtgaagccaatcataacgtaagtgccccatacggccgtatcactctgcacgtgttttgggagctcaacttcgactttcttcccaattattgctacaatgggagcactaacagattcgtgaggaccgctattccatttacccaggaaccacagcgggacaaacccgcaaatgttcaaccgtactacttatacggatcgaagccgctgaatatcgcctattcccatatttactcttcctaccgcaatttcgtcggacctccacattttaagaccatttgccggttgttgggataccagggcatcgccgttgtcatggaggagctgctgaagattgtaaagagcctgcttcaggggaccatactccagtatgtaaaaacgttgattgaagtaatgccgaagatctgcaggctgccccgtcatgaatacggatcccctggtatcttggagttcttccaccaccagctaaaggacatcatcgagtatgcggaacttaagactgacgtctttcagagtcttcgtgaggttggcaacgcaattctgttttgtctccttatagagcaggccctgtctcaggaagaagtatgcgacctgctgcacgccgcaccattccagaatatattaccacgagtgtacattaaggagggtgagagacttgaggtgcgtatgaaaaggctcgaagctaaatacgctcctctccatctggttccactgattgagcggctcggtacaccacaacagatcgctatcgcccgtgagggagatttgctgaccaaagagcggctgtgctgcggcctgagcatgttcgaggtgattctgacacggataagatcctatttgcaggatccaatctggagaggcccacctccaactaatggggtgatgcacgtagacgagtgtgtggaattccatcgcctttggtcagcaatgcaattcgtgtattgcattcccgttggaacaaacgaatttactgccgaacagtgtttcggtgacggtttgaattgggcgggatgcagtatcattgtgttactcggccaacagaggagattcgacctgtttgacttctgttaccacctgctgaaggtacagaggcaggacggaaaggatgagatcatcaagaacgttcctctaaaaaagatggccgaccggatcagaaagtaccagatcctgaacaatgaagtgttcgccatcctaaataaatacatgaaatctgttgagacagatagtagcaccgtggagcacgtgcgctgctttcaaccgcctattcatcagtcactcgctactacctgctag

SEQ ID NO: 328951 - DNA, 6791 bp, Artificial Sequence
  derived and/or modified sequence
ggacccgccgcagagccaggtaagcggccctcgcaggcctcgggccgggcacggggactaggatgccgccggggacggggatgaggccgtgaggatgcgcgaagggccgccccctctcccggcccgcggggggcgctcggcgctgtgcccgggctagcccgaggcccggcctcaggccccacgcggcccctttccccctcggacccaccgtgcgtcccgcggcacggaccctctgcccgggaggcgcgggcacatcgcggagctccggcgcggcggcgggggagccgcagcagcaggtgcgcggcctgggccggagccgccagcccgggaggaggcggtgctaatctcagggaccggagacacctgcagcggccgcgagcccggcagcggcgacatcctcgagtccagtgcagaatacagaaactgcagccatgaccacgcacgtcaccctggaagatgccctgtccaacgtggacctgcttgaagagcttcccctccccgaccagcagccatgcatcgagcctccaccttcctccatcatgtaccaggctaactttgacacaaactttgaggacaggaatgcatttgtcacgggcattgcaaggtacattgagcaggctacagtccactccagcatgaatgagatgctggaggaaggacatgagtatgcggtcatgctgtacacctggcgcagctgttcccgggccattcccaaggtgaaatgcaacgagcagcccaaccgagtagagatctatgagaagacagtagaggtgctggagccggaggtcaccaagctcatgaagttcatgtattttcagcgcaaggccatcgagcggttctgcagcgaggtgaagcggctgtgccatgccgagcgcaggaaggactttgtctctgaggcctacctcctgacccttggcaagttcatcaacatgtttgctgtcctggatgagctaaagaacatgaagtgcagcgtcaagaatgaccactctgcctacaagagggcagcacagttcctgcggaagatggcagatccccagtctatccaggagtcgcagaacctttccatgttcctggccaaccacaacaggatcacccagtgtctccaccagcaacttgaagtgatcccaggctatgaggagctgctggctgacattgtcaacatctgtgtggattactacgagaacaagatgtacctgactcccagtgagaaacatatgctcctcaaggtgatgggctttggcctctacctaatggatggaaatgtcagtaacatttacaaactggatgccaagaagagaattaatcttagcaaaattgataaattctttaagcagctgcaggtggtgccccttttcggcgacatgcagatagagctggccagatacattaagaccagtgctcactatgaagagaacaagtccaagtggacgtgcacccagagcagcatcagcccccagtacaatatctgcgagcagatggttcagatccgggatgaccacatccgcttcatctccgagctcgctcgctacagcaacagtgaggtggtgacgggctcagggctggacagccagaagtcagacgaggagtatcgcgagctcttcgacctagccctgcggggtctgcagcttctatccaagtggagcgcccacgtcatggaggtgtactcttggaagctggttcatcccacagacaagttctgcaacaaggactgtcctggcaccgcggaggaatatgagagagccacacgctacaattacaccagtgaggaaaaatttgccttcgttgaggtgatcgccatgatcaaaggcctgcaggtgctcatgggcaggatggagagcgtcttcaaccaggccatcaggaacaccatctacgcggcattgcaggacttcgcccaggtgacgctgcgtgagcccctgcggcaggcggtacggaagaagaagaatgtcctcatcagcgtcctacaggcaattcgaaagaccatctgtgactgggagggagggcgagagccccctaatgacccatgcttgagaggggagaaggaccccaaaggtggatttgatatcaaggtgccccggcgtgctgtggggccatccagcacacagctgtacatggtgcggaccatgcttgaatcactcattgcagacaaaagcggctccaagaagaccctgaggagcagcctggatggacccattgtcctcgccatagaggactttcacaaacagtccttcttcttcacacatctgctcaacatcagtgaagccctgcagcagtgttgtgacctctcccagctctggttccgagaattcttcctggagttaaccatgggccgacgaatccagttccccatcgagatgtccatgccctggattctaacggaccatatcctggaaaccaaagaaccttccatgatggagtatgtcctctaccctctggatctgtacaacgacagcgcctactatgctctgaccaagtttaaaaagcagttcctgtacgatgagatagaagctgaggtgaacctgtgttttgatcagtttgtctacaagctggcagaccagatctttgcttactacaaagccatggctggcagtgtcctgttggataaacgttttcgagctgagtgtaagaattatggcgtcatcattccgtatccaccgtccaatcgctatgaaacactgctgaagcagagacacgtccagctgttgggtagatcaattgacttgaacagactcattacccagcgcatctctgccgccatgtataaatccttggaccaagctatcagccgctttgagagtgaggacctgacctccattgtggagctggagtggctgctggagattaaccggctcacgcatcggctgctctgtaagcatatgacgctggacagcttcgatgccatgttccgagaggccaatcacaatgtgtccgccccctatggccgtatcaccctgcatgtcttctgggaactgaactttgactttctccccaactactgctacaatgggtccactaaccgttttgtgcggactgccattcctttcacccaagaaccacaacgagacaaacctgccaacgtccagccttattacctctatggatccaagcctctcaacattgcctacagccacatctacagctcctacaggaatttcgtggggccacctcatttcaagactatctgcagactcctgggttatcagggcatcgctgtggtcatggaggaactgctaaagattgtgaagagcttgctccaaggaaccattctccagtatgtgaaaacactgatagaggtgatgcccaagatatgccgcttgccccgacatgagtatggctccccagggatcctggagttcttccaccaccagctgaaggacatcattgagtacgcagagctcaaaacagacgtgttccagagcctgagggaagtgggcaatgccatcctcttctgcctcctcatagagcaagctctgtctcaggaggaggtctgcgatttgctccatgccgcacccttccaaaacatcttgcctagagtctacatcaaagagggggagcgcctggaggtccggatgaaacgtctggaagccaagtatgccccgctccacctggtccctctgatcgagcggctggggacccctcagcaaatcgccattgctcgcgagggtgacctcctgaccaaggagcggctgtgctgtggcctgtccatgttcgaggtcatcctgacccgcattcggagctacctgcaggaccccatctggcggggcccaccgcccaccaatggcgtcatgcacgtcgatgagtgtgtggagttccaccggctgtggagcgccatgcagttcgtgtactgcatccctgtgggaaccaacgagttcacagctgagcagtgtttcggcgatggcttgaactgggctggttgctccatcattgtcctgctgggccagcagcgtcgctttgacctgttcgacttctgttaccacctgctaaaagtgcagaggcaggacgggaaggatgaaatcattaagaatgtgcccctgaagaagatggccgaccggatcaggaagtatcagatcttgaacaatgaggtttttgccatcctgaacaaatacatgaagtccgtggagacagacagttccactgtggagcatgtgcgctgcttccagccacccatccaccagtccttggccaccacttgctaagcagaagatcctgcagacccttatctggaggaggaagagaagcaggagagagaaagccacagccagcctgccataggatccaactggacaacgtgtgggatggacctggaaacaagcacctccccaaacacatcaccactccctagggcggggcctgtgcatgctctcccatgacatctccatgctggtttctccatagcataaatgaaaaaaaaaaaaaaaaagtaaacagggcagtgtgtgctttttcttttctcccccctcaactatattaagaactcctagtttcaccctttctccatcccatcatcccacctatctgtggttgcttcccaagacctcctcccaagatagacatctcctacccagtgcccttgtgtgaccccaggactcaagtctcagactgtgaacagatgtggccatgcccagagacgccagcctggccagaagggcatgcctcagcttactacttcatctctcctggttccctccctgcagtgccccgggtgtcatcttctcccactctgggtaccagggattctaccacataggcttcccaaagccccattctaactcccctctctcagggaagccctagagagaggtccaaaaagcattcacagctgtatcacactctatgcaggtggggtaggagactgatcaggcctgctgtggggaagcagtatgtatgaacacagccagaaatgtcatagtccaaacaggatgctttcaggccatctcagctgcttgatggtgagatggttcccttattccttcaggaaaggcttagcattgggccacataggggaagcagctttgaacaaatcagtcatagcactgcctatagcattagccagtgaccaaattagggacaacgtcttggcacagaattgcttatcaaggaacatttccacaagaaagaaaatattaaggggttatttccacagaagcccaaaacgtcttggaaacacagaggtgaggaggaggaatagtaattgtcaatgagcttttaataccaagatacaccccctgcccccaaagaagagtcctcttttagggaatcagaaccttcattgtcctagaagctgaaagattcttggaacattttagcttttactctcaacttgctgttctctttacattccttaagttagactttcgggtgtggcttctctcccaggggtaacatttacttccattttctagactgaaccaaaagtcttctgcagaatctcccaccgagtgtggtaagaaggaaggacaaaaggctttaggatataaatttcatgttacagagcatgtcattgtcaaaggaaatctgtggccctgagattttaagaacataaaatgtgacatttgatatttctccagcccagggaagtaagatggttagcaatggttgccttaatcaaatggtcccatttttaaccccaaaggaagtgcccacagcaagaggtttgtgtgatgcacttatgtcctccggtgaggaaagggggccacatatgaaaggccccttaggtcagatcctgagagtagcacatttgagtgcagattcctgggccccacctcaaacctactaattctgaatctctgggaatagggccaggaaatctgccctttctacaaactacccaagttgttctgttgcacatcaatgtttgggaaccactgctgtaagggaatcattctggtcaccttgagctttgagctaccactaagccatgaaagaaaatacatcatacagggaagagagaagggaggaggttccaagtagtaactggcagatcctcctgtctggaggtaccaccttctattctggtttctgacttttccttcttgatgaccatagatgtgttccagaggcaaaagagacacattatcccagatggcagaacatgctttcaaaacatataaaatgtcaaagttccagatccttctacatctttagtcctgtctgaggatggtagctggctctctgtagctgatagatggctagagttccatccaaatccttgaccacgacttcatggagatttgaataatctatttgatgagatttctatttcaataacccacctctctcaccccacattcatatccctaaatttgaccctctgggccgagtcacattaccttcaggagacttgatcccagtagactgaggtcttccctttcagcagaaagatttcatttccctggcttgccagtggcactgatttccgaacacccaatgagtttaatattctttcctccttggcattactgccccagcctctttttattttttttgtgtgtgtctaataaccaggaaaaaaataaagcttaggttttaaaaagttttaaaaataatctgtttcagaaactgtcaaatgtaccatatttgtattaagagttgttgggaatttttgtacaatgaatttacatttatttatggtgacatatttacgcttgtgatcaaataatgatgttaaattcttaaatcatatttgctatgcagctgaagatgatattttgatttgtattttgggggtacctgtgttgagttgataaacatttccatcttcattaaaactgcttccaaactagtaaaaccagcaa

SEQ ID NO: 328952 - DNA, 6615 bp, Artificial Sequence
  derived and/or modified sequence
ggaagggcctcttcctctgtgagaattcagcattttgcaaccatccaaaaatgttgagggcatgctttgcttccagggcagacagagcagcacagtgagcatgggacacaggatccctgacttgctgtgtgcccttaaaccagccactacctctctgacgttcaaaattgagcaatggaaggcagcctgcccaactgttacctgcctgtcatcatgaaagcctgcggatgagtgcagaatacagaaactgcagccatgaccacgcacgtcaccctggaagatgccctgtccaacgtggacctgcttgaagagcttcccctccccgaccagcagccatgcatcgagcctccaccttcctccatcatgtaccaggctaactttgacacaaactttgaggacaggaatgcatttgtcacgggcattgcaaggtacattgagcaggctacagtccactccagcatgaatgagatgctggaggaaggacatgagtatgcggtcatgctgtacacctggcgcagctgttcccgggccattcccaaggtgaaatgcaacgagcagcccaaccgagtagagatctatgagaagacagtagaggtgctggagccggaggtcaccaagctcatgaagttcatgtattttcagcgcaaggccatcgagcggttctgcagcgaggtgaagcggctgtgccatgccgagcgcaggaaggactttgtctctgaggcctacctcctgacccttggcaagttcatcaacatgtttgctgtcctggatgagctaaagaacatgaagtgcagcgtcaagaatgaccactctgcctacaagagggcagcacagttcctgcggaagatggcagatccccagtctatccaggagtcgcagaacctttccatgttcctggccaaccacaacaggatcacccagtgtctccaccagcaacttgaagtgatcccaggctatgaggagctgctggctgacattgtcaacatctgtgtggattactacgagaacaagatgtacctgactcccagtgagaaacatatgctcctcaaggtgatgggctttggcctctacctaatggatggaaatgtcagtaacatttacaaactggatgccaagaagagaattaatcttagcaaaattgataaattctttaagcagctgcaggtggtgccccttttcggcgacatgcagatagagctggccagatacattaagaccagtgctcactatgaagagaacaagtccaagtggacgtgcacccagagcagcatcagcccccagtacaatatctgcgagcagatggttcagatccgggatgaccacatccgcttcatctccgagctcgctcgctacagcaacagtgaggtggtgacgggctcagggctggacagccagaagtcagacgaggagtatcgcgagctcttcgacctagccctgcggggtctgcagcttctatccaagtggagcgcccacgtcatggaggtgtactcttggaagctggttcatcccacagacaagttctgcaacaaggactgtcctggcaccgcggaggaatatgagagagccacacgctacaattacaccagtgaggaaaaatttgccttcgttgaggtgatcgccatgatcaaaggcctgcaggtgctcatgggcaggatggagagcgtcttcaaccaggccatcaggaacaccatctacgcggcattgcaggacttcgcccaggtgacgctgcgtgagcccctgcggcaggcggtacggaagaagaagaatgtcctcatcagcgtcctacaggcaattcgaaagaccatctgtgactgggagggagggcgagagccccctaatgacccatgcttgagaggggagaaggaccccaaaggtggatttgatatcaaggtgccccggcgtgctgtggggccatccagcacacagctgtacatggtgcggaccatgcttgaatcactcattgcagacaaaagcggctccaagaagaccctgaggagcagcctggatggacccattgtcctcgccatagaggactttcacaaacagtccttcttcttcacacatctgctcaacatcagtgaagccctgcagcagtgttgtgacctctcccagctctggttccgagaattcttcctggagttaaccatgggccgacgaatccagttccccatcgagatgtccatgccctggattctaacggaccatatcctggaaaccaaagaaccttccatgatggagtatgtcctctaccctctggatctgtacaacgacagcgcctactatgctctgaccaagtttaaaaagcagttcctgtacgatgagatagaagctgaggtgaacctgtgttttgatcagtttgtctacaagctggcagaccagatctttgcttactacaaagccatggctggcagtgtcctgttggataaacgttttcgagctgagtgtaagaattatggcgtcatcattccgtatccaccgtccaatcgctatgaaacactgctgaagcagagacacgtccagctgttgggtagatcaattgacttgaacagactcattacccagcgcatctctgccgccatgtataaatccttggaccaagctatcagccgctttgagagtgaggacctgacctccattgtggagctggagtggctgctggagattaaccggctcacgcatcggctgctctgtaagcatatgacgctggacagcttcgatgccatgttccgagaggccaatcacaatgtgtccgccccctatggccgtatcaccctgcatgtcttctgggaactgaactttgactttctccccaactactgctacaatgggtccactaaccgttttgtgcggactgccattcctttcacccaagaaccacaacgagacaaacctgccaacgtccagccttattacctctatggatccaagcctctcaacattgcctacagccacatctacagctcctacaggaatttcgtggggccacctcatttcaagactatctgcagactcctgggttatcagggcatcgctgtggtcatggaggaactgctaaagattgtgaagagcttgctccaaggaaccattctccagtatgtgaaaacactgatagaggtgatgcccaagatatgccgcttgccccgacatgagtatggctccccagggatcctggagttcttccaccaccagctgaaggacatcattgagtacgcagagctcaaaacagacgtgttccagagcctgagggaagtgggcaatgccatcctcttctgcctcctcatagagcaagctctgtctcaggaggaggtctgcgatttgctccatgccgcacccttccaaaacatcttgcctagagtctacatcaaagagggggagcgcctggaggtccggatgaaacgtctggaagccaagtatgccccgctccacctggtccctctgatcgagcggctggggacccctcagcaaatcgccattgctcgcgagggtgacctcctgaccaaggagcggctgtgctgtggcctgtccatgttcgaggtcatcctgacccgcattcggagctacctgcaggaccccatctggcggggcccaccgcccaccaatggcgtcatgcacgtcgatgagtgtgtggagttccaccggctgtggagcgccatgcagttcgtgtactgcatccctgtgggaaccaacgagttcacagctgagcagtgtttcggcgatggcttgaactgggctggttgctccatcattgtcctgctgggccagcagcgtcgctttgacctgttcgacttctgttaccacctgctaaaagtgcagaggcaggacgggaaggatgaaatcattaagaatgtgcccctgaagaagatggccgaccggatcaggaagtatcagatcttgaacaatgaggtttttgccatcctgaacaaatacatgaagtccgtggagacagacagttccactgtggagcatgtgcgctgcttccagccacccatccaccagtccttggccaccacttgctaagcagaagatcctgcagacccttatctggaggaggaagagaagcaggagagagaaagccacagccagcctgccataggatccaactggacaacgtgtgggatggacctggaaacaagcacctccccaaacacatcaccactccctagggcggggcctgtgcatgctctcccatgacatctccatgctggtttctccatagcataaatgaaaaaaaaaaaaaaaaagtaaacagggcagtgtgtgctttttcttttctcccccctcaactatattaagaactcctagtttcaccctttctccatcccatcatcccacctatctgtggttgcttcccaagacctcctcccaagatagacatctcctacccagtgcccttgtgtgaccccaggactcaagtctcagactgtgaacagatgtggccatgcccagagacgccagcctggccagaagggcatgcctcagcttactacttcatctctcctggttccctccctgcagtgccccgggtgtcatcttctcccactctgggtaccagggattctaccacataggcttcccaaagccccattctaactcccctctctcagggaagccctagagagaggtccaaaaagcattcacagctgtatcacactctatgcaggtggggtaggagactgatcaggcctgctgtggggaagcagtatgtatgaacacagccagaaatgtcatagtccaaacaggatgctttcaggccatctcagctgcttgatggtgagatggttcccttattccttcaggaaaggcttagcattgggccacataggggaagcagctttgaacaaatcagtcatagcactgcctatagcattagccagtgaccaaattagggacaacgtcttggcacagaattgcttatcaaggaacatttccacaagaaagaaaatattaaggggttatttccacagaagcccaaaacgtcttggaaacacagaggtgaggaggaggaatagtaattgtcaatgagcttttaataccaagatacaccccctgcccccaaagaagagtcctcttttagggaatcagaaccttcattgtcctagaagctgaaagattcttggaacattttagcttttactctcaacttgctgttctctttacattccttaagttagactttcgggtgtggcttctctcccaggggtaacatttacttccattttctagactgaaccaaaagtcttctgcagaatctcccaccgagtgtggtaagaaggaaggacaaaaggctttaggatataaatttcatgttacagagcatgtcattgtcaaaggaaatctgtggccctgagattttaagaacataaaatgtgacatttgatatttctccagcccagggaagtaagatggttagcaatggttgccttaatcaaatggtcccatttttaaccccaaaggaagtgcccacagcaagaggtttgtgtgatgcacttatgtcctccggtgaggaaagggggccacatatgaaaggccccttaggtcagatcctgagagtagcacatttgagtgcagattcctgggccccacctcaaacctactaattctgaatctctgggaatagggccaggaaatctgccctttctacaaactacccaagttgttctgttgcacatcaatgtttgggaaccactgctgtaagggaatcattctggtcaccttgagctttgagctaccactaagccatgaaagaaaatacatcatacagggaagagagaagggaggaggttccaagtagtaactggcagatcctcctgtctggaggtaccaccttctattctggtttctgacttttccttcttgatgaccatagatgtgttccagaggcaaaagagacacattatcccagatggcagaacatgctttcaaaacatataaaatgtcaaagttccagatccttctacatctttagtcctgtctgaggatggtagctggctctctgtagctgatagatggctagagttccatccaaatccttgaccacgacttcatggagatttgaataatctatttgatgagatttctatttcaataacccacctctctcaccccacattcatatccctaaatttgaccctctgggccgagtcacattaccttcaggagacttgatcccagtagactgaggtcttccctttcagcagaaagatttcatttccctggcttgccagtggcactgatttccgaacacccaatgagtttaatattctttcctccttggcattactgccccagcctctttttattttttttgtgtgtgtctaataaccaggaaaaaaataaagcttaggttttaaaaagttttaaaaataatctgtttcagaaactgtcaaatgtaccatatttgtattaagagttgttgggaatttttgtacaatgaatttacatttatttatggtgacatatttacgcttgtgatcaaataatgatgttaaattcttaaatcatatttgctatgcagctgaagatgatattttgatttgtattttgggggtacctgtgttgagttgataaacatttccatcttcattaaaactgcttccaaactagtaaaaccagcaa

SEQ ID NO: 328953 - DNA, 3762 bp, Artificial Sequence
  derived and/or modified sequence
atgaccacccacgtgaccctggaggacgccctgagcaacgtggacctgctggaggagctgcccctgcccgaccagcagccctgcatcgagcccccccccagcagcatcatgtaccaggccaacttcgacaccaacttcgaggacagaaacgccttcgtgaccggcatcgccagatacatcgagcaggccaccgtgcacagcagcatgaacgagatgctggaggagggccacgagtacgccgtgatgctgtacacctggagaagctgcagcagagccatccccaaggtgaagtgcaacgagcagcccaacagagtggagatctacgagaagaccgtggaggtgctggagcccgaggtgaccaagctgatgaagttcatgtacttccagagaaaggccatcgagagattctgcagcgaggtgaagagactgtgccacgccgagagaagaaaggacttcgtgagcgaggcctacctgctgaccctgggcaagttcatcaacatgttcgccgtgctggacgagctgaagaacatgaagtgcagcgtgaagaacgaccacagcgcctacaagagagccgcccagttcctgagaaagatggccgacccccagagcatccaggagagccagaacctgagcatgttcctggccaaccacaacagaatcacccagtgcctgcaccagcagctggaggtgatccccggctacgaggagctgctggccgacatcgtgaacatctgcgtggactactacgagaacaagatgtacctgacccccagcgagaagcacatgctgctgaaggtgatgggcttcggcctgtacctgatggacggcaacgtgagcaacatctacaagctggacgccaagaagagaatcaacctgagcaagatcgacaagttcttcaagcagctgcaggtggtgcccctgttcggcgacatgcagatcgagctggccagatacatcaagaccagcgcccactacgaggagaacaagagcaagtggacctgcacccagagcagcatcagcccccagtacaacatctgcgagcagatggtgcagatcagagacgaccacatcagattcatcagcgagctggccagatacagcaacagcgaggtggtgaccggcagcggcctggacagccagaagagcgacgaggagtacagagagctgttcgacctggccctgagaggcctgcagctgctgagcaagtggagcgcccacgtgatggaggtgtacagctggaagctggtgcaccccaccgacaagttctgcaacaaggactgccccggcaccgccgaggagtacgagagagccaccagatacaactacaccagcgaggagaagttcgccttcgtggaggtgatcgccatgatcaagggcctgcaggtgctgatgggcagaatggagagcgtgttcaaccaggccatcagaaacaccatctacgccgccctgcaggacttcgcccaggtgaccctgagagagcccctgagacaggccgtgagaaagaagaagaacgtgctgatcagcgtgctgcaggccatcagaaagaccatctgcgactgggagggcggcagagagccccccaacgacccctgcctgagaggcgagaaggaccccaagggcggcttcgacatcaaggtgcccagaagagccgtgggccccagcagcacccagctgtacatggtgagaaccatgctggagagcctgatcgccgacaagagcggcagcaagaagaccctgagaagcagcctggacggccccatcgtgctggccatcgaggacttccacaagcagagcttcttcttcacccacctgctgaacatcagcgaggccctgcagcagtgctgcgacctgagccagctgtggttcagagagttcttcctggagctgaccatgggcagaagaatccagttccccatcgagatgagcatgccctggatcctgaccgaccacatcctggagaccaaggagcccagcatgatggagtacgtgctgtaccccctggacctgtacaacgacagcgcctactacgccctgaccaagttcaagaagcagttcctgtacgacgagatcgaggccgaggtgaacctgtgcttcgaccagttcgtgtacaagctggccgaccagatcttcgcctactacaaggccatggccggcagcgtgctgctggacaagagattcagagccgagtgcaagaactacggcgtgatcatcccctacccccccagcaacagatacgagaccctgctgaagcagagacacgtgcagctgctgggcagaagcatcgacctgaacagactgatcacccagagaatcagcgccgccatgtacaagagcctggaccaggccatcagcagattcgagagcgaggacctgaccagcatcgtggagctggagtggctgctggagatcaacagactgacccacagactgctgtgcaagcacatgaccctggacagcttcgacgccatgttcagagaggccaaccacaacgtgagcgccccctacggcagaatcaccctgcacgtgttctgggagctgaacttcgacttcctgcccaactactgctacaacggcagcaccaacagattcgtgagaaccgccatccccttcacccaggagccccagagagacaagcccgccaacgtgcagccctactacctgtacggcagcaagcccctgaacatcgcctacagccacatctacagcagctacagaaacttcgtgggccccccccacttcaagaccatctgcagactgctgggctaccagggcatcgccgtggtgatggaggagctgctgaagatcgtgaagagcctgctgcagggcaccatcctgcagtacgtgaagaccctgatcgaggtgatgcccaagatctgcagactgcccagacacgagtacggcagccccggcatcctggagttcttccaccaccagctgaaggacatcatcgagtacgccgagctgaagaccgacgtgttccagagcctgagagaggtgggcaacgccatcctgttctgcctgctgatcgagcaggccctgagccaggaggaggtgtgcgacctgctgcacgccgcccccttccagaacatcctgcccagagtgtacatcaaggagggcgagagactggaggtgagaatgaagagactggaggccaagtacgcccccctgcacctggtgcccctgatcgagagactgggcaccccccagcagatcgccatcgccagagagggcgacctgctgaccaaggagagactgtgctgcggcctgagcatgttcgaggtgatcctgaccagaatcagaagctacctgcaggaccccatctggagaggccccccccccaccaacggcgtgatgcacgtggacgagtgcgtggagttccacagactgtggagcgccatgcagttcgtgtactgcatccccgtgggcaccaacgagttcaccgccgagcagtgcttcggcgacggcctgaactgggccggctgcagcatcatcgtgctgctgggccagcagagaagattcgacctgttcgacttctgctaccacctgctgaaggtgcagagacaggacggcaaggacgagatcatcaagaacgtgcccctgaagaagatggccgacagaatcagaaagtaccagatcctgaacaacgaggtgttcgccatcctgaacaagtacatgaagagcgtggagaccgacagcagcaccgtggagcacgtgagatgcttccagccccccatccaccagagcctggccaccacctgctag

SEQ ID NO: 328954 - DNA, 651 bp, Artificial Sequence
  derived and/or modified sequence
atggcaggtagtgtcctcctggataagcgatttcgggccgagtgcaagaactacggagtgattattccctatccaccatctaacaggtacgaaaccctgctcaagcagagacatgtgcagctgcttggcaggtcaattgatctcaacaggctgatcacccagcggattagtgccgccatgtacaagtctcttgaccaggccattagccgatttgaatcagaagacctgacatccatagtcgagctcgaatggttactcgagatcaaccgattgacccataggctgttgtgcaaacacatgacgctcgactcctttgatgccatgttccgggaagctaatcacaatgtgtctgcgccgtacggccgcatcaccctacacgtattttgggaattgaactttgactttctgccaaactattgttacaacggatctaccaaccgctttgtaagaaccgcttctttccatccccgcacaacaactcgacagacatgtcagaggcctgcactgctccctctgtggatccaggccagccagcattgcctacagccccatctacagctgctccaagaattcaggggcgctacaagtttccaggactatgcagacagctgggtgatccgtgcgagtctctggagttggcgaaattgctag

SEQ ID NO: 328955 - DNA, 651 bp, Artificial Sequence
  derived and/or modified sequence
atggccggctctgtgctgctggacaagcgcttccgggcagagtgcaagaactacggcgtcatcatcccctacccacccagcaacagatatgagaccctgctgaagcagagacatgtgcagctgctgggccgcagcattgacctgaacagactcatcacccagaggatctctgctgccatgtacaagagcctggaccaggccatcagcagatttgaaagtgaggacctgaccagcatcgtggagctggagtggctgctggagatcaaccggctgacccaccggctgctgtgcaagcacatgaccctggacagctttgatgccatgttccgggaggccaaccacaacgtgtctgccccctacggccgcatcaccctgcacgtgttctgggagctgaactttgacttcctgcccaactactgctacaacggcagcaccaacagatttgtgaggacagccagcttccaccccaggaccaccacccggcagacctgccagaggcctgccctgctgcccctgtggatccaggccagccagcactgcctgcagccccacctgcagctgctgcaggagttccggggggccaccagcttccaggactatgctgacagctgggtgatccgggccagcctgtggagctggaggaactgctag

SEQ ID NO: 328956 - DNA, 651 bp, Artificial Sequence
  derived and/or modified sequence
atggccggcagcgtgctgctggacaagcggttccgggccgagtgcaagaattatggggtgatcatcccgtacccgccttccaatcgctatgagacccttctcaaacaacgccatgtacagctcctgggccgaagcattgacctgaacagactgatcactcagcgaattagcgccgcaatgtacaaatctttggaccaagctatttcccgcttcgagtcggaggacctcaccagtatcgtggagctggaatggctgctcgaaataaaccgactgacccatagattgctttgtaaacacatgactctggacagctttgatgctatgtttcgtgaggctaaccataacgtgagcgcgccctacggcaggatcactctgcatgtgttctgggagttgaactttgatttcttacccaattactgctacaacggatctaccaaccgttttgtacgcaccgccagcttccacccgcgtaccactaccaggcaaacttgtcagagacctgccctcctgcctctatggatacaggcctcacagcactgcctgcaacctcatctccagctcctccaagagtttagaggcgctacctcttttcaggattacgctgatagctgggtgatcagagcctccttatggtcctggcgcaactgctag

SEQ ID NO: 328957 - DNA, 651 bp, Artificial Sequence
  derived and/or modified sequence
atggccggaagcgtccttctggacaagcggttccgcgcagagtgcaagaattacggagtgattatcccatatcccccttctaaccgatacgagaccctactcaaacagcggcatgtgcaactactgggacggagcatcgatctcaatcgtctcattactcagcgaatttccgcggcaatgtacaagtcccttgaccaggccatttcccgctttgagtcagaggatcttacgagcatcgtggaactggagtggctgctcgagatcaaccgtctgacccaccgactcctttgcaaacacatgaccctggattccttcgatgccatgtttcgggaggccaaccacaacgtgagcgccccttacggtcggataacattacatgtgttctgggagctcaactttgatttcctgccaaattactgttacaacggatcaaccaacaggttcgttcgcacggcatctttccacccacgaaccactactcggcaaacgtgccaacgacccgcactgctaccattgtggatccaggcctcccaacactgtctacaaccccacttgcagctgcttcaggaatttagaggggcaacctcattccaggattatgctgatagctgggtcattcgcgcaagcttatggtcgtggcggaattgctag

SEQ ID NO: 328958 - DNA, 651 bp, Artificial Sequence
  derived and/or modified sequence
atggccggcagcgtgctgctggacaagagattcagagccgagtgcaagaactacggcgtgatcatcccctacccccccagcaacagatacgagaccctgctgaagcagagacacgtgcagctgctgggcagaagcatcgacctgaacagactgatcacccagagaatcagcgccgccatgtacaagagcctggaccaggccatcagcagattcgagagcgaggacctgaccagcatcgtggagctggagtggctgctggagatcaacagactgacccacagactgctgtgcaagcacatgaccctggacagcttcgacgccatgttcagagaggccaaccacaacgtgagcgccccctacggcagaatcaccctgcacgtgttctgggagctgaacttcgacttcctgcccaactactgctacaacggcagcaccaacagattcgtgagaaccgccagcttccaccccagaaccaccaccagacagacctgccagagacccgccctgctgcccctgtggatccaggccagccagcactgcctgcagccccacctgcagctgctgcaggagttcagaggcgccaccagcttccaggactacgccgacagctgggtgatcagagccagcctgtggagctggagaaactgctag

SEQ ID NO: 328959 - DNA, 715 bp, Artificial Sequence
  derived and/or modified sequence
ttgaatacagataatcatgaggcccaagaccctaaggaacagtgcagccaggagtcggaaggagcctgggtttctgaatcatcacatggaggggagctgtcttcagctgggagagctgtcttcagttggatactggtggccgtttgggcatcctgggccagcccaaggacatcttccagtggccgtttgggcatcctgggtggtagcaggtatctccattgcactctatttgccacctcaccctgaaggaaggtacgagggccccttcaaacgccatacaaagaccttccggagtgcccagtgtgcagattgcctgacatgcgctctggaaccgtgagccatttgggaggtgcaagaggattccaggaaatggcagcaaggccttagaggagtttaagtatgtacttggccaggacaaaagtctgtcttcatctaggctctaggtgctgacttctgtaacaggggagctgttaacttcttcctgggaatccaccttctaccccacacccagaagcagagcaccatccactcaggcctccaagtgctccaggccttgtattccacctctgcctactttgagccagcaactgatttcagcaggaattcactgagactgacatcctctatgctcagcactgtgtgccaatagtatggccacacaagtagattttttcctatttctcttttcttaggctaatggttcagctctaaagat

SEQ ID NO: 328960 - DNA, 321 bp, Artificial Sequence
  derived and/or modified sequence
atgaggcccaagaccctaaggaacagtgcagccaggagtcggaaggagcctgggtttctgaatcatcacatggaggggagctgtcttcagctgggagagctgtcttcagttggatactggtggccgtttgggcatcctgggccagcccaaggacatcttccagtggccgtttgggcatcctgggtggtagcaggtatctccattgcactctatttgccacctcaccctgaaggaaggtacgagggccccttcaaacgccatacaaagaccttccggagtgcccagtgtgcagattgcctggtacaatgtccagcctcccca

SEQ ID NO: 328961 - protein, 168 aa, Artificial Sequence
  derived and/or modified sequence
MMLGTEGGEGFVVKVRGLPWSCSADEVQRFFSDCKIQNGAQGIRFIYTREGRPSGEAFVELESEDEVKLALKKDRETMGHRYVEVFKSNNVEMDWVLKHTGPNSPDTANDGFVRLRGLPFGCSKEEIVQFFSGLEIVPNGITLPVDFQGRSTGEAFVQFASQEIAEKA

SEQ ID NO: 328962 - protein, 212 aa, Artificial Sequence
  derived and/or modified sequence
MMLGTEGGEGFVVKVRGLPWSCSADEVQRFFSDCKIQNGAQGIRFIYTREGRPSGEAFVELESEDEVKLALKKDRETMGHRYVEVFKSNNVEMDWVLKHTGPNSPDTANDGFVRLRGLPFGCSKEEIVQFFSGLEIVPNGITLPVDFQGRSTGEAFVQFASQEIAEKALKKHKERIGHRYIEIFKSSRAEVRTHYDPPRKLMAMQRPGPYDR

SEQ ID NO: 328963 - protein, 130 aa, Artificial Sequence
  derived and/or modified sequence
MMLGTEGGEGFVVKVRGLPWSCSADEVQRFFSDCKIQNGAQGIRFIYTREGRPSGEAFVELESEDEVKLALKKDRETMGHRYVEVFKSNNVEMDWVLKHTGPNSPDTANDGFVRLRGLPFGCSKEEIVQF

SEQ ID NO: 328964 - protein, 84 aa, Artificial Sequence
  derived and/or modified sequence
MMLGTEGGEGFVVKVRGLPWSCSADEVQRFFSDCKIQNGAQGIRFIYTREGRPSGEAFVELESEDEVKLALKKDRETMGHRYVE

SEQ ID NO: 328965 - protein, 115 aa, Artificial Sequence
  derived and/or modified sequence
MMLGTEGGEGFVVKVRGLPWSCSADEVQRFFSDCKIQNGAQGIRFIYTREGRPSGEAFVELESEDEVKLALKKDRETMGHRYVEVFKSNNVEMDWVLKHTGPNSPDTANDGFVRL

SEQ ID NO: 328966 - protein, 49 aa, Artificial Sequence
  derived and/or modified sequence
MMLGTEGGEGFVVKVRGLPWSCSADEVQRFFSDCKIQNGAQGIRFIYTR

SEQ ID NO: 328967 - protein, 163 aa, Artificial Sequence
  derived and/or modified sequence
MMLGTEGGEGFVVKVRGLPWSCSADEVQRFFSDCKIQNGAQGIRFIYTREGRPSGEAFVELESEDEVKLALKKDRETMGHRYVEVFKSNNVEMDWVLKHTGPNSPDTANDGFVRLRGLPFGCSKEEIVQFFSGLEIVPNGITLPVDFQGRSTGEAFVQFASQE

SEQ ID NO: 328968 - protein, 445 aa, Artificial Sequence
  derived and/or modified sequence
MLKKQSAGLVLWGAILFVAWNALLLLFFWTRPAPGRPPSVSALDGDPASLTREVIRLAQDAEVELERQRGLLQQIGDALSSQRGRVPTAAPPAQPRVPVTPAPAVIPILVIACDRSTVRRCLDKLLHYRPSAELFPIIVSQDCGHEETAQAIASYGSAVTHIRQPDLSSIAVPPDHRKFQGYYKIARHYRWALGQVFRQFRFPAAVVVEDDLEVAPDFFEYFRATYPLLKADPSLWCVSAWNDNGKEQMVDASRPELLYRTDFFPGLGWLLLAELWAELEPKWPKAFWDDWMRRPEQRQGRACIRPEISRTMTFGRKGVSHGQFFDQHLKFIKLNQQFVHFTQLDLSYLQREAYDRDFLARVYGAPQLQVEKVRTNDRKELGEVRVQYTGRDSFKAFAKALGVMDDLKSGVPRAGYRGIVTFQFRGRRVHLAPPLTWEGYDPSWN

SEQ ID NO: 328969 - protein, 302 aa, Artificial Sequence
  derived and/or modified sequence
MLKKQSAGLVLWGAILFVAWNALLLLFFWTRPAPGRPPSVSALDGDPASLTRVFRQFRFPAAVVVEDDLEVAPDFFEYFRATYPLLKADPSLWCVSAWNDNGKEQMVDASRPELLYRTDFFPGLGWLLLAELWAELEPKWPKAFWDDWMRRPEQRQGRACIRPEISRTMTFGRKGVSHGQFFDQHLKFIKLNQQFVHFTQLDLSYLQREAYDRDFLARVYGAPQLQVEKVRTNDRKELGEVRVQYTGRDSFKAFAKALGVMDDLKSGVPRAGYRGIVTFQFRGRRVHLAPPLTWEGYDPSWN

SEQ ID NO: 328970 - protein, 103 aa, Artificial Sequence
  derived and/or modified sequence
MLKKQSAGLVLWGAILFVAWNALLLLFFWTRPAPGRPPSVSALDGDPASLTREVIRLAQDAEVELERQRGLLQQIGDALSSQRGRVPTAAPPAQPRVPVTPAP

SEQ ID NO: 328971 - protein, 199 aa, Artificial Sequence
  derived and/or modified sequence
MLKKQSAGLVLWGAILFVAWNALLLLFFWTRPAPGRPPSVSALDGDPASLTREVIRLAQDAEVELERQRGLLQQIGDALSSQRGRVPTAAPPAQPRVPVTPAPAVIPILVIACDRSTVRRCLDKLLHYRPSAELFPIIVSQDCGHEETAQAIASYGSAVTHIRQPDLSSIAVPPDHRKFQGYYKIARHYRWALGQVFRQ

SEQ ID NO: 328972 - protein, 111 aa, Artificial Sequence
  derived and/or modified sequence
MLKKQSAGLVLWGAILFVAWNALLLLFFWTRPAPGRPPSVSALDGDPASLTREVIRLAQDAEVELERQRGLLQQIGDALSSQRGRVPTAAPPAQPRVPVTPAPAVIPILVI

SEQ ID NO: 328973 - protein, 154 aa, Artificial Sequence
  derived and/or modified sequence
MLKKQSAGLVLWGAILFVAWNALLLLFFWTRPAPGRPPSVSALDGDPASLTREVIRLAQDAEVELERQRGLLQQIGDALSSQRGRVPTAAPPAQPRVPVTPAPAVIPILVIACDRSTVRRCLDKLLHYRPSAELFPIIVSQDCGHEETAQAIAS

SEQ ID NO: 328974 - protein, 34 aa, Artificial Sequence
  derived and/or modified sequence
MLKKQSAGLVLWGAILFVAWNALLLLFFWTRPAP

SEQ ID NO: 328975 - protein, 115 aa, Artificial Sequence
  derived and/or modified sequence
MLKKQSAGLVLWGAILFVAWNALLLLFFWTRPAPGRPPSVSALDGDPASLTREVIRLAQDAEVELERQRGLLQQIGDALSSQRGRVPTAAPPAQPRVPVTPAPAVIPILVIACDR

SEQ ID NO: 328976 - protein, 95 aa, Artificial Sequence
  derived and/or modified sequence
MLKKQSAGLVLWGAILFVAWNALLLLFFWTRPAPGRPPSVSALDGDPASLTREVIRLAQDAEVELERQRGLLQQIGDALSSQRGRVPTAAPPAQP

SEQ ID NO: 328977 - protein, 127 aa, Artificial Sequence
  derived and/or modified sequence
MLKKQSAGLVLWGAILFVAWNALLLLFFWTRPAPGRPPSVSALDGDPASLTREVIRLAQDAEVELERQRGLLQQIGDALSSQRGRVPTAAPPAQPRVPVTPAPAVIPILVIACDRSTVRRCLDKLLH

SEQ ID NO: 328978 - protein, 105 aa, Artificial Sequence
  derived and/or modified sequence
MLKKQSAGLVLWGAILFVAWNALLLLFFWTRPAPGRPPSVSALDGDPASLTREVIRLAQDAEVELERQRGLLQQIGDALSSQRGRVPTAAPPAQPRVPVTPAPAV

SEQ ID NO: 328979 - DNA, 1338 bp, Artificial Sequence
  derived and/or modified sequence
atgttgaaaaagcaaagtgccggactcgtcctgtggggtgcaatcctgtttgtggcatggaacgctctgctcctgctgttcttctggacacggcccgccccgggaagaccaccttcagtctcagctctggacggtgatcctgcatccttgactagggaagtaatccgacttgctcaggatgcagaggtggaactagaacgccaaagaggcctcctgcagcagatcggcgatgccctctcaagtcagaggggtcgggttcctaccgccgcaccccctgctcagccaagggtgccagtcactccagcgcccgcagtgatacctattctggttattgcttgtgataggtccaccgttcgcagatgtctcgacaagttattgcactaccgaccctcagccgaactgtttccaataatcgtcagtcaggattgcggtcacgaggaaaccgcccaggctatcgctagctacggctctgccgtgacgcacatacgtcagcctgacctgtcgtcgatcgccgtgccaccagaccataggaaattccagggctactataagatagcgcgccactaccgatgggctctcggacaggtcttcagacagttcagattccccgcagccgtggtggtggaggatgacctggaagtggccccagatttttttgagtatttccgagccacataccctctactgaaagccgatccgagcttatggtgcgtgtctgcctggaacgacaacggtaaagaacagatggtagacgcaagccgcccagaactactgtaccgcactgacttctttccaggcctgggatggcttttgctagccgagttatgggccgaattggaaccaaagtggcccaaggctttttgggacgattggatgcgccgaccagaacagagacagggcagagcatgtattaggcccgaaatcagtcggactatgacgttcggtcgcaagggcgtgtcacacggccaattttttgatcaacacttgaaatttattaagttaaatcagcaattcgtgcactttacacagctagatctgtcctatcttcaaagggaagcatatgatcgagacttcttggcaagggtttacggagccccacaactccaggtggagaaagttcgcacaaacgatagaaaggagttaggcgaggtccgggtgcagtacactggcagggattctttcaaggcctttgctaaagcgctcggcgtcatggatgatctgaaaagtggtgtcccacgcgcggggtacagggggatcgttacgtttcaatttagaggacggcgtgttcatctggccccccccttgacgtgggagggttacgatccctcctggaactag

SEQ ID NO: 328980 - DNA, 1338 bp, Artificial Sequence
  derived and/or modified sequence
atgctgaaaaaacagagtgccggtctcgtactatggggcgccattctcttcgtggcatggaacgccctgctgctgctgttcttctggaccaggccagcaccaggccgccccccttccgtgtccgctctggatggtgatcctgcttcacttactagagaggtgatccgattggcccaggacgctgaggtagagctggagcgtcagaggggcctgttacaacaaatcggagatgccttgagttcccagcgtggcagagtgcccaccgcagcccctcctgcgcaaccacgcgtgcctgtcacaccagcacctgctgttatcccgatactagttatcgcatgcgaccgcagtaccgtgcgcagatgcctggacaagcttctgcattatagaccatccgctgagttatttcctatcatcgtcagccaggattgtggccatgaagagactgcccaagctatagcgtcctacggttccgccgtcacacatattcgccagcccgatctttcatccattgccgtgccacctgatcacaggaagtttcagggatattataagatcgctaggcattacagatgggccttgggccaggttttccgtcaattccggtttccagccgccgtggtggttgaagacgatcttgaggtggctcccgacttcttcgagtattttcgagctacttacccactgttgaaggccgaccctagcctgtggtgtgtgagcgcatggaacgataatggaaaggagcagatggttgacgcctcccggccagagttattgtacagaacagatttctttcccgggctgggctggctgctgttggctgagctgtgggcggaattagagcccaagtggccaaaggccttttgggatgactggatgcgccgccctgaacagcgacagggcagggcctgcatcaggccagagatctcccggacgatgactttcggtaggaagggagtgtcacatgggcaatttttcgaccagcatctcaaattcatcaagcttaatcagcagttcgttcattttacccagttggacttaagctatctccagcgggaggcatacgatagagactttttagcgagggtctacggcgcccctcagctgcaggtggagaaagtccgtactaacgatcggaaagagctgggggaggtgagagtccaatacacaggtagagatagcttcaaagccttcgcaaaggcactcggggtcatggacgatctcaagagcggagtgcctcgggctggatatcggggcattgtcacgttccagttccggggccgccgggtgcatcttgctccacctttgacatgggaaggctatgatccttcttggaattag

SEQ ID NO: 328981 - DNA, 1338 bp, Artificial Sequence
  derived and/or modified sequence
atgttaaagaagcagtccgccgggctggtactgtggggcgctattcttttcgttgcatggaacgctctcctcctcctcttcttttggacaagacccgcaccaggacgcccgccatctgtgtccgcgctggacggcgatccagcctccctcacaagggaggtcatacgtctggcacaggacgccgaggtggagctggagagacaaaggggactgttacaacagattggagatgctctgtcttcgcagagaggtcgcgttccgactgctgccccccccgctcagcccagggtgcccgtcacccccgccccggcagtgatccccattcttgtcatcgcgtgcgataggtccaccgtacggaggtgccttgataagctgctacactatcgccccagcgctgagttatttcccattatcgtgagtcaggactgtggccatgaagagacggcgcaagccatcgcttcatatggctcagcagtgacacatataagacagccagacctttcctccatcgccgtgcccccagaccatagaaaatttcaagggtattacaagatcgcaagacactataggtgggctctgggacaggtgtttcgccagtttaggttccccgcagccgtggtggtggaggacgatctggaggtggcccctgacttctttgagtatttcagggccacctatccattactgaaggccgatccatctttgtggtgcgtgtccgcttggaatgataacggtaaagaacagatggtagatgcatcccggccagaactgctatatcggaccgacttttttcctggattggggtggttacttttggcagagctgtgggctgagctggaacctaaatggcctaaagcattttgggatgactggatgaggcgccccgaacaacgccagggccgagcgtgtattcgccccgagatctcccgaacgatgacattcggcagaaaaggcgtgagccatgggcagttctttgaccagcatttgaaattcattaagctgaaccagcagttcgtccattttacgcagcttgacctgtcttacctgcagcgcgaggcatatgacagagactttctcgccagagtgtacggcgccccacaacttcaagtggaaaaagtgcgcaccaatgacagaaaggaactgggtgaggtcagggtccaatataccggccgtgacagtttcaaggcttttgccaaggcactcggcgtgatggacgatctgaagagcggagtgcctcgtgcaggctaccgtggcatcgtaaccttccaatttagggggcgccgtgtgcatctcgccccgcccctgacgtgggaaggctatgacccttcctggaattag

SEQ ID NO: 328982 - DNA, 1338 bp, Artificial Sequence
  derived and/or modified sequence
atgctcaagaaacagtcagctggtctggtgctgtggggcgctatcctgttcgtcgcgtggaacgctctgctgctcttgtttttttggacccgcccggcccctgggcgaccgccctcagtcagtgccctggacggagaccccgcatccctgactcgagaggtgattagactggcacaggacgccgaggtagaattggaacgccagcgcggactgctccagcagatcggggatgcgctgtcttctcagagaggaagggtacctactgcagccccacccgctcagccaagggttcctgtgacacccgccccggccgtgatcccaatccttgtgatcgcttgtgaccggagtaccgttcggagatgcttggacaagctgctacactacagaccctctgctgagctgttcccgattatcgtgagccaggattgtgggcacgaggaaacagctcaagccatcgcctcgtatggcagcgcggtgacgcacattaggcagcctgatctgtctagcatagcagtgcctccagatcacaggaagttccaagggtattacaagatagccagacactacagatgggccctggggcaggtctttcgccagttcaggtttcctgctgctgtggtcgtcgaggacgatctagaggtggcccccgactttttcgagtacttccgggccacttatcccctgctcaaggcagatccatctctctggtgtgtgtcggcgtggaatgacaacgggaaggaacagatggtggatgcttcacgacctgagcttttgtacaggactgatttctttcctggcttgggttggctgctcctcgccgaattgtgggcggagttggagccgaagtggcctaaggcgttctgggacgattggatgcgtcgcccggagcagcggcagggtcgagcctgtatcaggcccgagatctcccggaccatgaccttcggacgaaagggtgtcagccatgggcagttttttgatcagcacctgaagtttattaagttgaatcaacagttcgtccatttcacccagctagatctaagctaccttcaacgcgaagcatatgatcgcgatttcctcgctagggtgtacggagcccctcagttacaggttgagaaagtcaggaccaatgatagaaaggaattgggcgaagttagagtccagtataccggtcgtgattcatttaaggcttttgcaaaagccctcggggtgatggatgatctgaaaagcggggtgcccagagccggatacaggggcatagtgaccttccagtttaggggcaggagagtccacctggctcctcctctgacatgggagggttatgacccaagttggaattag

SEQ ID NO: 328983 - DNA, 1338 bp, Artificial Sequence
  derived and/or modified sequence
atgttgaagaaacagtccgcggggctagtgctgtggggtgcgatcctctttgtcgcatggaacgctctgcttcttttatttttctggaccaggcctgcgcctggacggcctccctctgtgtcggcactggacggagatcccgcttcgctgacccgcgaggtcataagactggcccaggatgcagaggtcgaattggaacggcaacgggggttgctccaacagatcggagacgctctatcgtctcagagagggcgggtgccgacagcagcacctccagcacagcctagggtccctgtgaccccagctcccgcagtgatccccattttggttattgcatgcgaccgatccactgtaagacgctgtctggacaagcttcttcactataggcctagcgccgagctgttccctatcattgtgagccaagattgtggccacgaggagacagcccaagctatcgcaagctatgggtctgccgtcactcatatccgccagccagatctgtcaagcattgccgtgccccccgatcatcggaaatttcaggggtattacaagattgccagacactaccggtgggccctcggccaagtgtttcggcagttcaggtttccagctgccgtggtggtcgaagacgaccttgaagtggctcctgacttttttgaatattttagagcaacctatcctttgctgaaagccgatccgtccctgtggtgcgtgagcgcctggaacgacaatggaaaggaacagatggtagacgcctccagacccgagctgctgtaccggacggatttcttccctggactgggatggctgcttctggctgaattgtgggccgagcttgaaccgaaatggccaaaagctttttgggatgactggatgcgccggccggaacagcgacagggccgtgcctgcatacgccccgagatcagcaggactatgacattcggccgcaaaggcgtgagccatggccagttctttgaccaacaccttaagtttataaaattgaaccagcagttcgttcattttacccagctcgacctgagctaccttcagcgcgaggcttacgacagggatttcctcgcgagagtctatggagctccccaacttcaggtcgagaaggtccgaacaaacgacagaaaagagctcggtgaagtccgagtgcaatacaccggacgagacagtttcaaagccttcgctaaagctctgggggtaatggacgacttaaaatctggtgttcctagggcgggctacagaggaatcgtaacctttcagtttagagggcgcagggtccacttagccccccctttgacatgggagggctacgatccgtcatggaattag

SEQ ID NO: 328984 - DNA, 909 bp, Artificial Sequence
  derived and/or modified sequence
atgctgaaaaagcagtccgctggactggtcctatggggagctatattatttgtcgcctggaacgccctgctgttgttattcttctggactcgtccggcgcccgggcggccacccagcgtcagcgcactggacggcgacccagcatctctgaccagggtctttaggcagtttcggtttcctgctgccgttgtcgtcgaagatgacctcgaggtggcccccgacttcttcgagtatttccgggccacgtacccactgctgaaagctgaccccagcctgtggtgtgtatctgcttggaatgataacgggaaggaacagatggtggacgcctctcgaccagagttgctgtataggactgatttcttcccaggactgggctggctcctactggctgaactctgggccgaattagagcccaagtggccgaaagctttttgggatgactggatgcgtaggccagaacagagacagggccgggcatgcatccgccctgaaatctccagaaccatgacattcggtcgaaagggggttagtcacggccagttcttcgaccagcacctaaagttcatcaaattgaaccagcagttcgtccactttactcagttagatctgagctatctccagagggaggcctatgatcgggatttcctagcccgggtctatggtgcacctcagttgcaggtggagaaggtgcgcacaaatgaccggaaggagttaggcgaagtgcgagtgcagtataccgggcgggatagtttcaaagccttcgccaaggccctcggagtgatggatgacctgaagagcggggtgccccgggccggatatcgcggaatagtgaccttccaattccgcggtcgccgtgtccacctggccccccccttaacttgggagggctacgacccatcctggaactag

SEQ ID NO: 328985 - DNA, 312 bp, Artificial Sequence
  derived and/or modified sequence
atgttaaaaaagcagtccgccgggttggtgctttggggcgctattctgtttgtcgcttggaacgctctcctcctgctcttcttttggactcgtccggcccctggacgaccgccctcggtgagcgctttagatggcgaccccgcctcattaacccgcgaggtgattcggctcgcacaggatgctgaagtcgagctcgagagacagcgagggctcctccagcagataggcgacgccctctcatcccagagagggagggtgccaaccgccgcaccacctgcgcaacccagggtgcccgttactccggcaccctag

SEQ ID NO: 328986 - DNA, 600 bp, Artificial Sequence
  derived and/or modified sequence
atgttgaagaaacaatcggcagggttagtgttatggggggctatactgtttgtggcttggaacgcactgctacttctttttttttggaccaggcctgcaccggggcggcctccttctgtcagtgctctggatggcgacccagcgagccttacccgtgaagtgattaggctggcccaagatgccgaggtcgaattggagagacagcgtgggctgcttcaacagatcggagatgccttgtcttcccagcgcggtagagtgcccaccgccgcaccccccgcccagcccagggtgcccgttacccctgcccctgccgtcatccctattctcgttatcgcatgcgaccggtcaacagttaggaggtgtttggacaagttactccattaccgcccatcagccgaactgttcccaattatcgtgtcccaggactgtggccatgaggaaacagcccaggccattgcctcttacggttccgcagtcacgcacatccgccagccagacctgtcctccatcgccgttcctcccgaccatcggaagttccagggatactacaagatcgcccggcactaccggtgggcactcgggcaagtgttccggcagtag

SEQ ID NO: 328987 - DNA, 336 bp, Artificial Sequence
  derived and/or modified sequence
atgctgaagaaacagagtgccggcctcgtgttatggggggccattctgttcgttgcctggaacgccctgctattgctctttttctggaccagacctgcccctgggcgtcccccatccgtctcggccctggacggagaccccgcttcgctcactcgcgaagtcatcaggctggcccaagacgccgaagtggaactggaacgccaaaggggattactgcagcagattggtgatgcactgtctagccagagaggaagagttcctaccgcagcaccacccgcccaacctcgagttccggttacacctgccccagctgtgattccaattttggtcatttag

SEQ ID NO: 328988 - DNA, 465 bp, Artificial Sequence
  derived and/or modified sequence
atgctgaagaaacagtcagccggccttgtgctgtggggcgccattttattcgttgcctggaatgccctgctacttctgttcttttggactcgtccagcacccgggcggccaccgtccgttagcgctctggacggcgacccagcttctttaactcgtgaagtgatcaggttggcccaggacgcagaggttgaactcgagcgtcagcgaggtctgctacagcagataggagacgccctttcctcccagagggggcgcgtgcccaccgctgccccgcccgcccagccccgcgtgccagtgactccagctcctgccgtgatcccgatcctggtaattgcctgcgaccgatcaacagtccggcgctgtctcgacaaactcctacattatcgccctagcgccgagctcttccctattatcgtgtcccaggactgtggacatgaggagaccgcccaggcaattgcctcatag

SEQ ID NO: 328989 - DNA, 105 bp, Artificial Sequence
  derived and/or modified sequence
atgctgaagaagcagagcgcagggctggtcttatggggcgctatcctctttgtcgcttggaacgcactcctgctgctttttttctggacaagacctgccccctag

SEQ ID NO: 328990 - DNA, 348 bp, Artificial Sequence
  derived and/or modified sequence
atgctaaagaaacagtccgccgggctggttctctggggagccatcctctttgtcgcatggaatgcgttgctgctacttttcttctggacacgacctgcccctggcagacccccgtcagtgtcagccctagacggagatcccgcgtccctgaccagagaagtgatccgattggcccaggatgctgaggtcgaactcgagagacaacgcgggctactgcagcaaattggggacgcactgagcagccagcgcggaagggtccccaccgccgcgcctcccgctcaaccaagagtcccggtgactccagccccagccgttatccctatcctagtaatcgcatgcgacagatag

SEQ ID NO: 328991 - DNA, 288 bp, Artificial Sequence
  derived and/or modified sequence
atgcttaaaaagcaaagcgctggtttagttttgtggggcgcgattttatttgtggcttggaatgctttgctgcttttgttcttttggacgcgccccgccccaggccgtcccccctcagtgtctgcattggacggggaccccgcttcactgaccagggaggtgattaggctggcacaggacgctgaagtggagctcgagagacaaagaggtctgttgcagcagataggcgacgcgctgagcagtcaaagaggacgcgttcccaccgctgcaccgccggctcagccttag

SEQ ID NO: 328992 - DNA, 384 bp, Artificial Sequence
  derived and/or modified sequence
atgctcaaaaagcaatctgctgggctggttttgtggggcgcaattctgtttgtcgcgtggaacgcccttctgctcctgtttttttggactcgtcccgctcctggaagacccccctctgtgagcgctctggacggcgacccggcgagtctgacacgcgaagtcattagacttgcacaggatgccgaagtcgagctggagagacagcgcggattgctgcaacagattggggacgccctcagctcacaacgcggcagggtgccgactgcagcacccccggcccaaccccgcgtgcccgtgacccccgcgcccgccgtgatacctatcctcgtgatcgcgtgcgaccgttccacggtgcggcggtgtctggataagctgctgcactag

SEQ ID NO: 328993 - DNA, 318 bp, Artificial Sequence
  derived and/or modified sequence
atgctgaagaaacagtccgccgggttagtgttatggggggccattctgttcgtcgcctggaatgcccttttactgttgtttttttggactagacccgcccccggaaggcccccctcggttagtgcgctggacggggaccctgcgagcctcacccgggaagtgattagactcgctcaggatgcagaagtggaactggaaagacagcgggggctccttcaacagatcggagacgcattatcaagccagaggggccgggttccaactgcagcaccccctgctcaaccaagggtgcccgttactcctgcgccggctgtttag

SEQ ID NO: 328994 - DNA, 1338 bp, Artificial Sequence
  derived and/or modified sequence
atgctgaagaagcagagcgctggcctggtgctgtggggcgccatcctgtttgtggcctggaatgccctgctgctgctcttcttctggaccaggcctgcccctggccggcccccatctgtgtctgccctggatggagaccctgccagcctgacccgggaggtgatccggctggcccaggatgctgaggtggagctggagcggcagaggggcctgctgcagcagattggagatgccctgagcagccagaggggccgggtgcccacagctgcccccccagcccagccccgggtgcctgtgaccccagccccagctgtgatccccatcctggtgattgcctgtgacaggagcacagtgcggcgctgcctggacaagctgctgcactaccggcccagcgctgagctgttccccatcatcgtgtcccaggactgtggccacgaggagacagcccaggccatcgccagctatggcagcgctgtgacccacatccggcagcctgacctgagcagcattgctgtgcccccagaccacaggaagttccagggctactacaagatcgcccggcactaccgctgggccctgggccaggtgttccggcagttccgcttccctgctgctgtggtggtggaggatgacctggaggtggccccagacttctttgagtacttccgggccacctaccccctgctgaaggctgaccccagcctgtggtgtgtgtctgcctggaatgacaacgggaaggagcagatggtggatgccagcaggcctgagctgctgtacagaacagacttcttccctggcctgggctggctgctgctggccgagctgtgggccgagctggagcccaagtggcccaaggccttctgggatgactggatgagaagacctgagcagaggcagggccgggcctgcatccggcctgagatcagcaggaccatgaccttcggcaggaaaggagtgagccacggccagttctttgaccagcacctgaagttcatcaagctgaaccagcagtttgtgcacttcacccagctggacctgagctacctgcagcgggaggcctatgaccgggacttcctggcccgggtgtatggagccccccagctgcaggtggagaaggtgaggaccaatgacaggaaggagctgggggaggtgcgggtgcagtacacaggccgggacagcttcaaggcctttgccaaggccctgggcgtgatggatgacctgaagtctggagtgccccgggccggctaccggggcatcgtgaccttccagttccggggcagaagagtgcacctggccccacccctgacctgggagggctatgaccccagctggaactag

SEQ ID NO: 328995 - DNA, 909 bp, Artificial Sequence
  derived and/or modified sequence
atgctgaagaagcagagcgctggcctggtgctgtggggcgccatcctgtttgtggcctggaatgccctgctgctgctcttcttctggaccaggcctgcccctggccggcccccatctgtgtctgccctggatggagaccctgccagcctgaccagggtcttccggcagttccgcttccctgctgctgtggtggtggaggatgacctggaggtggccccagacttctttgagtacttccgggccacctaccccctgctgaaggctgaccccagcctgtggtgtgtgtctgcctggaatgacaatggcaaggagcagatggtggatgccagcaggcctgagctgctgtacagaacagacttcttccctggcctgggctggctgctgctggccgagctgtgggccgagctggagcccaagtggcccaaggccttctgggatgactggatgaggaggcctgagcagaggcagggccgggcctgcatccggcctgagatcagcaggaccatgacctttggaaggaagggcgtgagccacggccagttctttgaccagcacctgaagttcatcaagctgaaccagcagtttgtgcacttcacccagctggacctgagctacctgcagcgggaggcctatgaccgggacttcctggcccgggtgtatggagccccccagctgcaggtggagaaggtgaggaccaatgacaggaaggagctgggggaggtgcgggtgcagtacacaggccgggacagcttcaaggcctttgccaaggccctgggcgtgatggatgacctgaagagcggcgtgcccagggctggctaccggggcatcgtgaccttccagttccggggccggcgggtgcacctggccccacccctgacctgggagggctatgaccccagctggaactag

SEQ ID NO: 328996 - DNA, 312 bp, Artificial Sequence
  derived and/or modified sequence
atgctgaagaagcagagcgctggcctggtgctgtggggcgccatcctgtttgtggcctggaatgccctgctgctgctcttcttctggaccaggcctgcccctggccggcccccatctgtgtctgccctggatggagaccctgccagcctgacccgggaggtgatccggctggcccaggatgctgaggtggagctggagcggcagaggggcctgctgcagcagattggagatgccctgagcagccagaggggccgggtgcccacagctgcccccccagcccagccccgggtgcctgtgaccccagccccctag

SEQ ID NO: 328997 - DNA, 600 bp, Artificial Sequence
  derived and/or modified sequence
atgctgaagaagcagagcgctggcctggtgctgtggggcgccatcctgtttgtggcctggaatgccctgctgctgctcttcttctggaccaggcctgcccctggccggcccccatctgtgtctgccctggatggagaccctgccagcctgacccgggaggtgatccggctggcccaggatgctgaggtggagctggagcggcagaggggcctgctgcagcagattggagatgccctgagcagccagaggggccgggtgcccacagctgcccccccagcccagccccgggtgcctgtgaccccagccccagctgtgatccccatcctggtgattgcctgtgacaggagcacagtgcggcgctgcctggacaagctgctgcactaccggcccagcgctgagctgttccccatcatcgtgtcccaggactgtggccacgaggagacagcccaggccatcgccagctatggcagcgctgtgacccacatccggcagcctgacctgagcagcattgctgtgcccccagaccacaggaagttccagggctactacaagatcgcccggcactaccgctgggccctgggccaggtgttccggcagtag

SEQ ID NO: 328998 - DNA, 336 bp, Artificial Sequence
  derived and/or modified sequence
atgctgaagaagcagagcgctggcctggtgctgtggggcgccatcctgtttgtggcctggaatgccctgctgctgctcttcttctggaccaggcctgcccctggccggcccccatctgtgtctgccctggatggagaccctgccagcctgacccgggaggtgatccggctggcccaggatgctgaggtggagctggagcggcagaggggcctgctgcagcagattggagatgccctgagcagccagaggggccgggtgcccacagctgcccccccagcccagccccgggtgcctgtgaccccagccccagctgtgatccccatcctggtgatctag

SEQ ID NO: 328999 - DNA, 465 bp, Artificial Sequence
  derived and/or modified sequence
atgctgaagaagcagagcgctggcctggtgctgtggggcgccatcctgtttgtggcctggaatgccctgctgctgctcttcttctggaccaggcctgcccctggccggcccccatctgtgtctgccctggatggagaccctgccagcctgacccgggaggtgatccggctggcccaggatgctgaggtggagctggagcggcagaggggcctgctgcagcagattggagatgccctgagcagccagaggggccgggtgcccacagctgcccccccagcccagccccgggtgcctgtgaccccagccccagctgtgatccccatcctggtgattgcctgtgacaggagcacagtgcggcgctgcctggacaagctgctgcactaccggcccagcgctgagctgttccccatcatcgtgtcccaggactgtggccacgaggagacagcccaggccatcgccagctag

SEQ ID NO: 329000 - DNA, 105 bp, Artificial Sequence
  derived and/or modified sequence
atgctgaagaagcagagcgctggcctggtgctgtggggcgccatcctgtttgtggcctggaatgccctgctgctgctcttcttctggaccaggcctgccccctag

SEQ ID NO: 329001 - DNA, 348 bp, Artificial Sequence
  derived and/or modified sequence
atgctgaagaagcagagcgctggcctggtgctgtggggcgccatcctgtttgtggcctggaatgccctgctgctgctcttcttctggaccaggcctgcccctggccggcccccatctgtgtctgccctggatggagaccctgccagcctgacccgggaggtgatccggctggcccaggatgctgaggtggagctggagcggcagaggggcctgctgcagcagattggagatgccctgagcagccagaggggccgggtgcccacagctgcccccccagcccagccccgggtgcctgtgaccccagccccagctgtgatccccatcctggtgattgcctgtgacagatag

SEQ ID NO: 329002 - DNA, 288 bp, Artificial Sequence
  derived and/or modified sequence
atgctgaagaagcagagcgctggcctggtgctgtggggcgccatcctgtttgtggcctggaatgccctgctgctgctcttcttctggaccaggcctgcccctggccggcccccatctgtgtctgccctggatggagaccctgccagcctgacccgggaggtgatccggctggcccaggatgctgaggtggagctggagcggcagaggggcctgctgcagcagattggagatgccctgagcagccagaggggccgggtgcccacagctgcccccccagcccagccctag

SEQ ID NO: 329003 - DNA, 384 bp, Artificial Sequence
  derived and/or modified sequence
atgctgaagaagcagagcgctggcctggtgctgtggggcgccatcctgtttgtggcctggaatgccctgctgctgctcttcttctggaccaggcctgcccctggccggcccccatctgtgtctgccctggatggagaccctgccagcctgacccgggaggtgatccggctggcccaggatgctgaggtggagctggagcggcagaggggcctgctgcagcagattggagatgccctgagcagccagaggggccgggtgcccacagctgcccccccagcccagccccgggtgcctgtgaccccagccccagctgtgatccccatcctggtgattgcctgtgacaggagcacagtgcggcgctgcctggacaagctgctgcactag

SEQ ID NO: 329004 - DNA, 318 bp, Artificial Sequence
  derived and/or modified sequence
atgctgaagaagcagagcgctggcctggtgctgtggggcgccatcctgtttgtggcctggaatgccctgctgctgctcttcttctggaccaggcctgcccctggccggcccccatctgtgtctgccctggatggagaccctgccagcctgacccgggaggtgatccggctggcccaggatgctgaggtggagctggagcggcagaggggcctgctgcagcagattggagatgccctgagcagccagaggggccgggtgcccacagctgcccccccagcccagccccgggtgcctgtgaccccagccccagctgtgtag

SEQ ID NO: 329005 - DNA, 2761 bp, Artificial Sequence
  derived and/or modified sequence
cccctcagtccgccccgccccgccccgcctgccggggaagggccacgttgcccgcccggccgtccggccccggcgcgccgcagaaagggctggcgagtcgaaaggcgaggcggccgcggcagcgcttgggacgcgcctgggcaccgggctcgctccctgcgccccggagcaggccaagttcggggccaggacgtcgggaggacctggtgcatggctgcctcctaatcccatagtccagaggaggcatccctaggactgcgggcaagggagccgggcaagcccagggcagccttgaaccgtcccctggcctgccctccccggtgggggccaggatgctgaagaagcagtctgcagggcttgtgctgtggggcgctatcctctttgtggcctggaatgccctgctgctcctcttcttctggacgcgcccagcacctggcaggccaccctcagtcagcgctctcgatggcgaccccgccagcctcacccgggaagtgattcgcctggcccaagacgccgaggtggagctggagcggcagcgtgggctgctgcagcagatcggggatgccctgtcgagccagcgggggagggtgcccaccgcggcccctcccgcccagccgcgtgtgcctgtgacccccgcgccggcggtgattcccatcctggtcatcgcctgtgaccgcagcactgttcggcgctgcctggacaagctgctgcattatcggccctcggctgagctcttccccatcatcgttagccaggactgcgggcacgaggagacggcccaggccatcgcctcctacggcagcgcggtcacgcacatccggcagcccgacctgagcagcattgcggtgccgccggaccaccgcaagttccagggctactacaagatcgcgcgccactaccgctgggcgctgggccaggtcttccggcagtttcgcttccccgcggccgtggtggtggaggatgacctggaggtggccccggacttcttcgagtactttcgggccacctatccgctgctgaaggccgacccctccctgtggtgcgtctcggcctggaatgacaacggcaaggagcagatggtggacgccagcaggcctgagctgctctaccgcaccgactttttccctggcctgggctggctgctgttggccgagctctgggctgagctggagcccaagtggccaaaggccttctgggacgactggatgcggcggccggagcagcggcaggggcgggcctgcatacgccctgagatctcaagaacgatgacctttggccgcaagggtgtgagccacgggcagttctttgaccagcacctcaagtttatcaagctgaaccagcagtttgtgcacttcacccagctggacctgtcttacctgcagcgggaggcctatgaccgagatttcctcgcccgcgtctacggtgctccccagctgcaggtggagaaagtgaggaccaatgaccggaaggagctgggggaggtgcgggtgcagtatacgggcagggacagcttcaaggctttcgccaaggctctgggtgtcatggatgaccttaagtcgggggttccgagagctggctaccggggtattgtcaccttccagttccggggccgccgtgtccacctggcgcccccactgacgtgggagggctatgatcctagctggaattagcacctgcctgtccttcctgggcccctccttgccacatcatgagctgaggtgggaccacagtccccaggctgcatcggcctgcctgtgtttccctcttaggtgcatttatctttttgatttttccgagtggcatttaagtgcacaaatgataacaagaggattattctcccgttctcaagggagtcagatcaggggaactattctagggtatgttgcggggtattaagcaggaaaccactgtgtggtggggggcactgggcttgttggggccagaaatgtccacgtcctgagctttctcctggagcatgtgcagagagtttggcaacgttcgctctcttgaccagaccccttctccctgacctggctcttccagccagggcacgagccctccttctatacctgctccccttcccccagtggggactgagttatgggagaaggggacatatttgtggccaaaatgatactaaccaaaggggcttccttgtcagggcctggtggagttggtgggtcatcggggctcactgcctcctgcccttctctcctgtctgacccccacttagcccttctctccttgcagcctagcagtttatagttctgagatggaaagttgaagggggcaagcaagacctctcctcagcccatgcccagctgtcaggagagaggtgcagggaggaaggccttgtgctgggacaacctctctcttgccttacctcagagagggactatgccctgacccctcctttctgaaaatcagtgccctccctgttgctctaggaggctcctgctggcttggtagaagacagaattcgatctgcctgtccctttttcccctggggtttgacacacaggctcctctcagcatgaggtggagcagtgaccaggtggagcagtgaccaggacgcctctggcccagtgctgcccagcctccccgcccgctcccaggcgccccatgtcctcacaggccaggacgccatggcaggatggagaggacttggtggatttttgtttcttgcctgacctcagtttcatgaaagaaagtggaagctacagaattattttctaaaataaaggctgaattgtctgaaaaa

SEQ ID NO: 329006 - DNA, 3104 bp, Artificial Sequence
  derived and/or modified sequence
ggcttttgactgactggatgtgggaatgttgtggaagacttctggcctgccatttcctgagaacgggactgctgagagaggagctgggaggagcactgcaaatttcactttggacacgtgagtcagagaaatctgcctcctgggccatgccgcttctaaggcctgtttcttctcatgagccccagcacaagacagatgggccagttctcacagtggataacttcccctgcctgagcaagagatgggatagtatctgggatctgtccatcaccagactctgagcttaataaggcagctgaatgaagggaggtaacggacccctgagaggggcactgaagtctgcagtggggggggaggggcctggacacaccccttcccccccagactcctccccgtcagggtcagctcagccatggactttggacctggataagaagagagaagctgcactttggtggatctgatttgggattctcagttttgaaaatggagtgctgaatggggatttgatgatctcctggagagcaactgagacaagagaagaaaggtgcatggctgcctcctaatcccatagtccagaggaggcatccctaggactgcgggcaagggagccgggcaagcccagggcagccttgaaccgtcccctggcctgccctccccggtgggggccaggatgctgaagaagcagtctgcagggcttgtgctgtggggcgctatcctctttgtggcctggaatgccctgctgctcctcttcttctggacgcgcccagcacctggcaggccaccctcagtcagcgctctcgatggcgaccccgccagcctcacccgggaagtgattcgcctggcccaagacgccgaggtggagctggagcggcagcgtgggctgctgcagcagatcggggatgccctgtcgagccagcgggggagggtgcccaccgcggcccctcccgcccagccgcgtgtgcctgtgacccccgcgccggcggtgattcccatcctggtcatcgcctgtgaccgcagcactgttcggcgctgcctggacaagctgctgcattatcggccctcggctgagctcttccccatcatcgttagccaggactgcgggcacgaggagacggcccaggccatcgcctcctacggcagcgcggtcacgcacatccggcagcccgacctgagcagcattgcggtgccgccggaccaccgcaagttccagggctactacaagatcgcgcgccactaccgctgggcgctgggccaggtcttccggcagtttcgcttccccgcggccgtggtggtggaggatgacctggaggtggccccggacttcttcgagtactttcgggccacctatccgctgctgaaggccgacccctccctgtggtgcgtctcggcctggaatgacaacggcaaggagcagatggtggacgccagcaggcctgagctgctctaccgcaccgactttttccctggcctgggctggctgctgttggccgagctctgggctgagctggagcccaagtggccaaaggccttctgggacgactggatgcggcggccggagcagcggcaggggcgggcctgcatacgccctgagatctcaagaacgatgacctttggccgcaagggtgtgagccacgggcagttctttgaccagcacctcaagtttatcaagctgaaccagcagtttgtgcacttcacccagctggacctgtcttacctgcagcgggaggcctatgaccgagatttcctcgcccgcgtctacggtgctccccagctgcaggtggagaaagtgaggaccaatgaccggaaggagctgggggaggtgcgggtgcagtatacgggcagggacagcttcaaggctttcgccaaggctctgggtgtcatggatgaccttaagtcgggggttccgagagctggctaccggggtattgtcaccttccagttccggggccgccgtgtccacctggcgcccccactgacgtgggagggctatgatcctagctggaattagcacctgcctgtccttcctgggcccctccttgccacatcatgagctgaggtgggaccacagtccccaggctgcatcggcctgcctgtgtttccctcttaggtgcatttatctttttgatttttccgagtggcatttaagtgcacaaatgataacaagaggattattctcccgttctcaagggagtcagatcaggggaactattctagggtatgttgcggggtattaagcaggaaaccactgtgtggtggggggcactgggcttgttggggccagaaatgtccacgtcctgagctttctcctggagcatgtgcagagagtttggcaacgttcgctctcttgaccagaccccttctccctgacctggctcttccagccagggcacgagccctccttctatacctgctccccttcccccagtggggactgagttatgggagaaggggacatatttgtggccaaaatgatactaaccaaaggggcttccttgtcagggcctggtggagttggtgggtcatcggggctcactgcctcctgcccttctctcctgtctgacccccacttagcccttctctccttgcagcctagcagtttatagttctgagatggaaagttgaagggggcaagcaagacctctcctcagcccatgcccagctgtcaggagagaggtgcagggaggaaggccttgtgctgggacaacctctctcttgccttacctcagagagggactatgccctgacccctcctttctgaaaatcagtgccctccctgttgctctaggaggctcctgctggcttggtagaagacagaattcgatctgcctgtccctttttcccctggggtttgacacacaggctcctctcagcatgaggtggagcagtgaccaggtggagcagtgaccaggacgcctctggcccagtgctgcccagcctccccgcccgctcccaggcgccccatgtcctcacaggccaggacgccatggcaggatggagaggacttggtggatttttgtttcttgcctgacctcagtttcatgaaagaaagtggaagctacagaattattttctaaaataaaggctgaattgtctgaaaaata

SEQ ID NO: 329007 - DNA, 3045 bp, Artificial Sequence
  derived and/or modified sequence
agtctcttctgcccctccccctcctgtacggccgctactctgcgcccggcttccttctcacaacctggttctgcccacacctgttcttcagccctgtgaacagtggctgtagaacagtctcaggccctgcagacccacctccctcgctcccgtggtggcggtggtgacgggctggggacgttgggtagaaaaatgggcgggatgtggaacgctgcgttgccggggcccacttccggaggacgggcggaagtggctgcggtggatggttaacacagaaatctgcctcctgggccatgccgcttctaaggcctgtttcttctcatgagccccagactcctccccgtcagggtcagctcagccatggactttggacctggataagaagagagaagctgcactttggtggatctgatttgggattctcagttttgaaaatggagtgctgaatggggatttgatgatctcctggagagcaactgagacaagagaagaaaggtgcatggctgcctcctaatcccatagtccagaggaggcatccctaggactgcgggcaagggagccgggcaagcccagggcagccttgaaccgtcccctggcctgccctccccggtgggggccaggatgctgaagaagcagtctgcagggcttgtgctgtggggcgctatcctctttgtggcctggaatgccctgctgctcctcttcttctggacgcgcccagcacctggcaggccaccctcagtcagcgctctcgatggcgaccccgccagcctcacccgggaagtgattcgcctggcccaagacgccgaggtggagctggagcggcagcgtgggctgctgcagcagatcggggatgccctgtcgagccagcgggggagggtgcccaccgcggcccctcccgcccagccgcgtgtgcctgtgacccccgcgccggcggtgattcccatcctggtcatcgcctgtgaccgcagcactgttcggcgctgcctggacaagctgctgcattatcggccctcggctgagctcttccccatcatcgttagccaggactgcgggcacgaggagacggcccaggccatcgcctcctacggcagcgcggtcacgcacatccggcagcccgacctgagcagcattgcggtgccgccggaccaccgcaagttccagggctactacaagatcgcgcgccactaccgctgggcgctgggccaggtcttccggcagtttcgcttccccgcggccgtggtggtggaggatgacctggaggtggccccggacttcttcgagtactttcgggccacctatccgctgctgaaggccgacccctccctgtggtgcgtctcggcctggaatgacaacggcaaggagcagatggtggacgccagcaggcctgagctgctctaccgcaccgactttttccctggcctgggctggctgctgttggccgagctctgggctgagctggagcccaagtggccaaaggccttctgggacgactggatgcggcggccggagcagcggcaggggcgggcctgcatacgccctgagatctcaagaacgatgacctttggccgcaagggtgtgagccacgggcagttctttgaccagcacctcaagtttatcaagctgaaccagcagtttgtgcacttcacccagctggacctgtcttacctgcagcgggaggcctatgaccgagatttcctcgcccgcgtctacggtgctccccagctgcaggtggagaaagtgaggaccaatgaccggaaggagctgggggaggtgcgggtgcagtatacgggcagggacagcttcaaggctttcgccaaggctctgggtgtcatggatgaccttaagtcgggggttccgagagctggctaccggggtattgtcaccttccagttccggggccgccgtgtccacctggcgcccccactgacgtgggagggctatgatcctagctggaattagcacctgcctgtccttcctgggcccctccttgccacatcatgagctgaggtgggaccacagtccccaggctgcatcggcctgcctgtgtttccctcttaggtgcatttatctttttgatttttccgagtggcatttaagtgcacaaatgataacaagaggattattctcccgttctcaagggagtcagatcaggggaactattctagggtatgttgcggggtattaagcaggaaaccactgtgtggtggggggcactgggcttgttggggccagaaatgtccacgtcctgagctttctcctggagcatgtgcagagagtttggcaacgttcgctctcttgaccagaccccttctccctgacctggctcttccagccagggcacgagccctccttctatacctgctccccttcccccagtggggactgagttatgggagaaggggacatatttgtggccaaaatgatactaaccaaaggggcttccttgtcagggcctggtggagttggtgggtcatcggggctcactgcctcctgcccttctctcctgtctgacccccacttagcccttctctccttgcagcctagcagtttatagttctgagatggaaagttgaagggggcaagcaagacctctcctcagcccatgcccagctgtcaggagagaggtgcagggaggaaggccttgtgctgggacaacctctctcttgccttacctcagagagggactatgccctgacccctcctttctgaaaatcagtgccctccctgttgctctaggaggctcctgctggcttggtagaagacagaattcgatctgcctgtccctttttcccctggggtttgacacacaggctcctctcagcatgaggtggagcagtgaccaggtggagcagtgaccaggacgcctctggcccagtgctgcccagcctccccgcccgctcccaggcgccccatgtcctcacaggccaggacgccatggcaggatggagaggacttggtggatttttgtttcttgcctgacctcagtttcatgaaagaaagtggaagctacagaattattttctaaaataaaggctgaattgtctg

SEQ ID NO: 329008 - DNA, 1919 bp, Artificial Sequence
  derived and/or modified sequence
ctgatcacatggcagcagcccttcttggggaagtcagctacccagcagcctgtagtcctcggctacccaccctcaccgcctggggtcccatggtgagacagctgggtgggcatcaggcttctgcagagggccaggccggagggagctgggcgagggagtggggctggctcctggcttgcaccggcctcgtggaatccaggcctcagacctgatcgctggcgaaactggctctgtgcgctggagcccctggtcttctgcgtctgtcctcctcccggccagactttactcctggctcagcgacaggtgcatggctgcctcctaatcccatagtccagaggaggcatccctaggactgcgggcaagggagccgggcaagcccagggcagccttgaaccgtcccctggcctgccctccccggtgggggccaggatgctgaagaagcagtctgcagggcttgtgctgtggggcgctatcctctttgtggcctggaatgccctgctgctcctcttcttctggacgcgcccagcacctggcaggccaccctcagtcagcgctctcgatggcgaccccgccagcctcacccgggaagtgattcgcctggcccaagacgccgaggtggagctggagcggcagcgtgggctgctgcagcagatcggggatgccctgtcgagccagcgggggagggtgcccaccgcggcccctcccgcccagccgcgtgtgcctgtgacccccgcgccggcggtgattcccatcctggtcatcgcctgtgaccgcagcactgttcggcgctgcctggacaagctgctgcattatcggccctcggctgagctcttccccatcatcgttagccaggactgcgggcacgaggagacggcccaggccatcgcctcctacggcagcgcggtcacgcacatccggcagcccgacctgagcagcattgcggtgccgccggaccaccgcaagttccagggctactacaagatcgcgcgccactaccgctgggcgctgggccaggtcttccggcagtttcgcttccccgcggccgtggtggtggaggatgacctggaggtggccccggacttcttcgagtactttcgggccacctatccgctgctgaaggccgacccctccctgtggtgcgtctcggcctggaatgacaacggcaaggagcagatggtggacgccagcaggcctgagctgctctaccgcaccgactttttccctggcctgggctggctgctgttggccgagctctgggctgagctggagcccaagtggccaaaggccttctgggacgactggatgcggcggccggagcagcggcaggggcgggcctgcatacgccctgagatctcaagaacgatgacctttggccgcaagggtgtgagccacgggcagttctttgaccagcacctcaagtttatcaagctgaaccagcagtttgtgcacttcacccagctggacctgtcttacctgcagcgggaggcctatgaccgagatttcctcgcccgcgtctacggtgctccccagctgcaggtggagaaagtgaggaccaatgaccggaaggagctgggggaggtgcgggtgcagtatacgggcagggacagcttcaaggctttcgccaaggctctgggtgtcatggatgaccttaagtcgggggttccgagagctggctaccggggtattgtcaccttccagttccggggccgccgtgtccacctggcgcccccactgacgtgggagggctatgatcctagctggaattagcacctgcctgtccttcctgggcccctccttgccacatcatgagctgaggtgggaccacagtccccaggctgcatcggcctgcctgtgtttccctcttaggtgcatttatctttttgatttttccgagtggcatttaagtgcacaaatgataa

SEQ ID NO: 329009 - DNA, 3175 bp, Artificial Sequence
  derived and/or modified sequence
gtgtggatggatgtgtgttgagagagagaatggatgtgtgtgtgtttacgaataaacttggaggggagggggcaacaggggtgggttttcgggctgagaaatgggaacactgtggggctgctgcaagcaggacttgggccttaaacattccaggagagtgttctcgggagtagccccgggaaggactttaacagaggttaacacagaaatctgcctcctgggccatgccgcttctaaggcctgtttcttctcatgagccccagcacaagacagatgggccagttctcacagtggataacttcccctgcctgagcaagagatgggatagtatctgggatctgtccatcaccagactctgagcttaataaggcagctgaatgaagggaggtaacggacccctgagaggggcactgaagtctgcagtggggggggaggggcctggacacaccccttcccccccagactcctccccgtcagggtcagctcagccatggactttggacctggataagaagagagaagctgcactttggtggatctgatttgggattctcagttttgaaaatggagtgctgaatggggatttgatgatctcctggagagcaactgagacaagagaagaaaggtgcatggctgcctcctaatcccatagtccagaggaggcatccctaggactgcgggcaagggagccgggcaagcccagggcagccttgaaccgtcccctggcctgccctccccggtgggggccaggatgctgaagaagcagtctgcagggcttgtgctgtggggcgctatcctctttgtggcctggaatgccctgctgctcctcttcttctggacgcgcccagcacctggcaggccaccctcagtcagcgctctcgatggcgaccccgccagcctcacccgggaagtgattcgcctggcccaagacgccgaggtggagctggagcggcagcgtgggctgctgcagcagatcggggatgccctgtcgagccagcgggggagggtgcccaccgcggcccctcccgcccagccgcgtgtgcctgtgacccccgcgccggcggtgattcccatcctggtcatcgcctgtgaccgcagcactgttcggcgctgcctggacaagctgctgcattatcggccctcggctgagctcttccccatcatcgttagccaggactgcgggcacgaggagacggcccaggccatcgcctcctacggcagcgcggtcacgcacatccggcagcccgacctgagcagcattgcggtgccgccggaccaccgcaagttccagggctactacaagatcgcgcgccactaccgctgggcgctgggccaggtcttccggcagtttcgcttccccgcggccgtggtggtggaggatgacctggaggtggccccggacttcttcgagtactttcgggccacctatccgctgctgaaggccgacccctccctgtggtgcgtctcggcctggaatgacaacggcaaggagcagatggtggacgccagcaggcctgagctgctctaccgcaccgactttttccctggcctgggctggctgctgttggccgagctctgggctgagctggagcccaagtggccaaaggccttctgggacgactggatgcggcggccggagcagcggcaggggcgggcctgcatacgccctgagatctcaagaacgatgacctttggccgcaagggtgtgagccacgggcagttctttgaccagcacctcaagtttatcaagctgaaccagcagtttgtgcacttcacccagctggacctgtcttacctgcagcgggaggcctatgaccgagatttcctcgcccgcgtctacggtgctccccagctgcaggtggagaaagtgaggaccaatgaccggaaggagctgggggaggtgcgggtgcagtatacgggcagggacagcttcaaggctttcgccaaggctctgggtgtcatggatgaccttaagtcgggggttccgagagctggctaccggggtattgtcaccttccagttccggggccgccgtgtccacctggcgcccccactgacgtgggagggctatgatcctagctggaattagcacctgcctgtccttcctgggcccctccttgccacatcatgagctgaggtgggaccacagtccccaggctgcatcggcctgcctgtgtttccctcttaggtgcatttatctttttgatttttccgagtggcatttaagtgcacaaatgataacaagaggattattctcccgttctcaagggagtcagatcaggggaactattctagggtatgttgcggggtattaagcaggaaaccactgtgtggtggggggcactgggcttgttggggccagaaatgtccacgtcctgagctttctcctggagcatgtgcagagagtttggcaacgttcgctctcttgaccagaccccttctccctgacctggctcttccagccagggcacgagccctccttctatacctgctccccttcccccagtggggactgagttatgggagaaggggacatatttgtggccaaaatgatactaaccaaaggggcttccttgtcagggcctggtggagttggtgggtcatcggggctcactgcctcctgcccttctctcctgtctgacccccacttagcccttctctccttgcagcctagcagtttatagttctgagatggaaagttgaagggggcaagcaagacctctcctcagcccatgcccagctgtcaggagagaggtgcagggaggaaggccttgtgctgggacaacctctctcttgccttacctcagagagggactatgccctgacccctcctttctgaaaatcagtgccctccctgttgctctaggaggctcctgctggcttggtagaagacagaattcgatctgcctgtccctttttcccctggggtttgacacacaggctcctctcagcatgaggtggagcagtgaccaggtggagcagtgaccaggacgcctctggcccagtgctgcccagcctccccgcccgctcccaggcgccccatgtcctcacaggccaggacgccatggcaggatggagaggacttggtggatttttgtttcttgcctgacctcagtttcatgaaagaaagtggaagctacagaattattttctaaaataaaggctgaattgtctg

SEQ ID NO: 329010 - DNA, 2246 bp, Artificial Sequence
  derived and/or modified sequence
agaaagggctggcgagtcgaaaggcgaggcggccgcggcagcgcttgggacgcgcctgggcaccgggctcgctccctgcgccccggagcaggccaagttcggggccaggacgtcgggaggacctggtgcatggctgcctcctaatcccatagtccagaggaggcatccctaggactgcgggcaagggagccgggcaagcccagggcagccttgaaccgtcccctggcctgccctccccggtgggggccaggatgctgaagaagcagtctgcagggcttgtgctgtggggcgctatcctctttgtggcctggaatgccctgctgctcctcttcttctggacgcgcccagcacctggcaggccaccctcagtcagcgctctcgatggcgaccccgccagcctcacccgggtcttccggcagtttcgcttccccgcggccgtggtggtggaggatgacctggaggtggccccggacttcttcgagtactttcgggccacctatccgctgctgaaggccgacccctccctgtggtgcgtctcggcctggaatgacaacggcaaggagcagatggtggacgccagcaggcctgagctgctctaccgcaccgactttttccctggcctgggctggctgctgttggccgagctctgggctgagctggagcccaagtggccaaaggccttctgggacgactggatgcggcggccggagcagcggcaggggcgggcctgcatacgccctgagatctcaagaacgatgacctttggccgcaagggtgtgagccacgggcagttctttgaccagcacctcaagtttatcaagctgaaccagcagtttgtgcacttcacccagctggacctgtcttacctgcagcgggaggcctatgaccgagatttcctcgcccgcgtctacggtgctccccagctgcaggtggagaaagtgaggaccaatgaccggaaggagctgggggaggtgcgggtgcagtatacgggcagggacagcttcaaggctttcgccaaggctctgggtgtcatggatgaccttaagtcgggggttccgagagctggctaccggggtattgtcaccttccagttccggggccgccgtgtccacctggcgcccccactgacgtgggagggctatgatcctagctggaattagcacctgcctgtccttcctgggcccctccttgccacatcatgagctgaggtgggaccacagtccccaggctgcatcggcctgcctgtgtttccctcttaggtgcatttatctttttgatttttccgagtggcatttaagtgcacaaatgataacaagaggattattctcccgttctcaagggagtcagatcaggggaactattctagggtatgttgcggggtattaagcaggaaaccactgtgtggtggggggcactgggcttgttggggccagaaatgtccacgtcctgagctttctcctggagcatgtgcagagagtttggcaacgttcgctctcttgaccagaccccttctccctgacctggctcttccagccagggcacgagccctccttctatacctgctccccttcccccagtggggactgagttatgggagaaggggacatatttgtggccaaaatgatactaaccaaaggggcttccttgtcagggcctggtggagttggtgggtcatcggggctcactgcctcctgcccttctctcctgtctgacccccacttagcccttctctccttgcagcctagcagtttatagttctgagatggaaagttgaagggggcaagcaagacctctcctcagcccatgcccagctgtcaggagagaggtgcagggaggaaggccttgtgctgggacaacctctctcttgccttacctcagagagggactatgccctgacccctcctttctgaaaatcagtgccctccctgttgctctaggaggctcctgctggcttggtagaagacagaattcgatctgcctgtccctttttcccctggggtttgacacacaggctcctctcagcatgaggtggagcagtgaccaggtggagcagtgaccaggacgcctctggcccagtgctgcccagcctccccgcccgctcccaggcgccccatgtcctcacaggccaggacgccatggcaggatggagaggacttggtggatttttgtttcttgcctgacctcagtttcatgaaagaaagtggaagctacagaattattttctaaaataaaggctgaattgtctg

SEQ ID NO: 329011 - DNA, 693 bp, Artificial Sequence
  derived and/or modified sequence
gagagaagctgcactttggtggatctgatttgggattctcagttttgaaaatggagtgctgaatggggatttgatgatctcctggagagcaactgagacaagagaagaaaggtaaggctcctgtctcatttcccacttaatgtcttgctgtgcctgtgcagaaggtgttgagctggcgagttcgcggaggctactattcaggaaatcttatccagatgagtacactggaagctacacctctccattactctgtccaggtgcatggctgcctcctaatcccatagtccagaggaggcatccctaggactgcgggcaagggagccgggcaagcccagggcagccttgaaccgtcccctggcctgccctccccggtgggggccaggatgctgaagaagcagtctgcagggcttgtgctgtggggcgctatcctctttgtggcctggaatgccctgctgctcctcttcttctggacgcgcccagcacctggcaggccaccctcagtcagcgctctcgatggcgaccccgccagcctcacccgggaagtgattcgcctggcccaagacgccgaggtggagctggagcggcagcgtgggctgctgcagcagatcggggatgccctgtcgagccagcgggggagggtgcccaccgcggcccctcccgcccagccgcgtgtgcctgtgacccccgcgccgg

SEQ ID NO: 329012 - DNA, 878 bp, Artificial Sequence
  derived and/or modified sequence
ggcgagtcgaaaggcgaggcggccgcggcagcgcttgggacgcgcctgggcaccgggctcgctccctgcgccccggagcaggccaagttcggggccaggacgtcgggaggacctgagcctggcagagagcaggtgtgtgatacacgtcgtcaggtgcatggctgcctcctaatcccatagtccagaggaggcatccctaggactgcgggcaagggagccgggcaagcccagggcagccttgaaccgtcccctggcctgccctccccggtgggggccaggatgctgaagaagcagtctgcagggcttgtgctgtggggcgctatcctctttgtggcctggaatgccctgctgctcctcttcttctggacgcgcccagcacctggcaggccaccctcagtcagcgctctcgatggcgaccccgccagcctcacccgggaagtgattcgcctggcccaagacgccgaggtggagctggagcggcagcgtgggctgctgcagcagatcggggatgccctgtcgagccagcgggggagggtgcccaccgcggcccctcccgcccagccgcgtgtgcctgtgacccccgcgccggcggtgattcccatcctggtcatcgcctgtgaccgcagcactgttcggcgctgcctggacaagctgctgcattatcggccctcggctgagctcttccccatcatcgttagccaggactgcgggcacgaggagacggcccaggccatcgcctcctacggcagcgcggtcacgcacatccggcagcccgacctgagcagcattgcggtgccgccggaccaccgcaagttccagggctactacaagatcgcgcgccactaccgctgggcgctgggccaggtcttccggcagtt

SEQ ID NO: 329013 - DNA, 564 bp, Artificial Sequence
  derived and/or modified sequence
ctctcttcgctttctttactcagaactgaagctctcattccccacccaccaaggaaaaacaaaagggaagaagccacagctggccccggcttgctttggcacaggtgcatggctgcctcctaatcccatagtccagaggaggcatccctaggactgcgggcaagggagccgggcaagcccagggcagccttgaaccgtcccctggcctgccctccccggtgggggccaggatgctgaagaagcagtctgcagggcttgtgctgtggggcgctatcctctttgtggcctggaatgccctgctgctcctcttcttctggacgcgcccagcacctggcaggccaccctcagtcagcgctctcgatggcgaccccgccagcctcacccgggaagtgattcgcctggcccaagacgccgaggtggagctggagcggcagcgtgggctgctgcagcagatcggggatgccctgtcgagccagcgggggagggtgcccaccgcggcccctcccgcccagccgcgtgtgcctgtgacccccgcgccggcggtgattcccatcctggtcatcg

SEQ ID NO: 329014 - DNA, 1104 bp, Artificial Sequence
  derived and/or modified sequence
ggccagcgctggggatcgggcctggggcctggattgcgacccgcggcgggccgcggctcctagccgagacggggcgggcgggaaccaggttaacacagaaatctgcctcctgggccatgccgcttctaaggcctgtttcttctcatgagccccagcacaagacagatgggccagttctcacagtggataacttcccctgcctgagcaagagatgggatagtatctgggatctgtccatcaccagactctgagcttaataaggcagctgaatgaagggaggtaacggacccctgagaggggcactgaagtctgcagtggggggggaggggcctggacacaccccttcccccccagactcctccccgtcagggtcagctcagccatggactttggacctggataagaagagagaagctgcactttggtggatctgatttgggattctcagttttgaaaatggagtgctgaatggggatttgatgatctcctggagagcaactgagacaagagaagaaaggtgcatggctgcctcctaatcccatagtccagaggaggcatccctaggactgcgggcaagggagccgggcaagcccagggcagccttgaaccgtcccctggcctgccctccccggtgggggccaggatgctgaagaagcagtctgcagggcttgtgctgtggggcgctatcctctttgtggcctggaatgccctgctgctcctcttcttctggacgcgcccagcacctggcaggccaccctcagtcagcgctctcgatggcgaccccgccagcctcacccgggaagtgattcgcctggcccaagacgccgaggtggagctggagcggcagcgtgggctgctgcagcagatcggggatgccctgtcgagccagcgggggagggtgcccaccgcggcccctcccgcccagccgcgtgtgcctgtgacccccgcgccggcggtgattcccatcctggtcatcgcctgtgaccgcagcactgttcggcgctgcctggacaagctgctgcattatcggccctcggctgagctcttccccatcatcgttagccaggactgcgggcacgaggagacggcccaggccatcgcctc

SEQ ID NO: 329015 - DNA, 572 bp, Artificial Sequence
  derived and/or modified sequence
gaaagggctggcgagtcgaaaggcgaggcggccgcggcagcgcttgggacgcgcctgggcaccgggctcgctccctgcgccccggagcaggccaagttcggggccaggacgtcgggaggacctgagcctggcagagagcaggtgtgtgatacacgtcgtcaggtgactgaccgaggaattcagggcaaacagatcatctcaatttgccttgctgatgtgccagctgggattacgctgatggatgaagctcttcagagctatgggcaatatctacatatttgattgtcaagaaacttcgtgtggaaatagcttcaaacttacacaaattgcaagaataaaaaatagtgcatggctgcctcctaatcccatagtccagaggaggcatccctaggactgcgggcaagggagccgggcaagcccagggcagccttgaaccgtcccctggcctgccctccccggtgggggccaggatgctgaagaagcagtctgcagggcttgtgctgtggggcgctatcctctttgtggcctggaatgccctgctgctcctcttcttctggacgcgcccagcacct

SEQ ID NO: 329016 - DNA, 549 bp, Artificial Sequence
  derived and/or modified sequence
aggcttttccatggtgcttccgccaaagcttgtgaccgagtccttcccgcctagggctggtgggcctcccctgctggtgcatggctgcctcctaatcccatagtccagaggaggcatccctaggactgcgggcaagggagccgggcaagcccagggcagccttgaaccgtcccctggcctgccctccccggtgggggccaggatgctgaagaagcagtctgcagggcttgtgctgtggggcgctatcctctttgtggcctggaatgccctgctgctcctcttcttctggacgcgcccagcacctggcaggccaccctcagtcagcgctctcgatggcgaccccgccagcctcacccgggaagtgattcgcctggcccaagacgccgaggtggagctggagcggcagcgtgggctgctgcagcagatcggggatgccctgtcgagccagcgggggagggtgcccaccgcggcccctcccgcccagccgcgtgtgcctgtgacccccgcgccggcggtgattcccatcctggtcatcgcctgtgaccgcag

SEQ ID NO: 329017 - DNA, 555 bp, Artificial Sequence
  derived and/or modified sequence
aaataaccgggagacaagctttcggaggcttttgactgactggatgtgggaatgttgtggaagacttctggcctgccatttcctgagaacgggactgctgagagaggagctgggaggagcactgcaaatttcactttggacacgtgcatggctgcctcctaatcccatagtccagaggaggcatccctaggactgcgggcaagggagccgggcaagcccagggcagccttgaaccgtcccctggcctgccctccccggtgggggccaggatgctgaagaagcagtctgcagggcttgtgctgtggggcgctatcctctttgtggcctggaatgccctgctgctcctcttcttctggacgcgcccagcacctggcaggccaccctcagtcagcgctctcgatggcgaccccgccagcctcacccgggaagtgattcgcctggcccaagacgccgaggtggagctggagcggcagcgtgggctgctgcagcagatcggggatgccctgtcgagccagcgggggagggtgcccaccgcggcccctcccgcccagccgc

SEQ ID NO: 329018 - DNA, 619 bp, Artificial Sequence
  derived and/or modified sequence
gatgtcaggggcgtgggtcctgatcacatggcagcagcccttcttggggaagtcagctacccagcagcctgtagtcctcggctacccaccctcaccgcctggggtcccatggtgcatggctgcctcctaatcccatagtccagaggaggcatccctaggactgcgggcaagggagccgggcaagcccagggcagccttgaaccgtcccctggcctgccctccccggtgggggccaggatgctgaagaagcagtctgcagggcttgtgctgtggggcgctatcctctttgtggcctggaatgccctgctgctcctcttcttctggacgcgcccagcacctggcaggccaccctcagtcagcgctctcgatggcgaccccgccagcctcacccgggaagtgattcgcctggcccaagacgccgaggtggagctggagcggcagcgtgggctgctgcagcagatcggggatgccctgtcgagccagcgggggagggtgcccaccgcggcccctcccgcccagccgcgtgtgcctgtgacccccgcgccggcggtgattcccatcctggtcatcgcctgtgaccgcagcactgttcggcgctgcctggacaagctgctgcatt

SEQ ID NO: 329019 - DNA, 607 bp, Artificial Sequence
  derived and/or modified sequence
gaaaagagccacgaaataaccgggagacaagctttcggaggcttttgactgactggatgtgggaatgttgtggaagacttctggcctgccatttcctgagaacgggactgctgagagaggagctgggaggagcactgcaaatttcactttggacacgtgagtcagaggtgcatggctgcctcctaatcccatagtccagaggaggcatccctaggactgcgggcaagggagccgggcaagcccagggcagccttgaaccgtcccctggcctgccctccccggtgggggccaggatgctgaagaagcagtctgcagggcttgtgctgtggggcgctatcctctttgtggcctggaatgccctgctgctcctcttcttctggacgcgcccagcacctggcaggccaccctcagtcagcgctctcgatggcgaccccgccagcctcacccgggaagtgattcgcctggcccaagacgccgaggtggagctggagcggcagcgtgggctgctgcagcagatcggggatgccctgtcgagccagcgggggagggtgcccaccgcggcccctcccgcccagccgcgtgtgcctgtgacccccgcgccggcggt

SEQ ID NO: 329020 - DNA, 1338 bp, Artificial Sequence
  derived and/or modified sequence
atgctgaagaagcagagcgccggcctggtgctgtggggcgccatcctctttgtcgcctggaatgctctactgctgctttttttttggactcggccagcccccggcagacccccatcagttagtgccctcgatggagacccggcaagccttacgcgggaagtaattcggcttgcccaagatgcggaggtggaattggagcgccagagaggcctgctgcagcagatcggggatgccctgagctctcagaggggacgtgtcccgactgcggcgccaccagctcaacccagagtccccgtgactcccgccccagccgtgatccccatccttgtgatcgcttgcgacaggtcaaccgtgcgccggtgcctggataagctgttgcactacagaccctccgccgagctgtttccaataatcgtgtctcaagattgcggccacgaggagacggcacaagccatcgcctcttacggaagtgcagtgacacatatccgccagcccgatctgtcctctatcgccgtgcctcccgatcaccgtaaattccagggctattacaaaatcgctcgccattaccggtgggccctggggcaggtcttccgacagtttcgatttcccgctgctgttgtggtggaggatgatctcgaggtggcccctgatttttttgaatacttccgggctacctacccactgttgaaggccgacccaagcctatggtgtgtttctgcttggaacgacaacggaaaggaacagatggtggacgccagccggcccgaactgttgtatcggaccgactttttccctggcctgggatggctgttgctggcagagttgtgggccgagctggagcctaaatggccaaaagcattctgggacgattggatgcgccggcctgagcagcgccaaggccgagcctgtatcaggccggagatctccagaaccatgacttttggacgcaagggagtctcccatggacagttcttcgatcagcacttaaagttcatcaagttgaatcagcagttcgtgcactttacccagctggacctgtcctacctgcagcgagaggcctacgatagagatttccttgctcgagtctatggcgcgccacaactgcaggtggagaaagttaggactaacgatagaaaagagttaggggaggtgcgcgtgcagtacactggtagagacagtttcaaagccttcgcgaaggctttgggagtcatggacgacctgaagtctggagtgcctcgggcgggttacaggggcattgtaacatttcaatttaggggccgccgagtccacctggccccaccactgacttgggagggatacgatccttcttggaattag

SEQ ID NO: 329021 - DNA, 1338 bp, Artificial Sequence
  derived and/or modified sequence
atgctgaagaagcagagcgccggcctggtgctgtggggcgccatcctcttcgtggcttggaacgctctactgctgctttttttttggacacgaccagccccaggccgtcctccgagcgtctcagcattggacggtgatcctgcgtctcttacacgcgaggtcatcaggctggcccaggacgccgaagtggagctggagaggcagcggggactactccagcagattggagatgctctttcttcccagcggggacgagtccccaccgcagctcctcctgcacagccccgcgtccccgtaacccccgcccctgcagtgattcccatcctggttattgcttgtgacagaagcaccgtgcgcaggtgcttggacaagttgttgcattaccgcccctctgcagagttgttcccaattatcgtatctcaggattgcggccacgaagaaaccgctcaagccatcgcctcctacggaagcgccgttacccatattaggcagcctgatctgagttctatcgccgtcccccctgatcacagaaagttccaggggtattataaaatcgcccgacattaccgctgggcgctcggtcaggtatttcgtcagttcagatttcctgctgccgtagtggtggaggacgacctggaagtggccccagatttctttgagtactttcgcgctacatatcccctgctgaaggcagaccccagcttatggtgtgtgtctgcatggaacgataatggtaaggagcagatggtggacgcctcccgccctgaacttctctatcggactgatttttttcctggccttggctggctattgttggcagagctatgggccgaactcgaacctaaatggcccaaggcattctgggacgactggatgaggagacctgagcaaagacaaggacgagcatgcataaggcctgaaataagcaggacgatgacattcggaagaaagggcgtgtcccatggacagtttttcgatcagcacctcaagttcatcaaactcaaccagcagtttgtccactttacgcagcttgatctctcctatctccagcgggaggcctatgaccgtgactttctggcacgcgtctacggtgccccccaactgcaagtggagaaggtgagaacgaatgacaggaaggaactgggggaagtgagagtccagtacaccggacgtgattcttttaaagccttcgctaaagcccttggtgtcatggacgacctgaaatccggtgtgcctagggcaggttatcgggggatcgtcacgtttcagtttagagggcgccgggtgcatctggcaccacccttgacctgggaggggtacgatcctagctggaattag

SEQ ID NO: 329022 - DNA, 1338 bp, Artificial Sequence
  derived and/or modified sequence
atgctgaagaagcagagcgccggcctggtgctgtggggcgccatcctgttcgtggcatggaatgcactgcttctgttattcttctggacacgccccgctcccggccgaccgccttccgtgtcagcactggacggcgaccccgcatctctgacaagagaagtgatacgactcgcacaagacgccgaggtggagctggagcgacaaaggggcttgcttcagcagatcggggatgccctatcctctcaaaggggacgggtgccaaccgcagccccacccgctcagccacgggtccccgtgacgcctgcccctgccgttatacccatcttggtgatagcctgcgaccggagtacagtacgaagatgtctggacaagttgcttcactaccggccgtctgccgagctgttcccgatcattgtgtcacaagattgcggacacgaggaaaccgcccaggccatagcatcctacggctcagcggtgactcatattcggcagcccgacctaagttccattgcagttccacccgaccatcggaaatttcaaggctattataaaattgctcgccactatcggtgggccttaggccaggtgtttaggcagtttaggttccctgcagccgttgtcgtcgaggatgacctggaggttgcccccgacttttttgagtatttccgagcgacataccccttattaaaggctgacccaagcctctggtgcgtgtccgcctggaacgacaacgggaaagagcagatggttgatgcttccagaccagagctgctttaccgtacagatttcttcccgggactgggctggctgcttctggccgaattgtgggcagagctcgagcctaaatggcctaaggcgttctgggacgattggatgaggcgcccagagcagcggcaaggacgcgcctgtattcgccctgaaattagcagaacgatgaccttcggccggaagggggtgtcacacggccagttttttgatcagcacctaaagttcatcaagttgaatcaacagtttgtccacttcacccaactcgatctcagctacctccagcgcgaggcttatgaccgcgactttcttgcacgagtctacggtgccccacaactccaagtagagaaggttaggactaatgaccggaaggagctgggcgaagtgagagtgcaatatactggcagggacagttttaaggcctttgccaaggctttgggtgtgatggatgatctcaagtctggcgtcccaagagcaggctaccgcggaatcgtgacgtttcaatttcgaggaagacgggtgcacctggcccctcctctcacttgggaaggatacgatccttcttggaactag

SEQ ID NO: 329023 - DNA, 1338 bp, Artificial Sequence
  derived and/or modified sequence
atgctgaagaagcagagcgccggcctggtgctgtggggcgccatcctgtttgtcgcatggaacgcccttcttctgttgtttttttggactaggcccgcccctggtcgcccaccatccgtgtctgcactggacggcgatccggcctcgttgactcgcgaagtgattcgcctggctcaggatgccgaagtggagctcgagcggcagagaggattgttacaacaaatcggcgacgcactgtctagccaacgcggacgggtcccaactgctgctccccccgctcagccccgtgtgcccgtcacaccggcccctgctgtgatccccattctggtgatcgcatgtgatagaagtaccgtgagacggtgcctcgataaactgctccactaccggccaagcgccgaactgttccccatcatcgtgagccaggactgtggacacgaagaaactgcacaggctattgcctcgtacgggagcgcagtcacacatattcgccagcccgacctcagctctattgctgtgcccccggaccatcgaaaattccagggctattataagattgccagacactaccgctgggccttgggccaggtgttccgacagttcagattccccgcagcggtggtggtggaggacgacctggaagtcgccccggacttcttcgagtactttcgtgccacatatcccctgctgaaggccgacccatctctgtggtgcgtgagtgcttggaacgataacggtaaagagcagatggttgacgccagccgtcccgaactgctgtaccgcacagactttttccccgggttaggctggcttctcttagcggagctctgggccgaactggagcccaaatggcctaaagccttctgggacgattggatgcgacgccctgagcagcgacagggacgcgcatgcatccgtccggagatttcgcggacaatgacattcggaaggaaaggggtttcccatgggcagttctttgatcaacatctcaagttcatcaaactcaatcagcagtttgtccactttacacagctggatttgtcctatcttcagcgcgaggcttacgatagggactttcttgcacgggtgtatggcgctccccaacttcaagtggaaaaggttaggacaaatgatcgtaaggagttgggggaggttcgggtgcaatacacaggaagagatagtttcaaggctttcgctaaagccttgggggtaatggatgacttaaagtccggagtgccccgcgcgggataccggggcatcgtgacgtttcagtttcgcggaagacgggtgcatctagcacctcctttgacctgggagggttacgacccatcgtggaattag

SEQ ID NO: 329024 - DNA, 1338 bp, Artificial Sequence
  derived and/or modified sequence
atgctgaagaagcagagcgccggcctggtgctgtggggcgccatcctttttgtggcctggaacgcgctgcttttgctctttttttggacaaggcccgccccagggcgcccgcccagcgtttccgccctggatggagatccagcaagtctcactagagaggtgatacgactcgcgcaggacgcagaagtggagctggagaggcagaggggcctcctgcagcaaataggagacgccttgtcgtcacagcggggtcgcgtcccaacagcggccccacctgcccagcccagagtccccgttacaccagcccccgccgtgatccctatcctcgttatcgcgtgtgaccgcagtaccgtaagacggtgcttagataaactcttgcactaccgacctagtgcagagctgtttcccataatcgtgtctcaggactgtgggcacgaggagacagcccaggcaatcgcttcttatggctccgcagtcacgcacattcgccaaccagacctttcctctatcgctgttcctcctgatcaccgtaagtttcaggggtattacaagatagctagacattataggtgggccctaggccaggtgttccgccagtttcgtttccctgccgcggttgtggttgaagacgacctggaggtggctcctgattttttcgagtacttcagggctacgtacccacttttgaaggctgacccatccctttggtgtgttagcgcatggaacgacaacgggaaggaacagatggtggatgcatccaggcctgaactgctgtaccgcaccgacttcttccccggactcggttggctcttgctggcagagctttgggccgagctagaacccaagtggccaaaggcattctgggacgactggatgcgtcgtcctgaacaacgccagggtagggcgtgtatcaggccagagatctcccggacaatgaccttcggcagaaagggcgtttcgcacggacagttctttgaccaacatcttaagtttattaaactcaaccagcagttcgtccattttactcagttagacctctcttatctccaacgagaggcctatgatcgcgactttctggcacgggtctatggggccccccagttgcaggtagagaaggtgcgtaccaatgaccgaaaggagctcggggaagtgcgagtccagtacacaggacgggattcttttaaggctttcgccaaggcgttaggcgtcatggacgatctcaaaagtggcgtcccccgagccggctatcgaggcatcgtgacttttcagttccgtggccgtcgggtgcatctggccccaccactgacatgggagggttacgatccctcctggaactag

SEQ ID NO: 329025 - DNA, 909 bp, Artificial Sequence
  derived and/or modified sequence
atgctgaagaagcagagcgccggcctggtgctgtggggcgccatcttgtttgtcgcgtggaacgctctgctgctgttgtttttttggacaaggcctgctcctgggaggcccccctccgtctccgcactagacggtgatcctgccagcctcacaagggtttttcgtcagtttcggttccctgctgccgtagttgtggaggacgatctagaggtagcacctgactttttcgagtatttccgggcgacttacccactacttaaagcggacccttctctgtggtgcgtcagcgcttggaacgataatgggaaggaacagatggtggacgcttctcgcccagagttgctctatcgcaccgatttcttccccggcttaggctggcttctcttggccgagttatgggcggaactggaaccaaaatggcctaaggctttttgggacgattggatgcgacgtccagaacaacgccagggccgcgcctgtatccgccctgagatcagtcgcactatgaccttcggccggaagggagttagtcacggtcagttttttgaccagcacctcaaattcattaaactgaaccagcaattcgttcactttacacagcttgatctttcatatctccagcgcgaagcctatgacagggatttcctagcccgagtttacggggcacctcagttacaggttgagaaggtcagaaccaacgacagaaaggagctgggtgaagtgcgagtacaatatacaggaagagacagcttcaaggcttttgcgaaggccctgggcgtaatggacgacctgaaaagcggcgtcccccgggcaggataccgaggaattgtgactttccagtttaggggtcgacgggtgcacctggctccccccctgacctgggaggggtatgatccaagttggaactag

SEQ ID NO: 329026 - DNA, 312 bp, Artificial Sequence
  derived and/or modified sequence
atgctgaagaagcagagcgccggcctggtgctgtggggcgccatcctattcgtggcctggaatgcccttcttcttcttttcttctggacacgccctgccccggggagacccccgtcagtgtcagcacttgacggcgaccccgcctccttgactcgggaagtaatcaggctagcacaggacgctgaagtagagttggagcggcaaaggggattactgcaacaaatcggtgacgctttatccagccagagaggcagagtgcccaccgcagccccccctgcccagccaagagtcccagttactccagcaccttag

SEQ ID NO: 329027 - DNA, 600 bp, Artificial Sequence
  derived and/or modified sequence
atgctgaagaagcagagcgccggcctggtgctgtggggcgccatcctgttcgttgcttggaatgctcttttgctactgttcttctggactaggcccgcccccgggcggcccccctcggtctccgccctggacggtgaccctgctagtctcacacgcgaagtcatccgactggcacaagatgccgaggtggagctggagcggcagcggggcctactacagcagatcggggacgccctgtcttcccaaagaggacgcgtgcccacagccgcacctcccgcacagccaagagttccggtcacccccgcacctgctgtgatcccaattctagtgattgcctgtgacagatccacagttaggaggtgcctggacaagctgttgcattaccggcccagcgctgaactgttccctatcatagtatctcaagattgcggccatgaagagacggcacaggccatagcatcttacgggagcgccgtcactcacattcggcagcctgatctctcctcaattgccgttccgccggaccatagaaagttccagggctactacaagatagctcggcattataggtgggccctgggacaagtgttcaggcagtag

SEQ ID NO: 329028 - DNA, 336 bp, Artificial Sequence
  derived and/or modified sequence
atgctgaagaagcagagcgccggcctggtgctgtggggcgccatcctgttcgtggcctggaacgccttgttgcttttattcttttggacccggccagcccccggtcgccctccctctgtcagtgctctggatggagacccagcgtcgctgacccgggaagttatccgcctggcacaggatgctgaggtggaactcgaacgacaacgcggcctgctgcagcagattggagacgctctctcctctcagcgaggccgggtgcccacagctgcccctcctgcacagccaagagttcctgtgactcctgctcctgccgttatcccaattctggtgatttag

SEQ ID NO: 329029 - DNA, 465 bp, Artificial Sequence
  derived and/or modified sequence
atgctgaagaagcagagcgccggcctggtgctgtggggcgccatcctctttgtggcctggaatgccctgctgctcctgttcttctggacacgccccgctccaggtcgtcctccgtcagtgtcagccttagacggggaccctgcttctctgaccagggaagtcattagactcgcacaagacgccgaggtcgagctggagagacaaaggggcctcctacagcagattggcgatgcattgtcctcccagcggggccgcgtaccaacggcagcaccgcctgcacagccaagagtgcccgtgactcctgcaccagctgtgataccgatactagtgatagcttgtgatcgatcgacggtgcgcaggtgcctggataagctgctacactaccgcccatcagccgaactcttcccaattatcgtgtctcaggactgtggacacgaagaaaccgcccaggcgatcgccagttag

SEQ ID NO: 329030 - DNA, 105 bp, Artificial Sequence
  derived and/or modified sequence
atgctgaagaagcagagcgccggcctggtgctgtggggcgccatcctgttcgttgcatggaatgcactgttgctgttattcttttggacacgccccgcaccttag

SEQ ID NO: 329031 - DNA, 348 bp, Artificial Sequence
  derived and/or modified sequence
atgctgaagaagcagagcgccggcctggtgctgtggggcgccatcctgttcgtggcctggaatgctctgctgctcctatttttttggacaagaccagccccagggcgacctcctagcgtctcagctcttgatggtgatcctgctagtttgactcgggaagtgatcagactggctcaggacgccgaagtggagttggagcgccaacggggcctgctacaacagatcggagatgccctatcaagtcaacgaggccgtgttccaacagcggcacctcctgcgcagccccgggtgccagtaacaccggcccctgcagtgatcccaatcttagtgatcgcctgtgatcgatag

SEQ ID NO: 329032 - DNA, 288 bp, Artificial Sequence
  derived and/or modified sequence
atgctgaagaagcagagcgccggcctggtgctgtggggcgccatcttgttcgtcgcttggaacgcgctgcttctactcttcttctggacccggccggccccagggcgccctcccagcgtatctgccctggatggagacccagcatctctgactagagaggtgatacggctggctcaggatgccgaggtggagctggagcgccagagaggactcctgcagcagattggggacgctctcagtagccagcggggtagggtaccgacggccgctccccctgcccaaccttag

SEQ ID NO: 329033 - DNA, 384 bp, Artificial Sequence
  derived and/or modified sequence
atgctgaagaagcagagcgccggcctggtgctgtggggcgccatcctgttcgtcgcctggaatgccctgctcctgttgtttttttggactcgccctgctcctggacgccccccatcagtgtcagccctggacggtgatccagcatctttgacaagggaagttataaggttggcacaagacgccgaagtagagctagaaagacagcggggcctcctgcaacagattggggatgcactgagcagccagcgaggacgtgtgccaacggctgctcccccagctcagcctagagtgccggtgacgccagcacccgccgtgatccccatcctggtgattgcatgcgaccggagcactgtgcgccgatgtttagacaagcttcttcattag

SEQ ID NO: 329034 - DNA, 318 bp, Artificial Sequence
  derived and/or modified sequence
atgctgaagaagcagagcgccggcctggtgctgtggggcgccatcttgttcgtcgcgtggaacgcactcctgttacttttcttctggactcgacctgccccaggaaggccccccagcgtgagcgccctagatggtgacccggcatctctgacccgcgaagttatccgtcttgcccaggacgcggaagtggaattggaaaggcaacggggattacttcaacagatcggagatgccttgagcagtcaaagagggcgcgtaccaaccgccgccccacccgcccagcccagggtgcccgttacccccgcgcctgctgtttag

SEQ ID NO: 329035 - DNA, 1338 bp, Artificial Sequence
  derived and/or modified sequence
atgctcaagaaacagagcgccggtctcgtcctgtggggagccatcctatttgtggcatggaatgctttgcttcttttgttcttctggacaagacctgcccctgggaggcctccatccgtttccgcgctcgacggggatcccgcttccttgacccgggaggtgatcaggctagcccaggacgcagaggtggaactcgagcgtcagaggggtctgctgcaacagataggagacgccctttcttctcaacggggaagagtgcctacagctgcccctcccgctcagcctcgggtgccggtaaccccagcccctgctgtaatccccattctggtgattgcctgcgacagatctacagtacgtagatgcctcgataaactcctgcattatcgcccatcagcggaactcttccccatcatagtgtcccaggattgtggccatgaggaaacggctcaagccattgcctcgtatggatccgcagtgacccacattcgacagcctgatttatcaagcattgccgtaccaccggaccataggaaattccaggggtactacaaaatcgctcggcactatagatgggcactgggtcaagtgttccggcagtttcgctttcccgcagcagtggtggtggaggacgatctcgaagtcgctccagatttcttcgagtacttccgagcaacctacccacttctgaaagccgatccctccctttggtgcgtgtcagcatggaacgataatgggaaagagcagatggtggatgcttccaggcccgaacttctctaccgcaccgatttctttcctggacttggctggctcctgttagcagagctttgggctgagctggaacccaagtggccaaaagccttttgggatgactggatgagacggccagaacagcggcagggcagagcctgcatccggcctgagattagtcgaactatgacattcggacggaagggagtttctcacggacagttttttgaccagcacctgaaattcatcaagctgaaccaacaattcgttcacttcactcagctggatttgtcatatcttcaacgtgaagcctacgatagagatttccttgctcgggtgtatggcgctccacaacttcaggttgaaaaggtccgaacaaacgaccggaaggagctgggcgaggtgagagtgcagtacacgggtcgggacagcttcaaggcatttgcaaaggctctgggcgtcatggatgatcttaagtccggtgtccccagggccggttataggggaattgtgacttttcagttccgtggtcgtcgcgtgcatctggcgcctcccctgacctgggaggggtacgaccccagctggaactag

SEQ ID NO: 329036 - DNA, 1338 bp, Artificial Sequence
  derived and/or modified sequence
atgctgaagaagcagagtgctggcctcgtgttatggggagctatactctttgtggcttggaacgcattactcctgctgtttttttggacccgtccagcacccggaagacccccaagtgtgtctgccttggatggcgatcctgcctccctcaccagagaagtaattagattagcacaagacgcggaggtagaattagaaaggcaacggggactgcttcaacagattggggacgccttgagcagccagaggggtagagtcccaaccgctgccccacccgctcagcctcgggttccagtgacccccgctcccgctgtcatccccattttggtcatagcgtgcgacaggagcaccgtgcgcagatgtctggataagttacttcactatcgtcctagcgcagagctgttcccgataattgtgtctcaggactgtggtcacgaagaaactgcccaggcaatcgcgtcttatggaagcgccgtgacacacattcgacagccagatcttagttcaattgccgtgccgcctgatcaccggaagtttcaggggtattataaaattgccagacactatcgctgggctctcgggcaagtcttcagacaatttaggttccctgccgctgtggtagtggaggatgatctggaagtggctcccgatttttttgagtatttccgggctacataccctctcctgaaagcagaccccagcctctggtgcgttagcgcgtggaacgataacggcaaagagcagatggtcgacgcttcacggccagaattgctgtacaggaccgacttcttccctggactggggtggttactcttggcagagttgtgggccgaactggaacccaagtggcccaaggctttttgggacgactggatgcggcgacctgagcagcgccaaggcagggcgtgtatccggccagagattagccgtacaatgacattcggcagaaaaggggtcagccacggccagttctttgatcagcacctgaagttcatcaagctgaatcagcagtttgtgcattttacacagctggacctgagttacttacagcgcgaggcatacgatagggatttcctagcacgagtatatggagcaccgcagctgcaggtcgagaaggtgcggactaacgatcggaaagagctgggggaagttcgagtccagtacactggaagagacagtttcaaggcattcgctaaagccctgggagttatggatgacctgaagagcggcgtccctcgagctggttaccgcggaatagtcacctttcaatttagagggagaagagtgcacctggcccctcccctcacctgggagggctacgatccttcctggaactag

SEQ ID NO: 329037 - DNA, 1338 bp, Artificial Sequence
  derived and/or modified sequence
atgctcaaaaaacagtccgcaggtcttgtcttgtggggagctatcctctttgtcgcatggaacgcgctgctactcttgttcttctggacacggccagcccctgggcgacctccatcggtgtcagcactggatggggaccccgcatccctgactcgagaagtcattagactagcgcaagacgctgaggttgaactcgaaagacaacgtgggttactccagcaaatcggagacgccctttcttctcagcggggaagagtgcctaccgcagcccctccagctcagccccgtgtccctgtgacaccagcacccgcagtcataccaattcttgtcattgcttgtgatcggtcaaccgttcggagatgcctagataagctgttgcactaccggccttcagccgagcttttcccaattattgtgagccaagattgtggccatgaagagaccgcacaggccattgcctcctatggctctgccgtgactcacatccgccaacccgacctatcgtccatagctgtgccgccagaccatagaaagttccaggggtactacaagatcgccagacactatcgttgggcacttggccaggtattccgccagttccgctttccggcagcagtcgtggtcgaagacgatctcgaagtggcaccagacttctttgagtacttccgtgccacctaccccttactcaaagccgatccctccctgtggtgtgtgagcgcatggaatgataacggtaaggagcagatggttgatgctagtcgccctgagctcctgtaccggacagattttttccccggtctcggctggctgctcctggccgagttgtgggccgagcttgaacctaagtggcctaaggcgttttgggatgattggatgcgtaggcccgaacagaggcagggcagagcctgtattcggcctgagattagccgcaccatgacattcggacggaaaggtgtcagccatggacaattctttgatcagcacctcaagtttatcaaacttaaccagcagttcgttcatttcactcagctggacttgagttacctgcaaagagaggcctacgatcgggacttccttgccagagtgtatggggctccccagctccaagtcgaaaaggtgcgtaccaatgatcgcaaagagctgggtgaagtgcgtgttcaatataccggaagggacagctttaaagccttcgcaaaggcccttggtgtcatggacgacctcaaaagcggtgtgcctagagcaggctataggggcatcgtcacatttcagttccggggaagacgcgtgcatctggccccacccctgacctgggagggatatgaccctagttggaactag

SEQ ID NO: 329038 - DNA, 1338 bp, Artificial Sequence
  derived and/or modified sequence
atgcttaagaagcagtctgccggactggtgctgtggggtgcaattctctttgtcgcttggaatgcactccttctgctgtttttctggacacgcccagcgccaggaagacctccctccgtgagtgctctggatggcgacccagcatctctgactagggaggtcatacggctcgcccaggacgccgaggtggagctcgagcgccagagggggttacttcagcagattggagacgcactctcatctcagaggggcagggtgccaaccgctgccccacctgctcaacccagggtgcccgtcaccccggcaccagccgtcattcccatcctggtcattgcctgtgaccgcagtacagtacggcgatgtctcgataagctgctgcattaccggccttctgctgaactctttcctatcatagtgagtcaggattgcggacatgaggaaacagcccaggccattgcaagttatgggtccgcagttacccacatacgccagcccgacctctcctccatcgccgtcccaccggatcacaggaagtttcagggatactacaagatcgcaagacactaccgttgggccctggggcaagtcttccgccagttcagattcccggcagcggttgttgtggaggacgatctcgaggttgccccagactttttcgagtactttcgggctacttacccgctcctgaaagccgacccctccctgtggtgcgtaagcgcctggaacgacaatggcaaagaacaaatggtggacgcatctaggccggaactgctgtatagaaccgactttttccctggcctcggttggctcctcctcgccgagctgtgggctgagttggaacccaagtggccaaaggcgttctgggatgactggatgcgacgacctgaacagcgacaggggcgagcctgtatacgacctgaaatcagtaggaccatgacattcggacgaaaaggtgtctctcacggccaattttttgaccagcatctcaaattcatcaaattgaaccagcaatttgtgcactttactcagctggacttgtcgtatctgcagagggaggcttatgatagggattttctggcccgtgtgtatggtgcaccccagctccaggtcgagaaagtgcggacgaacgatcggaaggaattaggcgaggtgagggttcagtataccgggcgagacagttttaaggccttcgcaaaggccctgggggtgatggacgatcttaaatctggggtcccacgcgcaggatataggggaatcgttacattccagttccgcggacgccgtgttcatctggcccctccactaacctgggagggatacgaccccagctggaactag

SEQ ID NO: 329039 - DNA, 1338 bp, Artificial Sequence
  derived and/or modified sequence
atgctcaaaaagcagtctgccggattagtattatggggcgcaatcctgtttgttgcctggaacgccctgcttctgctatttttctggacgcggccagctccaggtcgtcccccatccgtgtcagcactcgatggcgacccagcctccctcactcgggaagtgatcaggctggctcaggacgcagaggtcgagctggagcgtcagaggggcctgctgcagcagattggcgacgccttgtcaagccagagaggcagagtacctactgccgcacccccagctcaacctcgggttcctgttacacctgcacccgcagtgattcctattctggtcattgcatgcgatcggagcacagtgagacggtgtctggataagctgctgcattatcgacctagtgccgaactgttcccgatcatcgttagccaagactgtggccatgaggagaccgcccaggctatcgcaagctacggcagtgcagtaactcacatccgacagccagatttaagcagcatcgcagtacccccagaccatcgcaagtttcaagggtattacaaaattgcacgtcattaccggtgggcactcggtcaggtcttcagacaatttcgattcccagcagcagtggtggttgaggatgatttggaggtagcaccagacttttttgagtacttcagggcgacctatcccctgcttaaagccgacccaagcctttggtgcgtgtcagcctggaacgataacggtaaggagcagatggtcgatgcaagtaggcctgagctgctttacaggacagatttctttccagggctgggctggcttctgttggccgagctgtgggcagagctggagcctaagtggcctaaggccttttgggacgattggatgagaagacccgaacagagacagggcagggcttgcatccgtcccgaaatatcccggacgatgacttttggaagaaaaggcgtttcccacgggcagttctttgatcagcacttgaagttcatcaaactgaatcagcagttcgtgcatttcacccagctggacctgtcctatctccagcgcgaggcatacgatagagatttcttggccagagtctacggggctccacagctgcaggtggagaaggttaggaccaatgatcggaaggagctgggcgaagtgagagtgcagtacacaggacgagatagttttaaggccttcgcaaaggcccttggcgtcatggacgatctgaagagcggcgtgccgagagccggttatcgcggaatagtaacattccagttccgcggtaggagggtgcacctggccccacccctgacttgggaaggatatgatccctcatggaattag

SEQ ID NO: 329040 - DNA, 909 bp, Artificial Sequence
  derived and/or modified sequence
atgcttaaaaaacagagtgccggactggtgttatggggggcaattctgtttgtggcttggaatgcacttctgctgctgttcttttggacgcgccctgcccctggcaggccaccatcagtctccgccctggatggagatcctgcatccttgacaagggtcttcaggcagttcagatttccagcggctgtggtggttgaagatgatctcgaggtggccccagactttttcgagtacttccgcgcaacttatcctcttctcaaagcagacccttctctgtggtgcgtgagcgcttggaacgacaatggtaaagaacagatggtggacgcctcccgaccagagcttctctatcggaccgatttcttcccgggactgggttggctactccttgccgaactctgggctgaacttgagcctaagtggcctaaagccttttgggacgactggatgcggaggcctgagcaacgccaggggagagcatgtatccggccagaaataagtcggacaatgactttcggtagaaagggcgtaagtcatggccagttcttcgaccaacacctcaaatttataaaattgaaccaacagtttgttcacttcacccagctggacctgagctatcttcagagagaggcctatgaccgcgactttttggcgagggtatacggggctcctcagcttcaagtggaaaaggtgcggacgaacgaccgcaaggagctgggggaagtccgagtgcagtacacaggcagggacagcttcaaggcctttgccaaagccttgggggtgatggatgatctgaaatcaggggtcccaagagctgggtacaggggtatcgtgacgtttcaattcagggggaggcgagtgcacctggcacccccactcacctgggagggttatgatccgtcatggaactag

SEQ ID NO: 329041 - DNA, 312 bp, Artificial Sequence
  derived and/or modified sequence
atgcttaagaaacagtccgctgggctcgtgctgtggggcgcaattttgttcgtggcctggaatgccctgctgctgttattcttctggacaaggcccgcacccggtaggccgccaagtgttagcgcgctggatggggatccggcaagcctcaccagggaggtgattcgactcgcacaagatgctgaggtggagttagaacggcaacgtgggctgcttcagcagatcggcgacgccctgtccagtcaaaggggcagggtgcctactgctgcccctccggctcagcctcgggtcccggtcactcctgccccatag

SEQ ID NO: 329042 - DNA, 600 bp, Artificial Sequence
  derived and/or modified sequence
atgttaaaaaagcaatccgccggtttggtgctttggggcgcaatactgttcgtggcctggaatgccttattactcttgtttttctggactcggcctgccccaggcagaccaccttcagtgtccgccctggacggagaccctgcaagtctcacaagggaggtgatccggctggcccaagatgcggaagtggaactcgaaagacaaaggggactcctccagcagatcggcgacgcactgtcttcacagaggggacgggttcctaccgccgctcccccagcccagccacgcgtacctgtcaccccagcacccgctgttatcccaatcctggtaatagcgtgcgacagatctactgtgagaaggtgcctggacaagctgctgcattacagaccctcagccgagcttttccctattatcgtgagccaggattgtggtcatgaagagaccgcccaggcgatcgcctcctacggctccgcagtaacccatatccgccagcccgacctgagtagtatcgccgtcccacccgaccatcgcaaatttcagggatattataaaatcgcgcgacactataggtgggccctgggacaggtgttccgccagtag

SEQ ID NO: 329043 - DNA, 336 bp, Artificial Sequence
  derived and/or modified sequence
atgctgaaaaagcagagcgcaggtcttgtcttgtggggcgctatactcttcgtcgcatggaatgccctcttactgctgtttttttggacaaggcccgctccaggaagacccccatctgtgtccgctttggacggtgaccctgctagcctcacccgagaagtgattcgactggcccaggacgctgaggttgaactggagcggcagagaggtttactgcaacagattggggacgctctttcgtctcaacgcggaagggtgcccactgccgctcctcctgcacaaccccgagttcctgtgacccccgctcccgctgtaatccccatcttggtgatatag

SEQ ID NO: 329044 - DNA, 465 bp, Artificial Sequence
  derived and/or modified sequence
atgctcaagaagcagagtgcaggcctcgtgctttggggagctattctcttcgtcgcgtggaatgcactcctactcctctttttttggactcgccctgctcctggtagaccacctagcgtatcagccttggacggcgatccagcatctctgacacgcgaggttatcaggctggctcaggacgcagaggtggaacttgaacgccagcgaggcttgctgcaacagatcggtgatgcgctcagctcgcaaagaggtcgggtccctactgccgctcccccagcccaacctcgggtgccagtaactccggcacctgcggttatccccattctagtgattgcatgtgaccgaagcacagtgagaagatgcctggataaactgttgcactaccggccttctgcggagttgtttcccatcatcgtgtcacaggattgcggacacgaggagacagctcaggccatagcctcatag

SEQ ID NO: 329045 - DNA, 105 bp, Artificial Sequence
  derived and/or modified sequence
atgctgaaaaaacagtcagctggtctcgtgctatggggagccattttatttgtggcttggaacgccctcctcctgctgttcttttggaccagaccagccccatag

SEQ ID NO: 329046 - DNA, 348 bp, Artificial Sequence
  derived and/or modified sequence
atgcttaagaaacagagtgcaggcctggtgctttggggtgccatcctcttcgtggcttggaatgccctgttgctcctgtttttttggacacgccctgccccaggtcgcccaccgagtgttagcgcgctcgacggtgaccccgcttctcttacaagagaggtgatccgtcttgcccaggatgccgaagttgagctggagcgccagaggggactgctgcagcagattggagacgcactgtccagtcaaaggggtagggtgcctactgccgctcctcctgcacagcctagagtgcccgtgacccccgctccggctgtaattcctattctggtgattgcttgtgaccgctag

SEQ ID NO: 329047 - DNA, 288 bp, Artificial Sequence
  derived and/or modified sequence
atgttgaagaagcagtctgctgggctggttctatggggcgctattctatttgtcgcttggaatgcactcctgttgttgttcttttggacccgccctgcccctggtagacccccttccgtttcggcactggacggggaccccgcaagcctgacacgagaggttatacgcctagcccaggacgccgaagtagagctcgaaaggcagcggggattgctacagcagatcggcgatgccctctcctcacaaagaggcagagttcctactgccgcaccgcctgcacagccttag

SEQ ID NO: 329048 - DNA, 384 bp, Artificial Sequence
  derived and/or modified sequence
atgttgaagaagcagagtgctgggcttgtgctttggggggctattctgttcgtggcctggaacgccctcctcctcctattcttttggacaaggccagctccaggaagaccgcctagcgtgagtgcactggatggtgaccccgcttcactgactagggaggtgatacgcctggcccaggatgccgaggtggagctggagcgccagagggggctcctgcagcagattggagacgcccttagttctcagaggggacgcgttccaaccgccgctcctcctgcacaacccagagttccagtaacccctgcgcctgccgtgatccctatccttgtcatcgcatgcgaccgcagtaccgtacgcaggtgcttggataagcttctgcactag

SEQ ID NO: 329049 - DNA, 318 bp, Artificial Sequence
  derived and/or modified sequence
atgctcaaaaagcagtcagcaggtttggtcttgtggggggcaatcctgttcgtagcctggaatgccctgctgctgcttttcttttggactagacccgcaccgggtcggcctccctcggtcagcgccctggatggtgatccagcgagccttactagagaggtcattaggttggctcaggatgcagaagttgaactggaaaggcagcgtggcctcctccagcagatcggtgacgccttgtccagccaaaggggcagggtacccaccgctgcgcctccggctcagcccagggtgccggtcacccctgcacccgctgtctag

SEQ ID NO: 329050 - DNA, 1338 bp, Artificial Sequence
  derived and/or modified sequence
atgctgaagaagcagagcgccggcctggtgctgtggggcgccatcctgttcgtggcctggaacgccctgctgctgctgttcttctggaccagacccgcccccggcagaccccccagcgtgagcgccctggacggcgaccccgccagcctgaccagagaggtgatcagactggcccaggacgccgaggtggagctggagagacagagaggcctgctgcagcagatcggcgacgccctgagcagccagagaggcagagtgcccaccgccgccccccccgcccagcccagagtgcccgtgacccccgcccccgccgtgatccccatcctggtgatcgcctgcgacagaagcaccgtgagaagatgcctggacaagctgctgcactacagacccagcgccgagctgttccccatcatcgtgagccaggactgcggccacgaggagaccgcccaggccatcgccagctacggcagcgccgtgacccacatcagacagcccgacctgagcagcatcgccgtgccccccgaccacagaaagttccagggctactacaagatcgccagacactacagatgggccctgggccaggtgttcagacagttcagattccccgccgccgtggtggtggaggacgacctggaggtggcccccgacttcttcgagtacttcagagccacctaccccctgctgaaggccgaccccagcctgtggtgcgtgagcgcctggaacgacaacggcaaggagcagatggtggacgccagcagacccgagctgctgtacagaaccgacttcttccccggcctgggctggctgctgctggccgagctgtgggccgagctggagcccaagtggcccaaggccttctgggacgactggatgagaagacccgagcagagacagggcagagcctgcatcagacccgagatcagcagaaccatgaccttcggcagaaagggcgtgagccacggccagttcttcgaccagcacctgaagttcatcaagctgaaccagcagttcgtgcacttcacccagctggacctgagctacctgcagagagaggcctacgacagagacttcctggccagagtgtacggcgccccccagctgcaggtggagaaggtgagaaccaacgacagaaaggagctgggcgaggtgagagtgcagtacaccggcagagacagcttcaaggccttcgccaaggccctgggcgtgatggacgacctgaagagcggcgtgcccagagccggctacagaggcatcgtgaccttccagttcagaggcagaagagtgcacctggccccccccctgacctgggagggctacgaccccagctggaactag

SEQ ID NO: 329051 - DNA, 909 bp, Artificial Sequence
  derived and/or modified sequence
atgctgaagaagcagagcgccggcctggtgctgtggggcgccatcctgttcgtggcctggaacgccctgctgctgctgttcttctggaccagacccgcccccggcagaccccccagcgtgagcgccctggacggcgaccccgccagcctgaccagagtgttcagacagttcagattccccgccgccgtggtggtggaggacgacctggaggtggcccccgacttcttcgagtacttcagagccacctaccccctgctgaaggccgaccccagcctgtggtgcgtgagcgcctggaacgacaacggcaaggagcagatggtggacgccagcagacccgagctgctgtacagaaccgacttcttccccggcctgggctggctgctgctggccgagctgtgggccgagctggagcccaagtggcccaaggccttctgggacgactggatgagaagacccgagcagagacagggcagagcctgcatcagacccgagatcagcagaaccatgaccttcggcagaaagggcgtgagccacggccagttcttcgaccagcacctgaagttcatcaagctgaaccagcagttcgtgcacttcacccagctggacctgagctacctgcagagagaggcctacgacagagacttcctggccagagtgtacggcgccccccagctgcaggtggagaaggtgagaaccaacgacagaaaggagctgggcgaggtgagagtgcagtacaccggcagagacagcttcaaggccttcgccaaggccctgggcgtgatggacgacctgaagagcggcgtgcccagagccggctacagaggcatcgtgaccttccagttcagaggcagaagagtgcacctggccccccccctgacctgggagggctacgaccccagctggaactag

SEQ ID NO: 329052 - DNA, 312 bp, Artificial Sequence
  derived and/or modified sequence
atgctgaagaagcagagcgccggcctggtgctgtggggcgccatcctgttcgtggcctggaacgccctgctgctgctgttcttctggaccagacccgcccccggcagaccccccagcgtgagcgccctggacggcgaccccgccagcctgaccagagaggtgatcagactggcccaggacgccgaggtggagctggagagacagagaggcctgctgcagcagatcggcgacgccctgagcagccagagaggcagagtgcccaccgccgccccccccgcccagcccagagtgcccgtgacccccgccccctag

SEQ ID NO: 329053 - DNA, 600 bp, Artificial Sequence
  derived and/or modified sequence
atgctgaagaagcagagcgccggcctggtgctgtggggcgccatcctgttcgtggcctggaacgccctgctgctgctgttcttctggaccagacccgcccccggcagaccccccagcgtgagcgccctggacggcgaccccgccagcctgaccagagaggtgatcagactggcccaggacgccgaggtggagctggagagacagagaggcctgctgcagcagatcggcgacgccctgagcagccagagaggcagagtgcccaccgccgccccccccgcccagcccagagtgcccgtgacccccgcccccgccgtgatccccatcctggtgatcgcctgcgacagaagcaccgtgagaagatgcctggacaagctgctgcactacagacccagcgccgagctgttccccatcatcgtgagccaggactgcggccacgaggagaccgcccaggccatcgccagctacggcagcgccgtgacccacatcagacagcccgacctgagcagcatcgccgtgccccccgaccacagaaagttccagggctactacaagatcgccagacactacagatgggccctgggccaggtgttcagacagtag

SEQ ID NO: 329054 - DNA, 336 bp, Artificial Sequence
  derived and/or modified sequence
atgctgaagaagcagagcgccggcctggtgctgtggggcgccatcctgttcgtggcctggaacgccctgctgctgctgttcttctggaccagacccgcccccggcagaccccccagcgtgagcgccctggacggcgaccccgccagcctgaccagagaggtgatcagactggcccaggacgccgaggtggagctggagagacagagaggcctgctgcagcagatcggcgacgccctgagcagccagagaggcagagtgcccaccgccgccccccccgcccagcccagagtgcccgtgacccccgcccccgccgtgatccccatcctggtgatctag

SEQ ID NO: 329055 - DNA, 465 bp, Artificial Sequence
  derived and/or modified sequence
atgctgaagaagcagagcgccggcctggtgctgtggggcgccatcctgttcgtggcctggaacgccctgctgctgctgttcttctggaccagacccgcccccggcagaccccccagcgtgagcgccctggacggcgaccccgccagcctgaccagagaggtgatcagactggcccaggacgccgaggtggagctggagagacagagaggcctgctgcagcagatcggcgacgccctgagcagccagagaggcagagtgcccaccgccgccccccccgcccagcccagagtgcccgtgacccccgcccccgccgtgatccccatcctggtgatcgcctgcgacagaagcaccgtgagaagatgcctggacaagctgctgcactacagacccagcgccgagctgttccccatcatcgtgagccaggactgcggccacgaggagaccgcccaggccatcgccagctag

SEQ ID NO: 329056 - DNA, 105 bp, Artificial Sequence
  derived and/or modified sequence
atgctgaagaagcagagcgccggcctggtgctgtggggcgccatcctgttcgtggcctggaacgccctgctgctgctgttcttctggaccagacccgccccctag

SEQ ID NO: 329057 - DNA, 348 bp, Artificial Sequence
  derived and/or modified sequence
atgctgaagaagcagagcgccggcctggtgctgtggggcgccatcctgttcgtggcctggaacgccctgctgctgctgttcttctggaccagacccgcccccggcagaccccccagcgtgagcgccctggacggcgaccccgccagcctgaccagagaggtgatcagactggcccaggacgccgaggtggagctggagagacagagaggcctgctgcagcagatcggcgacgccctgagcagccagagaggcagagtgcccaccgccgccccccccgcccagcccagagtgcccgtgacccccgcccccgccgtgatccccatcctggtgatcgcctgcgacagatag

SEQ ID NO: 329058 - DNA, 288 bp, Artificial Sequence
  derived and/or modified sequence
atgctgaagaagcagagcgccggcctggtgctgtggggcgccatcctgttcgtggcctggaacgccctgctgctgctgttcttctggaccagacccgcccccggcagaccccccagcgtgagcgccctggacggcgaccccgccagcctgaccagagaggtgatcagactggcccaggacgccgaggtggagctggagagacagagaggcctgctgcagcagatcggcgacgccctgagcagccagagaggcagagtgcccaccgccgccccccccgcccagccctag

SEQ ID NO: 329059 - DNA, 384 bp, Artificial Sequence
  derived and/or modified sequence
atgctgaagaagcagagcgccggcctggtgctgtggggcgccatcctgttcgtggcctggaacgccctgctgctgctgttcttctggaccagacccgcccccggcagaccccccagcgtgagcgccctggacggcgaccccgccagcctgaccagagaggtgatcagactggcccaggacgccgaggtggagctggagagacagagaggcctgctgcagcagatcggcgacgccctgagcagccagagaggcagagtgcccaccgccgccccccccgcccagcccagagtgcccgtgacccccgcccccgccgtgatccccatcctggtgatcgcctgcgacagaagcaccgtgagaagatgcctggacaagctgctgcactag

SEQ ID NO: 329060 - DNA, 318 bp, Artificial Sequence
  derived and/or modified sequence
atgctgaagaagcagagcgccggcctggtgctgtggggcgccatcctgttcgtggcctggaacgccctgctgctgctgttcttctggaccagacccgcccccggcagaccccccagcgtgagcgccctggacggcgaccccgccagcctgaccagagaggtgatcagactggcccaggacgccgaggtggagctggagagacagagaggcctgctgcagcagatcggcgacgccctgagcagccagagaggcagagtgcccaccgccgccccccccgcccagcccagagtgcccgtgacccccgcccccgccgtgtag

SEQ ID NO: 329061 - protein, 31 aa, Artificial Sequence
  derived and/or modified sequence
MPRRKKKVKEVSESRNLEKKDVETTSSVSVK

SEQ ID NO: 329062 - protein, 89 aa, Artificial Sequence
  derived and/or modified sequence
MPRRKKKVKEVSESRNLEKKDVETTSSVSVKRKRRLEDAFIVISDSDGEEPKEENGLQKTKTKQSNRAKCLAKRKIAQMTEEEQFALAL

SEQ ID NO: 329063 - DNA, 474 bp, Artificial Sequence
  derived and/or modified sequence
atgcccagaagaaagaagaaggtgaaggaggtgagcgagagcagaaacctggagaagaaggacgtggagaccaccagcagcgtgagcgtgaagagaaagagaagactggaggacgccttcatcgtgatcagcgacagcgacggcgaggagcccaaggaggagaacggcctgcagaagaccaagaccaagcagagcaacagagccaagtgcctggccaagagaaagatcgcccagatgaccgaggaggagcagttcgccctggccctgaagatgagcgagcaggaggccagagaggtgaacagccaggaggaggaggaggaggagctgctgagaaaggccatcgccgagagcctgaacagctgcagacccagcgacgccagcgccaccagaagcagacccctggccaccggccccagcagccagagccaccaggagaagaccaccgacagcggcctgaccgagggcatctggtag

SEQ ID NO: 329064 - DNA, 474 bp, Artificial Sequence
  derived and/or modified sequence
atgcctcgtaggaaaaagaaggtcaaagaggtgagtgaatccaggaacctggagaagaaggacgtcgagactacttcttcagtgtcagtgaagcgtaagcgccgactggaagacgcttttatcgtgattagcgacagcgacggagaggaacctaaagaggaaaatggattacagaagacgaagaccaagcaaagcaatcgggctaaatgcctggccaaacgtaagattgcacagatgaccgaggaagaacagttcgccctcgcactgaagatgtcagaacaggaagcacgcgaagtgaacagccaggaagaggaggaggaagaacttctgagaaaagcgatagccgaatccctgaactcttgtcgtcctagcgatgcttccgccacgcggagccgccctctggcgactggtccctcatctcagagtcatcaggaaaagaccacagacagtggactcactgagggaatctggtag

SEQ ID NO: 329065 - DNA, 474 bp, Artificial Sequence
  derived and/or modified sequence
atgcccaggaggaagaagaaggtgaaggaggtgtctgagagcaggaacctggagaagaaggatgtggagaccaccagctctgtgtctgtgaagaggaagaggcggctggaggatgccttcatcgtcatcagtgacagtgatggagaggagcccaaggaggagaatggcctgcagaagaccaagaccaagcagagcaacagagccaagtgcctggccaagaggaagatcgcccagatgacagaggaggagcagtttgccctggccctgaagatgtctgagcaggaggcccgggaggtgaacagccaggaggaggaggaggaggagctgctgaggaaggccatcgccgagagcctgaacagctgccggcccagtgatgccagcgccaccaggagccggcccctggccaccggccccagcagccagagccaccaggagaagaccacagacagcggcctgacagagggcatctggtag

SEQ ID NO: 329066 - DNA, 474 bp, Artificial Sequence
  derived and/or modified sequence
atgccccggcggaagaagaaggtgaaggaggtgagcgagagccggaatctggaaaagaaggacgtcgaaaccacatccagcgtgtccgtcaagcgaaagcggcgcctcgaagatgcctttatcgtcattagcgattccgacggggaagaacccaaggaggaaaacgggcttcaaaaaactaagacaaagcagtcaaaccgcgcaaagtgtctcgccaagcgcaaaatcgcccagatgactgaagaggagcagttcgctttggctttgaagatgtcagagcaggaagccagagaagttaattctcaagaggaggaagaagaagagttactgcgaaaagctatcgcggagagcctcaactcttgtaggcctagcgacgcctcagccacacgaagtaggcctctcgcgactgggccgagctctcagagccaccaagaaaagaccaccgactctggactcaccgagggcatctggtag

SEQ ID NO: 329067 - DNA, 474 bp, Artificial Sequence
  derived and/or modified sequence
atgcccagacgcaagaagaaggttaaggaggtgagtgaatcgcggaacctcgaaaaaaaggacgttgaaactacatcatcagtctccgtgaagcgcaagaggcgactggaagacgcattcattgtgattagcgatagtgacggcgaggaaccaaaagaagaaaacggcctgcagaagacgaaaactaaacagagcaatcgggctaaatgtctggccaaaaggaaaattgcccagatgacggaagaagaacaatttgccctagccttgaaaatgtccgagcaagaagctcgcgaagtcaactcacaggaagaagaggaggaagagctgcttcgaaaggctatcgctgaatctctgaactcttgccggccatcagatgctagtgcgaccaggagccgacccctggccacaggcccttcaagccaaagccaccaggaaaaaactacagatagcggactaaccgaggggatttggtag

SEQ ID NO: 329068 - DNA, 619 bp, Artificial Sequence
  derived and/or modified sequence
gcttattttgctttgctacctctggtacctcagagcgtgtgccgtggattcggaaacctgtcgctgattccgcagcagtgacccccccctcccggagaggctcgtgtggttttggctcatggctctcaccttgctcacgacaaaaggatgccacggagaaagaaaaaagttaaagaagtctccgaatctcggaacctggagaagaaggatgtggaaactaccagttctgtcagtgtgaagaggaagcgtagacttgaggatgcattcattgtgatatccgatagtgatggagaggaaccaaaggaggaaaatgggttgcagaaaacgaagacaaaacagtcgaatagagcaaagtgtttggccaaaagaaaaatcgcacagatgacagaagaagaacagtttgctctggctctcaaaatgagtgagcaggaagctagggaggtgaacagccaggaggaggaagaagaggagctcttgaggaaagccattgctgaaagcctgaatagttgccggccttctgatgcttccgctaccagatctcgacctctggccactggaccgtcttcccagtcccatcaagagaaaaccacagactctgggctcactgaaggcatatggc

SEQ ID NO: 329069 - protein, 448 aa, Artificial Sequence
  derived and/or modified sequence
MKGGTLGGIPGEPAVDHRDVDELLEFINSTEPKVPNSARAAKRARHKLKKKEKEKAQLAAEALKQANRVSGSREPRPARERLLEWPDRELDRVNSFLSSRLQEIKNTVKDSIRASFSVCELSMDSNGFSKEGAAEPEPQSLPPSNLSGSSEQQPDINLDLSPLTLGSPQNHTLQAPGEPAPPWAEMRGPHPPWTEVRGPPPGIVPENGLVRRLNTVPNLSRVIWVKTPKPGYPSSEEPSSKEVPSCKQELPEPVSSGGKPQKGKRQGSQAKKSEASPAPRPPASLEVPSAKGQVAGPKQPGRVLELPKVGSCAEAGEGSRGSRPGPGWAGSPKTEKEKGSSWRNWPGEAKARPQEQESVQPSGPARPQSLPQGKGRSRRSRNKQEKPASSLDDVFLPKDMDGVEMDETDREVEYFKRFCLDSAKQTRQKVAVNWTNFSLKKTTPSTAQ

SEQ ID NO: 329070 - DNA, 4570 bp, Artificial Sequence
  derived and/or modified sequence
gcggcggcggcggcggcgtgtggagcgagggagcggcgcgagcggcggcatgacgcggaggcggagcaggccgagcggcggtgcgggcaggcgcgagcgggctcgggccgcggggccgcagaagccccaggcgcccgagcccccgccgccgccaagcctggaggcgggagcgggtgcaggccctccggaggcgccggcggagcccgaccacgacggccccagggaggatgacgaacccaacctggtgcccggcccgcaggtaggagcgagcggggagacttcggcggctcgggcgctttcaccttccccgagcgggagcgggagtggggcggggttggggatgggccatcctgccgcggctggggtagcagccttcccccgggtccggcgccgaagctttctcccccggggcgggaatggaggctggacccctctccccaaagccgaggctcggtccgcgctcctgcgactaggctgaagctgctcccctctccccgccgcctccgggcgttccggccgtacacccacactgggactgggactgggactgggctgtgatcccgaggccgcagctccgctctcggcccgccacctcccccgggcccacctgctccctcagccacaggccatctcggggctctgggactggacgactgcagcctcttccctctgcccccgggaacggctccactccgtcccctgcagcgcctgcagccgcggccccctcagcagctgtgtctcctggcgcctcctcgccatacccagcagagcagttggagcagacagccaggctgcccggaggagtttttggtggggtttctgcactgaggtggaaacccagcagaacctgcccttcttccctcccctgctccgcaaggcagcccaccccgaccttgagatcccaggtttggagaatcctgctgagagcgaacagtaggaggattccccaaagcttccagcttgccacctggaagaaggtcactttcttttgagcaaaggagataacgggaggtaccctgccaaagttcactgagaggcgggggtgacatgggccacggttgctctgggagggttgtggcactcggggctgggtggctctccctaagcttgctctgacaaaagagttttgagttggtcttttggctgagcctgcccaggaaggcaggctcctgcaggagtcttggagggtcggatgcggcgccggatgaggatgaggcgtggcggaagatgcgtttggctctgcagacactgcatcgggcagcaggggactctgggaggctggtgcagccagaaggcatggctcttgacagccttctagtagaatctctggaattgtgcatatgaagaaacagaaactcagagcaactaaacatttgcccaaatgactccaactgtaggtgtcagacaaaagaaaagaaaaggacttttaggtcccccccgcctccagccagcctgtgcagacttgctgcctgctgtgtcaccgggaacgcaaaggctgggaagaaggcccttctcaaaatggactggtgttgcagggtgagaagctgccccctgacttcatgccaaagctcgtcaagaatctcctaggcgagatgcctctgtgggtctgccagagttgccgaaagagcatggaggaagatgaaaggcagacaggtcgagaacatgcagtggcgatctccttgtcacacacatcctgcaaatcacagtcttgtggagatgactctcattcgtcctcgtcttcctcctcatcatcctcatcctcgtcctcctcttcctgccctgggaactcgggagactgggatcctagctcgttcctgtcggcacataagctctcgggcctctggaattccccacattccagtggggccatgccaggcagctctcttgggagtcctcctaccatccccggtgaggctttccccgtctcggagcaccaccagcactcagacctcactgctccccctaacagccccaccggccaccacccgcagccagcatctctaatcccgtctcaccccagctcctttggctccccaccccacccacacctgctgcccaccaccccggcagcacctttccctgcccaggcttcagagtgccctgttgctgctgccactgccccccacactccagggccatgtcagagctcccatctaccctccaccagcatgccgctcctgaagatgcccccaccattctcggggtgcagccacccctgcagcgggcactgtggtgggcactgcagtgggcctctcctcccacccccgagctctcagccactccctagcactcacagggatcccgggtgcaaggggcacaagtttgcacacagtggcctggcttgccagctgccccagccctgcgaggcagatgaggggctgggtgaggaagaggatagcagctctgagcgaagctcctgcacctcatcctccacccaccagagagatgggaagttctgtgactgctgctactgtgagttcttcggccacaatgcggcaaaaggaaaggaaatggcagagagaaagctatgattctgatgagtatgtatacgtgtgtaatcccagagaagtgaacgcttgggagtgatgaaggcagagtggaagcaaaaaggctctcagtcccccaagtgtgacagccagccgagggacaggccgtgagcacagacggcgccaggaaggaggctcagatcagagggcatgctggctctggccagggggaggaagcagtgcagaagtctcataagccacccgctgccccgacgagtcggaactataccgagatccgggagaagctccgctcgaggctgaccaggcggaaagaggagctgcccatgaaggggggcaccctgggcgggatccctggggagcccgccgtggaccaccgagatgtggatgagctgctggaattcatcaacagcacggagcccaaagtccccaacagcgccagggccgccaagcgggcccggcacaagctgaaaaagaaggaaaaggagaaggcccagttggcagcagaagctctaaagcaggcaaatcgtgtttctggaagccgggagccaaggcctgccagggagaggctcttggagtggcccgaccgggaactggatcgggtcaacagcttcctgagcagccgtctgcaggagatcaaaaacactgtcaaagactccatccgtgccagcttcagtgtgtgtgagctcagcatggacagcaatggcttctctaaggagggggctgctgagcctgagcctcagagtctacccccctcaaacctcagtggctcctcagagcagcagcctgacatcaaccttgacctgtcccctttgactttgggctcccctcagaaccacacgttacaagctccaggcgagccagccccaccatgggcagaaatgagaggcccccacccaccatggacagaggtgagggggccccctcccggtatcgtccccgagaacgggctcgtgaggagactcaacaccgtgcccaacctatcccgggtgatctgggtcaagacacccaagccgggctaccccagctccgaggagccaagctcaaaggaagttcccagttgcaagcaggagctgcctgagcctgtgtcctcaggtgggaagccacagaagggcaagaggcagggcagtcaggccaagaagagcgaggcaagcccagccccccggcccccagccagcctagaggttcccagtgccaagggccaggtcgctggccccaagcagccaggcagggtcctagagcttcccaaagtaggcagctgtgctgaggctggagaggggagccgggggagccggccaggaccaggttgggctggcagtcccaaaactgagaaggagaagggcagctcctggcgaaactggccaggcgaggccaaggcacggcctcaggagcaggagtctgtgcagccctcaggcccagcaaggccacagagcttgccccagggcaagggccgcagccgccggagccgcaacaagcaggagaagccagcctcctccttggacgatgtgttcctgcccaaggacatggacggggtggagatggatgagactgaccgagaggtggagtactttaagaggttctgtttggattctgcaaagcagactcgtcagaaagttgctgtgaactggaccaacttcagcctcaagaaaaccactcctagcacagctcagtgaggccctgcccaggctgagctgcttcagggcgtcctgaggccctgactgccagctgaaggcgtataatttttccctccgtgtgccccacctacccgtccaagaccctctgtgctccccaccatcctggaccaaccaaaagctgaacggatgccacactgtgctggggccccttgacctcagcagagccgcttcctggtgctacgcagcctccacactcagagcccgtggactgggctggcctaagggccagggctgatggtactgctggcccaacactgctctctttgtgtttggtttttttgtttttgtttttattttgtttttttccaattctttacttttgatactgtgaagatctttcgtgccgaaagataaagcaacatttggacacag

SEQ ID NO: 329071 - protein, 158 aa, Artificial Sequence
  derived and/or modified sequence
MEADIITNLRCRLKEAEEERLKAAQYGLQLVESQNELQNQLDKCRNEMMTMTESYEQEKYTLQREVELKSRMLESLSCECEAIKQQQKMHLEKLEEQLSRSHGQEVNELKTKIEKLKVELDEARLSEKQLKHQVDHQKELLSCKSEELRVMSERVQES

SEQ ID NO: 329072 - protein, 230 aa, Artificial Sequence
  derived and/or modified sequence
MEADIITNLRCRLKEAEEERLKAAQYGLQLVESQNELQNQLDKCRNEMMTMTESYEQEKYTLQREVELKSRMLESLSCECEAIKQQQKMHLEKLEEQLSRSHGQEVNELKTKIEKLKVELDEARLSEKQLKHQVDHQKELLSCKSEELRVMSERVQESMSSEMLALQIELTEMESMKTTLKEEVNELQYRQEQLELLITNLMRQVDRLKEEKEEREKEAVSYYNALEKAR

SEQ ID NO: 329073 - protein, 64 aa, Artificial Sequence
  derived and/or modified sequence
LRPWECSPKCAGRCSNTQYKKACLTFCNKCCAKCLCVPPGTYGNKGACPCYNNWKTKEGGPKCP

SEQ ID NO: 329074 - protein, 66 aa, Artificial Sequence
  derived and/or modified sequence
GSLHPQDCQPKCTYRCSKTSFKKPCMFFCQKCCAKCLCVPAGTYGNKQTCPCYNNWKTKEGGPKCP

SEQ ID NO: 329075 - protein, 84 aa, Artificial Sequence
  derived and/or modified sequence
MAGGRGRGGGGGGGVAGGGNLRPWECSPKCAGRCSNTQYKKACLTFCNKCCAKCLCVPPGTYGNKGACPCYNNWKTKEGGPKCP

SEQ ID NO: 329076 - protein, 2696 aa, Artificial Sequence
  derived and/or modified sequence
MDQTCELPRRNCLLPFSNPVNLDAPEDKDSPFGNGQSNFSEPLNGCTMQLSTVSGTSQNAYGQDSPSCYIPLRRLQDLASMINVEYLNGSADGSESFQDPEKSDSRAQTPIVCTSLSPGGPTALAMKQEPSCNNSPELQVKVTKTIKNGFLHFENFTCVDDADVDSEMDPEQPVTEDESIEEIFEETQTNATCNYETKSENGVKVAMGSEQDSTPESRHGAVKSPFLPLAPQTETQKNKQRNEVDGSNEKAALLPAPFSLGDTNITIEEQLNSINLSFQDDPDSSTSTLGNMLELPGTSSSSTSQELPFCQPKKKSTPLKYEVGDLIWAKFKRRPWWPCRICSDPLINTHSKMKVSNRRPYRQYYVEAFGDPSERAWVAGKAIVMFEGRHQFEELPVLRRRGKQKEKGYRHKVPQKILSKWEASVGLAEQYDVPKGSKNRKCIPGSIKLDSEEDMPFEDCTNDPESEHDLLLNGCLKSLAFDSEHSADEKEKPCAKSRARKSSDNPKRTSVKKGHIQFEAHKDERRGKIPENLGLNFISGDISDTQASNELSRIANSLTGSNTAPGSFLFSSCGKNTAKKEFETSNGDSLLGLPEGALISKCSREKNKPQRSLVCGSKVKLCYIGAGDEEKRSDSISICTTSDDGSSDLDPIEHSSESDNSVLEIPDAFDRTENMLSMQKNEKIKYSRFAATNTRVKAKQKPLISNSHTDHLMGCTKSAEPGTETSQVNLSDLKASTLVHKPQSDFTNDALSPKFNLSSSISSENSLIKGGAANQALLHSKSKQPKFRSIKCKHKENPVMAEPPVINEECSLKCCSSDTKGSPLASISKSGKVDGLKLLNNMHEKTRDSSDIETAVVKHVLSELKELSYRSLGEDVSDSGTSKPSKPLLFSSASSQNHIPIEPDYKFSTLLMMLKDMHDSKTKEQRLMTAQNLVSYRSPGRGDCSTNSPVGVSKVLVSGGSTHNSEKKGDGTQNSANPSPSGGDSALSGELSASLPGLLSDKRDLPASGKSRSDCVTRRNCGRSKPSSKLRDAFSAQMVKNTVNRKALKTERKRKLNQLPSVTLDAVLQGDRERGGSLRGGAEDPSKEDPLQIMGHLTSEDGDHFSDVHFDSKVKQSDPGKISEKGLSFENGKGPELDSVMNSENDELNGVNQVVPKKRWQRLNQRRTKPRKRMNRFKEKENSECAFRVLLPSDPVQEGRDEFPEHRTPSASILEEPLTEQNHADCLDSAGPRLNVCDKSSASIGDMEKEPGIPSLTPQAELPEPAVRSEKKRLRKPSKWLLEYTEEYDQIFAPKKKQKKVQEQVHKVSSRCEEESLLARGRSSAQNKQVDENSLISTKEEPPVLEREAPFLEGPLAQSELGGGHAELPQLTLSVPVAPEVSPRPALESEELLVKTPGNYESKRQRKPTKKLLESNDLDPGFMPKKGDLGLSKKCYEAGHLENGITESCATSYSKDFGGGTTKIFDKPRKRKRQRHAAAKMQCKKVKNDDSSKEIPGSEGELMPHRTATSPKETVEEGVEHDPGMPASKKMQGERGGGAALKENVCQNCEKLGELLLCEAQCCGAFHLECLGLTEMPRGKFICNECRTGIHTCFVCKQSGEDVKRCLLPLCGKFYHEECVQKYPPTVMQNKGFRCSLHICITCHAANPANVSASKGRLMRCVRCPVAYHANDFCLAAGSKILASNSIICPNHFTPRRGCRNHEHVNVSWCFVCSEGGSLLCCDSCPAAFHRECLNIDIPEGNWYCNDCKAGKKPHYREIVWVKVGRYRWWPAEICHPRAVPSNIDKMRHDVGEFPVLFFGSNDYLWTHQARVFPYMEGDVSSKDKMGKGVDGTYKKALQEAAARFEELKAQKELRQLQEDRKNDKKPPPYKHIKVNRPIGRVQIFTADLSEIPRCNCKATDENPCGIDSECINRMLLYECHPTVCPAGGRCQNQCFSKRQYPEVEIFRTLQRGWGLRTKTDIKKGEFVNEYVGELIDEEECRARIRYAQEHDITNFYMLTLDKDRIIDAGPKGNYARFMNHCCQPNCETQKWSVNGDTRVGLFALSDIKAGTELTFNYNLECLGNGKTVCKCGAPNCSGFLGVRPKNQPIATEEKSKKFKKKQQGKRRTQGEITKEREDECFSCGDAGQLVSCKKPGCPKVYHADCLNLTKRPAGKWECPWHQCDICGKEAASFCEMCPSSFCKQHREGMLFISKLDGRLSCTEHDPCGPNPLEPGEIREYVPPPVPLPPGPSTHLAEQSTGMAAQAPKMSDKPPADTNQMLSLSKKALAGTCQRPLLPERPLERTDSRPQPLDKVRDLAGSGTKSQSLVSSQRPLDRPPAVAGPRPQLSDKPSPVTSPSSSPSVRSQPLERPLGTADPRLDKSIGAASPRPQSLEKTSVPTGLRLPPPDRLLITSSPKPQTSDRPTDKPHASLSQRLPPPEKVLSAVVQTLVAKEKALRPVDQNTQSKNRAALVMDLIDLTPRQKERAASPHQVTPQADEKMPVLESSSWPASKGLGHMPRAVEKGCVSDPLQTSGKAAAPSEDPWQAVKSLTQARLLSQPPAKAFLYEPTTQASGRASAGAEQTPGPLSQSPGLVKQAKQMVGGQQLPALAAKSGQSFRSLGKAPASLPTEEKKLVTTEQSPWALGKASSRAGLWPIVAGQTLAQSCWSAGSTQTLAQTCWSLGRGQDPKPEQNTLPALNQAPSSHKCAESEQK

SEQ ID NO: 329077 - DNA, 8091 bp, Artificial Sequence
  derived and/or modified sequence
atggaccaaacttgtgagcttcctaggcgtaactgcttgctcccgttctctaatcccgttaatctggacgcccccgaggataaggactcgcccttcgggaatggccaatcaaacttctccgagcctctgaacggctgtactatgcagcttagtaccgtgtcagggacttcccagaatgcctacggacaggattcaccgtcctgttacattccattacggcgattacaagatctcgcatccatgatcaacgtggaatatctcaacgggagtgcagacggatccgaaagcttccaggaccctgagaagtctgattccagagctcagactccaatcgtatgtacttctttgagccctggcggacctaccgctctcgcgatgaaacaggagccgtcctgcaataatagtcccgagttgcaggtcaaggtcaccaagactataaaaaacggattcctgcactttgaaaacttcacatgtgtcgatgacgcagatgtggacagtgaaatggacccagagcaaccggtcacagaggacgagagcattgaagagatctttgaagagacccagacaaatgccacgtgtaattatgaaaccaagtctgagaatggagttaaggtggcaatgggctctgagcaagatagcacaccggagagtaggcacggcgcagttaagtccccattcctcccgttggctcctcagacagaaacacagaagaataaacagagaaatgaagtggacgggtcaaacgaaaaggcagcccttctgccagccccatttagccttggagacactaacataaccattgaggaacagctgaactctatcaatctgtcatttcaagatgaccccgacagctccacatccacattaggaaacatgctcgaactcccaggcactagctcctcctccaccagccaggagctgcctttttgccagcccaaaaagaagtcaacccccctgaagtatgaggtgggggatcttatctgggctaaattcaaacgtcgaccttggtggccatgccgaatttgtagcgatcccttgattaacacacactcaaagatgaaggtgagcaaccgcagaccttacagacaatactacgtggaggccttcggtgatccctctgagagggcctgggtggcggggaaagccattgttatgttcgagggtaggcaccagttcgaggaactgcctgttctgagacgtaggggcaaacaaaaggagaagggttatcgacataaggttccccagaagattctaagtaagtgggaagctagcgtcggtctcgctgagcagtacgatgtgcccaaggggtctaagaatcgaaagtgtatccctggatcgattaaactggatagcgaagaggatatgcccttcgaggattgcactaacgatcccgagagtgaacatgatttactgctgaacggctgcctaaaaagcctcgcatttgattccgagcactccgctgacgagaaagagaaaccatgcgcgaagtctcgcgcccggaagtccagtgacaatccaaagaggaccagtgtgaaaaaggggcatatccagttcgaggcccataaggatgagcgtagaggcaagattccagaaaatctcggactgaacttcatctccggggatatctctgacacacaggctagcaatgaactgtctaggatcgccaacagtcttactggaagcaacacagcacccggcagctttctgtttagctcatgtggtaaaaataccgctaagaaggaatttgaaacaagtaatggagatagtttgctcggcctcccagagggcgcgctaatcagtaaatgctcccgagagaagaataaacctcagagaagtctggtgtgtggctccaaggtaaagctgtgctacattggcgccggcgacgaggagaagcgctctgacagcatctcaatctgtacaaccagcgacgacggatcatcagacttggatcctattgaacattcttctgagagcgacaattcagtgctggagatccccgatgcctttgaccgaactgaaaatatgttaagtatgcagaagaacgagaagatcaagtacagccggttcgctgccaccaataccagggtgaaggccaaacagaagccactcatatcaaacagccacacagaccacctgatggggtgtactaagagcgccgagccaggaacagaaacttcacaggtgaatcttagtgacctgaaagcgagtactttagtgcataagccacagagtgactttacaaacgacgccctatctcctaaatttaacttaagctctagcatcagctcagaaaattcgcttatcaagggtggggctgccaatcaagccctgctgcactcaaaatccaagcagccaaaatttaggtccatcaaatgtaaacacaaagagaatcccgtgatggctgaaccgccagtgatcaatgaggagtgttccctgaagtgctgctcttcagacactaaagggtccccgttggcctccatttccaaaagtgggaaggtagatgggctgaagctgttgaataatatgcatgagaagacccgtgacagcagtgacatcgagacggctgtagtcaagcacgtgctgagtgagctgaaggaattgtcttacagaagtctgggcgaagatgtgtcagacagcggaacatcgaagccctccaagccgctgttgttctctagtgcctcgagtcagaaccacatacctattgagcccgactacaagttttcaactcttttgatgatgcttaaggacatgcacgattctaagacaaaggagcagcggctgatgacagcacagaacttggtgagctataggtctccaggcaggggcgactgcagtacaaactccccggtgggagtgtccaaagtgctggtgagcggtggctctacccataatagcgagaaaaagggtgacgggactcagaactcggccaatccttcaccaagcggtggggattcggctctttccggggaactgagcgcatctctccccggcctgctaagcgataagcgcgacctccccgccagtgggaaaagcagatcagactgtgttaccagacgcaactgtggaagatccaaaccctcaagcaagctgcgcgatgcttttagcgcccagatggttaagaacactgtcaacaggaaggcgctgaagaccgaacgcaagaggaagctgaatcaactcccctcagtgacacttgacgccgtgctccagggcgacagagagcgaggcgggtctctgcgcgggggggccgaagatccttcaaaggaagaccccctgcagattatgggacacctgacctcggaagatggcgaccattttagtgacgtgcattttgatagcaaggtgaagcagtctgacccggggaagatcagcgaaaaggggctctctttcgaaaatggaaagggtcccgaacttgatagtgtcatgaacagcgagaacgatgagctgaacggtgtgaaccaggtggttccaaaaaagcgctggcagcggctcaatcagcgccgaactaagccccgaaaaagaatgaacagatttaaggaaaaggagaactctgaatgcgctttcagagtactcctgccttcagacccggtccaggagggacgagatgagttcccggagcataggaccccatccgcgagtatcctcgaagagccccttactgaacagaaccatgctgactgcttagacagtgctgggccccgtcttaacgtctgcgataaaagctctgcttcaataggtgacatggagaaagagcccggtatcccgtccctgacaccccaagctgaactgcccgaacctgcggtgaggtccgagaagaagcgccttcggaagcctagcaagtggcttcttgagtacacagaagaatacgatcagattttcgctcctaaaaagaaacaaaaaaaagtccaggaacaggtgcacaaagtttccagccggtgcgaagaggagagcctgctcgcacgtggacggtccagcgcacagaacaaacaggtggacgagaattccctgataagtactaaggaagagcctcccgtgctggaacgagaggctcctttccttgaaggacctcttgctcagtcagaacttggcggaggccacgctgagctgccccagcttacccttagtgtgccagtggcacccgaggtgagcccaaggcctgccctcgaatccgaagagctactggtaaagactcccggtaactacgaatcaaagaggcagcgtaagcccactaaaaagttgctggagtccaatgacttagacccaggattcatgcccaaaaagggagacctgggattgtctaagaaatgctacgaggctggccatcttgagaatggcattacagaatcctgtgcaacatcatatagcaaagactttgggggagggacgacaaaaatctttgataagcctcggaagaggaagcgtcagcgccacgccgcggctaagatgcaatgcaaaaaagtgaagaatgatgacagttctaaagaaatccccggatctgaaggcgaattgatgcctcatcggaccgccacctcgccaaaggagacagtggaggagggggtcgaacatgaccctggtatgcccgcctcaaagaaaatgcagggcgaacgcggcggaggagctgctctgaaggagaacgtctgccagaactgtgagaagctaggggaattactcctttgcgaggcccagtgttgtggcgcgtttcacttggaatgcttgggtctgaccgagatgccacggggcaaatttatctgtaacgagtgccgcacggggatacacacctgctttgtttgcaagcagtctggcgaagacgtgaagaggtgcctgctgcctctgtgtggtaagttttaccacgaagagtgtgtgcagaaatacccccccactgtcatgcagaacaaaggcttccgctgctcactgcacatatgcatcacgtgtcatgctgccaaccccgctaatgtgtcagccagtaaaggtcgactgatgaggtgcgttcggtgccccgtagcctaccatgccaatgacttctgccttgctgcaggctctaaaatcttggcaagtaattcgattatctgtcctaaccacttcactcctaggcgcggatgcagaaaccacgagcatgttaacgtctcatggtgctttgtgtgttcggaaggtggctctctcctgtgttgcgattcctgtcctgcagcgttccatcgagagtgcctcaacatcgacatcccggagggtaactggtattgcaacgattgcaaagcaggtaaaaagccacattaccgggaaatagtttgggtgaaggttggtagatatagatggtggcccgcagaaatctgtcatccacgcgccgttccctcaaatattgacaaaatgcgccacgacgtgggcgagttcccagtgctgttctttggtagcaacgactatttgtggactcatcaggcccgggtcttcccttacatggagggagatgtgtcaagcaaggacaaaatgggcaagggagtcgacggtacgtacaagaaggctcttcaggaggcagctgcacgtttcgaggagctaaaagcacagaaggagctgcggcaattacaggaggacagaaaaaatgacaaaaaaccgccgccttataagcacattaaagtgaaccgcccgatcggacgcgtgcagattttcacagccgatctgtcagagatccccaggtgcaattgtaaggccacggacgaaaatccctgcggcatcgatagcgaatgtatcaatagaatgctcctgtacgaatgccaccccacagtgtgccctgcaggcgggcgctgtcagaatcaatgcttctctaagaggcagtatccagaagtggagatcttccgtaccctgcaacggggttgggggttgcgaaccaaaacggatattaagaagggtgagtttgtgaacgaatacgtcggagagcttatagacgaagaagaatgccgggcaagaattagatatgctcaggagcacgatattactaatttttacatgctgacgctagacaaggatcgcatcatcgatgcagggccaaaaggcaactacgcacgcttcatgaatcactgttgtcaaccgaattgcgaaacacagaagtggagtgtcaacggcgatacacgggtaggactctttgctctgtctgatattaaagcagggactgaattaacctttaattacaacctggaatgcctcgggaacggaaaaaccgtgtgcaaatgcggggcacccaactgcagtgggttcctcggcgtaagacccaaaaaccagcccattgcgaccgaggagaagagcaaaaagtttaagaagaaacagcaggggaagaggaggacccagggagaaattacgaaggagcgagaagacgaatgtttttcttgcggggacgccgggcagttggtgtcttgtaaaaaacctgggtgtcctaaagtgtaccacgcagattgtttgaatctcaccaaacgccctgccggaaaatgggaatgtccatggcatcagtgcgacatctgcggtaaggaggcggctagtttctgcgagatgtgcccatcatctttttgtaaacagcaccgggaggggatgctgttcatttcaaagcttgatggaaggctctcctgtacagaacatgatccctgtgggccaaacccgctggagcctggggagatccgggagtacgttccccctcctgtccccctgcctccaggacccagtacgcatctcgctgagcagtcaacaggtatggccgcccaagcgcccaagatgtcagacaagcccccagctgacaccaatcaaatgctgagccttagcaaaaaggccctagcaggaacttgtcagcgcccactgcttccagagaggccgcttgagagaactgactcccgaccacagccactggacaaagtgagggatcttgcaggcagcggtacaaagtcccaatcccttgtgtcctcccagcggcctctggataggccacccgcagtggcggggcctagaccccaactctccgacaagcctagtcctgtgacgagtccatctagttcacctagcgtcagatcacaacctttagaacgaccccttggcacagccgatcctagactagacaagtccattggcgctgcttcaccacgtccccagagtctggagaagacctctgtgccgactgggctcagactacctccgccggatcgcctcttgattacgtcttcacccaagccacagacatctgacaggccaaccgataagcctcatgcctctctcagccagcggttgcctccaccagagaaggtactgtctgctgtagtccagacactggtggctaaggaaaaggccttacggccagttgatcagaacactcagtcaaagaacagagcggcccttgtgatggacctgatcgatctgacaccacgccaaaaagaaagggccgcctccccccaccaggtgacgccccaggccgacgaaaagatgcctgtgctagagagtagctcctggccggcatccaaaggactaggacatatgcctagggctgtcgagaaaggttgcgtgtccgacccgcttcagacttctgggaaagccgcagccccgagcgaggacccctggcaagccgtcaagtctctgacccaagcccggcttctatcacaaccccccgcgaaagccttcctctacgaaccgactacgcaagcaagtgggcgggcgagcgcaggagccgagcaaacacctggccccctttcacagtcaccagggctagtcaagcaggctaagcagatggtcggaggtcagcagctgccggccctcgccgctaagtccggtcagtcgtttaggagtctgggaaaagccccagcctccctgccaactgaggagaagaagctggtcaccacagaacagtccccttgggctctggggaaggcctccagtcgggctggtctttggcctattgtcgcaggtcagaccctggctcagtcttgttggtcggcgggctccacgcagactcttgctcagacctgttggagcctgggaaggggacaagaccccaagcctgagcagaatactctccctgcattgaatcaggctcccagttctcacaaatgtgcagaatctgaacaaaaatag

SEQ ID NO: 329078 - DNA, 8091 bp, Artificial Sequence
  derived and/or modified sequence
atggaccagacctgtgagctgcccaggaggaactgcctgctgcccttcagcaaccctgtgaacctggatgcccctgaggacaaggacagcccctttggaaatggccagagcaacttcagcgagcccctgaatggctgcaccatgcagctgagcacagtgtctggcaccagccagaatgcctacggccaggacagccccagctgctacatccccctgcggcggctgcaggacctggcctccatgatcaacgtggagtacctgaatggcagcgcagatggcagcgagagcttccaggaccctgagaagagtgacagccgggcccagacccccatcgtgtgcaccagcctgagccctgggggccccacagccctggccatgaagcaggagcccagctgcaacaacagccctgagctgcaggtgaaggtgaccaagaccatcaagaatggcttcctgcactttgagaacttcacctgtgtggatgatgctgatgtggacagcgagatggaccctgagcagcctgtgacagaagatgagagcattgaggagatctttgaggagacccagaccaatgccacctgcaactatgagaccaagtcagaaaatggagtgaaggtggccatgggcagcgagcaggacagcaccccagagagcagacatggagctgtgaagagccccttcctgcccctggccccccagacagagacccagaagaacaagcagagaaatgaggtggatggcagcaatgagaaggccgccctgctgcctgcccccttcagcctgggggacaccaacatcaccatcgaggagcagctgaacagcatcaacctgtccttccaggatgatcctgacagcagcaccagcaccctgggcaacatgctggagctgcccggcaccagcagcagcagcaccagccaggagctgcccttctgccagcccaagaagaagagcacccccctgaagtatgaggtgggggacctgatctgggccaagttcaagagaagaccctggtggccctgccgcatctgcagcgaccccctcatcaacacccacagcaagatgaaggtgagcaacagaagaccctaccggcagtactacgtggaggcctttggagaccccagcgagcgggcctgggtggccggcaaggccatcgtgatgtttgagggccgccaccagtttgaggagctgcctgtgctgcggcggcggggcaagcagaaggagaagggctaccgccacaaggtgccccagaagatcctgagcaagtgggaggcctctgtgggcctggccgagcagtatgatgtgcccaagggcagcaagaacaggaagtgcatccctggcagcatcaagctggacagcgaggaggacatgccctttgaggactgcaccaatgaccctgagagcgagcatgacctgctgctgaatggctgcctgaagagcctggcctttgattctgagcacagcgcagatgagaaggagaagccctgtgccaagagccgggccaggaagagcagtgacaaccccaagaggacctctgtgaagaagggccacatccagtttgaggcccacaaggatgaaagaagaggcaagatccctgagaacctgggcctgaacttcatcagcggggacatcagtgacacccaggccagcaatgagctgagccgcatcgccaacagcctgaccggcagcaacacagcccctggcagcttcctgttcagcagctgtgggaagaacacagccaagaaggagtttgagaccagcaatggagacagcctgctgggcctgcctgagggcgccctgatcagcaagtgcagccgggagaagaacaagccccagaggagcctggtgtgtggcagcaaggtgaagctgtgctacatcggggctggagatgaggagaagagaagtgacagcatcagcatctgcaccaccagtgatgatggcagcagtgacctggaccccatcgagcacagcagcgagagtgacaacagcgtgctggagatcccagatgcctttgacagaacagagaacatgctgtccatgcagaagaatgagaagatcaagtacagcagatttgctgccaccaacaccagggtgaaggccaagcagaagcccctcatcagcaacagccacacagaccacctgatgggctgcaccaagtctgctgagcctggaacagagaccagccaggtgaacctgagtgacctgaaggccagcaccctggtgcacaagccccagagcgacttcaccaatgatgccctgagccccaagttcaacctgagcagcagcatcagcagcgagaacagcctcatcaagggcggggccgccaaccaggccctgctgcacagcaagagcaagcagcccaagttccgcagcatcaagtgcaagcacaaggagaaccctgtgatggccgagccccctgtgatcaatgaagaatgttccctgaagtgctgcagcagtgacaccaagggcagccccctggccagcatcagcaagagcggcaaggtggatggcctgaagctgctgaacaacatgcatgagaagacccgggacagcagtgacatcgagacagctgtggtgaagcacgtgctgtctgagctgaaggagctgagctaccgcagcctgggggaggatgtgtctgattctggcaccagcaagcccagcaagcccctgctcttcagcagcgccagcagccagaaccacatccccattgaaccagactacaagttcagcaccctgctgatgatgctgaaggacatgcatgacagcaagaccaaggagcagaggctgatgacagcccagaacctggtgtcctaccgcagccctggccgcggggactgcagcaccaacagccctgtgggcgtgtccaaggtgctggtgtctgggggcagcacccacaacagcgagaagaagggagatggcacccagaacagcgccaaccccagccccagcggcggggacagcgccctgagcggggagctgagcgccagcctgcccggcctgctgagtgacaagagggacctgcctgccagcggcaagagcagaagtgactgtgtgaccaggaggaactgtggccgcagcaagcccagcagcaagctgagagatgccttcagcgcccagatggtgaagaacacagtgaacaggaaggccctgaagacagagaggaagaggaagctgaaccagctgcccagcgtgaccctggatgctgtgctgcagggcgaccgggagcggggcggcagcctgcggggcggcgctgaggaccccagcaaggaggaccccctgcagatcatgggccacctgaccagtgaagatggagaccacttcagtgatgtgcactttgacagcaaggtgaagcagagcgaccccgggaagatcagcgagaagggcctgagctttgaaaatggaaaaggacctgagctggacagcgtgatgaacagtgaaaatgatgagctgaatggagtgaaccaggtggtgcccaagaagcgctggcagaggctgaaccagaggaggaccaagcccaggaagaggatgaaccgcttcaaggagaaggaaaattctgaatgtgccttccgggtgctgctgcccagcgaccctgtgcaggagggcagagatgagttccctgagcacaggacccccagcgccagcatcctggaggagcccctgacagagcagaaccacgccgactgcctggacagcgctggcccccggctgaatgtgtgtgacaagagcagcgccagcatcggggacatggagaaggagcccggcatccccagcctgaccccccaggccgagctgcctgagcctgctgtgcgctctgagaagaagaggctgaggaagcccagcaagtggctgctggagtacacagaggagtatgaccagatctttgcccccaagaagaagcagaagaaggtgcaggagcaggtgcacaaggtgagcagccgctgtgaggaggagagcctgctggcccggggccgcagcagcgcccagaacaagcaggtggatgagaacagcctcatcagcaccaaggaggagccccctgtgctggagcgggaggcccccttcctggagggccccctggcccagagcgagctgggcggcggccacgccgagctgccccagctgaccctgtctgtgcctgtggcccctgaggtgagccccaggcctgccctggagagcgaggagctgctggtgaagaccccaggcaactatgagagcaagaggcagaggaagcccaccaagaagctgctggagagcaatgacctggaccccggcttcatgcccaagaagggggacctgggcctgagcaagaagtgctatgaggccggccacctggagaatggcatcacagagagctgtgccaccagctacagcaaggactttggaggcggcaccaccaagatctttgacaagcccaggaagaggaagaggcagagacatgctgctgccaagatgcagtgcaagaaggtgaagaatgatgacagcagcaaggagatccctggcagcgagggggagctgatgccccacaggacagccaccagccccaaggagaccgtggaggagggcgtggagcatgaccccggcatgcctgccagcaagaagatgcagggcgagcggggcggcggggccgccctgaaggaaaatgtgtgccagaactgtgagaagctgggggagctgctgctgtgtgaggcccagtgctgcggggccttccacctggagtgcctgggcctgacagagatgccccggggcaagttcatctgcaatgaatgtagaacaggcatccacacctgctttgtgtgcaagcagagcggagaagatgtgaagcgctgcctgctgcccctgtgtgggaagttctaccacgaggagtgtgtgcagaagtacccacccaccgtgatgcagaacaagggcttccgctgcagcctgcacatctgcatcacctgccacgccgccaacccagccaacgtgtctgccagcaagggccgcctgatgagatgtgtgcgctgccctgtggcctaccacgccaatgacttctgcctggccgccggcagcaagatcctggccagcaacagcatcatctgccccaaccacttcaccccccggcggggctgcaggaaccacgagcacgtgaatgtgtcctggtgctttgtgtgcagcgagggcggcagcctgctgtgctgtgacagctgcccagctgccttccaccgggagtgcctgaacatcgacatccctgagggcaactggtactgcaatgactgcaaggccggcaagaagccccactaccgggagatcgtgtgggtgaaggtgggccgctaccgctggtggccagctgagatctgccaccccagggctgtgcccagcaacatcgacaagatgagacatgatgtgggggagttccctgtgctcttcttcggcagcaatgactacctgtggacccaccaggcccgggtcttcccctacatggagggagatgtgagcagcaaggacaagatgggcaagggcgtggatggcacctacaagaaggccctgcaggaggccgccgccaggtttgaggagctgaaggcccagaaggagctgcggcagctgcaggaggacaggaagaatgacaagaagcccccaccctacaagcacatcaaggtgaaccggcccatcggccgggtgcagatcttcaccgctgacctgtctgagatcccccgctgcaactgcaaggccacagatgagaacccctgtggcattgattctgagtgcatcaacaggatgctgctgtatgagtgccaccccaccgtgtgcccagctgggggccgctgccagaaccagtgcttcagcaagaggcagtacccagaggtggagatcttccgcaccctgcagaggggctggggcctgcggaccaagacagacatcaagaagggggagtttgtgaatgaatatgtgggggagctgattgatgaggaggagtgccgggcccgcatccgctatgcccaggagcatgacatcaccaacttctacatgctgaccctggacaaggaccgcatcattgatgctggccccaagggcaactatgcccgcttcatgaaccactgctgccagcccaactgtgagacccagaagtggagcgtgaatggagacaccagggtgggcctgtttgccctgagtgacatcaaggccggcacagagctgaccttcaactacaacctggagtgcctgggcaatggcaagacagtgtgcaagtgtggggcccccaactgcagcggcttcctgggcgtgcggcccaagaaccagcccatcgccacagaggagaagagcaagaagttcaagaagaagcagcagggcaagaggaggacccagggcgagatcaccaaggagcgggaggatgagtgcttcagctgtggagatgctggccagctggtgtcctgcaagaagccaggctgccccaaggtgtaccacgccgactgcctgaacctgaccaagaggcctgctgggaagtgggagtgcccctggcaccagtgtgacatctgtgggaaggaggccgccagcttctgtgagatgtgccccagcagcttctgcaagcagcaccgggagggcatgctgttcatcagcaagctggatggccgcctgagctgcacagaacatgacccctgtggccccaaccccctggagcctggagagatccgggagtatgtgcccccacctgtgcccctgcccccaggccccagcacccacctggccgagcagagcacaggcatggccgcccaggcccccaagatgtctgacaagcccccagctgacaccaaccagatgctgagcctgagcaagaaggccctggccggcacctgccagaggcccctgctgcctgagcggcccctggagaggacagacagccggccccagcccctggacaaggtgcgggacctggccggcagcggcaccaagagccagagcctggtgagcagccagaggcccctggacaggcctcctgctgtggccggcccccggccccagctgagtgacaagcccagccctgtgaccagccccagcagcagccccagcgtgcgcagccagcccctggagcggcccctgggcacagctgacccccggctggacaagagcattggagctgccagcccccggccccagagcctggagaagacctctgtgcccaccggcctgcggctgcccccaccagaccggctgctgatcaccagcagccccaagccccagaccagtgaccggcccacagacaagccccacgccagcctgagccagaggctgcccccacctgagaaggtgctgtctgctgtggtgcagaccctggtggccaaggagaaggccctgcggcctgtggaccagaacacccagagcaagaacagagctgccctggtgatggacctgattgacctgaccccccggcagaaggagagagctgccagcccccaccaggtgaccccccaggctgatgagaagatgcctgtgctggagagcagctcctggccagccagcaagggcctgggccacatgcccagggctgtggagaagggctgtgtgtctgaccccctgcagaccagcggcaaggccgccgcccccagcgaggacccctggcaggccgtgaagagcctgacccaggcccggctgctgagccagcccccagccaaggccttcctgtatgagcccaccacccaggccagcggccgggccagcgctggagctgagcagaccccaggccccctgagccagagccctggcctggtgaagcaggccaagcagatggtgggcggccagcagctgcctgccctggccgccaagagcggccagagcttccgcagcctgggcaaggccccagccagcctgcccacagaggagaagaagctggtgaccacagagcagagcccctgggccctgggcaaggccagcagccgggccggcctgtggcccatcgtggccggccagaccctggcccagagctgctggagcgctggcagcacccagaccctggcccagacctgctggagcctgggccggggccaggaccccaagccagagcagaacaccctgcctgccctgaaccaggcccccagcagccacaagtgtgccgagagcgagcagaagtag

SEQ ID NO: 329079 - DNA, 8091 bp, Artificial Sequence
  derived and/or modified sequence
atggaccagacctgcgagctgccccggcggaactgcctgctgccctttagcaatcctgtcaatctggacgcccccgaggacaaagactcacccttcggtaacggccaatccaatttctcggagcctctgaacggctgcaccatgcagttgagcaccgtgagtgggaccagtcagaacgcctacggtcaggactctccttcttgctatattcctctgaggagacttcaggatctggcatctatgatcaatgttgaatatttgaacggctccgcagacggctccgagtctttccaagacccagaaaaatctgacagccgagcccagaccccaattgtctgcacctccttgtctccaggcgggccgaccgccctggcaatgaagcaggaaccgtcatgtaataattccccagagcttcaggtgaaggtcactaagactattaaaaacgggtttctccactttgagaactttacttgcgttgatgacgccgatgtggacagcgagatggatccagaacagcccgtgactgaagacgagtcaattgaggaaatatttgaagaaactcagactaacgccacctgcaattacgaaaccaagtccgaaaatggggtgaaagtggccatgggatcagagcaagactcaactccggagagtcgacacggagctgttaaatccccatttctcccgttggccccacagaccgaaacccagaagaacaaacagagaaacgaggtggacggatctaatgagaaggcggctctccttcccgccccattctcgctgggtgatacgaacattacaatcgaagaacagttgaattccataaatttgtctttccaagatgatcctgattcatctacttctactcttggcaatatgctcgaactccctggaacgtcttcttcttctactagccaggagttaccgttctgccagcctaagaagaagtccacgccactgaaatacgaagtgggcgaccttatctgggcaaagtttaagagacgaccttggtggccctgcaggatatgttcagaccctctcattaatacccattctaagatgaaagtcagtaatagaaggccttaccgacagtattacgtggaggcctttggcgacccatcagaaagagcctgggtggccggtaaggctattgtgatgttcgagggaaggcaccagttcgaggagctcccagtgcttcgtcggagaggaaaacagaaagagaagggctatcggcataaagtgccacagaagatactgagcaagtgggaagcttctgttggactggcagagcagtatgatgtgccgaaggggagtaaaaacagaaaatgtatccccgggtcaatcaagctcgatagtgaagaggatatgcctttcgaagattgtacaaatgaccccgagtcggagcatgatctcctgctcaatggatgtctgaagtcccttgcgttcgatagtgagcactctgcggatgagaaggagaagccctgcgctaagtcacgcgccaggaaaagctccgacaacccaaaacggacgtctgtcaagaaaggacacatccaattcgaagctcataaggatgagaggcgtggtaaaattcccgagaacctcggactcaacttcatctcaggcgatattagcgacactcaggcctccaacgagctgtctcgaatcgccaatagcctgacaggaagcaacaccgcacccggctcgtttttgttctcgtcatgcggaaaaaatactgccaaaaaagagttcgagacatcgaatggagacagtttgctggggctcccagaaggcgcgctgatttcaaaatgttcccgagaaaagaataagccccagcgttctcttgtctgcgggagcaaagtgaaactgtgctatataggggctggtgatgaagagaaacgatcagactcgatctctatatgcaccactagcgatgatggctcctccgatctggatcccatcgagcactcctctgaaagtgacaacagtgtcttagagatcccggacgccttcgatcggaccgagaacatgctttcaatgcagaagaatgagaagatcaaatacagtcgatttgcggccaccaatacacgcgttaaggctaagcagaagcctctgatctccaattctcacactgatcacttgatgggctgcaccaagagcgcggagcccggtaccgagaccagccaggtaaatctctcagatctcaaggcaagtacattagtgcataagccacagagcgacttcaccaacgatgcactatcacctaagtttaatctctctagctccatctcctccgagaattccctgatcaagggcggcgccgcaaatcaggctttgttacattccaaatccaagcaacccaagttcagatcaattaagtgtaaacataaagagaatccagtgatggcagagccccctgtgattaacgaggaatgctccctgaagtgctgtagctccgatacaaagggctcccctctggctagcatttctaaatcagggaaggtcgacgggctaaaactgctcaataacatgcatgagaagacaagagactcatctgatatcgaaaccgctgtggtcaagcacgttcttagcgagcttaaagagctgagctaccgctcccttggcgaagacgtgagcgactcgggtaccagtaagcccagcaagccgctcctttttagctctgctagctcgcagaaccacatccctatcgagccagattataagttttctacgttgctgatgatgctgaaagatatgcatgactccaaaacaaaggaacagagactgatgactgcacaaaatctcgtgagctaccgtagccctggccggggagactgctccaccaactctcctgtgggggtgagcaaggtcctggtgtctgggggttccacccataacagcgaaaagaagggcgatggtacgcagaactcagccaatcctagtccttctggcggcgattctgcgctctccggcgagctcagtgcttcgctgcctggccttctctctgacaaaagggatttaccggccagtgggaagtccagatcagactgtgtgaccagacggaactgcggcaggtctaagccatcttccaaacttcgtgacgctttctctgctcagatggtgaaaaacactgttaatcgaaaagctctaaagactgaacgcaagagaaaacttaaccaactgccttccgtcacattagacgccgtgcttcagggcgaccgcgagcgcggcggctcgctgagaggcggcgccgaggatccatccaaagaggatcccctacagattatgggacatcttacctccgaggacggagaccactttagcgacgtgcattttgatagcaaggtgaaacagtcagaccctggtaagatttccgagaagggactgtccttcgaaaacggcaagggtcctgaacttgattctgtcatgaattcagagaacgacgagctcaacggggtaaaccaagtggtaccaaaaaaacgctggcaaagactaaaccagcggcggactaaaccccgtaaaaggatgaacaggttcaaggagaaggagaattctgaatgtgcttttcgggtcctattgccatcagatcccgtccaagagggcagagacgagtttcctgagcatcgcaccccttcggcttctatactcgaagagccgctcactgaacagaaccacgctgactgcttggactcagcaggccccagacttaacgtttgcgacaaaagctccgcatccataggtgatatggaaaaggagccagggatcccatcactaactccacaggcggagctaccagaaccggctgtgagatccgagaagaagaggctgagaaaaccctcaaagtggctgctcgaatatacagaggaatacgaccagattttcgcccctaaaaagaagcagaaaaaagtccaagagcaggtgcacaaggttagttcacgctgtgaggaggaatctttgctcgcaagaggccgaagctctgcccagaacaagcaggtagatgaaaatagtctgataagcaccaaagaggagccccccgttctcgaaagggaggcgcctttcctggagggcccactggcgcagagtgagctcggcggcggacacgcagaactcccacaacttactttaagcgtgcctgtcgccccagaggtctccccacgacctgctcttgaaagtgaagagcttctggtgaagacaccagggaattacgaatctaaaaggcaaagaaagcccacaaagaagctgttggagagtaatgatctcgatcctggcttcatgccgaaaaagggggatctaggcctgtccaagaaatgctacgaggctggacaccttgagaatggcattaccgagtcttgtgccaccagctatagcaaagattttggtggtgggaccactaaaatcttcgataaaccccggaagcgcaagaggcagagacatgccgctgctaaaatgcagtgtaagaaggtcaagaacgacgactcgagcaaagaaatccctggtagtgagggcgaactgatgccgcaccgtacagccacgtctcctaaggaaacggtcgaggagggcgtcgagcacgaccccggcatgcccgccagcaaaaagatgcaaggtgagcgcggaggtggcgctgcactcaaggagaacgtgtgccagaactgcgagaagctgggggagctcctgctttgcgaggcccagtgctgtggcgcctttcacctcgaatgtctgggcctaactgaaatgcctcgggggaagttcatttgcaacgaatgccgtactggcatccacacctgctttgtttgtaaacaatcaggcgaggatgtcaagcgatgcctattaccactgtgtggaaagttttatcacgaggaatgtgtccagaaatacccccccaccgtgatgcagaataaaggcttcagatgctcactgcacatctgtatcacctgccatgcagccaaccccgcaaatgttagcgcgtctaagggcagactaatgcgttgcgtacgatgccccgttgcctatcacgcaaatgacttttgcctcgctgctggctccaagatccttgcgagcaactccattatttgtcctaatcacttcacaccgcggagaggatgtagaaaccatgaacacgttaatgtctcatggtgctttgtgtgctcggaggggggcagcttattgtgttgtgacagctgtcctgctgcgtttcatcgcgaatgcctgaacatcgatatcccagaaggcaattggtattgtaacgactgtaaagctggtaagaagccgcactatcgtgaaatcgtctgggtcaaagtcgggcgctacagatggtggcctgccgagatttgtcaccccagagcagtcccctccaatatagataagatgagacacgacgttggagaatttcctgtcctgttttttggatccaatgattatctctggactcaccaggcaagggtctttccgtatatggaaggggacgtatctagtaaggataagatgggaaaaggggtggatggcacgtacaagaaggcactccaggaggccgccgcgcggttcgaggaactaaaagcccagaaggaactgcgccagctgcaagaggataggaaaaatgacaaaaaaccaccgccttataagcacatcaaagtgaatcgccctattggacgggttcagattttcactgccgacctctccgagatccctagatgtaactgtaaggccactgacgagaacccctgcggaatagactccgagtgcattaacagaatgttgctgtatgagtgtcacccaactgtgtgtcctgccggcgggagatgccagaaccagtgtttttctaagagacagtaccctgaagtggagatctttcgcaccttacaacggggttggggacttagaacgaaaactgatatcaaaaaaggcgagttcgtgaatgagtacgtcggtgagcttattgatgaggaggagtgcagggcccgcatccgctatgcgcaggaacatgatattacaaatttttacatgctgactctggataaggaccgaattattgacgccgggccaaaaggcaactatgcccgatttatgaaccattgttgccaaccaaattgcgaaacacagaagtggagcgtgaacggggatacccgggtcggcctgtttgccctgtctgacatcaaagccggcactgagctcacatttaactacaatctggagtgtttaggaaacggcaaaacggtctgtaagtgtggcgccccgaactgttccggctttctcggcgtgcggcccaaaaaccaacccattgctaccgaggaaaagtctaaaaaatttaaaaaaaaacagcagggaaagcggcgtactcagggggagatcaccaaggagcgagaagatgagtgtttcagttgtggcgacgccggccagctggtgtcttgcaaaaaacctggatgccccaaggtataccacgccgactgcttgaacttaacgaagaggcccgctggaaagtgggaatgcccttggcatcaatgtgatatctgtgggaaggaggccgcttcattctgtgaaatgtgtccttcctctttctgtaagcaacatagagaaggcatgctcttcatcagcaagctggatggtaggctaagttgcacagaacatgacccatgcggtcctaacccactggagccaggagaaatccgcgagtatgtgccccctcctgtgcccctgccgcccgggcctagcacccatctggccgaacagtctactgggatggctgcccaggctcccaagatgtccgacaagccccccgcagacacaaatcagatgctgagcctgtccaaaaaggccctcgcaggaacatgtcagcggcccctgctccctgagcggcccttagagcgcaccgactctcggcctcagccactagacaaggtgcgtgacctggcagggtccggtaccaagtcacagtcgctggtatctagccagcggcctcttgatcggcctccggctgtggccggccctagaccccaactctcggacaaaccctcgccagtgaccagtcctagctcctccccctccgtgcggagtcagcctctggaacggcctctgggtaccgccgatcccaggctagataagagtattggagctgcttcccctagaccgcaatccctagagaaaacatctgtcccaactgggttgcggctgcctccccctgatagattattgattacaagcagtcccaaaccccagacttccgatagaccgacagacaaaccacacgcctcactcagccagagactccccccaccagagaaggtgctgtccgcagtcgttcaaacccttgtagccaaggagaaggccctgaggcccgtggaccagaatacccaaagcaagaatagggccgccttagtgatggatcttatagacctgaccccacgccagaaggaaagagctgccagtcctcaccaggtcaccccacaagccgacgagaaaatgcctgttttagaatctagttcgtggcccgcttctaagggacttggacacatgccccgtgctgttgaaaaaggttgcgtgtccgaccccctgcaaacttcagggaaagctgccgcaccgtctgaagatccatggcaggcagtcaagtccttaacccaggcccggcttctctcacaaccccctgccaaggcctttctgtacgagcctaccacacaggcttcaggtcgcgcctcggccggcgccgagcaaacgcccggacccctttcccagtcaccaggcctggttaaacaggccaagcagatggtgggtggtcagcaactgcccgccctcgcagccaagtctggacagtctttccggtctctgggcaaggctcctgcctcgctcccgacagaggagaagaagctagtgacaactgaacagtctccgtgggccttgggaaaagcgagttcccgtgccggtctgtggccgatcgtcgcagggcagacacttgcgcagagctgttggagtgctgggtctacgcagacattggcccagacctgttggagccttggacgcgggcaggaccccaagcccgaacagaatactctgccggccctgaatcaggcgccctccagtcacaagtgcgcggagagtgagcagaaatag

SEQ ID NO: 329080 - DNA, 12892 bp, Artificial Sequence
  derived and/or modified sequence
gctggcccgggagggggcgcggggcacggttgatgccggcccaggatggatcagacctgtgaactacccagaagaaattgtctgctgcccttttccaatccagtgaatttagatgcccctgaagacaaggacagccctttcggtaatggtcaatccaatttttctgagccacttaatgggtgtactatgcagttatcgactgtcagtggaacatcccaaaatgcttatggacaagattctccatcttgttacattccactgcggagactacaggatttggcctccatgatcaatgtagagtatttaaatgggtctgctgatggatcagaatcctttcaagaccctgaaaaaagtgattcaagagctcagacgccaattgtttgcacttccttgagtcctggtggtcctacagcacttgctatgaaacaggaaccctcttgtaataactcccctgaactccaggtaaaagtaacaaagactatcaagaatggctttctgcactttgagaattttacttgtgtggacgatgcagatgtagattctgaaatggacccagaacagccagtcacagaggatgagagtatagaggagatctttgaggaaactcagaccaatgccacctgcaattatgagactaaatcagagaatggtgtaaaagtggccatgggaagtgaacaagacagcacaccagagagtagacacggtgcagtcaaatcgccattcttgccattagctcctcagactgaaacacagaaaaataagcaaagaaatgaagtggacggcagcaatgaaaaagcagcccttctcccagcccccttttcactaggagacacaaacattacaatagaagagcaattaaactcaataaatttatcttttcaggatgatccagattccagtaccagtacattaggaaacatgctagaattacctggaacttcatcatcatctacttcacaggaattgccattttgtcaacctaagaaaaagtctacgccactgaagtatgaagttggagatctcatctgggcaaaattcaagagacgcccatggtggccctgcaggatttgttctgatccgttgattaacacacattcaaaaatgaaagtttccaaccggaggccctatcggcagtactacgtggaggcttttggagatccttctgagagagcctgggtggctggaaaagcaatcgtcatgtttgaaggcagacatcaattcgaagagctacctgtccttaggagaagagggaaacagaaagaaaaaggatataggcataaggttcctcagaaaattttgagtaaatgggaagccagtgttggacttgcagaacagtatgatgttcccaaggggtcaaagaaccgaaaatgtattcctggttcaatcaagttggacagtgaagaagatatgccatttgaagactgcacaaatgatcctgagtcagaacatgacctgttgcttaatggctgtttgaaatcactggcttttgattctgaacattctgcagatgagaaggaaaagccttgcgctaaatctcgagccagaaagagctctgataatccaaaaaggactagtgtgaaaaagggccacatacaatttgaagcacataaagatgaacggaggggaaagattccagagaaccttggcctaaactttatctctggggatatatctgatacgcaggcctctaatgaactttccaggatagcaaatagcctcacagggtccaacactgccccaggaagttttctgttttcttcctgtggaaaaaacactgcaaagaaagaatttgagacttcaaatggtgactctttattgggcttgcctgagggtgctttgatctcaaagtgttctcgagagaagaataaaccccaacgaagcctggtgtgtggttcaaaagtgaagctctgctatattggagcaggtgatgaggaaaagcgaagtgattccattagtatctgtaccacttctgatgatggaagcagtgacctggatcccatagaacacagctcagagtctgataacagtgtccttgaaattccagatgctttcgatagaacagagaacatgttatctatgcagaaaaatgaaaagataaagtattctaggtttgctgccacaaacactagggtaaaagcaaaacagaagcctctcattagtaactcacatacagaccacttaatgggttgtactaagagtgcagagcctggaaccgagacgtctcaggttaatctctctgatctgaaggcatctactcttgttcacaaaccccagtcagattttacaaatgatgctctctctccaaaattcaacctgtcatcaagcatatccagtgagaactcgttaataaagggtggggcagcaaatcaagctctattacattcgaaaagcaaacagcccaagttccgaagtataaagtgcaaacacaaagaaaatccagttatggcagaacccccagttataaatgaggagtgcagtttgaaatgctgctcttctgataccaaaggctctcctttggccagcatttctaaaagtgggaaagtggatggtctaaaactactgaacaatatgcatgagaaaaccagggattcaagtgacatagaaacagcagtggtgaaacatgttttatccgagttgaaggaactctcttacagatccttaggtgaggatgtcagtgactctggaacatcaaagccatcaaaaccattacttttctcttctgcttctagtcagaatcacatacctattgaaccagactacaaattcagtacattgctaatgatgttgaaagatatgcatgatagtaagacgaaggagcagcggttgatgactgctcaaaacctggtctcttaccggagtcctggtcgtggggactgttctactaatagtcctgtaggagtctctaaggttttggtttcaggaggctccacacacaattcagagaaaaagggagatggcactcagaactccgccaatcctagccctagtgggggtgactctgcattatctggcgagttgtctgcttccctacctggcttactgtccgacaagagagacctccctgcttctggtaaaagtcgttcagactgtgttactaggcgcaactgtggacgatcaaagccttcatccaaattgcgagatgctttttcagcccaaatggtaaagaacacagtgaaccgtaaagccttaaagaccgagcgcaaaagaaaactgaatcagcttccaagtgtgactcttgatgctgtactgcagggagaccgagaacgtggaggttcattgagaggtggggcagaagatcctagtaaagaggatccccttcagataatgggccacttaacaagtgaagatggtgaccatttttctgatgtgcatttcgatagcaaggttaagcaatctgatcctggtaaaatttctgaaaaaggactctcttttgaaaacggaaaaggcccagagctggactctgtaatgaacagtgagaatgatgaactcaatggtgtaaatcaagtggtgcctaaaaagcggtggcagcgtttaaaccaaaggcgcactaaacctcgtaagcgcatgaacagatttaaagagaaagaaaactctgagtgtgcctttagggtcttacttcctagtgaccctgtgcaggaggggcgggatgagtttccagagcatagaactccttcagcaagcatacttgaggaaccactgacagagcaaaatcatgctgactgcttagattcagctgggccacggttaaatgtttgtgataaatccagtgccagcattggtgacatggaaaaggagccaggaattcccagtttgacaccacaggctgagctccctgaaccagctgtgcggtcagagaagaaacgccttaggaagccaagcaagtggcttttggaatatacagaagaatatgatcagatatttgctcctaagaaaaaacaaaagaaggtacaggagcaggtgcacaaggtaagttcccgctgtgaagaggaaagccttctagcccgaggtcgatctagtgctcagaacaagcaggtggacgagaattctttgatttcaaccaaagaagagcctccagttcttgaaagggaggctccgtttttggagggccccttggctcagtcagaacttggaggtggacatgctgagttgccgcagctgaccttgtctgtgcctgtggctccggaagtctctccacggcctgcccttgagtctgaggaattgctagttaaaacgccaggaaattatgaaagtaaacgtcaaagaaaaccaactaagaaacttcttgaatccaatgatttagaccctggatttatgcccaagaagggggaccttggcctttctaaaaagtgctatgaagctggtcacctggagaatggcataactgaatcttgtgccacatcttattcaaaagattttggtggaggcactaccaagatatttgacaagccaaggaagcgaaaacgacagaggcatgctgcagccaagatgcagtgtaaaaaagtgaaaaatgatgactcgtcaaaagagattccaggctcagagggagaactaatgcctcacaggacggccacaagccccaaggagactgttgaggaaggtgtagaacacgatcccgggatgcctgcctctaaaaaaatgcagggtgaacgcggtggaggagctgcactcaaggagaatgtctgtcagaattgtgaaaaattgggtgagctgctgttatgtgaggctcagtgctgtggggctttccacctggagtgccttggattgactgagatgccaagaggaaaatttatctgcaatgaatgtcgcacaggaatccatacctgttttgtatgtaagcagagtggggaagatgttaaaaggtgccttctacccttgtgtggaaagttttaccatgaagagtgtgtccagaagtacccacccactgttatgcagaacaagggcttccggtgctccctccacatctgtataacctgtcatgctgctaatccagccaatgtttctgcatctaaaggtcggttgatgcgctgtgtccgctgtcctgtggcataccacgccaatgacttttgcctggctgctgggtcaaagatccttgcatctaatagtatcatctgccctaatcactttacccctaggcggggctgccgaaatcatgagcatgttaatgttagctggtgctttgtgtgctcagaaggaggcagccttctgtgctgtgattcttgccctgctgcttttcatcgtgaatgcctgaacattgatatccctgaaggaaactggtattgcaatgactgtaaagcaggcaaaaagccacactacagggagattgtctgggtaaaagttggacgatacaggtggtggccagctgagatctgccatcctcgagctgttccttccaacattgataagatgagacatgatgtgggagagttcccagtcctcttttttggatctaatgactatttgtggactcaccaggcccgagtcttcccttacatggagggtgacgtgagcagcaaggataagatgggcaaaggagtggatgggacatataaaaaagctcttcaggaagctgcagcaaggtttgaggaattaaaggcccaaaaagagctaagacagctgcaggaagaccgaaagaatgacaagaagccaccaccttataaacatataaaggtaaaccgtcctattggcagggtacagatcttcactgcagacttatctgaaataccccgttgcaactgtaaagctactgatgagaacccctgtgggatagactctgaatgcatcaaccgcatgctgctctatgagtgccaccccacagtgtgtcctgccggagggcgctgtcaaaaccagtgcttttccaagcgccaatatccagaggttgaaattttccgcacattacagcggggttggggtctacggacaaaaacagatattaaaaagggtgaatttgtgaatgagtatgtgggtgagcttatagatgaagaagaatgcagagctcgaattcgctatgctcaagaacatgatatcactaatttctatatgctcaccctagacaaagaccgaatcattgatgctggtcccaaaggaaactatgctcggttcatgaatcattgctgccagcccaactgtgaaacacagaagtggtctgtgaatggagatacccgtgtaggcctttttgcactaagtgacattaaagcaggcactgaacttaccttcaactacaacctagaatgtcttgggaatggaaagactgtttgcaaatgtggagccccgaactgcagtggcttcttgggtgtaaggccaaagaatcaacccattgccacggaagaaaagtcaaagaaattcaagaagaagcaacagggaaagcgcaggacccagggtgaaatcacaaaggagcgagaagatgagtgttttagttgtggggatgctggccagctcgtctcctgcaagaaaccaggctgcccaaaagtttaccacgcagactgtctcaatctgaccaagcgaccagcagggaaatgggaatgtccgtggcatcagtgtgacatctgcgggaaggaagcagcctccttctgtgagatgtgccccagctccttttgtaagcagcatcgagaagggatgcttttcatttccaaactggatgggcgtctgtcttgtactgagcatgacccctgtgggcccaatcctctggaacctggggagatccgtgagtatgtgcctcccccagtaccgctgcctccagggccaagcactcacctggcagagcaatcaacaggaatggctgctcaggcacccaaaatgtcagataaacctcctgctgacaccaaccagatgctgtcgctctccaaaaaagctctggcagggacttgtcagaggccattgctacctgaaagacctcttgagagaactgactccaggccccagcctttagataaggtcagagacctcgctgggtcagggaccaaatcccaatccttggtttccagccagaggccactggacaggccaccagcagtggcaggaccaagaccccagctaagcgacaaaccctctccagtgaccagcccaagctcctcaccctcagtcaggtcccaaccactggaaagacctctggggacggctgacccaaggctggataaatccataggtgctgccagcccaaggccccagtcactggagaaaacctcagttcccactggcctgagacttccgccgccagacagactgctcattactagcagtcccaaaccccagacttcagacaggcctactgacaaaccccatgcctctttgtcccagagactcccacctcctgagaaagtactatcagctgtggtccagacccttgtagctaaagaaaaagcactgaggcctgtggaccagaatactcagtcaaaaaatagagctgctttggtgatggatctcatagacctaactcctcgccagaaggagcgggcagcttcacctcatcaggtcacaccacaggctgatgagaagatgccagtgttggagtcaagttcatggcctgccagcaaaggtctggggcatatgccgagagctgttgagaaaggctgtgtgtcagatcctcttcagacatctgggaaagcagcagccccttcagaggacccctggcaagctgttaaatcactcacccaggccagacttctttctcagcctcctgccaaggcctttttatatgagccaacaactcaggcctcaggaagagcttctgcaggggctgagcagaccccagggcctcttagccaatccccgggcctggtgaagcaggcgaagcagatggtcggaggccagcaactacctgcacttgccgccaagagtgggcaatcttttaggtctctcgggaaggccccagcctccctccccactgaagaaaagaagttggtaaccacagagcaaagtccctgggccctgggaaaagcctcatcacgggcagggctctggcccatagtggctggacagacactggcacagtcttgctggtctgctgggagcacacagacattggcacagacttgctggtctcttggaagagggcaagaccccaaaccagagcaaaatacacttccagctcttaaccaggctccttccagtcacaagtgtgcagaatcagaacagaagtagtaccaatcaatgtcacatgaacaaacaagctgcccccagggtaccatttggggaggggaaatcttttctttctttcccccttaaaaaaaaacacatctgccccgaacactttcccactgttattctttcctcatatcccaacactcagaactcttgtgacattagccagtgggggcttatggttgtgtgaaccatgtatgaaaatccagtgggccccaaccaaggagacagacagacttgggtctctttcccccaacttttccacatggtcatcgtgaaataaaaagtccactctggagtcaagtatggaattcaattccgctggtcaggttggaaggtataggggctctcaaagcgatttccccaaccagacagagccccattgagggcacctaggaacccttgggaggaaatggtgttctttcaaatcagtggcgatttcctgagcattcacgtgttctaggccgggtgctagtcactgatgagagatacaggcctcatccctgtgagcctggattccaaggctttcaggaacctttgaccaggaagtaacaggaagttctgaggggccctggggctttagactcattttgaaatgtcctttgtggcaccagaagtggttgtgttgaggaagtgtctcttggctgcggtgtgcatgggtgcgtgtgcatgcgcgcacactcacagaggtctcctctatagatgcaagggtgctgcattgaggccagcaaggctgttggctgtggggtcgccgctgctgcttttgtctgggctgtgcagagtctcaagatcagtccttggaggagcaggtggtcaggggcagtcgggctctgtgcgaatgtagatttccagcagtggaagaaggcatttggcaagcttctctttctttgcttttgtttctacctatttttctctttgtacatgaatccaccccatccctatttccctaaaacactcaggtgctttcagatttcagagcctcgggcagtggacatagggaatctctggcaagctctgagctagacacaccagcttcaggaagagtaccagatcctgatgggaaatttcttttccccattccttttccctcctgagtggagggagtcctcttcttcgcctccctgagaattgctgtgctctgtattgagagcacctgcctgctgacttagctcaaaggcaagccagaacccttccctgaagactggcaagaggtggtgtttagagcaacgtccaggctaagagatgactcctattaactgctgattatctgttactgctgccctgagctggggcccaagggctgggaaatctgttggtgctaccctgccctaccattcacccagctcacagactgccaacaggaagtgctgtttggctagtttcctcccacttgtctacccctcctttgtccttagaccaacatgtttacctctctgctttgccaacttagccagcaggccatccccggccctaacgtctcctggccattatctcttagttatggctttcacgctctcaataggattctgtatttggtcccaatttcctcaagttcttattgaggttactcccatcaattccacggagggaacagtagttattatagaagcatttgcgctttatctaaagattaaaaatagaatctgcttttatttcccaaagtctgtctctgaggttgagacacttgaactcaggcagagggacgaggctgggcagggctgtcctgagtttaggggcctatccctgcatttcactgagacctcggaatctcctctgtgaattccacctgcctagttctcccctttcatcctctctctcttcccacatcatcaaagaggaaaagctctttgttcaaaaggaagagaaaacgtaaagcatcttattttcttttaaaagaattttaaaccatgaaaaagatatttttaaagaaattcaccgagaacattaaagttcattatattaagtatttatcatgtgtgagaataataaatatataactgcagctagtaggtccctttccctaatcttttaggtcatatgagtagggtttgcttggtgccagtcctgtgcccttttctctccagtcatctgtagttgtgatcagaaaaaggtatctgcactgcactgtcagagtctcctttcactatgttgtgtgttaaattaccgtagctctttgtttcatgaaataaactgtgaatttggggggggcggggggagggcgtgcaggccatgtaaaaattttccgtggagaagtttgattctaaagtagcttctctaaagtaggctttggtaggtaatcaacttgacagcagtctagatgtctcacaggacaggagggagtgagggaaaggggccatgattggctgctttgtggttttattttggttctttccattctccgccattcattggaggcttcgttccagacctgcctgggaaaacagcttctgagccattttggggagcagttcttcatctgaatggatggacatctgggcttccttcaagggccattgaatgggaactagaaaaccactggaaactagaaatttgagctattgggcccaccagtagcagcatgtgatactagatggttaaaatcatgaaagcagtcactatccaattagaagcagagtcacaacaactgttgggaaatgtgactcttggaggaaggtggggagggagtggccttgccagccctgtgggacgtcccctgaagtttgtaataagaccccttttccaaagggatgtgaattggagtgaaaaggaaatctttcatcttagaaaacttctggtccttaacgcagggtggtatttgggtatgtgcttggaaattgagatctcaagagtgtttgccttggagccagctccccaggaggccttttccagggacaaggcaaaagttgaaattctccatgggtagctagaaagccaatacatctagccctgctaagtcagaaaaagattatgaaaaatgttgaaatttacattcaaagcctcatttgcttatcttgctggagccaacccagtctaatagcaaaatagctgtcattgatacagaaacatcctcatttttaaatgtctgctttaccctgttactgagtttgagatgacttaaatcactgtgttgaccctcttctgaaccaaatctttagcattgatgaaaatagttattttattctttacatccttcaccccacactatggtcagggcatgaaacaccctgttgatcccttcccaggctcggcactgtctgctcactggagccggactcccaggttgtaattctaatgttgcctcatgagaacagaatggcagaaagtttagtcctgacagattcccccatagggagtaatgaggacagcatgaaacttggataggttttacccttagtccctataaggtggattttactaaggttttttaaatgatactgtcatcctcttggggtttatcagccaggttagaggagcccagtgtcctaacctctctcagatcatggcagagaaggagctgcctccagcccctttcttgctgagtttcatttgagcagttccatgtgtagacattccaagtcactgcttggtagttgctgtgggagcctgtcattggctatggccagttagttctcagctgagcttcctagggccagtgcaacagggccagaggctgctatagtgtaaattgaaataagaatagatcattgttttgtacacacacacaataaaatgtaatgatggtgctaatttcacggtataaataagcactgccaagggttgagggactggcagctcaagaaacccgggttcctgtttgggaggagattttatgtagaaaagtttgaggctttgttaaaagtggggagaaggaagatcctcagtgaagcctgcacccaaccctggagtggcccagtgcaatccagaggtggaagagatcctatatccaggtgaaggtggccattgagtttctcagggctggggccaccttgtccatagcctccgtccacgctgcctggagcaggttgttagagagctctggttgttgggtcttcctcagctcccttctgcccctctctacctcttccactcatggaagcccctctactgcttatgaagattaagggtagtattttctaaggaagtggaaagaattaaactagaaatccacaacctcggaagaagtgtttcgagtttaacatgcgctgtttctgcttatgtggttccttctctagagctgctttcccatggctttcaaaacatcaggttattgtggggcttcaggtgtaaggtcctggaagttcagcaaagtttcgtggacaagacatgggcacagagagtagaagcagaaataaatggttctatgttttcaacttccagggttggggcaggccagagcaaggcggtctcatcgaggtgggtgctacctgtgtgtgtgtagatgagtgtgctgaaggtggggagggcagcacacagcagctcatggcagagccgcctcctaggtcttggcaaagaggcaagctgacgatagacatctacctatattgttaagaaaggggtcggggggatcagccaaggtccatcattgcttttttgccgcgcccccccccccccgcccccatagattgtcagctgtaagtgaaactcctagtgaaaaagaggggagccctgtgttaggagtccccataaacatgtactgtaattctttgtatatagaaaaaaaatttactgtaaagtaaagtttaactttactcatata

SEQ ID NO: 329081 - DNA, 8090 bp, Artificial Sequence
  derived and/or modified sequence
atggaccagacgtgtgagctgcccagacggaactgcctcttgcccttttccaatcctgtgaacctcgatgcacctgaggacaaagacagtccatttgggaatggtcaatccaactttagcgagccgttgaatgggtgcacaatgcagctaagcaccgttagcgggactagtcagaacgcctatggacaggacagtccatcctgttacatccctctgagaagactccaggacctggcgtcaatgattaacgtggaatacttgaatgggtccgcagacgggtcggagtcatttcaggacccagagaaatccgactcccgggctcaaactcctatcgtctgtacttccttgagccccggtggcccaactgcccttgccatgaagcaggagcctagctgtaacaacagtccagaactacaagtgaaagtgacaaagactatcaagaacggctttctacactttgagaattttacctgcgtcgacgatgcagacgtggatagcgaaatggaccccgaacagccagtgaccgaggatgaaagcattgaggagatcttcgaggagactcagaccaatgcgacttgtaattacgagacgaagtccgaaaatggcgttaaggtggccatggggagcgagcaggactcgactccagagagtcgccacggtgccgtgaaatccccgttcctcccacttgcaccacagacggaaacgcaaaagaataagcagcggaatgaagtggacggatccaacgagaaagccgctcttctgcccgcaccattcagccttggggacaccaacattacaattgaagagcagctcaattccatcaacctgagttttcaggacgaccccgactcctcaacgtctacgctaggcaacatgctggaattgcctggcacgtcctcctcctctacaagtcaggaacttcccttttgtcagcccaaaaagaagtccacacctctgaaatacgaggttggcgacctgatttgggccaaattcaagcgccgtccctggtggccttgtcgcatctgttctgatccacttataaatacccacagcaaaatgaaggtgagtaacagaagaccatatcggcagtactacgtagaggcctttggtgatccctccgagagagcatgggtcgcgggtaaggccatagtgatgttcgagggcagacaccagtttgaagagcttccggtcctgaggcgaagaggcaagcagaaggaaaagggctaccggcataaggtccctcagaagatactgtctaaatgggaagcctctgtgggcttagccgaacaatatgatgtgccgaaagggagcaagaatcgcaagtgtattccaggatctattaagctggacagcgaggaggatatgccctttgaagactgcactaatgatcccgagagtgaacacgatctcctgcttaatgggtgcctgaagagcctggcattcgactctgagcattctgccgacgagaaggaaaagccttgcgctaagtccagggctcgcaaaagtagtgataacccaaagcggacatctgtgaagaagggccacatacaattcgaggcacataaggatgaacgcagaggaaagatccccgagaatctaggactcaactttatttctggagatatttcagatactcaggcctctaatgagctcagtagaattgctaacagcctcaccggtagcaatactgcacccggatcctttttgttttcatcttgtggtaagaacaccgctaagaaggagttcgagacatccaacggtgatagtctgcttggcttgcccgagggggctcttatcagtaagtgtagtcgcgagaaaaataaaccacagagatcccttgtatgcgggtcaaaggtgaaattgtgttacataggggcaggcgacgaagaaaaacgaagcgattctatcagcatctgcactacttcagacgacggatcgtccgatttagatcccatagagcactccagcgaaagcgataacagtgtcctagaaatccctgatgcgttcgacagaactgaaaacatgcttagcatgcagaagaacgagaaaatcaaatactctcggtttgcagccaccaatacaagggtgaaggctaagcagaaaccccttatctctaattctcatactgatcatttaatgggatgcaccaagtccgcggaacctggtacggagaccagccaggtgaacctgtctgatctgaaagcatccaccttggtccataaaccacagtcggactttacgaacgacgctctttctccgaaattcaatctgtcctcctccatctcctccgaaaatagtcttattaaaggaggtgcagctaatcaggccctcctgcacagcaagtcaaagcaacctaaatttaggtccatcaaatgtaaacacaaagaaaatccggttatggcagagcccccagtgattaatgaagagtgtagcctgaagtgctgttcttctgacaccaagggaagccccctggcgagtattagtaagtccggaaaagttgacggtcttaagctactgaataacatgcacgaaaagactcgcgattcgagcgacatagagacggccgtggtgaagcacgttctgtctgaattgaaggagttatcataccggtcattaggagaagatgtgtctgactccggcacctctaagcctagcaaaccattgttgttctccagcgctagtagccagaaccatatacccattgaaccagactataaattcagtactttgctgatgatgcttaaagatatgcacgactctaaaactaaagagcagagattaatgacagcacagaaccttgtatcctatagatcaccagggcgtggcgactgcagcaccaattcacctgtgggcgtctctaaggttctggtgtccgggggtagtacacacaattcagagaaaaagggcgacggtacccagaattcagccaatccatcacccagtggcggagacagtgcactgtctggggaactgagtgcgtcccttcccggactgctctccgacaaacgggacttgcccgctagtggaaaatctaggagtgattgcgttacgagacggaactgcggacgctcgaaaccgtccagcaaactgcgcgacgcattctctgcccagatggtcaagaatacagtgaaccgcaaggccctaaagacagagcgcaaacggaagctgaatcagcttccgtccgtaacactggacgcagtcctgcagggagatcgggagcgagggggaagcctgaggggaggggcagaagatcccagcaaggaagacccgttgcaaattatggggcacttgaccagcgaggatggagaccacttctccgatgttcatttcgatagcaaagttaaacaatccgaccctggcaagattagcgaaaaagggctatctttcgagaatggcaaaggccctgaactcgatagtgttatgaatagtgaaaatgatgaacttaatggggtgaatcaggtagtgccaaaaaagcggtggcagagactgaatcagaggagaacaaagccaagaaagcggatgaatcgtttcaaagagaaggaaaatagcgagtgcgcctttcgcgttttgctaccaagtgatcccgtacaggaggggcgagacgagtttcccgagcaccggactccgtcagcctccatcctcgaagagccacttactgagcagaatcacgctgactgtctcgattctgctggtcctagactcaatgtctgtgacaagagctccgcctccattggagatatggagaaagagcctggcatcccctccctgaccccccaggcggaactgccggaaccggctgtgaggagtgaaaaaaagcgactgagaaagccctccaagtggttgctcgaatacaccgaggaatacgatcagatttttgctcccaagaagaaacagaaaaaggtgcaggagcaagtccacaaagtgtcttcaagatgtgaggaggaatccctgctcgccagaggaagatctagcgctcagaataagcaagtggacgagaactctcttatttccaccaaagaggagcccccagtgctcgaacgggaggctcccttcctagaaggacccttagcccaatctgagctcgggggaggccatgcagaattgccgcagttgacactaagcgtgcctgttgcccctgaggtgagccctcggcctgcgctggagtccgaggaactactggttaagacccccggtaattatgagtccaagaggcagcggaagcccaccaaaaagctcttggaatcgaacgatctagaccctggattcatgccaaagaaaggcgacctagggctttcaaagaagtgctacgaagccggacatttggagaacgggataaccgagagttgcgctaccagctattccaaagatttcggcggaggtactaccaagattttcgacaaaccacgaaagaggaagagacagaggcacgccgctgctaagatgcaatgtaagaaggtgaagaacgacgattcttcaaaagaaattccaggctctgagggagagctcatgccacacaggacagcgacctccccgaaggagaccgtggaagaaggagtggagcacgatcctggcatgccagcgagcaaaaagatgcagggggagaggggaggcggagctgcacttaaggaaaatgtgtgccagaattgtgagaaactgggcgagttactgttatgcgaggcacagtgctgtggtgcctttcaccttgagtgtcttgggctcactgagatgcctcggggtaaattcatctgcaatgagtgtcgcactgggatacacacatgcttcgtttgtaaacagtccggcgaggacgttaaaagatgtctcctgcccttatgcggtaaattttatcacgaggagtgtgtgcagaagtatccacccacagtaatgcaaaacaagggattccgctgctccctgcacatctgtatcacatgccatgccgctaacccagccaacgtgagcgccagcaagggcaggttgatgaggtgtgtgagatgtcctgtcgcttaccatgctaacgacttttgcttagcggcaggatctaaaattcttgctagtaacagtatcatctgccccaaccattttacgcctcgaaggggctgtcggaatcacgagcacgtcaacgttagttggtgtttcgtgtgctccgaaggagggtcgctcctgtgctgcgacagctgtcccgcagcctttcacagggagtgtcttaatatcgatattcctgaggggaactggtactgcaacgactgcaaagctggaaagaagccccactaccgggagatcgtgtgggtgaaggtcgggagataccggtggtggcccgctgaaatctgccacccaagagctgtcccttctaatatcgataagatgagacatgatgtgggcgagttccctgtgctcttcttcgggtccaatgattatctgtggacccatcaggccagggtttttccgtacatggagggcgatgtgagttctaaggacaagatggggaagggagtggatggcacctacaagaaggctctgcaggaagctgcagctcgatttgaggagcttaaggcccagaaagagctgcgccagttacaagaagatagaaagaacgataaaaaacctcctccctacaaacatattaaggtcaaccggccaatagggagagtccagatctttactgcagatctctctgaaatcccacggtgcaactgtaaggccaccgatgagaacccgtgcggtatagatagtgagtgtattaaccggatgctcctgtatgagtgtcatccaactgtgtgtcccgctggtggcagatgccagaatcagtgcttcagtaaaaggcagtatcccgaggtggaaatttttaggacccttcaacgcggttggggactgcgcaccaaaacggacattaaaaaaggcgaattcgtgaacgaatatgtcggcgaactgatcgatgaggaggagtgtcgagccagaatcaggtatgcacaggaacacgacataaccaacttctatatgctgaccttggataaagatagaatcatcgacgccggtccaaaaggtaactatgctagatttatgaatcactgttgccaaccgaactgtgaaacccagaagtggagtgtgaacggggacactagggtcggtttgtttgccctgtccgatataaaagccggaacggagctcacatttaattacaacttggagtgtctcggtaatggaaagaccgtatgcaaatgcggtgcgcctaattgctctggctttctgggcgtacggccaaaaaatcagcctatcgccaccgaagaaaagtccaagaaattcaaaaaaaaacaacagggaaagagacggacacagggggaaatcacaaaggagcgagaagacgagtgcttcagctgcggtgatgccggtcagcttgtcagctgtaaaaaacccggatgcccaaaagtgtaccatgccgactgcctgaatctcacaaagagacctgcgggtaaatgggaatgcccttggcatcaatgcgatatctgtggcaaggaagcggcttccttttgtgagatgtgcccgtcctcattctgtaaacagcatcgggaaggtatgctctttatcagcaagctggatggaagactctcctgcactgagcacgatccgtgcggcccaaatcctttggaacctggcgagatccgcgagtacgtccccccacccgtgcccttgcctccaggcccttccacacatctggctgagcagtcaaccggaatggccgctcaggcacccaagatgtcagataaaccacccgcagacactaaccagatgctaagtctcagcaagaaagctctggccggtacctgccagaggccacttctcccagagcgaccattagaacgcacggatagtcgaccccaaccactcgataaggtcagggacctggccggtagtgggacgaaaagccagtcactggtttcctcccagcgccctttggatagacccccagctgtggcaggacctcgcccacagctgtccgacaaaccttcgcccgtaacatctccttctagctcccccagtgtccggtcccaacctttagaaaggccactgggaactgccgacccaaggttggacaagtccattggggcagcctcacctcggccacagtcccttgagaagacgtcagtcccaactggtcttcgcttgccacctcccgatcggcttttaatcacctcatcccctaagcctcagacctccgatcgtccaacagataaaccacacgcatccctgagtcaacggctgccaccgccagaaaaggttttgagcgctgttgtgcagacactggtggccaaggaaaaagccctgcgccctgtagatcagaatacccaatctaaaaaccgggcagccctggtgatggacctaatcgatttgactccaaggcagaaggagcgggctgccagcccacaccaggtgacacctcaagcagatgaaaagatgccagttcttgaatcttcgagctggccagcatcgaaaggccttggccatatgcccagagcggtcgaaaaaggatgcgtctcagacccactccaaaccagcggtaaggcagccgctccttcagaagatccatggcaggcggttaagagtctgacccaggcccgattgctaagtcagcctccagccaaagcattcctttacgaacctactactcaggcaagcggaagggcatccgccggagccgaacagacaccagggcctctgtcccagtcccccggtctggttaagcaggctaagcagatggtggggggacagcaattacccgcactggccgctaaaagtggacagtccttccgaagcttggggaaggctccagcctcgctcccaaccgaggaaaaaaagcttgtgactactgagcagagtccttgggccttagggaaagccagttcccgtgcgggtctctggcctatcgtggcaggacagactctcgcccaatcctgttggagcgctggctccacgcagacactggcacaaacttgttggagtcttggccgtgggcaagacccaaagccagaacagaacactctgcctgcactgaaccaggccccatccagccacaagtgcgcagagtccgaacagaagta

SEQ ID NO: 329082 - DNA, 8091 bp, Artificial Sequence
  derived and/or modified sequence
atggaccagacctgcgagctgcccagaagaaactgcctgctgcccttcagcaaccccgtgaacctggacgcccccgaggacaaggacagccccttcggcaacggccagagcaacttcagcgagcccctgaacggctgcaccatgcagctgagcaccgtgagcggcaccagccagaacgcctacggccaggacagccccagctgctacatccccctgagaagactgcaggacctggccagcatgatcaacgtggagtacctgaacggcagcgccgacggcagcgagagcttccaggaccccgagaagagcgacagcagagcccagacccccatcgtgtgcaccagcctgagccccggcggccccaccgccctggccatgaagcaggagcccagctgcaacaacagccccgagctgcaggtgaaggtgaccaagaccatcaagaacggcttcctgcacttcgagaacttcacctgcgtggacgacgccgacgtggacagcgagatggaccccgagcagcccgtgaccgaggacgagagcatcgaggagatcttcgaggagacccagaccaacgccacctgcaactacgagaccaagagcgagaacggcgtgaaggtggccatgggcagcgagcaggacagcacccccgagagcagacacggcgccgtgaagagccccttcctgcccctggccccccagaccgagacccagaagaacaagcagagaaacgaggtggacggcagcaacgagaaggccgccctgctgcccgcccccttcagcctgggcgacaccaacatcaccatcgaggagcagctgaacagcatcaacctgagcttccaggacgaccccgacagcagcaccagcaccctgggcaacatgctggagctgcccggcaccagcagcagcagcaccagccaggagctgcccttctgccagcccaagaagaagagcacccccctgaagtacgaggtgggcgacctgatctgggccaagttcaagagaagaccctggtggccctgcagaatctgcagcgaccccctgatcaacacccacagcaagatgaaggtgagcaacagaagaccctacagacagtactacgtggaggccttcggcgaccccagcgagagagcctgggtggccggcaaggccatcgtgatgttcgagggcagacaccagttcgaggagctgcccgtgctgagaagaagaggcaagcagaaggagaagggctacagacacaaggtgccccagaagatcctgagcaagtgggaggccagcgtgggcctggccgagcagtacgacgtgcccaagggcagcaagaacagaaagtgcatccccggcagcatcaagctggacagcgaggaggacatgcccttcgaggactgcaccaacgaccccgagagcgagcacgacctgctgctgaacggctgcctgaagagcctggccttcgacagcgagcacagcgccgacgagaaggagaagccctgcgccaagagcagagccagaaagagcagcgacaaccccaagagaaccagcgtgaagaagggccacatccagttcgaggcccacaaggacgagagaagaggcaagatccccgagaacctgggcctgaacttcatcagcggcgacatcagcgacacccaggccagcaacgagctgagcagaatcgccaacagcctgaccggcagcaacaccgcccccggcagcttcctgttcagcagctgcggcaagaacaccgccaagaaggagttcgagaccagcaacggcgacagcctgctgggcctgcccgagggcgccctgatcagcaagtgcagcagagagaagaacaagccccagagaagcctggtgtgcggcagcaaggtgaagctgtgctacatcggcgccggcgacgaggagaagagaagcgacagcatcagcatctgcaccaccagcgacgacggcagcagcgacctggaccccatcgagcacagcagcgagagcgacaacagcgtgctggagatccccgacgccttcgacagaaccgagaacatgctgagcatgcagaagaacgagaagatcaagtacagcagattcgccgccaccaacaccagagtgaaggccaagcagaagcccctgatcagcaacagccacaccgaccacctgatgggctgcaccaagagcgccgagcccggcaccgagaccagccaggtgaacctgagcgacctgaaggccagcaccctggtgcacaagccccagagcgacttcaccaacgacgccctgagccccaagttcaacctgagcagcagcatcagcagcgagaacagcctgatcaagggcggcgccgccaaccaggccctgctgcacagcaagagcaagcagcccaagttcagaagcatcaagtgcaagcacaaggagaaccccgtgatggccgagccccccgtgatcaacgaggagtgcagcctgaagtgctgcagcagcgacaccaagggcagccccctggccagcatcagcaagagcggcaaggtggacggcctgaagctgctgaacaacatgcacgagaagaccagagacagcagcgacatcgagaccgccgtggtgaagcacgtgctgagcgagctgaaggagctgagctacagaagcctgggcgaggacgtgagcgacagcggcaccagcaagcccagcaagcccctgctgttcagcagcgccagcagccagaaccacatccccatcgagcccgactacaagttcagcaccctgctgatgatgctgaaggacatgcacgacagcaagaccaaggagcagagactgatgaccgcccagaacctggtgagctacagaagccccggcagaggcgactgcagcaccaacagccccgtgggcgtgagcaaggtgctggtgagcggcggcagcacccacaacagcgagaagaagggcgacggcacccagaacagcgccaaccccagccccagcggcggcgacagcgccctgagcggcgagctgagcgccagcctgcccggcctgctgagcgacaagagagacctgcccgccagcggcaagagcagaagcgactgcgtgaccagaagaaactgcggcagaagcaagcccagcagcaagctgagagacgccttcagcgcccagatggtgaagaacaccgtgaacagaaaggccctgaagaccgagagaaagagaaagctgaaccagctgcccagcgtgaccctggacgccgtgctgcagggcgacagagagagaggcggcagcctgagaggcggcgccgaggaccccagcaaggaggaccccctgcagatcatgggccacctgaccagcgaggacggcgaccacttcagcgacgtgcacttcgacagcaaggtgaagcagagcgaccccggcaagatcagcgagaagggcctgagcttcgagaacggcaagggccccgagctggacagcgtgatgaacagcgagaacgacgagctgaacggcgtgaaccaggtggtgcccaagaagagatggcagagactgaaccagagaagaaccaagcccagaaagagaatgaacagattcaaggagaaggagaacagcgagtgcgccttcagagtgctgctgcccagcgaccccgtgcaggagggcagagacgagttccccgagcacagaacccccagcgccagcatcctggaggagcccctgaccgagcagaaccacgccgactgcctggacagcgccggccccagactgaacgtgtgcgacaagagcagcgccagcatcggcgacatggagaaggagcccggcatccccagcctgaccccccaggccgagctgcccgagcccgccgtgagaagcgagaagaagagactgagaaagcccagcaagtggctgctggagtacaccgaggagtacgaccagatcttcgcccccaagaagaagcagaagaaggtgcaggagcaggtgcacaaggtgagcagcagatgcgaggaggagagcctgctggccagaggcagaagcagcgcccagaacaagcaggtggacgagaacagcctgatcagcaccaaggaggagccccccgtgctggagagagaggcccccttcctggagggccccctggcccagagcgagctgggcggcggccacgccgagctgccccagctgaccctgagcgtgcccgtggcccccgaggtgagccccagacccgccctggagagcgaggagctgctggtgaagacccccggcaactacgagagcaagagacagagaaagcccaccaagaagctgctggagagcaacgacctggaccccggcttcatgcccaagaagggcgacctgggcctgagcaagaagtgctacgaggccggccacctggagaacggcatcaccgagagctgcgccaccagctacagcaaggacttcggcggcggcaccaccaagatcttcgacaagcccagaaagagaaagagacagagacacgccgccgccaagatgcagtgcaagaaggtgaagaacgacgacagcagcaaggagatccccggcagcgagggcgagctgatgccccacagaaccgccaccagccccaaggagaccgtggaggagggcgtggagcacgaccccggcatgcccgccagcaagaagatgcagggcgagagaggcggcggcgccgccctgaaggagaacgtgtgccagaactgcgagaagctgggcgagctgctgctgtgcgaggcccagtgctgcggcgccttccacctggagtgcctgggcctgaccgagatgcccagaggcaagttcatctgcaacgagtgcagaaccggcatccacacctgcttcgtgtgcaagcagagcggcgaggacgtgaagagatgcctgctgcccctgtgcggcaagttctaccacgaggagtgcgtgcagaagtacccccccaccgtgatgcagaacaagggcttcagatgcagcctgcacatctgcatcacctgccacgccgccaaccccgccaacgtgagcgccagcaagggcagactgatgagatgcgtgagatgccccgtggcctaccacgccaacgacttctgcctggccgccggcagcaagatcctggccagcaacagcatcatctgccccaaccacttcacccccagaagaggctgcagaaaccacgagcacgtgaacgtgagctggtgcttcgtgtgcagcgagggcggcagcctgctgtgctgcgacagctgccccgccgccttccacagagagtgcctgaacatcgacatccccgagggcaactggtactgcaacgactgcaaggccggcaagaagccccactacagagagatcgtgtgggtgaaggtgggcagatacagatggtggcccgccgagatctgccaccccagagccgtgcccagcaacatcgacaagatgagacacgacgtgggcgagttccccgtgctgttcttcggcagcaacgactacctgtggacccaccaggccagagtgttcccctacatggagggcgacgtgagcagcaaggacaagatgggcaagggcgtggacggcacctacaagaaggccctgcaggaggccgccgccagattcgaggagctgaaggcccagaaggagctgagacagctgcaggaggacagaaagaacgacaagaagccccccccctacaagcacatcaaggtgaacagacccatcggcagagtgcagatcttcaccgccgacctgagcgagatccccagatgcaactgcaaggccaccgacgagaacccctgcggcatcgacagcgagtgcatcaacagaatgctgctgtacgagtgccaccccaccgtgtgccccgccggcggcagatgccagaaccagtgcttcagcaagagacagtaccccgaggtggagatcttcagaaccctgcagagaggctggggcctgagaaccaagaccgacatcaagaagggcgagttcgtgaacgagtacgtgggcgagctgatcgacgaggaggagtgcagagccagaatcagatacgcccaggagcacgacatcaccaacttctacatgctgaccctggacaaggacagaatcatcgacgccggccccaagggcaactacgccagattcatgaaccactgctgccagcccaactgcgagacccagaagtggagcgtgaacggcgacaccagagtgggcctgttcgccctgagcgacatcaaggccggcaccgagctgaccttcaactacaacctggagtgcctgggcaacggcaagaccgtgtgcaagtgcggcgcccccaactgcagcggcttcctgggcgtgagacccaagaaccagcccatcgccaccgaggagaagagcaagaagttcaagaagaagcagcagggcaagagaagaacccagggcgagatcaccaaggagagagaggacgagtgcttcagctgcggcgacgccggccagctggtgagctgcaagaagcccggctgccccaaggtgtaccacgccgactgcctgaacctgaccaagagacccgccggcaagtgggagtgcccctggcaccagtgcgacatctgcggcaaggaggccgccagcttctgcgagatgtgccccagcagcttctgcaagcagcacagagagggcatgctgttcatcagcaagctggacggcagactgagctgcaccgagcacgacccctgcggccccaaccccctggagcccggcgagatcagagagtacgtgcccccccccgtgcccctgccccccggccccagcacccacctggccgagcagagcaccggcatggccgcccaggcccccaagatgagcgacaagccccccgccgacaccaaccagatgctgagcctgagcaagaaggccctggccggcacctgccagagacccctgctgcccgagagacccctggagagaaccgacagcagaccccagcccctggacaaggtgagagacctggccggcagcggcaccaagagccagagcctggtgagcagccagagacccctggacagaccccccgccgtggccggccccagaccccagctgagcgacaagcccagccccgtgaccagccccagcagcagccccagcgtgagaagccagcccctggagagacccctgggcaccgccgaccccagactggacaagagcatcggcgccgccagccccagaccccagagcctggagaagaccagcgtgcccaccggcctgagactgcccccccccgacagactgctgatcaccagcagccccaagccccagaccagcgacagacccaccgacaagccccacgccagcctgagccagagactgcccccccccgagaaggtgctgagcgccgtggtgcagaccctggtggccaaggagaaggccctgagacccgtggaccagaacacccagagcaagaacagagccgccctggtgatggacctgatcgacctgacccccagacagaaggagagagccgccagcccccaccaggtgaccccccaggccgacgagaagatgcccgtgctggagagcagcagctggcccgccagcaagggcctgggccacatgcccagagccgtggagaagggctgcgtgagcgaccccctgcagaccagcggcaaggccgccgcccccagcgaggacccctggcaggccgtgaagagcctgacccaggccagactgctgagccagccccccgccaaggccttcctgtacgagcccaccacccaggccagcggcagagccagcgccggcgccgagcagacccccggccccctgagccagagccccggcctggtgaagcaggccaagcagatggtgggcggccagcagctgcccgccctggccgccaagagcggccagagcttcagaagcctgggcaaggcccccgccagcctgcccaccgaggagaagaagctggtgaccaccgagcagagcccctgggccctgggcaaggccagcagcagagccggcctgtggcccatcgtggccggccagaccctggcccagagctgctggagcgccggcagcacccagaccctggcccagacctgctggagcctgggcagaggccaggaccccaagcccgagcagaacaccctgcccgccctgaaccaggcccccagcagccacaagtgcgccgagagcgagcagaagtag

SEQ ID NO: 329083 - protein, 2593 aa, Artificial Sequence
  derived and/or modified sequence
MDQTCELPRRNCLLPFSNPVNLDAPEDKDSPFGNGQSNFSEPLNGCTMQLSTVSGTSQNAYGQDSPSCYIPLRRLQDLASMINVEYLNGSADGSESFQDPEKSDSRAQTPIVCTSLSPGGPTALAMKQEPSCNNSPELQVKVTKTIKNGFLHFENFTCVDDADVDSEMDPEQPVTEDESIEEIFEETQTNATCNYETKSENGVKVAMGSEQDSTPESRHGAVKSPFLPLAPQTETQKNKQRNEVDGSNEKAALLPAPFSLGDTNITIEEQLNSINLSFQDDPDSSTSTLGNMLELPGTSSSSTSQELPFVPQKILSKWEASVGLAEQYDVPKGSKNRKCIPGSIKLDSEEDMPFEDCTNDPESEHDLLLNGCLKSLAFDSEHSADEKEKPCAKSRARKSSDNPKRTSVKKGHIQFEAHKDERRGKIPENLGLNFISGDISDTQASNELSRIANSLTGSNTAPGSFLFSSCGKNTAKKEFETSNGDSLLGLPEGALISKCSREKNKPQRSLVCGSKVKLCYIGAGDEEKRSDSISICTTSDDGSSDLDPIEHSSESDNSVLEIPDAFDRTENMLSMQKNEKIKYSRFAATNTRVKAKQKPLISNSHTDHLMGCTKSAEPGTETSQVNLSDLKASTLVHKPQSDFTNDALSPKFNLSSSISSENSLIKGGAANQALLHSKSKQPKFRSIKCKHKENPVMAEPPVINEECSLKCCSSDTKGSPLASISKSGKVDGLKLLNNMHEKTRDSSDIETAVVKHVLSELKELSYRSLGEDVSDSGTSKPSKPLLFSSASSQNHIPIEPDYKFSTLLMMLKDMHDSKTKEQRLMTAQNLVSYRSPGRGDCSTNSPVGVSKVLVSGGSTHNSEKKGDGTQNSANPSPSGGDSALSGELSASLPGLLSDKRDLPASGKSRSDCVTRRNCGRSKPSSKLRDAFSAQMVKNTVNRKALKTERKRKLNQLPSVTLDAVLQGDRERGGSLRGGAEDPSKEDPLQIMGHLTSEDGDHFSDVHFDSKVKQSDPGKISEKGLSFENGKGPELDSVMNSENDELNGVNQVVPKKRWQRLNQRRTKPRKRMNRFKEKENSECAFRVLLPSDPVQEGRDEFPEHRTPSASILEEPLTEQNHADCLDSAGPRLNVCDKSSASIGDMEKEPGIPSLTPQAELPEPAVRSEKKRLRKPSKWLLEYTEEYDQIFAPKKKQKKVQEQVHKVSSRCEEESLLARGRSSAQNKQVDENSLISTKEEPPVLEREAPFLEGPLAQSELGGGHAELPQLTLSVPVAPEVSPRPALESEELLVKTPGNYESKRQRKPTKKLLESNDLDPGFMPKKGDLGLSKKCYEAGHLENGITESCATSYSKDFGGGTTKIFDKPRKRKRQRHAAAKMQCKKVKNDDSSKEIPGSEGELMPHRTATSPKETVEEGVEHDPGMPASKKMQGERGGGAALKENVCQNCEKLGELLLCEAQCCGAFHLECLGLTEMPRGKFICNECRTGIHTCFVCKQSGEDVKRCLLPLCGKFYHEECVQKYPPTVMQNKGFRCSLHICITCHAANPANVSASKGRLMRCVRCPVAYHANDFCLAAGSKILASNSIICPNHFTPRRGCRNHEHVNVSWCFVCSEGGSLLCCDSCPAAFHRECLNIDIPEGNWYCNDCKAGKKPHYREIVWVKVGRYRWWPAEICHPRAVPSNIDKMRHDVGEFPVLFFGSNDYLWTHQARVFPYMEGDVSSKDKMGKGVDGTYKKALQEAAARFEELKAQKELRQLQEDRKNDKKPPPYKHIKVNRPIGRVQIFTADLSEIPRCNCKATDENPCGIDSECINRMLLYECHPTVCPAGGRCQNQCFSKRQYPEVEIFRTLQRGWGLRTKTDIKKGEFVNEYVGELIDEEECRARIRYAQEHDITNFYMLTLDKDRIIDAGPKGNYARFMNHCCQPNCETQKWSVNGDTRVGLFALSDIKAGTELTFNYNLECLGNGKTVCKCGAPNCSGFLGVRPKNQPIATEEKSKKFKKKQQGKRRTQGEITKEREDECFSCGDAGQLVSCKKPGCPKVYHADCLNLTKRPAGKWECPWHQCDICGKEAASFCEMCPSSFCKQHREGMLFISKLDGRLSCTEHDPCGPNPLEPGEIREYVPPPVPLPPGPSTHLAEQSTGMAAQAPKMSDKPPADTNQMLSLSKKALAGTCQRPLLPERPLERTDSRPQPLDKVRDLAGSGTKSQSLVSSQRPLDRPPAVAGPRPQLSDKPSPVTSPSSSPSVRSQPLERPLGTADPRLDKSIGAASPRPQSLEKTSVPTGLRLPPPDRLLITSSPKPQTSDRPTDKPHASLSQRLPPPEKVLSAVVQTLVAKEKALRPVDQNTQSKNRAALVMDLIDLTPRQKERAASPHQVTPQADEKMPVLESSSWPASKGLGHMPRAVEKGCVSDPLQTSGKAAAPSEDPWQAVKSLTQARLLSQPPAKAFLYEPTTQASGRASAGAEQTPGPLSQSPGLVKQAKQMVGGQQLPALAAKSGQSFRSLGKAPASLPTEEKKLVTTEQSPWALGKASSRAGLWPIVAGQTLAQSCWSAGSTQTLAQTCWSLGRGQDPKPEQNTLPALNQAPSSHKCAESEQK

SEQ ID NO: 329084 - DNA, 7782 bp, Artificial Sequence
  derived and/or modified sequence
atggaccagacatgtgaattgcctcgccgtaattgcctgctgcctttcagcaaccctgttaatctggatgcacccgaagataaggatagcccatttggcaacggccagtcaaatttctcagaacctctcaacggttgtaccatgcaactgtccaccgtatcaggaacaagtcaaaacgcttatggccaggactccccttcatgctacatccccctgcggagactgcaggacctggcatctatgatcaatgtcgagtacctcaatgggtccgctgacggcagtgagtcttttcaggatcccgaaaagagtgatagccgcgcccagaccccaattgtctgtacttctctgagcccaggcggtccgaccgcccttgcgatgaagcaagagccatcatgtaacaattcacccgagctgcaagttaaagtcaccaagaccattaaaaacggcttccttcactttgagaactttacgtgcgtggacgatgccgacgtggacagcgaaatggaccccgaacagccagtgaccgaagatgaatccattgaggaaatcttcgaagaaacacagaccaatgctacatgcaactatgagaccaagtctgagaatggagtcaaagtggctatggggagtgagcaggactccacacctgagtccagacacggggcagttaaatcgccgtttttaccactggctccacagaccgaaactcagaagaataagcagcgcaacgaagtggatggttccaatgaaaaggccgccctactgcccgccccattctctctcggcgacacaaacatcacgattgaagagcagttaaattccataaatctaagttttcaggatgacccagactcatccacttcgaccctgggcaatatgttggaattgcccgggacatctagctcatccactagccaggaacttcccttcgttcctcaaaaaattctctccaaatgggaggcgtctgtaggcctcgccgagcagtacgacgtcccaaaggggtccaagaaccggaagtgcattcctggctccattaagctggactccgaggaagacatgcccttcgaagactgtacaaacgatccagaaagtgagcacgatctgctcctgaatggatgcctaaaaagtctagcatttgattccgagcattccgcggatgaaaaagagaaaccttgcgccaaatcgagggctcggaagagttccgacaatcctaagaggacttcggtgaagaaaggccatattcagtttgaggcgcacaaggatgaaaggagaggaaagattccggaaaacttaggcctaaacttcattagtggcgacatctccgatacccaggccagcaacgagttatcacgcattgctaactcactcaccggcagcaacactgctccagggtctttcctgttttccagttgtggaaagaatacggctaagaaggagttcgagacctcgaacggtgacagtctgctcggccttcccgagggagccctgatctcaaagtgctctcgagagaagaacaagccccaacgttctctggtgtgtggctccaaggttaagctgtgttacatcggggccggcgatgaagagaagaggtcggattcaatatccatatgcactactagcgatgacgggtccagtgatctcgaccctatcgagcacagcagcgagtccgataattccgtcctcgagatacccgatgcgttcgaccgcactgaaaatatgctgagtatgcagaaaaatgagaaaatcaaatattctagatttgcggctactaatacccgagtgaaggctaaacaaaaaccgctgataagcaatagtcacactgaccatttgatgggatgcactaagtctgccgaaccgggaaccgaaacatcgcaggttaacctgagtgatctcaaagcttcaaccttggtgcacaagccacagagcgatttcacaaacgatgctctgagccctaaatttaacctgtccagcagcatcagctccgagaattcactgattaaaggtggggcagccaaccaggcgctgctccactccaagtctaagcaaccaaaatttcgatctatcaaatgcaaacataaggagaatccagttatggccgagccacctgtgattaatgaggagtgttcacttaaatgctgctcatccgacacgaagggttctcccctggcatccatatcaaagtctggcaaggttgacgggcttaagctgcttaacaacatgcacgaaaaaaccagagacagttccgatattgagaccgctgttgtgaagcacgtgcttagcgaacttaaggagttgtcctataggagcctcggagaggatgtcagcgattcaggaacaagcaaaccttccaaacccctcctgttctccagtgcatcttctcagaatcacattcccatcgaaccagattacaagttctccacactcctgatgatgctgaaagacatgcatgactctaaaaccaaggagcagcggttgatgacggcccaaaatttggtaagctaccgtagccctggcagaggagactgctctaccaactctccggtcggagtgtcaaaagtgctggttagcggtggaagcacgcataattcggagaagaagggcgacgggactcaaaactccgctaaccctagtccttcaggtggagattcggccctgagtggcgagctgtcggcctctctacccggcctgttgtccgacaagagagatctccctgcctcagggaaatcccggtccgactgtgttacccgacggaattgcggaaggtctaagccatccagcaagcttagagatgcctttagcgcacagatggtcaagaacaccgtcaacaggaaggccttaaagacagagaggaaaaggaagctgaatcagctcccctccgtgaccctcgatgctgttctacaaggggaccgagagcgaggtggcagcctgcgcggcggtgctgaagatccctcaaaagaggatcctttgcagataatgggacatcttacctccgaggacggtgaccacttcagcgacgtgcacttcgactccaaggtcaagcagtctgatccaggcaagatttccgaaaaaggcctgtccttcgagaatggcaaagggcctgagctggactccgtgatgaacagcgagaacgacgagctgaacggagttaaccaggtcgttcctaagaaaaggtggcaacgactgaaccagcggcgtacgaaaccccggaagagaatgaaccggtttaaggaaaaagagaattcagagtgcgcatttcgtgtgctgctcccttctgaccctgtgcaggaaggtcgagacgagtttcccgagcatcggacgccttcagcctccatactggaggaacctcttacagagcagaaccacgcggattgcctcgactccgccgggcccagattaaacgtgtgtgataaatcctccgcaagtatcggagatatggagaaggaacctggcataccgagcctcaccccgcaggccgaactccccgagcctgcagtgcgaagcgagaaaaagaggctgaggaagccaagcaagtggttgctggagtacaccgaggaatatgaccagattttcgcgccgaagaaaaagcaaaagaaggtgcaggaacaggtgcataaggtatccagcaggtgcgaggaagagtctctgttagcgagaggacgaagcagcgcgcagaataaacaggttgatgaaaactcccttatctctacgaaggaggagcctccagtcctggaacgcgaagctccttttcttgaggggccactcgcccagtctgagctgggcggcgggcatgccgaactgcctcagctaaccctgagtgtgcccgttgcacccgaggtgtccccacgtccagccctcgaatctgaggagctactggtgaaaacacctggcaactacgaatccaagcgacagaggaagccaacgaagaaactgctagagagcaatgatctcgatcccggatttatgcccaagaaaggcgacctaggtttgagcaaaaagtgctacgaggccggccacctagaaaacggtattactgagtcttgcgccacaagttattcaaaagattttggaggaggcactacaaaaattttcgataagccacggaagagaaaacggcagagacatgccgccgcgaaaatgcagtgcaagaaggtgaagaatgatgatagttccaaggaaataccgggcagcgaaggcgaactgatgccacacaggactgcgacttctccaaaagagacagtggaggaaggtgtggagcacgatccaggaatgccagccagtaagaagatgcaaggagagagaggaggaggtgcagccttgaaggaaaatgtgtgccagaattgcgaaaaattaggcgagctgctgctgtgtgaagctcaatgctgtggcgctttccatctcgagtgcttgggcctgactgagatgcctagaggtaagtttatatgtaatgagtgccgcacaggaatacacacttgctttgtttgcaagcaatccggggaggatgtcaagagatgcctgctgcctctctgtggaaagttctatcacgaggagtgcgtccagaagtacccaccaaccgtgatgcaaaataaaggatttagatgcagcctgcacatatgcattacctgccacgctgccaatccagcgaacgtctccgcctcaaagggccggttaatgaggtgtgtccgttgccctgttgcctaccacgccaatgacttctgcctggccgccggttctaaaatactggcttcaaattccattatctgtcccaatcactttacaccccgcagaggctgccggaatcacgagcacgtcaacgtgtcatggtgtttcgtgtgcagcgagggaggctcgctgctgtgttgtgacagttgtccagcagccttccacagagagtgcctgaacatcgacatccccgaaggaaactggtactgtaatgactgtaaagcgggaaagaagccacattatcgggagatagtgtgggtgaaagtcggacggtaccgttggtggccagctgaaatctgtcaccccagggcagtgccgtccaacatagacaagatgcggcatgacgtgggagaattccctgttctcttttttggcagcaacgactacctttggacccatcaggctcgcgtgttcccctacatggagggggacgtgtctagcaaagataagatgggaaagggagtcgacggaacctataagaaagcccttcaagaggccgccgcgagattcgaggagttaaaggcacagaaagagctgaggcagctccaggaagatcggaaaaacgataagaaaccccctccatataagcacattaaggtgaacagacccatcggccgagtgcagatatttaccgccgatttgagcgaaattcccaggtgtaattgtaaggctaccgatgagaatccctgcggcatcgatagtgagtgtataaatagaatgctgttgtacgagtgtcatcctactgtgtgccccgctggcggccgatgtcagaaccagtgtttttccaaaaggcagtatcctgaagtagagatcttccggacactccagcgaggttggggcctacgcactaagacggacatcaaaaaaggtgaattcgtaaatgagtacgttggggaactgattgatgaagaagaatgtagagctaggattagatatgcacaagaacatgacataactaatttttacatgctgacacttgacaaggatagaatcattgatgccggcccgaagggcaactacgcacgctttatgaaccactgctgtcagccaaattgtgaaacacagaagtggtcagtcaacggcgatactagggtggggttatttgccctgtccgacattaaggccggcacagagcttacctttaattacaatctagagtgcctcggcaacgggaagacagtatgcaagtgcggcgctccaaattgcagcggcttcctgggagtacgccccaagaaccagcccattgccactgaggagaaatccaagaaatttaaaaaaaagcagcagggtaagcggaggacacagggcgaaattacaaaagaacgcgaggatgaatgcttttcatgcggtgacgcggggcaattagtgtcgtgcaaaaagcctgggtgcccgaaggtttatcacgctgactgtctgaacctaaccaaaaggcctgccggcaaatgggaatgcccctggcatcagtgtgatatctgtggaaaggaagcagcctccttctgtgagatgtgtccgagctccttttgcaagcagcaccgggaggggatgctttttattagcaaactggatgggcggctgagctgcaccgaacacgacccatgtggccccaatcccttagagcctggcgagattagagaatacgtcccgcctcccgttcccttgcctcccgggccatctacccatctggcagaacaatccacagggatggcggcacaggcccctaagatgtccgataagccgccggctgatacgaaccagatgctcagcttgtcaaagaaggccctggccggcacatgccagcggcccttgctgccagagcggcccctcgaaagaaccgattcaagaccccaaccactagataaggtgagggatctagccggctcaggcacaaagagccagtccttagtgtcatctcaacggcctcttgatagaccaccggcagtagctggaccccggccacagctgagtgacaaaccctcacccgttacctctccatcttcttctccttccgttcggagtcagcccttagagcgaccattggggaccgccgacccccgattggacaaatccattggagctgcatcccccaggccacagtcgctcgagaaaaccagtgtcccaaccggcctgagactacctccgccagaccggttgctcattacctcttccccaaagcctcagactagcgacaggcctaccgataaacctcacgcatcactgtcacagagactgccaccacccgagaaagtgctttcagcagtggtgcagacgctcgttgccaaggaaaaagcactcagaccagtggaccaaaatacccagagcaaaaaccgcgctgccctggtgatggatctgattgatctcacaccaaggcaaaaggagcgtgccgctagcccccaccaagttactccccaggccgatgagaaaatgccagttctggagtcctcttcctggccagctagcaagggtctgggccacatgccgagggcagttgagaagggatgtgtgtccgacccccttcagacctctgggaaggcggcagctcctagtgaggacccctggcaagccgtcaagtctttgacccaggcccgccttctctctcagcctcctgccaaggccttcttgtacgaacctactacacaggctagtgggcgcgcaagcgcaggcgccgagcagaccccaggacccctgagccagtccccggggttggtcaaacaagctaaacaaatggtgggcggacagcagcttcctgcactggcggccaagtccggccaatccttcaggagccttggcaaggcccctgccagcttgcccaccgaagagaaaaagctggtgacgactgagcagtctccctgggccctcggtaaagccagttcccgagcaggactgtggcctatagtggccgggcagacccttgcccagagctgctggagcgctggatcaactcagacactcgcccagacctgttggtcgttggggcggggtcaggatcccaagccagaacagaacactcttccagccctgaaccaggcaccctccagtcataaatgtgccgagtcagaacagaaatag

SEQ ID NO: 329085 - DNA, 7782 bp, Artificial Sequence
  derived and/or modified sequence
atggaccagacctgtgagctgcccaggaggaactgcctgctgcccttcagcaaccctgtgaacctggatgcccctgaggacaaggacagcccctttggaaatggccagagcaacttcagcgagcccctgaatggctgcaccatgcagctgagcacagtgtctggcaccagccagaatgcctacggccaggacagccccagctgctacatccccctgcggcggctgcaggacctggcctccatgatcaacgtggagtacctgaatggcagcgcagatggcagcgagagcttccaggaccctgagaagagtgacagccgggcccagacccccatcgtgtgcaccagcctgagccctgggggccccacagccctggccatgaagcaggagcccagctgcaacaacagccctgagctgcaggtgaaggtgaccaagaccatcaagaatggcttcctgcactttgagaacttcacctgtgtggatgatgctgatgtggacagcgagatggaccctgagcagcctgtgacagaagatgagagcattgaggagatctttgaggagacccagaccaatgccacctgcaactatgagaccaagtcagaaaatggagtgaaggtggccatgggcagcgagcaggacagcaccccagagagcagacatggagctgtgaagagccccttcctgcccctggccccccagacagagacccagaagaacaagcagagaaatgaggtggatggcagcaatgagaaggccgccctgctgcctgcccccttcagcctgggggacaccaacatcaccatcgaggagcagctgaacagcatcaacctgtccttccaggatgatcctgacagcagcaccagcaccctgggcaacatgctggagctgcccggcaccagcagcagcagcaccagccaggagctgccctttgtgccccagaagatcctgagcaagtgggaggcctctgtgggcctggccgagcagtatgatgtgcccaagggcagcaagaacaggaagtgcatccctggcagcatcaagctggacagcgaggaggacatgccctttgaggactgcaccaatgaccctgagagcgagcatgacctgctgctgaatggctgcctgaagagcctggcctttgacagcgagcacagcgcagatgagaaggagaagccctgtgccaagagccgggccaggaagagcagtgacaaccccaagaggacctctgtgaagaagggccacatccagtttgaggcccacaaggatgagcggcggggcaagatccctgagaacctgggcctgaacttcatcagcggggacatcagtgacacccaggccagcaatgagctgagcagaattgccaacagcctgaccggcagcaacacagcccctggcagcttcctgttcagcagctgtgggaagaacacagccaagaaggagtttgagaccagcaatggagacagcctgctgggcctgcctgagggcgccctgatcagcaagtgcagccgggagaagaacaagccccagaggagcctggtgtgtggcagcaaggtgaagctgtgctacatcggggctggagatgaggagaagagaagtgacagcatcagcatctgcaccaccagtgatgatggcagcagtgacctggaccccatcgagcacagcagcgagagtgacaacagcgtgctggagatcccagatgcctttgacagaacagagaacatgctgtccatgcagaagaatgagaagatcaagtacagcagatttgctgccaccaacaccagggtgaaggccaagcagaagcccctcatcagcaacagccacacagaccacctgatgggctgcaccaagtctgctgagcccggcacagagaccagccaggtgaacctgagtgacctgaaggccagcaccctggtgcacaagccccagagcgacttcaccaatgatgccctgagccccaagttcaacctgagcagcagcatcagcagcgagaacagcctcatcaagggcggggccgccaaccaggccctgctgcacagcaagagcaagcagcccaagttccgcagcatcaagtgcaagcacaaggaaaatcctgtgatggccgagccccctgtgatcaatgaggagtgcagcctgaagtgctgcagcagtgacaccaagggcagccccctggccagcatcagcaagagcggcaaggtggatggcctgaagctgctgaacaacatgcatgagaagacccgggacagcagtgacattgaaacagctgtggtgaagcacgtgctgtctgagctgaaggagctgagctaccgcagcctgggagaagatgtgtctgacagcggcaccagcaagcccagcaagcccctgctcttcagcagcgccagcagccagaaccacatccccatcgagccagactacaagttcagcaccctgctgatgatgctgaaggacatgcatgacagcaagaccaaggagcagaggctgatgacagcccagaacctggtgtcctaccgcagccctggccgcggggactgcagcaccaacagccctgtgggcgtgtccaaggtgctggtgtctgggggcagcacccacaacagcgagaagaagggagatggcacccagaacagcgccaaccccagccccagcggcggggacagcgccctgtctggagagctgagcgccagcctgcccggcctgctgagtgacaagagggacctgcctgccagcggcaagagcagaagtgactgtgtgaccaggaggaactgtggccgcagcaagcccagcagcaagctgagagatgccttcagcgcccagatggtgaagaacacagtgaacaggaaggccctgaagacagagaggaagaggaagctgaaccagctgcccagcgtgaccctggatgctgtgctgcagggcgaccgggagcggggcggcagcctgcggggcggcgctgaggaccccagcaaagaagaccccctgcagatcatgggccacctgaccagtgaagatggagaccacttcagtgatgtgcactttgacagcaaggtgaagcagagcgaccccgggaagatcagcgagaagggcctgagctttgaaaatggcaagggccctgagctggacagcgtgatgaacagtgaaaatgatgagctgaatggagtgaaccaggtggtgcccaagaagcgctggcagaggctgaaccagaggaggaccaagcccaggaagaggatgaaccgcttcaaggagaaggagaacagtgaatgtgccttccgggtgctgctgcccagcgaccctgtgcaggagggcagagatgagttccctgagcacaggaccccatctgccagcatcctggaggagcccctgacagagcagaaccacgccgactgcctggacagcgctggcccccggctgaatgtgtgtgacaagagcagcgccagcattggagacatggagaaggagcccggcatccccagcctgaccccccaggccgagctgcctgagcctgctgtgcgctctgagaagaagaggctgaggaagcccagcaagtggctgctggagtacacagaggagtatgaccagatctttgcccccaagaagaagcagaagaaggtgcaggagcaggtgcacaaggtgagcagccgctgtgaggaggagagcctgctggcccggggccgcagcagcgcccagaacaagcaggtggatgagaacagcctcatcagcaccaaggaggagccccctgtgctggagcgggaggcccccttcctggagggccccctggcccagagcgagctgggcggcggccatgctgagctgccccagctgaccctgtctgtgcctgtggcccctgaggtgagccccaggcctgccctggagagcgaggagctgctggtgaagaccccaggcaactatgagagcaagaggcagaggaagcccaccaagaagctgctggagagcaatgacctggaccccggcttcatgcccaagaagggggacctgggcctgagcaagaagtgctatgaagctggccacctggagaatggcatcacagagagctgtgccaccagctacagcaaggactttggaggcggcaccaccaagatctttgacaagcccaggaagaggaagaggcagagacatgctgctgccaagatgcagtgcaagaaggtgaagaatgatgacagcagcaaggagatccctggcagcgagggggagctgatgccccacaggacagccaccagccccaaggagaccgtggaggagggcgtggagcatgaccccggcatgcctgccagcaagaagatgcagggcgagcggggcggcggggccgccctgaaggaaaatgtgtgccagaactgtgagaagctgggggagctgctgctgtgtgaggcccagtgctgcggggccttccacctggagtgcctgggcctgacagagatgccccggggcaagttcatctgcaatgaatgtagaacaggcatccacacctgctttgtgtgcaagcagagcggggaggatgtgaagcgctgcctgctgcccctgtgtgggaagttctaccatgaagaatgtgtgcagaagtacccacccaccgtgatgcagaacaagggcttccgctgcagcctgcacatctgcatcacctgccacgccgccaacccagccaacgtgtctgccagcaagggccgcctgatgagatgtgtgcgctgccctgtggcctaccacgccaatgacttctgcctggccgccggcagcaagatcctggccagcaacagcatcatctgccccaaccacttcaccccaagaagaggctgcagaaatcatgaacatgtgaatgtgtcctggtgctttgtgtgcagcgagggcggcagcctgctgtgctgtgacagctgcccagctgccttccacagagaatgtctgaacatcgacatccctgagggcaactggtactgcaatgactgcaaggccggcaagaagccccactaccgggagatcgtgtgggtgaaggtgggccgctaccgctggtggccagctgagatctgccaccccagggctgtgcccagcaacatcgacaagatgagacatgatgtgggggagttccctgtgctcttcttcggcagcaatgactacctgtggacccaccaggcccgggtcttcccctacatggagggagatgtgagcagcaaggacaagatgggcaaaggagtggatggcacctacaagaaggccctgcaggaggccgccgccaggtttgaggagctgaaggcccagaaggagctgcggcagctgcaggaggacaggaagaatgacaagaagcccccaccctacaagcacatcaaggtgaaccggcccatcggccgggtgcagatcttcaccgctgacctgtctgagatcccccgctgcaactgcaaggccacagatgagaacccctgtggcatcgacagcgagtgcatcaacaggatgctgctgtatgagtgccaccccaccgtgtgcccagctgggggccgctgccagaaccagtgcttcagcaagaggcagtacccagaggtggagatcttccgcaccctgcagaggggctggggcctgcggaccaagacagacatcaagaagggggagtttgtgaatgaatatgtgggggagctgattgatgaggaggagtgccgggcccgcatccgctatgcccaggagcatgacatcaccaacttctacatgctgaccctggacaaggaccgcatcattgatgctggccccaagggcaactatgcccgcttcatgaaccactgctgccagcccaactgtgagacccagaagtggagcgtgaatggagacaccagggtgggcctgtttgccctgagtgacatcaaggccggcacagagctgaccttcaactacaacctggagtgcctgggcaatggcaagacagtgtgcaagtgtggggcccccaactgcagcggcttcctgggcgtgcggcccaagaaccagcccatcgccacagaggagaagagcaagaagttcaagaagaagcagcagggcaagaggaggacccagggcgagatcaccaaggagagagaagatgagtgcttcagctgtggagatgctggccagctggtgtcctgcaagaagccaggctgccccaaggtgtaccacgccgactgcctgaacctgaccaagaggcctgctgggaagtgggagtgcccctggcaccagtgtgacatctgtgggaaggaggccgccagcttctgtgagatgtgccccagcagcttctgcaagcagcaccgggagggcatgctgttcatcagcaagctggatggccgcctgagctgcacagaacatgacccctgtggccccaaccccctggagcccggggagatccgggagtatgtgcccccacctgtgcccctgcccccaggccccagcacccacctggccgagcagagcacaggcatggccgcccaggcccccaagatgtctgacaagcccccagctgacaccaaccagatgctgagcctgagcaagaaggccctggccggcacctgccagaggcccctgctgcctgagcggcccctggagaggacagacagccggccccagcccctggacaaggtgcgggacctggccggcagcggcaccaagagccagagcctggtgagcagccagaggcccctggaccggcccccagctgtggccggcccccggccccagctgagtgacaagcccagccctgtgaccagccccagcagcagccccagcgtgcgcagccagcccctggagcggcccctgggcacagctgacccccggctggacaagagcatcggggccgccagcccccggccccagagcctggagaagacctctgtgcccaccggcctgcggctgcccccaccagaccggctgctgatcaccagcagccccaagccccagaccagtgaccggcccacagacaagccccacgccagcctgagccagaggctgcccccacctgagaaggtgctgtctgctgtggtgcagaccctggtggccaaggagaaggccctgcggcctgtggaccagaacacccagagcaagaacagagctgccctggtgatggacctgattgacctgaccccccggcagaaggagcgggccgccagcccccaccaggtgaccccccaggctgatgagaagatgcctgtgctggagagcagctcctggccagccagcaagggcctgggccacatgcccagggctgtggagaagggctgtgtgtctgaccccctgcagaccagcggcaaggctgctgcccccagcgaggacccctggcaggccgtgaagagcctgacccaggcccggctgctgagccagcccccagccaaggccttcctgtatgagcccaccacccaggccagcggccgggccagcgctggagctgagcagaccccaggccccctgagccagagccctggcctggtgaagcaggccaagcagatggtgggcggccagcagctgcctgccctggccgccaagagcggccagagcttccgcagcctgggcaaggccccagccagcctgcccacagaggagaagaagctggtgaccacagagcagagcccctgggccctgggcaaggccagcagcagagctggcctgtggcccatcgtggccggccagaccctggcccagagctgctggagcgctggcagcacccagaccctggcccagacctgctggagcctgggccggggccaggaccccaagccagagcagaacaccctgcctgccctgaaccaggcccccagcagccacaagtgtgccgagagcgagcagaagtag

SEQ ID NO: 329086 - DNA, 7782 bp, Artificial Sequence
  derived and/or modified sequence
atggaccagacctgcgagctgccccggcggaactgcctgctgcccttttccaatccagtcaacctggatgctccagaggataaggactccccattcggaaatggtcagagcaacttttccgagcccctcaacgggtgcactatgcagctgagcaccgtttctgggacctcccagaacgcctatgggcaggactcaccaagctgctacattcccctgcggcggctccaggacctcgcatctatgattaatgtagaatacttaaacggatcagcagacggtagtgagtcttttcaggaccccgaaaagtcagattctcgagctcagacacccatcgtttgcacgagcttgtcccccggtggaccaaccgctttggcaatgaaacaggagcccagttgtaataacagccctgagttgcaagttaaggttaccaaaactatcaagaacggtttcctgcacttcgagaacttcacatgtgtggacgatgccgatgtggacagcgagatggaccctgagcagcccgtgacagaggacgagagcatcgaagaaatttttgaagagactcaaacaaatgccacatgtaactacgagacaaagagcgagaatggtgttaaggtggctatgggctctgaacaggactccacacccgagtcaagacacggcgcagttaagtctccctttttgcccctcgcccctcaaacagagacgcagaaaaataagcaacgaaatgaggtcgacgggagcaacgagaaagcagcccttcttcctgcccctttttctctgggggacaccaatatcacaatcgaggagcagctgaattccatcaatctgagtttccaggacgacccggatagctcaacctcgactcttggcaatatgctggaactaccaggcacttcatcaagttcaacaagccaggagctgccgttcgtcccacagaaaatcctgtccaagtgggaagcctctgtgggattagctgagcagtacgacgtgcccaaaggaagtaaaaacaggaaatgcattcctgggagtatcaaactggatagtgaggaagatatgccttttgaggattgcacgaacgaccccgagagcgagcatgaccttctgctcaatggatgcctgaaaagtctggcctttgactctgagcattctgccgacgagaaagagaaaccatgtgcaaaatcccgcgcacggaaaagctctgataatcccaagaggacttccgttaagaaaggacacattcagtttgaggctcacaaggatgaaagaagaggcaagattccagaaaatcttggactgaactttatttcgggcgacatctctgacacgcaggcttccaacgagctgtcccgaattgcaaactccctcactgggagcaacacggctcctggcagcttcctattcagctcttgtggaaagaacaccgccaagaaggaatttgaaaccagcaacggggacagtttgttagggcttccggagggggcactgatctccaagtgcagccgtgagaagaataagccacagcggtccctggtgtgtggctctaaggttaagctatgttatattggggctggggacgaggaaaagaggagcgactcaatatcaatttgtaccacctccgatgatggcagtagtgaccttgaccccattgagcattcgtccgaaagcgacaatagtgttttagaaattccagacgccttcgatagaactgagaatatgctcagcatgcagaagaacgagaaaatcaaatactcccgctttgccgccactaatacaagagttaaagccaaacaaaagccattgattagtaattctcacacagatcatcttatgggctgtaccaaaagtgccgaacctggaaccgagactagccaggtgaatctctcggatctgaaggccagtacccttgtgcacaagccgcagagcgatttcacaaacgatgcactgagcccaaagttcaatctgtctagtagcatctcctccgagaattctctcatcaaggggggagctgctaaccaggccctgctccacagcaagagcaagcagcctaagttccgttccattaagtgcaagcataaggaaaaccctgtcatggctgaacccccagtaatcaacgaggaatgctccctgaagtgttgcagcagtgataccaagggcagtcccctggcctcgatttccaagtctggaaaagtggatggtctcaagcttctgaataatatgcacgagaagacccgggactccagcgatatcgaaacagcagtggtgaaacacgtactgtccgaactaaaagaactaagctaccggtccctgggggaagacgtgagcgactcagggacatctaagccaagtaagccactgcttttctccagtgcttcttcacagaatcatattcccattgaacctgactataaattctctacccttctgatgatgctgaaggatatgcatgattctaagaccaaagagcagaggctgatgacagcccagaatcttgtgagctacagaagtccgggtaggggagattgctcaacaaactctcccgtaggcgtgagcaaggtactggtatccggggggagtacccacaattcagagaagaagggtgacgggacgcagaattccgctaacccgtctcctagcgggggcgattccgccctctcgggcgaactgtccgcctcgctgcccggattactctcagacaaaagagatctcccggcaagcgggaagagcagaagtgattgcgtcacccgtagaaattgtggacgcagcaagcctagttccaagttaagggatgcattctctgcgcagatggtaaagaacactgtcaatcggaaagccctgaaaactgaaaggaagagaaagctcaatcaactgccatcggtcactttggatgccgttttgcagggcgatcgcgagaggggcgggtcgctgaggggcggcgctgaagacccttcgaaggaggacccgctgcagataatgggccatcttaccagcgaggatggggatcacttttcagatgtgcatttcgatagcaaagttaagcagtcggatccaggaaagatcagtgaaaaaggtctatctttcgagaacggcaaagggcccgagcttgattccgtcatgaacagtgagaacgatgagttgaacggcgtcaaccaagtcgtgcccaaaaagagatggcaaagattaaaccagaggagaactaagcctcggaagagaatgaataggttcaaggagaaggaaaattcagagtgcgcatttagagtgctgctcccaagcgatccagttcaagaaggacgcgacgagtttcccgaacatcgcactccctcagcatctatcctggaagaacccttaacagagcagaatcacgccgactgtctcgatagtgccggaccccgcctgaacgtttgcgataagagtagcgcgtccatcggggatatggagaaggagccaggcatcccctccctgacaccccaggcagaactgcctgaaccagctgttcggagtgagaaaaagcggttgagaaaaccgagcaagtggctgctcgagtacacggaagagtatgatcagatattcgcccccaagaagaagcagaaaaaggtgcaagaacaggtgcacaaggtgtcttctcggtgcgaggaggagtctctgctggccagaggtagatccagcgctcagaataaacaggtagatgagaactctttaatctctacgaaagaagaaccacccgtcctggaacgtgaagcccctttccttgaagggcctctggcacagagcgagttgggaggcggacatgcagagttgccgcagctgacgcttagtgtgcctgtagcacctgaggtgagccccaggcccgcactggagtctgaggagctgctcgttaagactccaggcaattacgagtccaaacgacaacggaagccaacaaaaaaactacttgaatctaatgatctcgatcccggcttcatgcccaagaagggagacctcggactgagtaagaagtgttacgaggccgggcatctagagaacggcataaccgaaagttgtgcaacctcatacagcaaggacttcggagggggaactacaaagatatttgataaaccacgcaaaagaaagagacaacggcacgccgccgctaaaatgcagtgcaaaaaagtgaagaacgatgattcctccaaagaaatacctggaagtgagggggaactgatgccacacaggacagcaacgtcccccaaggagaccgtggaggaaggcgtcgagcatgatcctggcatgcccgcttcgaagaaaatgcagggggagagaggcggcggagccgctctgaaagaaaatgtttgtcagaactgcgaaaagttgggggagttgttactgtgtgaggcacagtgctgcggggctttccatttggagtgcctgggcttaacagagatgcctagaggaaaatttatctgcaatgagtgtagaacgggcatccacacgtgttttgtctgtaagcagagtggggaagacgtaaagcgatgcctgctcccactgtgtggtaaattctatcatgaggaatgcgtgcagaaatacccacccactgtgatgcagaacaaagggttccgttgcagccttcacatctgcattacttgtcatgcagccaaccccgctaatgttagcgcctctaaaggtaggcttatgcgatgtgtccgctgcccagtggcctaccacgctaacgatttctgccttgctgctggtagcaaaatcctcgcatccaatagtatcatctgtccaaaccattttactccccgaaggggctgccgcaaccacgaacacgtgaacgtatcatggtgtttcgtgtgtagcgaaggaggtagcctcctttgttgtgattcttgccctgctgcctttcacagagagtgcctgaacattgatatacctgaagggaattggtactgcaatgattgcaaagccggaaagaagccacattaccgagaaatcgtttgggtaaaagtggggaggtaccgctggtggcccgcagaaatctgccacccaagggccgtgcccagcaatattgacaaaatgaggcacgacgtaggcgaattcccagtgttattcttcggctccaacgactacctatggacccaccaagctagggtgttcccttatatggagggcgacgtgagtagcaaagataagatgggcaagggtgtcgacgggacttacaaaaaagccctgcaggaagccgcagccagatttgaagagctgaaagcccagaaggagctcagacagctacaagaagacagaaagaacgacaagaagccacccccatataaacatattaaggtcaatagacccattggacgggtccagatcttcactgccgatctctcagagatcccaagatgtaactgcaaggctaccgatgagaatccctgtggcattgattccgagtgcatcaatagaatgctactgtatgagtgccacccaactgtgtgtcccgccggaggtcgttgtcaaaaccagtgtttctcaaagagacaatacccggaggtggaaatctttcgaactctgcaacgcgggtggggcctgaggaccaaaacggacattaaaaagggagagtttgttaacgagtatgttggcgagctgattgacgaggaagaatgccgagcgaggattcgttatgcccaggaacatgatatcacgaacttttacatgctaactctcgataaggataggatcattgatgccggccctaaaggcaactatgcacgatttatgaaccactgttgtcagcccaattgcgagacacagaagtggtccgtgaacggcgacacgcgggtgggtctatttgccctcagcgacattaaggccggtaccgagctgaccttcaattacaaccttgagtgcctgggcaatggaaaaacggtgtgtaagtgtggggcccccaactgtagtggcttcctaggagtaaggccaaagaaccagcctattgcgaccgaagagaagtctaagaagtttaagaagaagcaacagggaaagagacgtacccagggagagataacgaaggagagagaagatgaatgtttctcgtgcggtgacgctgggcagctcgtatcctgcaagaaacccggatgtcccaaggtgtaccacgcagactgtcttaacctcacaaagcggccagccggaaagtgggaatgtccatggcatcagtgtgacatctgtggaaaagaagccgcaagcttctgcgagatgtgtcctagcagcttttgcaagcagcaccgcgaggggatgctgttcataagtaagttggacggcaggctttcttgcactgaacacgacccgtgtggccccaacccgctggagccaggcgagatacgcgaatacgttcccccccctgtccccctaccgccaggcccgagcacgcatctggccgagcagagcacaggtatggctgcccaggcgcccaaaatgagtgataagcccccagcagatacgaatcaaatgctgtctctttccaagaaggccctggctggcacctgtcagaggcctttgctgccagagagaccattggagcgcactgactcacgcccccaacctctggacaaggtcagagatctggccgggtctggaactaaatcacagtcactggtgtccagtcagaggcctctggataggccgcccgcagtggctggaccacggccccagttatccgacaagccctctcccgtcacctctccttccagcagtcccagtgtgagatcgcagcctttagagcgacctctgggaacagccgatcccagactcgataagagcataggggcagcttcccctcggccccagtcacttgaaaaaacatcggtccccacaggacttcgcctcccccccccggacagattactgattacttccagtccgaagcctcagacctccgaccgccctaccgataagcctcacgccagcctgtcacaaagactgcctccccctgaaaaggtcctgagcgccgtagtgcaaactctggtggccaaagagaaagcgttgcggcccgtagaccagaacacacagtcaaagaatcgggccgcccttgtgatggatttgatcgatctaactcctcgccagaaggaacgagcagcctcaccacatcaagttacacctcaagccgatgagaagatgcctgtgctagaaagcagcagctggcctgcgtccaagggtttagggcatatgccacgtgctgtggagaagggatgtgtctctgatcctctccagactagtggcaaagcggctgccccctctgaggatccatggcaagccgtaaagagccttacccaagctaggctgctgtcccagcccccagcaaaagcctttctgtacgagccaacgactcaggcttccggcagggcgtcagccggcgccgagcaaacacccggccctctgtctcaaagtcctggtcttgtaaaacaggccaaacagatggtcgggggacaacagttacccgcgctggcagccaagagtgggcagtccttccggtccctggggaaagctcctgcctcactccccaccgaggaaaaaaagcttgtgactacagagcaatctccttgggcactaggaaaggcatccagccgagccgggctgtggccgatcgtggcaggccagacattagcacaatcttgttggagcgctggatccacacagaccctcgcccagacgtgctggagcctcgggcgcggccaggacccaaaaccggagcagaatacactccctgcactgaaccaggccccatcatcccataagtgtgcagagagtgaacagaaatag

SEQ ID NO: 329087 - DNA, 12533 bp, Artificial Sequence
  derived and/or modified sequence
atggatcagacctgtgaactacccagaagaaattgtctgctgcccttttccaatccagtgaatttagatgcccctgaagacaaggacagccctttcggtaatggtcaatccaatttttctgagccacttaatgggtgtactatgcagttatcgactgtcagtggaacatcccaaaatgcttatggacaagattctccatcttgttacattccactgcggagactacaggatttggcctccatgatcaatgtagagtatttaaatgggtctgctgatggatcagaatcctttcaagaccctgaaaaaagtgattcaagagctcagacgccaattgtttgcacttccttgagtcctggtggtcctacagcacttgctatgaaacaggaaccctcttgtaataactcccctgaactccaggtaaaagtaacaaagactatcaagaatggctttctgcactttgagaattttacttgtgtggacgatgcagatgtagattctgaaatggacccagaacagccagtcacagaggatgagagtatagaggagatctttgaggaaactcagaccaatgccacctgcaattatgagactaaatcagagaatggtgtaaaagtggccatgggaagtgaacaagacagcacaccagagagtagacacggtgcagtcaaatcgccattcttgccattagctcctcagactgaaacacagaaaaataagcaaagaaatgaagtggacggcagcaatgaaaaagcagcccttctcccagcccccttttcactaggagacacaaacattacaatagaagagcaattaaactcaataaatttatcttttcaggatgatccagattccagtaccagtacattaggaaacatgctagaattacctggaacttcatcatcatctacttcacaggaattgccatttgttcctcagaaaattttgagtaaatgggaagccagtgttggacttgcagaacagtatgatgttcccaaggggtcaaagaaccgaaaatgtattcctggttcaatcaagttggacagtgaagaagatatgccatttgaagactgcacaaatgatcctgagtcagaacatgacctgttgcttaatggctgtttgaaatcactggcttttgattctgaacattctgcagatgagaaggaaaagccttgcgctaaatctcgagccagaaagagctctgataatccaaaaaggactagtgtgaaaaagggccacatacaatttgaagcacataaagatgaacggaggggaaagattccagagaaccttggcctaaactttatctctggggatatatctgatacgcaggcctctaatgaactttccaggatagcaaatagcctcacagggtccaacactgccccaggaagttttctgttttcttcctgtggaaaaaacactgcaaagaaagaatttgagacttcaaatggtgactctttattgggcttgcctgagggtgctttgatctcaaagtgttctcgagagaagaataaaccccaacgaagcctggtgtgtggttcaaaagtgaagctctgctatattggagcaggtgatgaggaaaagcgaagtgattccattagtatctgtaccacttctgatgatggaagcagtgacctggatcccatagaacacagctcagagtctgataacagtgtccttgaaattccagatgctttcgatagaacagagaacatgttatctatgcagaaaaatgaaaagataaagtattctaggtttgctgccacaaacactagggtaaaagcaaaacagaagcctctcattagtaactcacatacagaccacttaatgggttgtactaagagtgcagagcctggaaccgagacgtctcaggttaatctctctgatctgaaggcatctactcttgttcacaaaccccagtcagattttacaaatgatgctctctctccaaaattcaacctgtcatcaagcatatccagtgagaactcgttaataaagggtggggcagcaaatcaagctctattacattcgaaaagcaaacagcccaagttccgaagtataaagtgcaaacacaaagaaaatccagttatggcagaacccccagttataaatgaggagtgcagtttgaaatgctgctcttctgataccaaaggctctcctttggccagcatttctaaaagtgggaaagtggatggtctaaaactactgaacaatatgcatgagaaaaccagggattcaagtgacatagaaacagcagtggtgaaacatgttttatccgagttgaaggaactctcttacagatccttaggtgaggatgtcagtgactctggaacatcaaagccatcaaaaccattacttttctcttctgcttctagtcagaatcacatacctattgaaccagactacaaattcagtacattgctaatgatgttgaaagatatgcatgatagtaagacgaaggagcagcggttgatgactgctcaaaacctggtctcttaccggagtcctggtcgtggggactgttctactaatagtcctgtaggagtctctaaggttttggtttcaggaggctccacacacaattcagagaaaaagggagatggcactcagaactccgccaatcctagccctagtgggggtgactctgcattatctggcgagttgtctgcttccctacctggcttactgtccgacaagagagacctccctgcttctggtaaaagtcgttcagactgtgttactaggcgcaactgtggacgatcaaagccttcatccaaattgcgagatgctttttcagcccaaatggtaaagaacacagtgaaccgtaaagccttaaagaccgagcgcaaaagaaaactgaatcagcttccaagtgtgactcttgatgctgtactgcagggagaccgagaacgtggaggttcattgagaggtggggcagaagatcctagtaaagaggatccccttcagataatgggccacttaacaagtgaagatggtgaccatttttctgatgtgcatttcgatagcaaggttaagcaatctgatcctggtaaaatttctgaaaaaggactctcttttgaaaacggaaaaggcccagagctggactctgtaatgaacagtgagaatgatgaactcaatggtgtaaatcaagtggtgcctaaaaagcggtggcagcgtttaaaccaaaggcgcactaaacctcgtaagcgcatgaacagatttaaagagaaagaaaactctgagtgtgcctttagggtcttacttcctagtgaccctgtgcaggaggggcgggatgagtttccagagcatagaactccttcagcaagcatacttgaggaaccactgacagagcaaaatcatgctgactgcttagattcagctgggccacggttaaatgtttgtgataaatccagtgccagcattggtgacatggaaaaggagccaggaattcccagtttgacaccacaggctgagctccctgaaccagctgtgcggtcagagaagaaacgccttaggaagccaagcaagtggcttttggaatatacagaagaatatgatcagatatttgctcctaagaaaaaacaaaagaaggtacaggagcaggtgcacaaggtaagttcccgctgtgaagaggaaagccttctagcccgaggtcgatctagtgctcagaacaagcaggtggacgagaattctttgatttcaaccaaagaagagcctccagttcttgaaagggaggctccgtttttggagggccccttggctcagtcagaacttggaggtggacatgctgagttgccgcagctgaccttgtctgtgcctgtggctccggaagtctctccacggcctgcccttgagtctgaggaattgctagttaaaacgccaggaaattatgaaagtaaacgtcaaagaaaaccaactaagaaacttcttgaatccaatgatttagaccctggatttatgcccaagaagggggaccttggcctttctaaaaagtgctatgaagctggtcacctggagaatggcataactgaatcttgtgccacatcttattcaaaagattttggtggaggcactaccaagatatttgacaagccaaggaagcgaaaacgacagaggcatgctgcagccaagatgcagtgtaaaaaagtgaaaaatgatgactcgtcaaaagagattccaggctcagagggagaactaatgcctcacaggacggccacaagccccaaggagactgttgaggaaggtgtagaacacgatcccgggatgcctgcctctaaaaaaatgcagggtgaacgcggtggaggagctgcactcaaggagaatgtctgtcagaattgtgaaaaattgggtgagctgctgttatgtgaggctcagtgctgtggggctttccacctggagtgccttggattgactgagatgccaagaggaaaatttatctgcaatgaatgtcgcacaggaatccatacctgttttgtatgtaagcagagtggggaagatgttaaaaggtgccttctacccttgtgtggaaagttttaccatgaagagtgtgtccagaagtacccacccactgttatgcagaacaagggcttccggtgctccctccacatctgtataacctgtcatgctgctaatccagccaatgtttctgcatctaaaggtcggttgatgcgctgtgtccgctgtcctgtggcataccacgccaatgacttttgcctggctgctgggtcaaagatccttgcatctaatagtatcatctgccctaatcactttacccctaggcggggctgccgaaatcatgagcatgttaatgttagctggtgctttgtgtgctcagaaggaggcagccttctgtgctgtgattcttgccctgctgcttttcatcgtgaatgcctgaacattgatatccctgaaggaaactggtattgcaatgactgtaaagcaggcaaaaagccacactacagggagattgtctgggtaaaagttggacgatacaggtggtggccagctgagatctgccatcctcgagctgttccttccaacattgataagatgagacatgatgtgggagagttcccagtcctcttttttggatctaatgactatttgtggactcaccaggcccgagtcttcccttacatggagggtgacgtgagcagcaaggataagatgggcaaaggagtggatgggacatataaaaaagctcttcaggaagctgcagcaaggtttgaggaattaaaggcccaaaaagagctaagacagctgcaggaagaccgaaagaatgacaagaagccaccaccttataaacatataaaggtaaaccgtcctattggcagggtacagatcttcactgcagacttatctgaaataccccgttgcaactgtaaagctactgatgagaacccctgtgggatagactctgaatgcatcaaccgcatgctgctctatgagtgccaccccacagtgtgtcctgccggagggcgctgtcaaaaccagtgcttttccaagcgccaatatccagaggttgaaattttccgcacattacagcggggttggggtctacggacaaaaacagatattaaaaagggtgaatttgtgaatgagtatgtgggtgagcttatagatgaagaagaatgcagagctcgaattcgctatgctcaagaacatgatatcactaatttctatatgctcaccctagacaaagaccgaatcattgatgctggtcccaaaggaaactatgctcggttcatgaatcattgctgccagcccaactgtgaaacacagaagtggtctgtgaatggagatacccgtgtaggcctttttgcactaagtgacattaaagcaggcactgaacttaccttcaactacaacctagaatgtcttgggaatggaaagactgtttgcaaatgtggagccccgaactgcagtggcttcttgggtgtaaggccaaagaatcaacccattgccacggaagaaaagtcaaagaaattcaagaagaagcaacagggaaagcgcaggacccagggtgaaatcacaaaggagcgagaagatgagtgttttagttgtggggatgctggccagctcgtctcctgcaagaaaccaggctgcccaaaagtttaccacgcagactgtctcaatctgaccaagcgaccagcagggaaatgggaatgtccgtggcatcagtgtgacatctgcgggaaggaagcagcctccttctgtgagatgtgccccagctccttttgtaagcagcatcgagaagggatgcttttcatttccaaactggatgggcgtctgtcttgtactgagcatgacccctgtgggcccaatcctctggaacctggggagatccgtgagtatgtgcctcccccagtaccgctgcctccagggccaagcactcacctggcagagcaatcaacaggaatggctgctcaggcacccaaaatgtcagataaacctcctgctgacaccaaccagatgctgtcgctctccaaaaaagctctggcagggacttgtcagaggccattgctacctgaaagacctcttgagagaactgactccaggccccagcctttagataaggtcagagacctcgctgggtcagggaccaaatcccaatccttggtttccagccagaggccactggacaggccaccagcagtggcaggaccaagaccccagctaagcgacaaaccctctccagtgaccagcccaagctcctcaccctcagtcaggtcccaaccactggaaagacctctggggacggctgacccaaggctggataaatccataggtgctgccagcccaaggccccagtcactggagaaaacctcagttcccactggcctgagacttccgccgccagacagactgctcattactagcagtcccaaaccccagacttcagacaggcctactgacaaaccccatgcctctttgtcccagagactcccacctcctgagaaagtactatcagctgtggtccagacccttgtagctaaagaaaaagcactgaggcctgtggaccagaatactcagtcaaaaaatagagctgctttggtgatggatctcatagacctaactcctcgccagaaggagcgggcagcttcacctcatcaggtcacaccacaggctgatgagaagatgccagtgttggagtcaagttcatggcctgccagcaaaggtctggggcatatgccgagagctgttgagaaaggctgtgtgtcagatcctcttcagacatctgggaaagcagcagccccttcagaggacccctggcaagctgttaaatcactcacccaggccagacttctttctcagcctcctgccaaggcctttttatatgagccaacaactcaggcctcaggaagagcttctgcaggggctgagcagaccccagggcctcttagccaatccccgggcctggtgaagcaggcgaagcagatggtcggaggccagcaactacctgcacttgccgccaagagtgggcaatcttttaggtctctcgggaaggccccagcctccctccccactgaagaaaagaagttggtaaccacagagcaaagtccctgggccctgggaaaagcctcatcacgggcagggctctggcccatagtggctggacagacactggcacagtcttgctggtctgctgggagcacacagacattggcacagacttgctggtctcttggaagagggcaagaccccaaaccagagcaaaatacacttccagctcttaaccaggctccttccagtcacaagtgtgcagaatcagaacagaagtagtaccaatcaatgtcacatgaacaaacaagctgcccccagggtaccatttggggaggggaaatcttttctttctttcccccttaaaaaaaaacacatctgccccgaacactttcccactgttattctttcctcatatcccaacactcagaactcttgtgacattagccagtgggggcttatggttgtgtgaaccatgtatgaaaatccagtgggccccaaccaaggagacagacagacttgggtctctttcccccaacttttccacatggtcatcgtgaaataaaaagtccactctggagtcaagtatggaattcaattccgctggtcaggttggaaggtataggggctctcaaagcgatttccccaaccagacagagccccattgagggcacctaggaacccttgggaggaaatggtgttctttcaaatcagtggcgatttcctgagcattcacgtgttctaggccgggtgctagtcactgatgagagatacaggcctcatccctgtgagcctggattccaaggctttcaggaacctttgaccaggaagtaacaggaagttctgaggggccctggggctttagactcattttgaaatgtcctttgtggcaccagaagtggttgtgttgaggaagtgtctcttggctgcggtgtgcatgggtgcgtgtgcatgcgcgcacactcacagaggtctcctctatagatgcaagggtgctgcattgaggccagcaaggctgttggctgtggggtcgccgctgctgcttttgtctgggctgtgcagagtctcaagatcagtccttggaggagcaggtggtcaggggcagtcgggctctgtgcgaatgtagatttccagcagtggaagaaggcatttggcaagcttctctttctttgcttttgtttctacctatttttctctttgtacatgaatccaccccatccctatttccctaaaacactcaggtgctttcagatttcagagcctcgggcagtggacatagggaatctctggcaagctctgagctagacacaccagcttcaggaagagtaccagatcctgatgggaaatttcttttccccattccttttccctcctgagtggagggagtcctcttcttcgcctccctgagaattgctgtgctctgtattgagagcacctgcctgctgacttagctcaaaggcaagccagaacccttccctgaagactggcaagaggtggtgtttagagcaacgtccaggctaagagatgactcctattaactgctgattatctgttactgctgccctgagctggggcccaagggctgggaaatctgttggtgctaccctgccctaccattcacccagctcacagactgccaacaggaagtgctgtttggctagtttcctcccacttgtctacccctcctttgtccttagaccaacatgtttacctctctgctttgccaacttagccagcaggccatccccggccctaacgtctcctggccattatctcttagttatggctttcacgctctcaataggattctgtatttggtcccaatttcctcaagttcttattgaggttactcccatcaattccacggagggaacagtagttattatagaagcatttgcgctttatctaaagattaaaaatagaatctgcttttatttcccaaagtctgtctctgaggttgagacacttgaactcaggcagagggacgaggctgggcagggctgtcctgagtttaggggcctatccctgcatttcactgagacctcggaatctcctctgtgaattccacctgcctagttctcccctttcatcctctctctcttcccacatcatcaaagaggaaaagctctttgttcaaaaggaagagaaaacgtaaagcatcttattttcttttaaaagaattttaaaccatgaaaaagatatttttaaagaaattcaccgagaacattaaagttcattatattaagtatttatcatgtgtgagaataataaatatataactgcagctagtaggtccctttccctaatcttttaggtcatatgagtagggtttgcttggtgccagtcctgtgcccttttctctccagtcatctgtagttgtgatcagaaaaaggtatctgcactgcactgtcagagtctcctttcactatgttgtgtgttaaattaccgtagctctttgtttcatgaaataaactgtgaatttggggggggcggggggagggcgtgcaggccatgtaaaaattttccgtggagaagtttgattctaaagtagcttctctaaagtaggctttggtaggtaatcaacttgacagcagtctagatgtctcacaggacaggagggagtgagggaaaggggccatgattggctgctttgtggttttattttggttctttccattctccgccattcattggaggcttcgttccagacctgcctgggaaaacagcttctgagccattttggggagcagttcttcatctgaatggatggacatctgggcttccttcaagggccattgaatgggaactagaaaaccactggaaactagaaatttgagctattgggcccaccagtagcagcatgtgatactagatggttaaaatcatgaaagcagtcactatccaattagaagcagagtcacaacaactgttgggaaatgtgactcttggaggaaggtggggagggagtggccttgccagccctgtgggacgtcccctgaagtttgtaataagaccccttttccaaagggatgtgaattggagtgaaaaggaaatctttcatcttagaaaacttctggtccttaacgcagggtggtatttgggtatgtgcttggaaattgagatctcaagagtgtttgccttggagccagctccccaggaggccttttccagggacaaggcaaaagttgaaattctccatgggtagctagaaagccaatacatctagccctgctaagtcagaaaaagattatgaaaaatgttgaaatttacattcaaagcctcatttgcttatcttgctggagccaacccagtctaatagcaaaatagctgtcattgatacagaaacatcctcatttttaaatgtctgctttaccctgttactgagtttgagatgacttaaatcactgtgttgaccctcttctgaaccaaatctttagcattgatgaaaatagttattttattctttacatccttcaccccacactatggtcagggcatgaaacaccctgttgatcccttcccaggctcggcactgtctgctcactggagccggactcccaggttgtaattctaatgttgcctcatgagaacagaatggcagaaagtttagtcctgacagattcccccatagggagtaatgaggacagcatgaaacttggataggttttacccttagtccctataaggtggattttactaaggttttttaaatgatactgtcatcctcttggggtttatcagccaggttagaggagcccagtgtcctaacctctctcagatcatggcagagaaggagctgcctccagcccctttcttgctgagtttcatttgagcagttccatgtgtagacattccaagtcactgcttggtagttgctgtgggagcctgtcattggctatggccagttagttctcagctgagcttcctagggccagtgcaacagggccagaggctgctatagtgtaaattgaaataagaatagatcattgttttgtacacacacacaataaaatgtaatgatggtgctaatttcacggtataaataagcactgccaagggttgagggactggcagctcaagaaacccgggttcctgtttgggaggagattttatgtagaaaagtttgaggctttgttaaaagtggggagaaggaagatcctcagtgaagcctgcacccaaccctggagtggcccagtgcaatccagaggtggaagagatcctatatccaggtgaaggtggccattgagtttctcagggctggggccaccttgtccatagcctccgtccacgctgcctggagcaggttgttagagagctctggttgttgggtcttcctcagctcccttctgcccctctctacctcttccactcatggaagcccctctactgcttatgaagattaagggtagtattttctaaggaagtggaaagaattaaactagaaatccacaacctcggaagaagtgtttcgagtttaacatgcgctgtttctgcttatgtggttccttctctagagctgctttcccatggctttcaaaacatcaggttattgtggggcttcaggtgtaaggtcctggaagttcagcaaagtttcgtggacaagacatgggcacagagagtagaagcagaaataaatggttctatgttttcaacttccagggttggggcaggccagagcaaggcggtctcatcgaggtgggtgctacctgtgtgtgtgtagatgagtgtgctgaaggtggggagggcagcacacagcagctcatggcagagccgcctcctaggtcttggcaaagaggcaagctgacgatagacatctacctatattgttaagaaaggggtcggggggatcagccaaggtccatcattgcttttttgccgcgcccccccccccccgcccccatagattgtcagctgtaagtgaaactcctagtgaaaaagaggggagccctgtgttaggagtccccataaacatgtactgtaattctttgtatatagaaaaaaaatttactgtaaagtaaagtttaactttactc

SEQ ID NO: 329088 - DNA, 7781 bp, Artificial Sequence
  derived and/or modified sequence
atggatcagacatgcgaactgccgagacggaactgcctcctcccatttagtaacccagtaaatctcgatgccccagaggataaggactcccccttcggcaacggccagtcaaacttctctgagccactgaacggatgtacgatgcaactctcaactgtgtccggtacatcacaaaacgcctatggtcaagactccccctcttgctacatccctctgaggcgcctgcaagacctggccagcatgatcaatgtcgaatacctaaatggcagtgccgatggatccgaatcctttcaggacccagaaaaaagtgattctcgcgctcagacccccatagtctgcacctcattgtcaccaggcggtccgaccgccctcgccatgaagcaggaaccaagctgtaataattctcccgagctgcaagtcaaggttacgaagaccatcaagaatgggttcctccatttcgagaattttacctgcgtcgatgacgctgacgtggattccgaaatggatcccgaacaaccagtaacagaggatgaaagtatcgaggaaatctttgaggagacacaaaccaacgccacatgcaattatgagaccaaatccgagaacggagtcaaggtcgctatgggaagcgaacaagacagcacccccgaatcacggcacggggctgtcaaatccccattcttacctctggcaccccagacagaaactcagaagaataagcaacgtaacgaggtcgatggtagcaacgagaaggctgcactgctgcctgccccattctctctcggggacaccaacattacgatagaagaacagctgaacagcattaatttgtcttttcaggatgaccctgacagttcgacatccaccctgggaaacatgctggagctgccaggaaccagctcaagctcaaccagtcaggaactgccatttgttccacagaagatccttagcaagtgggaagcatctgttggactggccgagcaatatgacgtccccaaggggagcaaaaatagaaagtgtattcctggatcaataaaactggacagcgaggaagacatgcccttcgaggattgtactaatgacccagagtccgagcacgatctcctgcttaatggatgcctgaagtctctcgcatttgactccgaacactcagccgatgagaaggagaaaccctgtgccaagagccgcgcacgaaaaagctccgataatccaaagcgaacctccgtgaaaaagggacacattcagttcgaggcccacaaagatgagagacgcggtaagattccagaaaatctgggcctgaattttatcagcggagatattagtgacacgcaggctagtaatgagttgtccagaatcgctaacagcttaaccggcagcaacacagcaccaggctctttcttgtttagtagttgtggaaaaaacaccgccaaaaaagaatttgagacatctaacggggatagcttgctgggtctcccagagggtgctctgatcagcaagtgctctagggaaaaaaacaaacctcaacgatcattggtgtgcggcagcaaagtgaaactctgctacatcggagccggtgacgaggagaaaaggtctgactctatctctatctgtactacctcggatgatggatcctcagacttagaccccattgaacattcctcagagtctgataatagcgttttagagatcccagatgccttcgatagaactgagaacatgctgtccatgcagaaaaatgagaagataaagtatagccgatttgcagctacaaacactcgcgtgaaagcaaaacagaagccactcatctccaatagccatacagatcacttgatgggctgcacaaaatccgccgagcctggcacagaaacctctcaggtgaatctgtcagatctcaaagcaagcactctggtgcataagccacaatcagattttacgaatgacgcgctgtccccaaaattcaatttgtcgtcatcaatttcatctgagaactcattgatcaaggggggtgcagctaaccaggcgctgctgcattccaagagcaaacaacctaagttccgcagtataaaatgtaaacacaaggaaaatcccgtcatggccgagcctccggtcatcaacgaagaatgttcgttaaagtgttgttcttccgatacaaagggatctccgctggctagtatcagcaagtctggaaaggtcgacggcctgaagctcctgaataatatgcacgaaaagacaagggactcgagcgatatcgaaaccgctgtcgttaaacatgtgctgtccgaactgaaagagcttagctacagaagccttggcgaggatgtgagcgacagcggcacatccaagccctccaagccattgctcttctccagcgccagcagccagaatcatatccccatagagccagactataagtttagtactctgttgatgatgctcaaagatatgcacgacagcaagactaaagaacaacggctcatgaccgcacagaacctggtgtcatatcgatctcccggacgcggagactgctcaaccaattctcccgttggagtttcaaaggtattggtgagtggaggatctacgcacaacagcgagaagaagggggatggcacccaaaattccgctaacccatcgccatccgggggagatagcgctctgtctggtgagctctccgcaagcctccctgggttgttgagcgacaagagagatctgcccgcatcaggaaaatctcgctccgactgcgtcaccaggaggaactgtggcagatctaagccgagctctaaactgcgcgatgctttttctgctcagatggtgaaaaacacagtaaacagaaaggctctcaaaacagaacgtaaacgcaaactgaaccagttaccatctgttacacttgacgcggtcttgcagggcgatagagagcgcggtggttccttacgagggggagctgaggatccttccaaggaagaccccctgcagatcatggggcatcttacatccgaagatggggatcacttctctgacgtgcattttgacagcaaagtaaagcagtcagatccaggaaaaatctccgaaaaaggtctctcgtttgaaaatggtaagggtccagaactcgactcagtgatgaatagcgaaaatgatgaacttaacggagtgaatcaggtggtccccaaaaaaagatggcagaggttaaatcaacgtagaaccaaacccaggaagcggatgaaccgtttcaaggagaaggaaaactctgagtgtgcgtttagggtgttgctccccagcgaccccgtgcaagagggacgggacgagttccctgaacaccgcaccccctccgcctctatactggaagagcccctgactgagcagaatcatgcagactgccttgacagcgccggtcctaggcttaacgtgtgtgacaaaagctcggcatcaatcggtgacatggaaaaagaacctggcattcctagcttgaccccccaggccgagctgcctgagccagctgtgaggtctgaaaaaaagaggctgcgtaaaccgtcgaagtggctcttggagtacaccgaagagtacgaccagatcttcgcacccaaaaagaaacaaaagaaggtgcaggaacaggtacacaaggtgagctcaaggtgcgaggaagagagcctcctagccagaggacgttcgagtgcccagaacaaacaggtggatgaaaactcattaatcagcacgaaggaggagccaccagtgctggaacgtgaggcccctttcctcgaaggcccactggctcagtcagagttaggcggaggacacgcagagctcccacagctaacattatccgttcctgtagctccggaggtgtcaccccgaccagcgttagaatccgaagagcttttggttaagacacctggcaactatgagtccaagcggcaaagaaagcccactaaaaaactacttgaatcaaatgatctggacccaggattcatgcctaaaaagggggacctggggttatctaaaaagtgttatgaggccggtcacttggaaaacggcataactgaatcttgcgccaccagttactcaaaagattttggcggaggcaccaccaagattttcgacaaaccccgtaaaagaaaaagacagcgacacgctgccgcaaaaatgcaatgtaaaaaggtcaagaatgatgactcaagtaaggaaatcccaggatctgagggcgagttaatgcctcaccggaccgctaccagccctaaagaaaccgttgaggaaggggttgaacacgatccaggaatgcccgcatctaaaaagatgcagggagaaagaggaggaggggctgcactgaaagagaacgtctgtcagaactgcgaaaagctgggggagcttctgctctgcgaggcccagtgctgcggggcattccatttggaatgtctcgggctgactgagatgccacggggaaagtttatctgtaatgagtgtcgtacagggatccatacatgcttcgtttgcaagcaatccggagaggacgtcaaacgctgcctactacccctgtgcggtaaattctaccatgaggagtgcgtgcaaaagtacccccctacagtgatgcaaaacaaaggctttcgctgcagcctccatatttgcattacctgccatgcagccaacccggctaatgtgagcgctagcaaaggtagactcatgcgttgcgtcagatgcccggtggcttatcatgccaatgacttctgcctggccgctgggtctaagatcctcgccagcaatagcatcatctgccctaaccactttacacccagaagaggctgtagaaaccatgagcatgtgaatgtgagctggtgtttcgtttgctctgaaggcggtagtcttctttgctgtgactcgtgtccagccgctttccacagagagtgccttaatattgacattccggagggcaattggtactgcaacgattgcaaggccggaaagaagccccactatagggagatcgtctgggtcaaggtgggaaggtatagatggtggccggcagaaatctgtcatcctcgcgctgtcccaagcaatatcgataaaatgcggcatgacgtgggggaattcccagtgctctttttcggatcaaacgactacctgtggacacatcaggcccgagtttttccatacatggaaggcgatgtgagtagtaaggataaaatgggcaaaggcgtggacgggacttacaagaaggccctgcaggaagcggcagcacggtttgaggaattaaaggctcaaaaggaactcaggcagctgcaggaagatcgcaagaatgacaagaaacccccaccatacaaacatatcaaagtaaacagaccaatcggccgtgttcaaattttcacagcggatctgtccgagatacctcggtgtaactgtaaggctactgacgaaaacccctgcggaatcgatagcgagtgcataaaccggatgctgctgtacgagtgccacccaaccgtgtgccctgctggaggtcggtgccaaaatcaatgtttttctaagcgacaataccctgaggttgagatctttcggactctgcaacggggttggggcctgcgcactaagaccgatatcaaaaaaggagagttcgtgaacgagtatgtgggcgaactgatcgatgaagaggagtgtagagctagaatccgctacgcacaagagcacgatatcaccaacttttatatgctgacgttagacaaagaccgcataatcgacgcaggccctaagggaaactatgctagattcatgaaccattgttgccagcccaactgcgagacccagaagtggtcagtcaatggggacacccgggttgggctctttgcattgagtgatattaaggccggaaccgagctgacttttaattacaatctcgagtgtcttggaaacgggaagaccgtctgtaagtgcggagcgccaaactgcagtggctttttgggtgtcagacccaagaaccagcccatcgcgaccgaggagaaaagtaaaaaattcaagaagaagcagcagggcaaacgacggacacagggagaaatcacaaaggagagagaggatgagtgcttctcatgcggcgacgcagggcagctggttagttgtaagaaacccggatgtccaaaggtgtatcatgccgattgtctgaacctcacaaaaagacccgcaggcaaatgggaatgcccctggcaccaatgcgatatatgtggtaaggaggcagccagtttttgtgaaatgtgtcccagcagtttctgcaagcagcatcgggagggaatgttgttcataagtaaactcgatggacggcttagctgtactgagcacgacccctgtggccctaatcctttggagcccggagaaatccgggagtatgtcccaccaccggtcccacttcctcctggaccaagtacccacctggccgagcagtctaccggaatggcggctcaagcccctaagatgagcgacaaacctcccgctgatacaaaccaaatgttatccctgagcaagaaagctctagccggaacctgccagagaccactgctccccgagaggccacttgaaagaacagactcaaggccgcagcccctagataaagtcagggacctggctggatcgggcacaaagtctcagtccctggtcagcagtcagcggcctctggaccggcctccagccgttgccggaccgaggccccaacttagtgataagccatcacccgttacctcaccgtcaagtagcccttctgtccgctcccagccactggagcgtcccctgggcaccgccgaccctcgactcgataagtctatcggggctgcttctccgagacctcagagcctggagaaaacatccgttcccactgggctgcgtctgccaccacctgacagattactcataacatccagcccaaagccccagacaagtgaccgcccaacggataagccgcacgcatccctgagccagagactccccccaccagagaaggttctgtcggctgtcgtgcagactctcgtcgcaaaggagaaggcactgcgcccagttgaccagaacacccaaagtaaaaatagggccgctcttgtgatggatctgatagacctgacccctagacagaaagagcgcgctgctagtcctcaccaggtgactccacaggcagacgagaaaatgcctgtcttggagtccagcagttggccagcttcaaaaggactaggtcacatgcccagagcggtggaaaaaggctgcgtgagcgaccccctccagacttcagggaaagccgctgcgcctagcgaagatccatggcaggctgtcaaaagcctgacccaagctaggcttctgagccagccccctgctaaggccttcctgtatgagccaactacgcaggcctcggggcgtgcaagcgcaggcgctgagcaaacacccggtccgctctcacaaagcccaggcttggttaaacaagcaaaacagatggtgggaggccagcagttacccgctctcgccgcaaaatccgggcagagtttccgaagtctaggcaaggctcctgcatcattgccaacagaggagaaaaagctcgtaacaaccgagcaaagcccgtgggcgctggggaaagcatcatcccgggcaggcctgtggccaatcgtggccggtcaaaccctggctcaatcatgttggtcagcaggatccacccagacccttgctcagacatgctggtccctcgggagaggccaggacccaaagcctgagcagaacactctccccgctctgaatcaggctccttcctcacataagtgtgccgagtccgaacagaagta

SEQ ID NO: 329089 - DNA, 7782 bp, Artificial Sequence
  derived and/or modified sequence
atggaccagacctgcgagctgcccagaagaaactgcctgctgcccttcagcaaccccgtgaacctggacgcccccgaggacaaggacagccccttcggcaacggccagagcaacttcagcgagcccctgaacggctgcaccatgcagctgagcaccgtgagcggcaccagccagaacgcctacggccaggacagccccagctgctacatccccctgagaagactgcaggacctggccagcatgatcaacgtggagtacctgaacggcagcgccgacggcagcgagagcttccaggaccccgagaagagcgacagcagagcccagacccccatcgtgtgcaccagcctgagccccggcggccccaccgccctggccatgaagcaggagcccagctgcaacaacagccccgagctgcaggtgaaggtgaccaagaccatcaagaacggcttcctgcacttcgagaacttcacctgcgtggacgacgccgacgtggacagcgagatggaccccgagcagcccgtgaccgaggacgagagcatcgaggagatcttcgaggagacccagaccaacgccacctgcaactacgagaccaagagcgagaacggcgtgaaggtggccatgggcagcgagcaggacagcacccccgagagcagacacggcgccgtgaagagccccttcctgcccctggccccccagaccgagacccagaagaacaagcagagaaacgaggtggacggcagcaacgagaaggccgccctgctgcccgcccccttcagcctgggcgacaccaacatcaccatcgaggagcagctgaacagcatcaacctgagcttccaggacgaccccgacagcagcaccagcaccctgggcaacatgctggagctgcccggcaccagcagcagcagcaccagccaggagctgcccttcgtgccccagaagatcctgagcaagtgggaggccagcgtgggcctggccgagcagtacgacgtgcccaagggcagcaagaacagaaagtgcatccccggcagcatcaagctggacagcgaggaggacatgcccttcgaggactgcaccaacgaccccgagagcgagcacgacctgctgctgaacggctgcctgaagagcctggccttcgacagcgagcacagcgccgacgagaaggagaagccctgcgccaagagcagagccagaaagagcagcgacaaccccaagagaaccagcgtgaagaagggccacatccagttcgaggcccacaaggacgagagaagaggcaagatccccgagaacctgggcctgaacttcatcagcggcgacatcagcgacacccaggccagcaacgagctgagcagaatcgccaacagcctgaccggcagcaacaccgcccccggcagcttcctgttcagcagctgcggcaagaacaccgccaagaaggagttcgagaccagcaacggcgacagcctgctgggcctgcccgagggcgccctgatcagcaagtgcagcagagagaagaacaagccccagagaagcctggtgtgcggcagcaaggtgaagctgtgctacatcggcgccggcgacgaggagaagagaagcgacagcatcagcatctgcaccaccagcgacgacggcagcagcgacctggaccccatcgagcacagcagcgagagcgacaacagcgtgctggagatccccgacgccttcgacagaaccgagaacatgctgagcatgcagaagaacgagaagatcaagtacagcagattcgccgccaccaacaccagagtgaaggccaagcagaagcccctgatcagcaacagccacaccgaccacctgatgggctgcaccaagagcgccgagcccggcaccgagaccagccaggtgaacctgagcgacctgaaggccagcaccctggtgcacaagccccagagcgacttcaccaacgacgccctgagccccaagttcaacctgagcagcagcatcagcagcgagaacagcctgatcaagggcggcgccgccaaccaggccctgctgcacagcaagagcaagcagcccaagttcagaagcatcaagtgcaagcacaaggagaaccccgtgatggccgagccccccgtgatcaacgaggagtgcagcctgaagtgctgcagcagcgacaccaagggcagccccctggccagcatcagcaagagcggcaaggtggacggcctgaagctgctgaacaacatgcacgagaagaccagagacagcagcgacatcgagaccgccgtggtgaagcacgtgctgagcgagctgaaggagctgagctacagaagcctgggcgaggacgtgagcgacagcggcaccagcaagcccagcaagcccctgctgttcagcagcgccagcagccagaaccacatccccatcgagcccgactacaagttcagcaccctgctgatgatgctgaaggacatgcacgacagcaagaccaaggagcagagactgatgaccgcccagaacctggtgagctacagaagccccggcagaggcgactgcagcaccaacagccccgtgggcgtgagcaaggtgctggtgagcggcggcagcacccacaacagcgagaagaagggcgacggcacccagaacagcgccaaccccagccccagcggcggcgacagcgccctgagcggcgagctgagcgccagcctgcccggcctgctgagcgacaagagagacctgcccgccagcggcaagagcagaagcgactgcgtgaccagaagaaactgcggcagaagcaagcccagcagcaagctgagagacgccttcagcgcccagatggtgaagaacaccgtgaacagaaaggccctgaagaccgagagaaagagaaagctgaaccagctgcccagcgtgaccctggacgccgtgctgcagggcgacagagagagaggcggcagcctgagaggcggcgccgaggaccccagcaaggaggaccccctgcagatcatgggccacctgaccagcgaggacggcgaccacttcagcgacgtgcacttcgacagcaaggtgaagcagagcgaccccggcaagatcagcgagaagggcctgagcttcgagaacggcaagggccccgagctggacagcgtgatgaacagcgagaacgacgagctgaacggcgtgaaccaggtggtgcccaagaagagatggcagagactgaaccagagaagaaccaagcccagaaagagaatgaacagattcaaggagaaggagaacagcgagtgcgccttcagagtgctgctgcccagcgaccccgtgcaggagggcagagacgagttccccgagcacagaacccccagcgccagcatcctggaggagcccctgaccgagcagaaccacgccgactgcctggacagcgccggccccagactgaacgtgtgcgacaagagcagcgccagcatcggcgacatggagaaggagcccggcatccccagcctgaccccccaggccgagctgcccgagcccgccgtgagaagcgagaagaagagactgagaaagcccagcaagtggctgctggagtacaccgaggagtacgaccagatcttcgcccccaagaagaagcagaagaaggtgcaggagcaggtgcacaaggtgagcagcagatgcgaggaggagagcctgctggccagaggcagaagcagcgcccagaacaagcaggtggacgagaacagcctgatcagcaccaaggaggagccccccgtgctggagagagaggcccccttcctggagggccccctggcccagagcgagctgggcggcggccacgccgagctgccccagctgaccctgagcgtgcccgtggcccccgaggtgagccccagacccgccctggagagcgaggagctgctggtgaagacccccggcaactacgagagcaagagacagagaaagcccaccaagaagctgctggagagcaacgacctggaccccggcttcatgcccaagaagggcgacctgggcctgagcaagaagtgctacgaggccggccacctggagaacggcatcaccgagagctgcgccaccagctacagcaaggacttcggcggcggcaccaccaagatcttcgacaagcccagaaagagaaagagacagagacacgccgccgccaagatgcagtgcaagaaggtgaagaacgacgacagcagcaaggagatccccggcagcgagggcgagctgatgccccacagaaccgccaccagccccaaggagaccgtggaggagggcgtggagcacgaccccggcatgcccgccagcaagaagatgcagggcgagagaggcggcggcgccgccctgaaggagaacgtgtgccagaactgcgagaagctgggcgagctgctgctgtgcgaggcccagtgctgcggcgccttccacctggagtgcctgggcctgaccgagatgcccagaggcaagttcatctgcaacgagtgcagaaccggcatccacacctgcttcgtgtgcaagcagagcggcgaggacgtgaagagatgcctgctgcccctgtgcggcaagttctaccacgaggagtgcgtgcagaagtacccccccaccgtgatgcagaacaagggcttcagatgcagcctgcacatctgcatcacctgccacgccgccaaccccgccaacgtgagcgccagcaagggcagactgatgagatgcgtgagatgccccgtggcctaccacgccaacgacttctgcctggccgccggcagcaagatcctggccagcaacagcatcatctgccccaaccacttcacccccagaagaggctgcagaaaccacgagcacgtgaacgtgagctggtgcttcgtgtgcagcgagggcggcagcctgctgtgctgcgacagctgccccgccgccttccacagagagtgcctgaacatcgacatccccgagggcaactggtactgcaacgactgcaaggccggcaagaagccccactacagagagatcgtgtgggtgaaggtgggcagatacagatggtggcccgccgagatctgccaccccagagccgtgcccagcaacatcgacaagatgagacacgacgtgggcgagttccccgtgctgttcttcggcagcaacgactacctgtggacccaccaggccagagtgttcccctacatggagggcgacgtgagcagcaaggacaagatgggcaagggcgtggacggcacctacaagaaggccctgcaggaggccgccgccagattcgaggagctgaaggcccagaaggagctgagacagctgcaggaggacagaaagaacgacaagaagccccccccctacaagcacatcaaggtgaacagacccatcggcagagtgcagatcttcaccgccgacctgagcgagatccccagatgcaactgcaaggccaccgacgagaacccctgcggcatcgacagcgagtgcatcaacagaatgctgctgtacgagtgccaccccaccgtgtgccccgccggcggcagatgccagaaccagtgcttcagcaagagacagtaccccgaggtggagatcttcagaaccctgcagagaggctggggcctgagaaccaagaccgacatcaagaagggcgagttcgtgaacgagtacgtgggcgagctgatcgacgaggaggagtgcagagccagaatcagatacgcccaggagcacgacatcaccaacttctacatgctgaccctggacaaggacagaatcatcgacgccggccccaagggcaactacgccagattcatgaaccactgctgccagcccaactgcgagacccagaagtggagcgtgaacggcgacaccagagtgggcctgttcgccctgagcgacatcaaggccggcaccgagctgaccttcaactacaacctggagtgcctgggcaacggcaagaccgtgtgcaagtgcggcgcccccaactgcagcggcttcctgggcgtgagacccaagaaccagcccatcgccaccgaggagaagagcaagaagttcaagaagaagcagcagggcaagagaagaacccagggcgagatcaccaaggagagagaggacgagtgcttcagctgcggcgacgccggccagctggtgagctgcaagaagcccggctgccccaaggtgtaccacgccgactgcctgaacctgaccaagagacccgccggcaagtgggagtgcccctggcaccagtgcgacatctgcggcaaggaggccgccagcttctgcgagatgtgccccagcagcttctgcaagcagcacagagagggcatgctgttcatcagcaagctggacggcagactgagctgcaccgagcacgacccctgcggccccaaccccctggagcccggcgagatcagagagtacgtgcccccccccgtgcccctgccccccggccccagcacccacctggccgagcagagcaccggcatggccgcccaggcccccaagatgagcgacaagccccccgccgacaccaaccagatgctgagcctgagcaagaaggccctggccggcacctgccagagacccctgctgcccgagagacccctggagagaaccgacagcagaccccagcccctggacaaggtgagagacctggccggcagcggcaccaagagccagagcctggtgagcagccagagacccctggacagaccccccgccgtggccggccccagaccccagctgagcgacaagcccagccccgtgaccagccccagcagcagccccagcgtgagaagccagcccctggagagacccctgggcaccgccgaccccagactggacaagagcatcggcgccgccagccccagaccccagagcctggagaagaccagcgtgcccaccggcctgagactgcccccccccgacagactgctgatcaccagcagccccaagccccagaccagcgacagacccaccgacaagccccacgccagcctgagccagagactgcccccccccgagaaggtgctgagcgccgtggtgcagaccctggtggccaaggagaaggccctgagacccgtggaccagaacacccagagcaagaacagagccgccctggtgatggacctgatcgacctgacccccagacagaaggagagagccgccagcccccaccaggtgaccccccaggccgacgagaagatgcccgtgctggagagcagcagctggcccgccagcaagggcctgggccacatgcccagagccgtggagaagggctgcgtgagcgaccccctgcagaccagcggcaaggccgccgcccccagcgaggacccctggcaggccgtgaagagcctgacccaggccagactgctgagccagccccccgccaaggccttcctgtacgagcccaccacccaggccagcggcagagccagcgccggcgccgagcagacccccggccccctgagccagagccccggcctggtgaagcaggccaagcagatggtgggcggccagcagctgcccgccctggccgccaagagcggccagagcttcagaagcctgggcaaggcccccgccagcctgcccaccgaggagaagaagctggtgaccaccgagcagagcccctgggccctgggcaaggccagcagcagagccggcctgtggcccatcgtggccggccagaccctggcccagagctgctggagcgccggcagcacccagaccctggcccagacctgctggagcctgggcagaggccaggaccccaagcccgagcagaacaccctgcccgccctgaaccaggcccccagcagccacaagtgcgccgagagcgagcagaagtag

SEQ ID NO: 329090 - protein, 289 aa, Artificial Sequence
  derived and/or modified sequence
MPQEQYTHHRSTMPGSVGPQVYKVGIYGWRKRCLYFFVLLLMILILVNLAMTIWILKVMNFTIDGMGNLRITEKGLKLEGDSEFLQPLYAKEIQSRPGNALYFKSARNVTVNILNDQTKVLTQLITGPKAVEAYGKKFEVKTVSGKLLFSADNNEVVVGAERLRVLGAEGTVFPKSIETPNVRADPFKELRLESPTRSLVMEAPKGVEINAEAGNMEATCRTELRLESKDGEIKLDAAKIRLPRLPHGSYTPTGTRQKVFEICVCANGRLFLSQAGAGSTCQINTSVCL

SEQ ID NO: 329091 - DNA, 9759 bp, Artificial Sequence
  derived and/or modified sequence
agagaggacttatctccagcatctagcactacagagcagaggctgtgtggagaatggctgaaaaatcagaattggttgtagaagcagttttctttctggttgtgagtatgagcccggcagacaccatgagcgctgttgcaggggagtcggcctgtgcttgacacatgtgtttcccattgatagctggagacagcccagtagctgtgagtcggtctgacaaagccatattgaagtacggagtacggtttcaaagcagtcagaaaaagaacgggaatgctgttcaggaaattcttcaggcatgggcagggacttggctgcagttctgcagttggaaaatctgactggggcagcttctgagcgcaggctgggcctgcacacactcagcgggccgagtggccacctccttcagagctgctcagcacgccctgggatcgcgggcggttttcatcggccggtttgtgaaacggacaagagagatgcctcaggagcagtacactcaccaccggagcaccatgcctggctctgtggggccacaggtatacaaggtggggatttatggctggcggaaacgatgcctgtatttctttgtcctgctcctcatgattttaatactggtgaacttggccatgaccatctggattctcaaagtcatgaacttcacaattgatggaatgggaaacctgaggatcacagaaaaaggtctaaagctagaaggagactctgaattcttacaacctctctacgccaaagaaatccagtcccgaccaggtaatgccctgtacttcaagtctgccagaaatgttacagtgaacattctcaatgaccagactaaagtgctaactcagcttataacaggtccaaaagccgtagaagcttatggtaaaaaatttgaggtaaaaactgtttctggaaaattgctcttctctgcagacaataatgaagtggtagtaggagctgaaagattacgagttttaggagcggagggcacagtgttccctaaatctatagaaacacctaatgtcagggcagaccccttcaaagaactaaggttggagtccccaacccggtctctagtgatggaggccccaaaaggagtggaaatcaatgcagaagctggcaatatggaagccacctgcaggacagagctgagactggaatccaaagatggagagattaagttagatgctgcgaaaatcaggctacctagactgcctcatggatcctacacgcctacaggaacgaggcagaaggtcttcgagatctgcgtctgcgccaatgggagattattcctgtctcaggcaggagctgggtccacttgtcagataaacacaagtgtctgcctctgaaagactatccatagtggacattgttggcagcataaaggccttttttggctttagacactggctgccagctatttttactagaacacagaaagcctatcaaagaccttgtgtgtatgtgtacgtgtgtgtgcgtgcttgagtgtgttcgcgtgtgtgggtggatataaatatatataaatatatataaataaatatatatatcctctgtataaaatgaggtttcagtacaaaaggaaccatgggtgaccctgcgatatccactgtcattttccatcccatccccaccacctgagtgacagaaatctaaacacacatccgtcccaacattccccagaccattcagaatcacacagcgtattaaacactgacagaatcttcatctagatattcgagtagcagcatatcttctcttttagtgtcattacgagggagtgatggcgggaatctcagtcgcactcaagctctgagacctttgtatcaaaaataggcatttgatttcctgttttagctttagtaaggctggctaacttccccctcttcaagctaggaactggcaatgctgtagaagtcagccgtaggaattcaaaatggctggcctaccttggctaccagacatattggggtttttgtagttgaatgaatgaggaggatgaatttcagcaaattttgaactgctcacccaacttctgctatcttgctccctccaaactcacagattctcctacagtcaaattaggagctgtaaatcagcacaaaataagataacagctgttcctcagtgagctggaagctacttaatggcctgatgggcaatgaacaaacgggtgatatgtctctgtttaagggaaaaatggcttaaaagctgttctgttctcacttctgactttaaccaaaagatttcaacccacaatgatcaggtcaatcaaaatccctaagagcagaactcctaccccaaaagaagcctggaagtctaattaagagtagcataaggaacctaattatgtttaccatgtttcttgggattggtgggaaatgtcaaaacatgccctttatttttaaaggcattcacaaactctctgactttgttcttcttatatattttttcagtgccgggatattcatattcctaaagccactattgtgttttctctaagaagcactacatgccaccagaattgtgcactgaaagataatacaaactgagtgtctttatgagaatcactgtgtcccctgaggcccagcagtacctgcttccctgtatgtggaagcagcacctcattcccgccatcagctacctctcatcaccccaccttcatcatcatgctccagggtcaccctggccagctcttgtgctgggacaggggattacaccatctctgttcaaagagggggaaatgtgcctatgccttaagtcaatgcactcagcaaggagaagcacatcttatttatcttgttacctatagtttactttgggtgattggaggggaatgacttagttatgactggacatcttaaaagctgatagacaagccaaatggctggcagatgatgtggatttcaaagagcccagaatgaactcatcactggcttagacagtcctggatgccatttggaaagtagtggccctgcaagcctaaatgaagtagtatttgtaggcctgggtggcatttggatttttcttttccctcaacaaggttttactttttcttactttacaagcaagggaagttttgtgataggagagaaataaaagatttgatattttttgagatgacactcaagcatcaggctgagatttgcacacatgggatgtaaaagcaagctgtgtgttgcttagtcacttacttagaagtagatggtgggggacagcggcgtgggtcctagcctggccagtgatgctgctggcgtccagaccccagactcactccaagcactcttgttcaatatctcatgcagaagagttgggctggtcactcttaggggtgagaccccgtgattggttggtttgtagcactaaggtctaaaaaggaaaaccataaaagacatcagattacgctggatcagtataattaatattccatagggccatgttgccagaatctgtatgtatcaatacagggtttttccaagccaggaaacgccctccttggctactaggagcacctatcccatatcattcagataaacaatgatagctacaaagtcatttgtggctagataggttaagacaggtgattttttaaagtagactgtctttgcattttgccatctgaagttcattaatctttagatgacaaaaaagcaaaaagttcccagaacgtttttgcttagattttgttctaatcaccacgtgaaggaatgagattagcaccacaagtttcatgccaataaaagagactggtgtgatcccacatgcaaaatttaatcctaagggtagtgagatcacaaacagaataaaaataagagcaatcaaccatataaatcaagtacctattgggaacagacataacattcaatttttcatttatgctaagtgaccacagtatacaaagtaataagcaggaaatttgatatgggttaaattatgcattttgttcagattttggaaattggtatgcattataagtttctcaatgtacatctttttatcccaacaccctcaaactagaatatttgtcagtggtcaagagaaaaaattttacctgaattcttgggggccggcggggagcttttacattaaaaatctactaacgcctactttttaaaaaatgagattctttctaatctttatatatgacattttctagacaatcgcacctttgggtatattaaacagctggtatcataacaaagaatccaaatgaaccttcaatatactagaagttctagtaggttaatattgttcagaagatttttacaaattaaaaactgatttccaaatatgttcaacatttacttctatttgatatctgctcaagaagtcatagaagtcttgggaaactattcgagtatcacagaggttttcaaaagcccttatggtgacatctacctaggtaaaagcctgacatgtggctttataattgttatgttacccaagggataaacttgaactggctttgaacatcctttaggtcattttctctttggataattttcatcgcatatccagcaactatagaccaaagtttgcttaaggtttgaccctagagcagaggtgggcaaactatgacctggaaaccaaatctgacttaccaccttttcctgtagttaaagttttattgtcacatagccacatacattcatttacatgttttctgattttacactacagcagcaggatggagtagttgtgtcagagactatgtatcccacaaagcatagattacttactatttagtcctttacaggcaaagtttcctcacccctgacctagaggtttttgtggtatgcattggatatagcaggaaagaaagcacatttccaaacagcagggagtaagcttacatttctgtgtaggtttgggaatatagttacttggcaaagtctttcaggaaggaagcccttccttatgttacatgtggaaagcctgccttccaagacatgtggaagtaattgatccacctgccagagaaacacaggctcagaggatgcctgggaacagggaggatgggattagtggaagcttaatggaaaaggaaagttatgatcctccaagacccttaattgatagaccataccaggttctgcaggtcagcatcattgtgtaatgagagtgaagtaggggaccctgtggttcaaccttagaatctgtttcctgtaggctctttctgctgtctatattcattaaagttttccacttcaccctcccatagtctagagggatgcccattccatggtcctccagagaatagttttgacttaacatgtctgtttagcccacatcacgtcagttatcaacaccgccactgtgcttactgttcctacagccacaccaggcttgaagagttagtgagaccaacaaataattggaagtattggaaaaagcaaaatacatggggacaaaaaaaatacagtgaaattctttttatcaaactgatgctgtgagaaaccagatgaatgccagtttggctttatttctaagaatctgggtcttcattctctggtgtagaaggaatgcaaaaaactataacaacaacaacaaaaacatattttgaaaagacatattctgacatctctgcttgtgtgtggtaaggcaggttcctatcagacatttatccctttggtcaagatcccttttgctcatccagggtttcatactcaatatcgcttaaaaaaaaaaaagtatcagctagggatgactctggaagtatgagtatcatggtggggaggaaggaattttttttaaatgtaaatgacccccatttaccagaccctaatcaaagtcacttaagggaatccctcagccttttatttggaaacagttgaaataaactggcagcagctagatcagagtatcttgctttattttataaaggccaaaggtagtatgaagtttggaccaaaaaggtaaatagatccattccagcacctgatactgatttttcaaggctctatgaaaggtcaaaaatttcattaaacaagaccagttctccctcttccccctgtcccaagaaatcttaggcatgaaaaggataaggaaacagctcctggaatgatacatttgcatagtgccctagtagcaggttgggaaaaagttataatataagaaacaaccttcgaaaacaggccttttatctcaaagataaaatgtctttcttgtggtctttcatcactatctccgtggtggaaggttcccctagttccaacatatttccattaaaatagtcaaagccacggcattgggatgtcagatgcctctctttctttgtggtaatcggaatttaaaattatacagttgcctctgaatttctcatgcacaaagccaaaccactgataagagataaagcagtctgaagcctgctgcttcagccagcacagcacaccacacacgctcgcactttcaaaagcaatgtgatttctatggttcttaaaagctttcttcataagggagtccctgaaatttctcaaggcaggtttgaatggcaaagggaaaataattacttgtgggaggtcctccttttgagtattgttagagcatacatgtaaaagaaaataacctttttggggcaactcatgctcacacatgctgttttctttggttctccccctaccttccttttgtagatattgacagaataggaggaaatgagcatccttatttgagaaagagcaagaatgtcatgagcccttgatgcaatagtaagtgtgatgtcatcatacagtgttaatgatgctatcaaatccatcaataaacagtctcaaaccttccaacaacagtgctcactgctgctcctcaacttcagcccagcaagcagtaatatcatcacccattttgagatatgcaggtggaatagaacaaagaaacagccactgtaatcgagaagcatgtttactgtctaaatccacctgttgcagtaggaagccagagtggggttccaaatgcctcattaagtatgtggacagcctcactagtaagtgagtgaatttggcttcatcactgaacattagctaaggtcagcttaataacacaaatatgaggccgacttctttgcgagaagagaaaagaaaacatctgcttgatttaaaatccaccccacatgcctagagttgtctaatagtccctcactttccaatggcttcacatcctacttctacatttggggttttttggtgaaatcagagatagctcaggatttcataaaacgagaaactccaaactggtctattaggttccatgggaacacttgtagccaaaggattgtctgagggcaggaagacgacacttgtcaacaaggaagacagtgtttctttagttcccatattcatctaattcatggggttctaacattttggggggccatagattcttttgacaatctgagccaatctatgaaacttctccccaaaaagaaccaccccacaaaatcttgcaaaacgtaagagattttcctggatctgaagctacccgaagacatgggaagagttgtattctattattcaattttaagaatatttattaatattcactgagctattgctagccactgtgctaaacattttacatacattctcctatttcatcctcaaaacaatcctttgagttgggttttaatatagttccaatattcggatgtgaaaactgaggcttatagtggctaagaaacttgcccaaagccactacctagaaaatggcagagctggaatgtaggtttaactcctgaccactatgctataaagtcaccacatgtcaaactaattttcaagttgttgggacatgtcccctactaggttttaaactagatcttccttggtagatgaagctatagaacttctattttccctgctttctgtagtctctcacagtgacagcatctatactaaagtatagatacctaaggggaaaatatagaaagcctgcctgaataatagaatctagaacaacaacaaaaatattaattttttctgtgtatgcttaggtcaagcttaaaaaaaaaaaaaaaagaccggaaaatacctgggttgttagcctcacatttaggaaaaaattgtaatactcagttatctgtgtgtgtggctaaacaagtcagcatttctgcacacatacatctctttcctttatacttcccttcaaaagacaaatatcttacttttgatctttgacactatttggtcagtattcttctttacctttacttgtggcaaaactcaaggaagcgatcaaatagagggaagctcatttctatcattgtctctgtttccctataagaaagaactaccagggactcactgactgcattaggcatacaatgtcagagctgagctgaccactctggtcctgtaatgtctttggcctcacaccttggcagccatcattaatgggccatacccttccccaggtgcagaattctcctccccagagcactcaggccgttactaccaatttatctgagttggaaataagactcatttgccagttcttatttttaaagtggcaccctttaactttgaacctgtgtattttacactggcatcctagattcagcaatgaggtttggtggtgtttcaactaggaagggagaaaatgagtgcatctgaagttccttacagcttggtttctttggaatgctttcatcttctaagcaaagggatcagggtttgatctgtaagagttaaaaagacaaagtcattttgaagaattaactcagccagggatcatgcaaaaagattagaaaccataatgcccttgttaaagccctgctgtcaacctgccttcacccagagcttagagggccacagcagcaaagaggttggggtccatccctctctgatgtgctttttccacaacacatatctggtcctctggcaggattgtggatagagctcctcaccatacccaaaagactcagccccagtgccagtgctttcctggttcaacaacccaccacaaaaccttagtaaaaggatgagccaaaaatgaaaaagactcgactctacagtaagtcagtcagggatttcctttttaatggtttaagacatccaaatggcaagccaggaatagataccattaaagggtctcataggactaaccttaccagagccagaaatctagctctctggaagagatgcaagattctagaaaagtaaagggaagtgtcggcacatctaaatttagtgaacacaaaattaatttttatctagtctgtgacggagggaataaagtttttcatgtatcaaccacctcccccagtcaggtttctccctttttgagattatgaagaagctgagacatacttcttaaggaggtcgtgttttagaaggaaaaggcagaggctatccatcattatgctggctagatgcgcttctgaagaagccggattctgatgttcttaaccaaaatggtgaggtcatggaagtcccatttgcttggagattttgaaaaaaaaaaaaaaaaaaaacccattcccataaagtaattgagttcagcctttggattatttttggtttggtttttctctggttttgggtgtgatgtaagaagagctttttagttttgttttgaataacatcaatccttgcacactctatgcaaaaattttgtaagcatttcaataatgctatgaattacaaggaactattttaactttattacactttctgtataaaaaatttgtatttaatattatttcgaccacagtcttgtaaaatatattaataaaaataatgattggtaagaaggaaaaaaaaaaaaaaaaaa

SEQ ID NO: 329092 - DNA, 870 bp, Artificial Sequence
  derived and/or modified sequence
atgccacaggaacagtacacgcaccaccggtctacgatgcccggaagtgtaggcccccaggtgtacaaggtgggaatttatgggtggcggaagaggtgtctctactttttcgtgctcttgctcatgattctgatactcgtgaacctagccatgaccatctggatcctcaaagtaatgaactttaccatagacgggatgggtaatttgagaattacagagaagggactgaagctcgaaggcgatagcgaattcttacagcctctgtacgccaaggaaatccagagccgacctggaaacgccctgtactttaaatctgccaggaacgttacagtaaatatcctgaacgatcagactaaggtgctgacccagcttatcacaggcccaaaagcagttgaagcctatggcaagaaatttgaggtaaaaacggtgtccggcaaactgctcttttccgccgataataatgaggtcgtcgtgggggccgaaaggttaagggtcttaggggcggaggggaccgtgttcccaaaaagtatcgagactcctaacgtccgggccgatcccttcaaggagctcaggctcgaatcccccacccgctctttagttatggaagctccaaagggtgtggagatcaatgccgaggccggcaacatggaagccacctgtcggacagagctccggctggagtcaaaagatggggaaatcaagcttgatgcagcaaaaattcggctgcctcgtcttcctcacggctcgtacactcccaccggcaccagacagaaggtctttgagatctgtgtatgcgctaatggcaggctgtttttgtcccaggctggggcagggtccacctgtcagatcaatacatctgtgtgtctatag

SEQ ID NO: 329093 - DNA, 870 bp, Artificial Sequence
  derived and/or modified sequence
atgccccaggagcagtacacccaccacaggagcaccatgcctggctctgtgggcccccaggtgtacaaggtgggcatctacggctggaggaagcgctgcctgtacttctttgtgctgctgctgatgatcctgatcctggtgaacctggccatgaccatctggatcctgaaggtgatgaacttcaccattgatggcatgggcaacctgcgcatcacagagaagggcctgaagctggagggggacagcgagttcctgcagcccctgtatgccaaggagatccagagcaggcctggaaatgccctgtacttcaagagcgccagaaatgtgacagtgaacatcctgaatgaccagaccaaggtgctgacccagctgatcaccggccccaaggctgtggaggcctacggcaagaagtttgaggtgaagacagtgtctgggaagctgctcttctctgctgacaacaatgaggtggtggtgggcgctgagcggctgcgggtgctgggcgctgagggcaccgtcttccccaagagcattgagaccccaaatgtgcgggctgaccccttcaaggagctgcggctggagagccccaccaggagcctggtgatggaggcccccaagggcgtggagatcaatgctgaggccggcaacatggaggccacctgcaggacagagctgcggctggagagcaaggatggagagatcaagctggatgctgccaagatccggctgccccggctgccccacggcagctacacccccaccggcacccggcagaaggtgtttgagatctgtgtgtgtgccaacggccgcctcttcctgagccaggccggggccggcagcacctgccagatcaacacctctgtgtgcctgtag

SEQ ID NO: 329094 - DNA, 870 bp, Artificial Sequence
  derived and/or modified sequence
atgccccaggagcagtacacccaccaccggagcaccatgcccggctcagtcggaccccaagtctacaaggtcgggatttatggatggagaaagagatgtctatacttcttcgttctgttactgatgatactcattctggtgaacttggccatgacaatatggattcttaaggttatgaacttcacaatagacggcatgggaaacttgcgtataactgagaaagggctgaagctcgagggcgactctgagtttttgcagccactttacgccaaagagatacaaagcaggcctggaaatgcactgtactttaagagcgccaggaacgtgaccgtcaatatactgaacgaccaaacgaaggtgctgacacaactcatcactgggcccaaagctgtcgaagcttatggcaaaaagtttgaagttaaaactgtgtccgggaaactcttgttctccgctgacaataacgaagtagttgtaggggctgaacggcttagggtcctgggagcagaggggactgtgttcccgaaaagcatagagacacctaatgtgagggctgacccctttaaagaactgcgcctggaatcgccaactcgctcactggtgatggaggcccctaagggcgtggagataaatgctgaggccggaaatatggaggcgacctgccgtactgaactgcgcctggagagcaaagacggggagatcaagctggatgctgcaaaaatccgccttcctcgtctaccccatggttcctacactcccaccgggactcgccagaaggtattcgagatttgtgtgtgcgcaaacggaaggctctttttgagccaggctggggccggaagcacctgccagattaacacgagcgtgtgtctctag

SEQ ID NO: 329095 - DNA, 870 bp, Artificial Sequence
  derived and/or modified sequence
atgccccaagagcagtacactcaccacagatccaccatgccaggtagtgtcggtcctcaagtgtacaaggtgggcatctacgggtggagaaaaaggtgtctgtatttctttgtgctgctgctgatgatcttgatcctggtcaacctcgcaatgacaatctggattctaaaggtgatgaacttcactatagatgggatgggcaatctcagaatcacagagaagggccttaagctagaaggagattcagagtttcttcagccactatacgccaaagagattcagtcgaggcccggaaacgccctatacttcaagtctgcacggaacgtgacagtgaacattctcaacgatcagactaaagtccttacccagctgatcacagggcctaaggcagtggaagcgtatggcaaaaagttcgaggtaaagacagtgtcaggcaagttgcttttttcagctgacaataatgaggtggtggtaggcgcagagagattgcgagttttaggcgcagagggcactgtgttccctaaatccatcgagactcctaatgtcagagccgacccgtttaaagagttgagactcgagagccctacgcgcagcctggttatggaagcgccaaagggagtggagatcaatgccgaggcgggaaatatggaagcgacttgcagaaccgaactacgtttggagagtaaagacggcgaaattaagctcgacgctgccaaaatccgcttacctagattaccccatggctcctacacaccaactggcacccggcagaaggtgtttgaaatttgcgtgtgcgccaacggtcgcttatttttgagtcaggctggggctggatcaacatgtcagataaatacatcggtttgcctctag

SEQ ID NO: 329096 - DNA, 9455 bp, Artificial Sequence
  derived and/or modified sequence
gagcagaagaaagagaggacttatctccagcatctagcactacagagcagaggctgtgtggagaatggctgaaaaatcagaattggttgtagaagcagttttctttctggttgtgagtatgagcccggcagacaccatgagcgctgttgcaggggagtcggcctgtgcttgacacatgtgtttcccattgatagctggagacagcccagtagctgtgagtcggtctgacaaagccatattgaagtacggagtacggtttcaaagcagtcagaaaaagaacgggaatgctgttcaggaaattcttcaggcatgggcagggacttggctgcagttctgcagttggaaaatctgactggggcagcttctgagcgcaggctgggcctgcacacactcagcgggccgagtggccacctccttcagagctgctcagcacgccctgggatcgcgggcggttttcatcggccggtttgtgaaacggacaagagagatgcctcaggagcagtacactcaccaccggagcaccatgcctggctctgtggggccacaggtatacaaggtggggatttatggctggcggaaacgatgcctgtatttctttgtcctgctcctcatgattttaatactggtgaacttggccatgaccatctggattctcaaagtcatgaacttcacaattgatggaatgggaaacctgaggatcacagaaaaaggtctaaagctagaaggagactctgaattcttacaacctctctacgccaaagaaatccagtcccgaccaggtaatgccctgtacttcaagtctgccagaaatgttacagtgaacattctcaatgaccagactaaagtgctaactcagcttataacaggtccaaaagccgtagaagcttatggtaaaaaatttgaggtaaaaactgtttctggaaaattgctcttctctgcagacaataatgaagtggtagtaggagctgaaagattacgagttttaggagcggagggcacagtgttccctaaatctatagaaacacctaatgtcagggcagaccccttcaaagaactaaggttggagtccccaacccggtctctagtgatggaggccccaaaaggagtggaaatcaatgcagaagctggcaatatggaagccacctgcaggacagagctgagactggaatccaaagatggagagattaagttagatgctgcgaaaatcaggctacctagactgcctcatggatcctacacgcctacaggaacgaggcagaaggtcttcgagatctgcgtctgcgccaatgggagattattcctgtctcaggcaggagctgggtccacttgtcagataaacacaagtgtctgcctctgaaagactatccatagtggacattgttggcagcataaaggccttttttggctttagacactggctgccagctatttttactagaacacagaaagcctatcaaagaccttgtgtgtatgtgtacgtgtgtgtgcgtgcttgagtgtgttcgcgtgtgtgggtggatataaatatatataaatatatataaataaatatatatatcctctgtataaaatgaggtttcagtacaaaaggaaccatgggtgaccctgcgatatccactgtcattttccatcccatccccaccacctgagtgacagaaatctaaacacacatccgtcccaacattccccagaccattcagaatcacacagcgtattaaacactgacagaatcttcatctagatattcgagtagcagcatatcttctcttttagtgtcattacgagggagtgatggcgggaatctcagtcgcactcaagctctgagacctttgtatcaaaaataggcatttgatttcctgttttagctttagtaaggctggctaacttccccctcttcaagctaggaactggcaatgctgtagaagtcagccgtaggaattcaaaatggctggcctaccttggctaccagacatattggggtttttgtagttgaatgaatgaggaggatgaatttcagcaaattttgaactgctcacccaacttctgctatcttgctccctccaaactcacagattctcctacagtcaaattaggagctgtaaatcagcacaaaataagataacagctgttcctcagtgagctggaagctacttaatggcctgatgggcaatgaacaaacgggtgatatgtctctgtttaagggaaaaatggcttaaaagctgttctgttctcacttctgactttaaccaaaagatttcaacccacaatgatcaggtcaatcaaaatccctaagagcagaactcctaccccaaaagaagcctggaagtctaattaagagtagcataaggaacctaattatgtttaccatgtttcttgggattggtgggaaatgtcaaaacatgccctttatttttaaaggcattcacaaactctctgactttgttcttcttatatattttttcagtgccgggatattcatattcctaaagccactattgtgttttctctaagaagcactacatgccaccagaattgtgcactgaaagataatacaaactgagtgtctttatgagaatcactgtgtcccctgaggcccagcagtacctgcttccctgtatgtggaagcagcacctcattcccgccatcagctacctctcatcaccccaccttcatcatcatgctccagggtcaccctggccagctcttgtgctgggacaggggattacaccatctctgttcaaagagggggaaatgtgcctatgccttaagtcaatgcactcagcaaggagaagcacatcttatttatcttgttacctatagtttactttgggtgattggaggggaatgacttagttatgactggacatcttaaaagctgatagacaagccaaatggctggcagatgatgtggatttcaaagagcccagaatgaactcatcactggcttagacagtcctggatgccatttggaaagtagtggccctgcaagcctaaatgaagtagtatttgtaggcctgggtggcatttggatttttcttttccctcaacaaggttttactttttcttactttacaagcaagggaagttttgtgataggagagaaataaaagatttgatattttttgagatgacactcaagcatcaggctgagatttgcacacatgggatgtaaaagcaagctgtgtgttgcttagtcacttacttagaagtagatggtgggggacagcggcgtgggtcctagcctggccagtgatgctgctggcgtccagaccccagactcactccaagcactcttgttcaatatctcatgcagaagagttgggctggtcactcttaggggtgagaccccgtgattggttggtttgtagcactaaggtctaaaaaggaaaaccataaaagacatcagattacgctggatcagtataattaatattccatagggccatgttgccagaatctgtatgtatcaatacagggtttttccaagccaggaaacgccctccttggctactaggagcacctatcccatatcattcagataaacaatgatagctacaaagtcatttgtggctagataggttaagacaggtgattttttaaagtagactgtctttgcattttgccatctgaagttcattaatctttagatgacaaaaaagcaaaaagttcccagaacgtttttgcttagattttgttctaatcaccacgtgaaggaatgagattagcaccacaagtttcatgccaataaaagagactggtgtgatcccacatgcaaaatttaatcctaagggtagtgagatcacaaacagaataaaaataagagcaatcaaccatataaatcaagtacctattgggaacagacataacattcaatttttcatttatgctaagtgaccacagtatacaaagtaataagcaggaaatttgatatgggttaaattatgcattttgttcagattttggaaattggtatgcattataagtttctcaatgtacatctttttatcccaacaccctcaaactagaatatttgtcagtggtcaagagaaaaaattttacctgaattcttgggggccggcggggagcttttacattaaaaatctactaacgcctactttttaaaaaatgagattctttctaatctttatatatgacattttctagacaatcgcacctttgggtatattaaacagctggtatcataacaaagaatccaaatgaaccttcaatatactagaagttctagtaggttaatattgttcagaagatttttacaaattaaaaactgatttccaaatatgttcaacatttacttctatttgatatctgctcaagaagtcatagaagtcttgggaaactattcgagtatcacagaggttttcaaaagcccttatggtgacatctacctaggtaaaagcctgacatgtggctttataattgttatgttacccaagggataaacttgaactggctttgaacatcctttaggtcattttctctttggataattttcatcgcatatccagcaactatagaccaaagtttgcttaaggtttgaccctagagcagaggtgggcaaactatgacctggaaaccaaatctgacttaccaccttttcctgtagttaaagttttattgtcacatagccacatacattcatttacatgttttctgattttacactacagcagcaggatggagtagttgtgtcagagactatgtatcccacaaagcatagattacttactatttagtcctttacaggcaaagtttcctcacccctgacctagaggtttttgtggtatgcattggatatagcaggaaagaaagcacatttccaaacagcagggagtaagcttacatttctgtgtaggtttgggaatatagttacttggcaaagtctttcaggaaggaagcccttccttatgttacatgtggaaagcctgccttccaagacatgtggaagtaattgatccacctgccagagaaacacaggctcagaggatgcctgggaacagggaggatgggattagtggaagcttaatggaaaaggaaagttatgatcctccaagacccttaattgatagaccataccaggttctgcaggtcagcatcattgtgtaatgagagtgaagtaggggaccctgtggttcaaccttagaatctgtttcctgtaggctctttctgctgtctatattcattaaagttttccacttcaccctcccatagtctagagggatgcccattccatggtcctccagagaatagttttgacttaacatgtctgtttagcccacatcacgtcagttatcaacaccgccactgtgcttactgttcctacagccacaccaggcttgaagagttagtgagaccaacaaataattggaagtattggaaaaagcaaaatacatggggacaaaaaaaatacagtgaaattctttttatcaaactgatgctgtgagaaaccagatgaatgccagtttggctttatttctaagaatctgggtcttcattctctggtgtagaaggaatgcaaaaaactataacaacaacaacaaaaacatattttgaaaagacatattctgacatctctgcttgtgtgtggtaaggcaggttcctatcagacatttatccctttggtcaagatcccttttgctcatccagggtttcatactcaatatcgcttaaaaaaaaaaaagtatcagctagggatgactctggaagtatgagtatcatggtggggaggaaggaattttttttaaatgtaaatgacccccatttaccagaccctaatcaaagtcacttaagggaatccctcagccttttatttggaaacagttgaaataaactggcagcagctagatcagagtatcttgctttattttataaaggccaaaggtagtatgaagtttggaccaaaaaggtaaatagatccattccagcacctgatactgatttttcaaggctctatgaaaggtcaaaaatttcattaaacaagaccagttctccctcttccccctgtcccaagaaatcttaggcatgaaaaggataaggaaacagctcctggaatgatacatttgcatagtgccctagtagcaggttgggaaaaagttataatataagaaacaaccttcgaaaacaggccttttatctcaaagataaaatgtctttcttgtggtctttcatcactatctccgtggtggaaggttcccctagttccaacatatttccattaaaatagtcaaagccacggcattgggatgtcagatgcctctctttctttgtggtaatcggaatttaaaattatacagttgcctctgaatttctcatgcacaaagccaaaccactgataagagataaagcagtctgaagcctgctgcttcagccagcacagcacaccacacacgctcgcactttcaaaagcaatgtgatttctatggttcttaaaagctttcttcataagggagtccctgaaatttctcaaggcaggtttgaatggcaaagggaaaataattacttgtgggaggtcctccttttgagtattgttagagcatacatgtaaaagaaaataacctttttggggcaactcatgctcacacatgctgttttctttggttctccccctaccttccttttgtagatattgacagaataggaggaaatgagcatccttatttgagaaagagcaagaatgtcatgagcccttgatgcaatagtaagtgtgatgtcatcatacagtgttaatgatgctatcaaatccatcaataaacagtctcaaaccttccaacaacagtgctcactgctgctcctcaacttcagcccagcaagcagtaatatcatcacccattttgagatatgcaggtggaatagaacaaagaaacagccactgtaatcgagaagcatgtttactgtctaaatccacctgttgcagtaggaagccagagtggggttccaaatgcctcattaagtatgtggacagcctcactagtaagtgagtgaatttggcttcatcactgaacattagctaaggtcagcttaataacacaaatatgaggccgacttctttgcgagaagagaaaagaaaacatctgcttgatttaaaatccaccccacatgcctagagttgtctaatagtccctcactttccaatggcttcacatcctacttctacatttggggttttttggtgaaatcagagatagctcaggatttcataaaacgagaaactccaaactggtctattaggttccatgggaacacttgtagccaaaggattgtctgagggcaggaagacgacacttgtcaacaaggaagacagtgtttctttagttcccatattcatctaattcatggggttctaacattttggggggccatagattcttttgacaatctgagccaatctatgaaacttctccccaaaaagaaccaccccacaaaatcttgcaaaacgtaagagattttcctggatctgaagctacccgaagacatgggaagagttgtattctattattcaattttaagaatatttattaatattcactgagctattgctagccactgtgctaaacattttacatacattctcctatttcatcctcaaaacaatcctttgagttgggttttaatatagttccaatattcggatgtgaaaactgaggcttatagtggctaagaaacttgcccaaagccactacctagaaaatggcagagctggaatgtaggtttaactcctgaccactatgctataaagtcaccacatgtcaaactaattttcaagttgttgggacatgtcccctactaggttttaaactagatcttccttggtagatgaagctatagaacttctattttccctgctttctgtagtctctcacagtgacagcatctatactaaagtatagatacctaaggggaaaatatagaaagcctgcctgaataatagaatctagaacaacaacaaaaatattaattttttctgtgtatgcttaggtcaagcttaaaaaaaaaaaaaaaagaccggaaaatacctgggttgttagcctcacatttaggaaaaaattgtaatactcagttatctgtgtgtgtggctaaacaagtcagcatttctgcacacatacatctctttcctttatacttcccttcaaaagacaaatatcttacttttgatctttgacactatttggtcagtattcttctttacctttacttgtggcaaaactcaaggaagcgatcaaatagagggaagctcatttctatcattgtctctgtttccctataagaaagaactaccagggactcactgactgcattaggcatacaatgtcagagctgagctgaccactctggtcctgtaatgtctttggcctcacaccttggcagccatcattaatgggccatacccttccccaggtgcagaattctcctccccagagcactcaggccgttactaccaatttatctgagttggaaataagactcatttgccagttcttatttttaaagtggcaccctttaactttgaacctgtgtattttacactggcatcctagattcagcaatgaggtttggtggtgtttcaactaggaagggagaaaatgagtgcatctgaagttccttacagcttggtttctttggaatgctttcatcttctaagcaaagggatcagggtttgatctgtaagagttaaaaagacaaagtcattttgaagaattaactcagccagggatcatgcaaaaagattagaaaccataatgcccttgttaaagccctgctgtcaacctgccttcacccagagcttagagggccacagcagcaaagaggttggggtccatccctctctgatgtgctttttccacaacacatatctggtcctctggcaggattgtggatagagctcctcaccatacccaaaagactcagccccagtgccagtgctttcctggttcaacaacccaccacaaaaccttagtaaaaggatgagccaaaaatgaaaaagactcgactctacagtaagtcagtcagggatttcctttttaatggtttaagacatccaaatggcaagccaggaatagataccattaaagggtctcataggactaaccttaccagagccagaaatctagctctctggaagagatgcaagattctagaaaagtaaagggaagtgtcggcacatctaaatttagtgaacacaaaattaatttttatctagtctgtgacggagggaataaagtttttcatgtatcaaccacctcccccagtcaggtttctccctttttgagattatgaagaagctgagacatacttcttaaggaggtcgtgttttagaaggaaaaggcagaggctatccatcattatgctggctagatgcgcttctgaagaagccggattctgatgttcttaaccaaaatggtgaggtcatggaagtcccatttgcttggagattttgaaaa

SEQ ID NO: 329097 - DNA, 867 bp, Artificial Sequence
  derived and/or modified sequence
atgccccaggagcagtacacccaccaccgcagcaccatgcccggcagcgtgggcccccaggtgtacaaggtgggcatctacggctggcgcaagcgctgcctgtacttcttcgtgctgctgctgatgatcctgatcctggtgaacctggccatgaccatctggatcctgaaggtgatgaacttcaccatcgacggcatgggcaacctgcgcatcaccgagaagggcctgaagctggagggcgacagcgagttcctgcagcccctgtacgccaaggagatccagagccgccccggcaacgccctgtacttcaagagcgcccgcaacgtgaccgtgaacatcctgaacgaccagaccaaggtgctgacccagctgatcaccggccccaaggccgtggaggcctacggcaagaagttcgaggtgaagaccgtgagcggcaagctgctgttcagcgccgacaacaacgaggtggtggtgggcgccgagcgcctgcgcgtgctgggcgccgagggcaccgtgttccccaagagcatcgagacccccaacgtgcgcgccgaccccttcaaggagctgcgcctggagagccccacccgcagcctggtgatggaggcccccaagggcgtggagatcaacgccgaggccggcaacatggaggccacctgccgcaccgagctgcgcctggagagcaaggacggcgagatcaagctggacgccgccaagatccgcctgccccgcctgccccacggcagctacacccccaccggcacccgccagaaggtgttcgagatctgcgtgtgcgccaacggccgcctgttcctgagccaggccggcgccggcagcacctgccagatcaacaccagcgtgtgcctg

SEQ ID NO: 329098 - DNA, 870 bp, Artificial Sequence
  derived and/or modified sequence
atgccccaggagcagtacacccaccacagaagcaccatgcccggcagcgtgggcccccaggtgtacaaggtgggcatctacggctggagaaagagatgcctgtacttcttcgtgctgctgctgatgatcctgatcctggtgaacctggccatgaccatctggatcctgaaggtgatgaacttcaccatcgacggcatgggcaacctgagaatcaccgagaagggcctgaagctggagggcgacagcgagttcctgcagcccctgtacgccaaggagatccagagcagacccggcaacgccctgtacttcaagagcgccagaaacgtgaccgtgaacatcctgaacgaccagaccaaggtgctgacccagctgatcaccggccccaaggccgtggaggcctacggcaagaagttcgaggtgaagaccgtgagcggcaagctgctgttcagcgccgacaacaacgaggtggtggtgggcgccgagagactgagagtgctgggcgccgagggcaccgtgttccccaagagcatcgagacccccaacgtgagagccgaccccttcaaggagctgagactggagagccccaccagaagcctggtgatggaggcccccaagggcgtggagatcaacgccgaggccggcaacatggaggccacctgcagaaccgagctgagactggagagcaaggacggcgagatcaagctggacgccgccaagatcagactgcccagactgccccacggcagctacacccccaccggcaccagacagaaggtgttcgagatctgcgtgtgcgccaacggcagactgttcctgagccaggccggcgccggcagcacctgccagatcaacaccagcgtgtgcctgtag

SEQ ID NO: 329099 - protein, 472 aa, Artificial Sequence
  derived and/or modified sequence
MDIRNYILNYVASQPKLAPFVIQALIQVIAKITKLGWFEVQKDQFVFREIIADVKKFLQVDYSRPSAKHRKIATSFRDTSLKDVLVLACSLLKEVFAKPLNLQDQCQQNLVMQVLKLVLNCLNFDFIGSSADESADDLCTVQIPTTWRTIFLEPETLDLFFNLYHSLPPLLSQLALSCLVQFASTRRSLFNSPERAKYLGNLIKGVKRILENPQGLSDPGNYHEFCRFLARLKTNYQLGELVMVKEYPEVIRLIANFTITSLQHWEFAPNSVHYLLTLWQRMVASVPFVKSTEPHLLDTYAPEITKAFITSRLDSVAIVVRDHLDDPLDDTATVFQQLEQLCTVSRCEYEKTCALLVQLFDQNAQNYQKLLHPYSGVTVDITIQEGRLAWLVYLVGTVVGGRLTYTSTDEHDAMDGELSCRVFQLISLMDTGLPRCCNEKIELAILWFLDQFRKTYVGDQLQRTSKKTFIYL

SEQ ID NO: 329100 - protein, 518 aa, Artificial Sequence
  derived and/or modified sequence
VYARMSEVLGITDDNHVLETFMTKIVTNLKYWGRYEPVISRTLQFLNDLSVGYILLKKLVKIDAVKFMLKNHTSEHFPFLGISDNHSLSDFRCRTTFYTALTRLLMVDLGEDEDEFENFMLPLTVAFETVLQIFNNNFKQEDVKRMLIGLARDLRGIAFALNTKTSYTMLFDWMYPTYLPLLQNAVERWYGEPTCTTPILKLMAELMQNRSQRLNFDVSSPNGILLFREASKMVCTYGNQILSLGSLSKDQIYPMKLKGISICYSALKSALCGNYVSFGVFKLYGDNHFDNVLQAFVKMLLSVSHSDLLQYRKLSQSYYPLLECLTQDHMSFIINLEPPVLMYVLTSISEGLTTLDTVVSSSCCTSLDYIVTYLFKHIAKEGKKPLRCREATQAGQRLLHFMQQNPDVLQQMMSVLMNTIVFEDCRNQWSVSRPLLGLILLNEKYFSELRASLINSQPLPKQEVLAQCFRNLMEGVEQNLSVKNRDRFTQNLSVFRRDVAEALRSDGNTEPCSLDMMS

SEQ ID NO: 329101 - DNA, 1557 bp, Artificial Sequence
  derived and/or modified sequence
gtgtacgcacggatgagtgaagtcttgggaatcacagacgataaccatgtacttgagactttcatgacaaagatcgttaccaatctgaaatattggggtcgctatgagcctgtgataagtcgcaccctgcaatttttgaacgatttatcagtaggatatatactgcttaaaaagctggtgaaaatcgacgccgtgaaattcatgctgaaaaatcatacgtccgagcatttcccttttctgggaatcagcgataatcatagccttagcgatttccgctgtagaactacattttacacagctctgacccgcctcctcatggtagatctcggggaggacgaggatgagttcgaaaactttatgcttcccctgactgttgctttcgagactgtcctgcagattttcaataacaactttaagcaggaggatgtgaaacggatgttaatcggacttgccagggaccttcggggtatcgcttttgcactaaatacaaaaacctcctataccatgttgtttgattggatgtaccccacgtatctccccctgctgcagaacgccgttgaaaggtggtacggcgagccgacttgcacaactcccatactgaagttgatggcagagttaatgcagaataggagccagcggttgaacttcgacgtatcttcacctaacgggatactgctgtttcgtgaggcaagcaagatggtctgcacttacggcaaccagatcctatctttggggtccctcagcaaggaccagatttacccaatgaaacttaagggcatctcgatctgctactcagccctcaaaagcgcgctatgtgggaattatgtttccttcggcgtgttcaagctctatggggataatcattttgacaatgtgctgcaggctttcgtaaaaatgttactcagtgtgtcgcactccgatctcctgcagtataggaagctcagccagtcttactacccgttgcttgaatgtctgactcaggaccacatgtcgtttattattaatctcgagcctcccgtgttgatgtacgttctcacaagcattagcgaagggctaacgactcttgacactgtggtgagctcaagttgctgcacctcccttgactacattgtgacatacctattcaaacatatcgcaaaagagggcaaaaagccacttaggtgccgagaggcaacccaagctggtcagcgtctgctccattttatgcaacagaaccccgatgtactgcagcaaatgatgagtgtgttgatgaatacaattgttttcgaggattgcaggaaccagtggtcagtgtcaaggcccttactgggactaattcttctcaatgagaaatacttttcagaactacgcgctagtctcattaacagtcagcctctaccaaaacaagaggtgctcgctcagtgcttccgcaacttgatggagggtgttgagcagaatctgtcggtgaaaaatagggatcggttcacacagaatctcagtgtgtttagacgggatgtagccgaggctctgaggtcagacggtaacaccgagccttgcagcctggatatgatgtcctag

SEQ ID NO: 329102 - DNA, 1557 bp, Artificial Sequence
  derived and/or modified sequence
gtgtatgccaggatgtctgaggtgctgggcatcacagatgacaaccacgtgctggagaccttcatgaccaagatcgtgaccaacctgaagtactggggccgctatgagcctgtgatcagcaggaccctgcagttcctgaatgacctgtctgtgggctacatcctgctgaagaagctggtgaagattgatgctgtgaagttcatgctgaagaaccacaccagcgagcacttccccttcctgggcatcagtgacaaccacagcctgagtgacttccgctgcaggaccaccttctacacagccctgacccggctgctgatggtggacctgggagaagatgaagatgaatttgagaacttcatgctgcccctgactgtggcctttgaaacagtgctgcagatcttcaacaacaacttcaagcaggaggatgtgaagaggatgctgattggcctggcccgggacctgcggggcatcgcctttgccctgaacaccaagaccagctacaccatgctgtttgactggatgtaccccacctacctgcccctgctgcagaatgctgtggagcgctggtacggggagcccacctgcaccacccccatcctgaagctgatggccgagctgatgcagaacagaagccagaggctgaactttgatgtgagcagccccaacggcatcctgctcttccgggaggccagcaagatggtgtgcacctacggcaaccagatcctgagcctgggcagcctgagcaaggaccagatctaccccatgaagctgaagggcatcagcatctgctacagcgccctgaagagcgccctgtgtggcaactacgtgtcctttggagtcttcaagctgtatggagacaaccactttgacaacgtgctgcaggcctttgtgaagatgctgctgtctgtgagccacagcgacctgctgcagtacaggaagctgagccagagctactaccccctgctggagtgcctgacccaggaccacatgtccttcatcatcaacctggagccccctgtgctgatgtatgtgctgaccagcatcagcgagggcctgaccaccctggacacagtggtgagcagcagctgctgcaccagcctggactacatcgtgacctacctgttcaagcacatcgccaaggagggcaagaagcccctgcgctgccgggaggccacccaggccggccagaggctgctgcacttcatgcagcagaacccagatgtgctgcagcagatgatgtctgtgctgatgaacaccatcgtgtttgaggactgcaggaaccagtggagcgtgtcccggcccctgctgggcctcatcctgctgaatgagaagtacttcagcgagctgcgggccagcctcatcaacagccagcccctgcccaagcaggaggtgctggcccagtgcttcaggaacctgatggagggcgtggagcagaacctgtctgtgaagaacagagaccgcttcacccagaacctgtctgtgttcagaagagatgtggccgaggccctgcggagtgatggcaacacagagccctgcagcctggacatgatgtcctag

SEQ ID NO: 329103 - DNA, 1557 bp, Artificial Sequence
  derived and/or modified sequence
gtgtacgcccggatgagcgaggtgctgggcatcaccgacgacaaccacgtgcttgagacttttatgaccaagattgtgaccaacttaaagtattggggaagatatgagccagtgattagcaggactctgcagtttctcaacgatctgtccgtaggctatattttgcttaaaaagctagtgaagatagacgcggtgaagttcatgctgaaaaaccacactagcgagcactttccatttctggggatatctgataaccactccctgtcagattttcgatgcagaacgaccttttacaccgctctgactaggttgttgatggtggacttgggagaggacgaagacgaattcgagaacttcatgttaccgttaacggtcgctttcgagacagtgttgcagattttcaacaataatttcaaacaggaagacgtgaaacggatgttaatcgggctggcccgtgacctgagaggcattgcattcgctctcaatactaaaactagctacaccatgctctttgattggatgtatcctacatacctgccgctactgcagaatgcggttgagcgctggtatggagaacccacatgcactactcccattctgaagctcatggccgaactgatgcagaacagatcccagagactgaacttcgatgttagctccccaaatggcatactgctgtttagggaagcctctaaaatggtatgcacttacggcaatcaaatcctgagcctcggttctctaagcaaggatcaaatttatccaatgaaattgaaagggatttccatctgctacagtgccctgaagtccgccctctgcggaaattacgtttcttttggcgtcttcaaattgtacggcgacaatcatttcgataatgtactccaggcatttgttaagatgctactgagcgtgtcacatagtgacttgctgcagtatcgtaagctgtcccagagctactatccgctcctagagtgtttgacccaggaccatatgagttttatcattaatcttgaacctcccgtgcttatgtacgtgttgacgtccatttccgaagggttaacaaccttagataccgttgtgagtagttcttgctgcacgtctttagattatattgtcacttacctcttcaaacacatcgccaaagaaggcaaaaaaccgcttcggtgccgcgaggcgacccaggccgggcagaggctgttgcacttcatgcaacagaacccagacgtgctgcagcagatgatgagcgtgctgatgaatacaattgtcttcgaggattgccggaaccaatggtctgtgtcacgccccctactggggctcatcctcctcaatgagaagtatttcagtgagcttagagctagtctcatcaactctcagcccctgccaaagcaggaggtgcttgcacaatgtttccggaatctgatggagggagtagagcagaacttatccgtgaagaatagggataggttcacccaaaatttgtccgtgtttagacgagacgtagccgaggcccttcggagcgacggcaacacagagccatgtagtttggatatgatgagctag

SEQ ID NO: 329104 - DNA, 1557 bp, Artificial Sequence
  derived and/or modified sequence
gtgtacgcaaggatgagcgaagtgctcgggatcacggatgataatcacgtcttagagacatttatgaccaaaattgtgacaaacctgaagtactggggccgatacgagcctgtaatttcacggaccctgcaattcttgaacgacctatcagtaggatatatacttctgaagaaacttgttaaaattgatgccgtgaaattcatgctgaagaaccatacttccgagcacttcccttttctaggaatttcagacaatcactccttaagcgactttcgttgtcgcacgacattttataccgcactcactagattgctgatggttgaccttggtgaggatgaggacgagttcgaaaatttcatgcttcctttgaccgtggcttttgagactgtcctccaaatttttaacaataacttcaagcaggaggatgtcaaaaggatgctgatcggcctcgcgagagacctgcgtggaattgcatttgctctgaacacaaaaacgagttacaccatgctgtttgactggatgtaccccacatatctgcctctgctacagaatgcagtggagaggtggtatggagaacccacctgtacaacacccatcctcaagctcatggccgagctgatgcagaaccggtcccagaggctgaactttgacgtctcttccccaaatggaatcctgttgtttcgcgaggcctctaagatggtttgtacttatggcaatcagatcctgtccctgggatccctgagcaaggatcagatttatccgatgaagttgaaggggatatctatttgttattccgcacttaaatctgccctctgcggaaattacgtgagcttcggggtcttcaaactgtatggcgacaaccacttcgataatgtgctgcaggcctttgtgaaaatgctgctgtcagtttctcactctgatctgctgcagtaccggaaactgtcacaatcctactatccattgttggagtgcttgacccaggaccatatgagttttatcatcaatcttgagccccctgtcctcatgtatgtactgaccagcatctcagaaggattaacgacgctagataccgtcgttagcagttcatgttgtacatcgcttgattacatcgtcacatacctgtttaagcatatagctaaagaggggaagaaaccccttagatgccgcgaggctacacaggcaggccagaggttgcttcacttcatgcagcaaaaccccgatgtgttgcagcagatgatgtctgtgctcatgaataccattgtgtttgaagactgcagaaatcaatggagcgtttcccgaccgctgctgggactgattctcctcaacgagaagtacttttctgaactgcgtgcttctttgatcaactctcagcctctccctaagcaggaagtgctggcccagtgctttagaaatctcatggagggggtcgaacagaacttgtctgtcaagaaccgcgaccgattcactcaaaatctttcagtgttccggagagatgtggcagaagcccttcggagcgatggcaataccgagccttgctccctggacatgatgagctag

SEQ ID NO: 329105 - DNA, 2078 bp, Artificial Sequence
  derived and/or modified sequence
attgaataacatcatggaatcagaatacttgaactggaagagatcatataatatatagtctagtagtttttctgtttgctccgtggttggggcagggaggggaggaggaggagcttggcaagttatcttctccttccgtgaaacagagcactttaaagtgcttactttctttatcacttactttctcatattggccttccaggtatatgctcgtatgtcagaagtcttaggaataacagatgacaaccacgttctagagacgttcatgacaaaaattgttacaaaccttaaatactggggaagatatgagcctgtaatttcaaggactcttcagttcctaaatgacctttctgttggttatatccttttaaaaaaacttgtgaagatagatgctgtgaaattcatgctaaaaaaccacacgagtgaacacttcccttttcttggcatcagtgacaatcatagtctcagcgacttcaggtgtcgaacaaccttctacacagcgctcactcgccttctgatggtagatctgggtgaagatgaggatgaatttgagaatttcatgctgcctcttacagttgcttttgaaacagtattacaaatattcaacaacaactttaaacaagaagatgtaaagcgtatgttgatcgggctggcaagagatcttcgagggattgcctttgcactgaacacaaagaccagctacaccatgctgtttgactggatgtacccaacgtaccttccccttcttcagaatgctgttgaacggtggtatggagagccaacatgtacaactcccatcttgaaacttatggcagaacttatgcaaaacagatcccagcgtttgaattttgatgtatcatctcctaatggaattcttctcttcagagaagctagtaaaatggtttgcacttatggtaatcagatcctgtcccttgggagcctctcaaaagatcagatttatccaatgaaactcaagggcatctccatctgctattcagctctcaagtctgccttgtgtggaaattatgtcagctttggcgtcttcaagttgtatggggacaaccattttgacaatgtactccaggcttttgtcaaaatgctgctgtcagtgtcccacagtgacttgctacaataccggaaactgagccagtcttattatccactcctggaatgtctcactcaggaccatatgagcttcatcatcaacttagagcctcctgtactcatgtatgttctcacatctatctcagagggactcactactcttgatacagttgtctcctccagctgctgtaccagtttagactacatcgtcacctacctcttcaagcacatagcaaaagagggcaagaagccacttcgatgcagagaggctacccaggctggtcagagactattacattttatgcagcaaaacccagatgtcctgcagcagatgatgtctgtcctcatgaacaccattgtctttgaagactgtcggaaccagtggtcagtatccaggcctctcctggggctcatcctgctcaatgagaagtatttcagtgaactgagagcaagtttgataaacagccagcccctccccaagcaggaggtccttgcccagtgcttcagaaacctaatggaaggagtggagcagaacctgtccgtcaagaacagagacaggttcacccaaaatctgtctgtattcagaagagatgtggcagaggcgttgcgcagtgatggcaacactgaaccatgcagtctcgacatgatgagctgacccgacttttctgaccatgtgcggagcagcctttatcaagagactcctgaaggtctgggtctcaggacagtgatgttggctagcccaggggaatgtatttttcaaaacatacaagcaacagcaaaagccctaacttcttatacgtctagcctaattataagaatttctaacagtaccagtgtaaattcagtcttttctctgaaaagcaaaggatgtgttttcagtctttctatcaaatattatctttgttctcctaatgctctgaaaggatgtagaaacaatatttaaccaaagaacgtaataaaccaggtttgcacct

SEQ ID NO: 329106 - DNA, 1557 bp, Artificial Sequence
  derived and/or modified sequence
gtgtacgccagaatgagcgaggtgctgggcatcaccgacgacaaccacgtgctggagaccttcatgaccaagatcgtgaccaacctgaagtactggggcagatacgagcccgtgatcagcagaaccctgcagttcctgaacgacctgagcgtgggctacatcctgctgaagaagctggtgaagatcgacgccgtgaagttcatgctgaagaaccacaccagcgagcacttccccttcctgggcatcagcgacaaccacagcctgagcgacttcagatgcagaaccaccttctacaccgccctgaccagactgctgatggtggacctgggcgaggacgaggacgagttcgagaacttcatgctgcccctgaccgtggccttcgagaccgtgctgcagatcttcaacaacaacttcaagcaggaggacgtgaagagaatgctgatcggcctggccagagacctgagaggcatcgccttcgccctgaacaccaagaccagctacaccatgctgttcgactggatgtaccccacctacctgcccctgctgcagaacgccgtggagagatggtacggcgagcccacctgcaccacccccatcctgaagctgatggccgagctgatgcagaacagaagccagagactgaacttcgacgtgagcagccccaacggcatcctgctgttcagagaggccagcaagatggtgtgcacctacggcaaccagatcctgagcctgggcagcctgagcaaggaccagatctaccccatgaagctgaagggcatcagcatctgctacagcgccctgaagagcgccctgtgcggcaactacgtgagcttcggcgtgttcaagctgtacggcgacaaccacttcgacaacgtgctgcaggccttcgtgaagatgctgctgagcgtgagccacagcgacctgctgcagtacagaaagctgagccagagctactaccccctgctggagtgcctgacccaggaccacatgagcttcatcatcaacctggagccccccgtgctgatgtacgtgctgaccagcatcagcgagggcctgaccaccctggacaccgtggtgagcagcagctgctgcaccagcctggactacatcgtgacctacctgttcaagcacatcgccaaggagggcaagaagcccctgagatgcagagaggccacccaggccggccagagactgctgcacttcatgcagcagaaccccgacgtgctgcagcagatgatgagcgtgctgatgaacaccatcgtgttcgaggactgcagaaaccagtggagcgtgagcagacccctgctgggcctgatcctgctgaacgagaagtacttcagcgagctgagagccagcctgatcaacagccagcccctgcccaagcaggaggtgctggcccagtgcttcagaaacctgatggagggcgtggagcagaacctgagcgtgaagaacagagacagattcacccagaacctgagcgtgttcagaagagacgtggccgaggccctgagaagcgacggcaacaccgagccctgcagcctggacatgatgagctag

SEQ ID NO: 329107 - DNA, 1419 bp, Artificial Sequence
  derived and/or modified sequence
atggacatacggaactacatcctgaattacgtcgcttctcagccaaagcttgccccgttcgtgatccaagcactgatacaagttatcgcaaagatcaccaagctcggttggtttgaggtccaaaaagatcagtttgttttcagagagattattgcagacgtaaagaagttcctccaggtagactactcgcgcccttctgccaagcacagaaaaatagcaacttcgttcagagacacatctctcaaggatgtgctggtcctggcctgcagcctgctcaaagaggtcttcgcaaagccgctcaatttgcaagatcagtgccagcaaaacctcgtcatgcaggtactcaagttagtcctgaactgtctaaacttcgactttatcggctcttcagccgatgagtccgccgacgacttatgtacggtgcaaatccccaccacttggaggacaatctttctcgaacccgagacattggacctgttctttaacctctatcattccctgcctccattgctaagtcagcttgctctctcttgtctggtgcagtttgcaagcactcgcaggtctctgtttaactcgcccgagcgggctaagtatctcggcaacctcattaaaggtgtgaaacgcatcttggagaacccacagggtctgagcgaccctggaaactatcacgaattttgtcggttcctcgccaggctcaaaacaaactatcagctcggagaactggtcatggtgaaggagtaccccgaggtgatacgactgatcgcaaattttacaattaccagcttacagcattgggaatttgccccgaattccgtgcattaccttctcacactttggcaacgtatggtcgcctccgtcccctttgttaaatcaacagagccccacctcttggatacctacgccccagaaatcaccaaggcatttattacgtccagactggactcagtggccatcgtagtgcgggatcatctggacgaccccctggacgatactgccacagtgtttcagcagctggaacagctttgtacagttagcaggtgcgagtacgaaaaaacatgcgcactcctggtgcagctgttcgatcagaacgcgcaaaactatcaaaagctgctacacccctattctggagtgacggtggatataacaatccaagaaggaagactggcatggctggtttacctggtaggcacggtcgtggggggaagactgacctacacgagtacagatgaacacgacgcaatggatggcgaactgtcctgccgagtgtttcagttgatttccctgatggatacaggcctcccgcgctgctgtaacgagaagatagagctggccatcctctggtttcttgatcagtttcgtaaaacctatgttggagaccagctacagcggacatcaaagaagacctttatctacttgtag

SEQ ID NO: 329108 - DNA, 1419 bp, Artificial Sequence
  derived and/or modified sequence
atggacatccggaactacatcctgaactacgtggccagccagcccaagctggcccccttcgtcatccaggccctgatccaggtgattgccaagatcaccaagctgggctggtttgaggtgcagaaggaccagtttgtgttccgggagatcatcgcagatgtgaagaagttcctgcaggtggactacagccggcccagcgccaagcacaggaagatcgccaccagcttccgggacaccagcctgaaggatgtgctggtgctggcctgcagcctgctgaaggaggtgtttgccaagcccctgaacctgcaggaccagtgccagcagaacctggtgatgcaggtgctgaagctggtgctgaactgcctgaactttgacttcatcggcagcagcgcagatgagagcgcagatgacctgtgcaccgtgcagatccccaccacctggaggaccatcttcctggagcctgagaccctggacctcttcttcaacctgtaccacagcctgccccccctgctgagccagctggccctgagctgcctggtgcagtttgccagcacccggcgcagcctcttcaacagccctgagcgggccaagtacctgggcaacctgatcaagggcgtgaagaggatcctggagaacccccagggcctgagtgaccccggcaactaccacgagttctgccgcttcctggcccggctgaagaccaactaccagctgggggagctggtgatggtgaaggagtacccagaggtgatccgcctcatcgccaacttcaccatcaccagcctgcagcactgggagtttgcccccaacagcgtgcactacctgctgaccctgtggcagaggatggtggcctctgtgccctttgtgaagagcacagagccccacctgctggacacctacgcccctgagatcaccaaggccttcatcaccagccggctggacagcgtggccatcgtggtgcgggaccacctggatgaccccctggatgacacagccaccgtcttccagcagctggagcagctgtgcaccgtgagccgctgtgaatatgagaagacctgtgccctgctggtgcagctgtttgaccagaatgcccagaactaccagaagctgctgcacccctacagcggcgtgacagtggacatcaccatccaggagggccgcctggcctggctggtgtacctggtgggcaccgtggtgggcggccgcctgacctacaccagcacagatgaacatgatgccatggatggagagctgagctgcagggtcttccagctgatcagcctgatggacaccggcctgccccgctgctgcaatgagaagattgagctggccatcctgtggttcctggaccagttcaggaagacctacgtgggggaccagctgcagaggaccagcaagaagaccttcatctacctgtag

SEQ ID NO: 329109 - DNA, 1419 bp, Artificial Sequence
  derived and/or modified sequence
atggacatccggaactacatcctgaactacgtggccagccagcccaaattggcccctttcgtgattcaagctctgatccaggttatcgcgaaaattacaaagctgggatggtttgaggttcagaaggatcagtttgtgttccgagagattatagctgatgtgaagaaatttcttcaggtcgactacagtagaccaagcgcaaagcataggaaaatcgctacatcattccgggacacctctctcaaggacgtcctcgtacttgcatgcagcctgctgaaggaagtgtttgctaagccactcaacctgcaggaccagtgccagcagaatttagttatgcaagtgctgaagctagtgctgaactgcttgaacttcgattttatcggatcctccgcagacgagtcagccgacgatttatgcacagtgcaaattcccactacatggagaaccatattccttgagcccgagacactcgatctattttttaatctgtatcattctctccctcccctgctgtctcagctcgcactcagttgcctggtgcagttcgcgagcacccgtaggagcctctttaacagtccagaaagagcaaagtatttgggcaacctcattaagggagttaagagaatcctggagaaccctcagggattgagtgatcctgggaattaccacgagttctgcagattcttggcacgcctgaaaaccaattaccagctcggcgaacttgtcatggttaaggaataccctgaagtgatcagattaatcgctaactttaccatcacttctctacagcactgggagtttgcccctaacagcgtgcactacttattgacgctatggcaaaggatggtggcctctgtgccgttcgtgaagagtacggaaccccatttgcttgacacttatgcacccgagattactaaagcttttataacaagcagactagactcggttgcgatcgtcgttcgcgaccacctcgacgacccactggatgacaccgccaccgtcttccagcagttagagcagctctgtacagtaagccgatgtgagtatgaaaaaacatgtgccctccttgttcagcttttcgatcaaaatgcccagaactaccagaaactccttcacccatacagcggagtgactgtggatataacaatccaggagggcaggcttgcttggctggtatatctagtaggcacagtcgttggaggcagactcacctacacaagcactgatgagcatgatgctatggatggagagttatcatgccgggtgttccagctcatctccctgatggatacaggactgcctagatgttgcaacgagaagattgaactggccattctgtggttcctcgaccagttcagaaaaacctacgtgggcgaccaacttcagagaacgtccaaaaagacttttatctatctgtag

SEQ ID NO: 329110 - DNA, 1419 bp, Artificial Sequence
  derived and/or modified sequence
atggacatccgtaactacattctaaattatgtggcttcccagcctaagctagcgccatttgtgatacaagcgttaatccaggtcatagccaaaataacaaagctcggttggtttgaggtgcagaaagatcaattcgttttccgggaaatcattgctgacgtgaagaaatttctacaggtggactactcgaggccatcagccaagcacagaaagatagccactagctttcgggataccagcctgaaagacgtgctggtgcttgcttgctcgctgttgaaagaggtgtttgctaaaccattgaacctacaggatcagtgccagcagaacctagtaatgcaggtgttaaagcttgtcctgaattgtcttaactttgacttcatcggtagcagcgcagacgaaagcgccgatgatctgtgcactgtccagatcccaactacttggcgcaccattttcctggaacccgaaactctcgacctttttttcaatttgtaccacagccttcctcccctcctttcacagctcgcgttatcctgtctggtccagtttgccagcactaggcgtagtctgtttaatagccccgagcgggcaaaatatctggggaacttaattaaaggcgttaaaaggattctggaaaatccccagggcttaagcgacccaggcaattatcacgagttctgcaggttcctcgcgcgtctgaaaaccaactaccaacttggggagctggtcatggtgaaggaataccctgaagtgattaggctcatcgctaacttcacaatcacatccctgcagcattgggaatttgccccaaattcagtacattatcttcttactctatggcagaggatggtggcatcagtccccttcgtcaagtctaccgagccccaccttttagatacttacgcacccgagatcactaaggcctttatcacaagcaggctcgacagtgtggctattgtggtgcgggatcacctggatgacccgctagatgacaccgccacagtcttccagcaactagagcagttatgcaccgtgtctcgatgtgagtatgaaaagacctgtgccctgttagtccagctgtttgaccaaaatgcccagaactaccaaaaactcctacacccatactccggtgttaccgtggacatcacaatacaagaaggaaggttggcctggctagtgtatctagtgggcacagtcgtgggagggcgtctgacctatacaagtaccgatgaacacgacgccatggatggcgaactgagttgtcgagtattccagctgatttctttaatggatacaggcctgcccaggtgctgcaacgagaaaatagaactagctattctctggttcctggaccagttccggaagacctatgtgggcgatcaacttcagcgaacatcaaaaaagacatttatttacctctag

SEQ ID NO: 329111 - DNA, 1678 bp, Artificial Sequence
  derived and/or modified sequence
gccgcctcctgggaagatggcgctgcacttccagagtttggctgaattggaagtgttatgtactcatctctacatagggactgatcttacacaaagaatagaggctgagaaagcactcttggaacttattgacagtccagaatgtctcagcaagtgtcaacttttattagaacaaggaacaacatcctatgctcagctccttgcagcaacatgtctttcaaaacttgtcagccgagtcagtcctttacctgttgagcagaggatggacatcagaaactacattctgaattacgtggcatcacagcccaagctggctccctttgtcatccaagctcttattcaagtcattgctaaaatcactaagttggggtggtttgaggttcagaaagaccaatttgtcttcagagaaattattgctgatgtgaagaagtttctccaggttgattattctagaccttcagcaaaacacaggaaaatagctacctcatttcgtgatacttctctcaaagacgttttagtgctagcatgctctcttttaaaagaggtgtttgccaaacctttaaatcttcaggatcaatgtcagcaaaatctggtaatgcaggtcttgaaactggtccttaactgccttaactttgacttcattggcagttcagcagatgaatctgcagatgatctttgcacggtgcagattccaacaacttggagaacaattttcctggaaccagaaacattggatcttttcttcaatttgtatcattcacttccaccactactatctcagttagcactttcatgtttagttcagtttgcttcgacaagaaggtccttatttaacagtcctgaacgtgccaagtaccttggtaatttaattaagggagtaaaaaggatacttgaaaaccctcagggtttgtctgatccaggtaattatcatgaattttgtcgatttttggctcgtttaaagacaaattatcagctgggagaattagttatggtgaaggaatatcctgaagttattagattgattgctaattttaccattactagcctacagcactgggaatttgctcctaacagtgttcattatttattaactctgtggcaaaggatggtagcatctgttccttttgtgaaatcaactgaaccccacctattagacacttatgcaccagaaatcacgaaggcctttatcacttctcggttggactctgttgccatagttgtgagagatcacttagatgatccactggatgatactgccactgtgtttcagcagttggagcagttgtgcacggtcagcagatgtgaatatgaaaagacatgtgctcttcttgtgcagttattcgaccaaaatgcacagaattaccaaaaacttctgcatccatattctggtgtaactgtggacatcaccattcaggaaggacgtcttgcatggctggtatacttagttgggacagttgtaggaggaagattaacatataccagtacagatgagcatgatgctatggatggagaattatcctgtcgagtttttcagcttatatctttaatggataccggattgcctcgatgttgtaatgagaaaatagagcttgcaattctgtggttcttggatcagtttcgtaaaacatatgttggtgatcaacttcaaagaacctcaaagaagacgtttatttattta

SEQ ID NO: 329112 - DNA, 1419 bp, Artificial Sequence
  derived and/or modified sequence
atggacatcagaaactacatcctgaactacgtggccagccagcccaagctggcccccttcgtgatccaggccctgatccaggtgatcgccaagatcaccaagctgggctggttcgaggtgcagaaggaccagttcgtgttcagagagatcatcgccgacgtgaagaagttcctgcaggtggactacagcagacccagcgccaagcacagaaagatcgccaccagcttcagagacaccagcctgaaggacgtgctggtgctggcctgcagcctgctgaaggaggtgttcgccaagcccctgaacctgcaggaccagtgccagcagaacctggtgatgcaggtgctgaagctggtgctgaactgcctgaacttcgacttcatcggcagcagcgccgacgagagcgccgacgacctgtgcaccgtgcagatccccaccacctggagaaccatcttcctggagcccgagaccctggacctgttcttcaacctgtaccacagcctgccccccctgctgagccagctggccctgagctgcctggtgcagttcgccagcaccagaagaagcctgttcaacagccccgagagagccaagtacctgggcaacctgatcaagggcgtgaagagaatcctggagaacccccagggcctgagcgaccccggcaactaccacgagttctgcagattcctggccagactgaagaccaactaccagctgggcgagctggtgatggtgaaggagtaccccgaggtgatcagactgatcgccaacttcaccatcaccagcctgcagcactgggagttcgcccccaacagcgtgcactacctgctgaccctgtggcagagaatggtggccagcgtgcccttcgtgaagagcaccgagccccacctgctggacacctacgcccccgagatcaccaaggccttcatcaccagcagactggacagcgtggccatcgtggtgagagaccacctggacgaccccctggacgacaccgccaccgtgttccagcagctggagcagctgtgcaccgtgagcagatgcgagtacgagaagacctgcgccctgctggtgcagctgttcgaccagaacgcccagaactaccagaagctgctgcacccctacagcggcgtgaccgtggacatcaccatccaggagggcagactggcctggctggtgtacctggtgggcaccgtggtgggcggcagactgacctacaccagcaccgacgagcacgacgccatggacggcgagctgagctgcagagtgttccagctgatcagcctgatggacaccggcctgcccagatgctgcaacgagaagatcgagctggccatcctgtggttcctggaccagttcagaaagacctacgtgggcgaccagctgcagagaaccagcaagaagaccttcatctacctgtag

SEQ ID NO: 329113 - protein, 166 aa, Artificial Sequence
  derived and/or modified sequence
MRHTSKRKPQYYEAEMVLKYYKHLEEGSVSLCCPGWSAVAQSRLTAASTFGAQVILLFQLSEQLRLQELKLPTFRAHSPLLKSRRFFVDILTLLSSHCQLCPAARHLAVYLLDHFMDRYNVTTSKQLYTVAVSCLLLASRNKGSGSPVPTRSAQQCRQTWARGSPW

SEQ ID NO: 329114 - DNA, 501 bp, Artificial Sequence
  derived and/or modified sequence
atgaggcatacgtctaaaagaaaaccacaatattatgaggctgaaatggtactgaaatattacaaacacttggaggaaggcagtgtctcgctctgttgcccaggctggagtgcagtggcacaatcacggctcactgctgcctcaacctttggtgctcaagtgattcttctatttcagctttctgagcagctaagactacaggaactgaagctgcccaccttccgagcccactccccactcctgaagagccgccggttcttcgtggacatcctgaccctgctgagcagccactgccagctctgccctgcagcccggcacctggccgtctacctgctggaccacttcatggatcgctacaacgtcaccacctccaagcagctctacaccgtggccgtctcctgcctcctgcttgcaagtcggaacaaaggatcagggtccccagtgcccacacgttcagcgcagcagtgccgtcagacctgggccagaggcagcccctggtga

SEQ ID NO: 329115 - DNA, 501 bp, Artificial Sequence
  derived and/or modified sequence
atgagacacaccagcaagagaaagccccagtactacgaggccgagatggtgctgaagtactacaagcacctggaggagggcagcgtgagcctgtgctgccccggctggagcgccgtggcccagagcagactgaccgccgccagcaccttcggcgcccaggtgatcctgctgttccagctgagcgagcagctgagactgcaggagctgaagctgcccaccttcagagcccacagccccctgctgaagagcagaagattcttcgtggacatcctgaccctgctgagcagccactgccagctgtgccccgccgccagacacctggccgtgtacctgctggaccacttcatggacagatacaacgtgaccaccagcaagcagctgtacaccgtggccgtgagctgcctgctgctggccagcagaaacaagggcagcggcagccccgtgcccaccagaagcgcccagcagtgcagacagacctgggccagaggcagcccctggtag

SEQ ID NO: 329116 - DNA, 501 bp, Artificial Sequence
  derived and/or modified sequence
atgaggcatacctcaaagcgcaagccccagtattacgaggctgagatggtgctgaagtattacaagcatctggaagaaggttctgtgagcctctgctgtcctggatggagcgccgtggcccaaagcagactaactgcagcttcaaccttcggcgcccaggttatactgttatttcagctgtcggaacagctcaggcttcaggagctgaagttgcccacgtttagagctcacagtccactcctcaagtccaggcggttctttgtggatattcttactcttctttccagccactgccagttgtgcccagccgcacggcaccttgccgtctatttgcttgaccactttatggataggtacaacgtcactacctcaaagcagctttatacagtagctgtatcatgtctgttgcttgcctcacgcaataagggaagtggaagtcctgtccccacgcgctcagctcaacagtgtaggcagacctgggccaggggttctccctggtag

SEQ ID NO: 329117 - DNA, 501 bp, Artificial Sequence
  derived and/or modified sequence
atgaggcacaccagcaagaggaagccccagtactatgaggccgagatggtgctgaagtactacaagcacctggaggagggctctgtgtccctgtgctgccccggctggagcgctgtggcccagagccggctgacagctgccagcaccttcggggcccaggtgatcctgctcttccagctgtctgagcagctgcggctgcaggagctgaagctgcccaccttccgggcccacagccccctgctgaagagccgccgcttctttgtggacatcctgaccctgctgagcagccactgccagctgtgcccagctgcccggcacctggccgtgtacctgctggaccacttcatggaccgctacaacgtgaccaccagcaagcagctgtacacagtggccgtgtcctgcctgctgctggccagcaggaacaagggcagcggcagccctgtgcccaccaggtctgcccagcagtgccggcagacctgggcccggggcagcccctggtag

SEQ ID NO: 329118 - DNA, 501 bp, Artificial Sequence
  derived and/or modified sequence
atgcggcacaccagcaagcggaagccccagtactacgaggccgagatggtactgaaatactacaagcaccttgaagagggctccgtgagtctctgttgcccaggctggagcgctgtggctcagtccaggctgaccgccgccagcacattcggtgcacaagtaatactgttgtttcagttgtccgagcaactgcgcctgcaggagctgaagctcccaacctttagagctcactccccactactcaaatctagaagatttttcgtggatatacttaccctgctcagcagtcactgccagctgtgtccagctgccagacatttggctgtatatctccttgaccacttcatggacaggtacaatgttaccacatctaaacagctctatacagtggccgtgtcttgtctgttgttggcctctcgcaataaagggtctgggtcccccgtccctacaaggtccgcacagcagtgccgtcagacatgggccagaggatctccatggtag

SEQ ID NO: 329119 - DNA, 501 bp, Artificial Sequence
  derived and/or modified sequence
atgcggcacaccagcaagcggaaacctcaatactatgaagctgaaatggtattgaagtattataagcatctggaagagggctctgtgtcactttgttgcccgggttggagcgccgttgcacaaagccgactgacagctgcaagcacctttggcgctcaggtcatcctgctttttcaactgtctgagcagctgcgcctgcaggagttgaagctgcctacttttcgcgctcattcacctcttctgaagtcccggcgtttttttgtagatatcctgactctgttaagctctcactgtcagctgtgccctgccgctcgccacttggccgtatatttgcttgaccactttatggaccggtacaatgtgaccaccagcaagcaactgtatactgtggcggtgagttgcctcctgttggcctcaaggaacaagggctccggaagcccagtgcccacacggtcagctcagcagtgtagacaaacctgggctcgtggttccccctggtag

SEQ ID NO: 329120 - DNA, 186 bp, Artificial Sequence
  derived and/or modified sequence
atgggcagggcagatacgccgcgtcacccccctccccctgccgcaggctttggtgtgcatagaggtgcttttttaattcctgtggcactaagggtgctgctggctgggcgaacacctcgcccatttacccccggacttgcagacccaaggcgtttggggccacgcagggttcaggccgctcagtag

SEQ ID NO: 329121 - protein, 412 aa, Artificial Sequence
  derived and/or modified sequence
MADREGGCAAGRGRELEPELEPGPGPGSALEPGEEFEIVDRSQLPGPGDLRSATRPRAAEGWSAPILTLARRATGNLSASCGSALRAAAGLGGGDSGDGTARAASKCQMMEERANLMHMMKLSIKVLLQSALSLGRSLDADHAPLQQFFVVMEHCLKHGLKVKKSFIGQNKSFFGPLELVEKLCPEASDIATSVRNLPELKTAVGRGRAWLYLALMQKKLADYLKVLIDNKHLLSEFYEPEALMMEEEGMVIVGLLVGLNVLDANLCLKGEDLDSQVGVIDFSLYLKDVQDLDGGKEHERITDVLDQKNYVEELNRHLSCTVGDLQTKIDGLEKTNSKLQEEEERMKGQDKGGLSRGRELAASCPAVSLLDTSCLLLAGGGCSALLRLSTAFSCNRPNLLTSRRTAAVKRTK

SEQ ID NO: 329122 - DNA, 1239 bp, Artificial Sequence
  derived and/or modified sequence
atggccgacagagagggcggctgcgccgccggcagaggcagagagctggagcccgagctggagcccggccccggccccggcagcgccctggagcccggcgaggagttcgagatcgtggacagaagccagctgcccggccccggcgacctgagaagcgccaccagacccagagccgccgagggctggagcgcccccatcctgaccctggccagaagagccaccggcaacctgagcgccagctgcggcagcgccctgagagccgccgccggcctgggcggcggcgacagcggcgacggcaccgccagagccgccagcaagtgccagatgatggaggagagagccaacctgatgcacatgatgaagctgagcatcaaggtgctgctgcagagcgccctgagcctgggcagaagcctggacgccgaccacgcccccctgcagcagttcttcgtggtgatggagcactgcctgaagcacggcctgaaggtgaagaagagcttcatcggccagaacaagagcttcttcggccccctggagctggtggagaagctgtgccccgaggccagcgacatcgccaccagcgtgagaaacctgcccgagctgaagaccgccgtgggcagaggcagagcctggctgtacctggccctgatgcagaagaagctggccgactacctgaaggtgctgatcgacaacaagcacctgctgagcgagttctacgagcccgaggccctgatgatggaggaggagggcatggtgatcgtgggcctgctggtgggcctgaacgtgctggacgccaacctgtgcctgaagggcgaggacctggacagccaggtgggcgtgatcgacttcagcctgtacctgaaggacgtgcaggacctggacggcggcaaggagcacgagagaatcaccgacgtgctggaccagaagaactacgtggaggagctgaacagacacctgagctgcaccgtgggcgacctgcagaccaagatcgacggcctggagaagaccaacagcaagctgcaggaggaggaggagagaatgaagggccaggacaagggcggcctgagcagaggcagagagctggccgccagctgccccgccgtgagcctgctggacaccagctgcctgctgctggccggcggcggctgcagcgccctgctgagactgagcaccgccttcagctgcaacagacccaacctgctgaccagcagaagaaccgccgccgtgaagagaaccaagtag

SEQ ID NO: 329123 - DNA, 1239 bp, Artificial Sequence
  derived and/or modified sequence
atggccgatagggagggaggatgcgcagcgggccgcggccgagaactggaacccgaactggagcccggaccgggacctggaagcgcactggagcccggtgaggagttcgagatcgtagatcgctcccaactccccggaccaggggatctccgcagcgccaccaggccacgcgccgcggaaggctggtcagccccaatcctcactctggctagacgggctacgggcaatttatcggcgtcttgcggcagtgcccttagagctgccgccggactcggcggtggtgactccggcgacggaacagcacgtgcagcttccaagtgccagatgatggaagagcgtgcaaacctgatgcacatgatgaaattgagcatcaaggtattactgcagagtgcacttagcctcggacgttctttggatgcagaccatgctccactacaacagttctttgtggtcatggagcactgcctgaagcacgggctgaaagtcaaaaagtcttttattggtcaaaataagtcctttttcgggcctctggaactcgtggaaaagttatgccctgaagcttccgatatagccacatcagttagaaatttgcctgaactgaaaaccgcagtcggccgtgggagagcatggctctatcttgctctgatgcagaaaaagctggccgactacctgaaggtgctgatagataataagcatttgctgtccgaattctatgagccggaagcattaatgatggaggaggaggggatggtgatagtcggactcctggtaggactgaatgtgcttgatgccaacctctgcttaaagggggaggatctggattcgcaggtaggcgtaatcgatttctccctgtacctgaaggacgtccaagacctcgatggcggaaaggaacacgaaaggatcactgacgtgctagatcaaaagaactacgtggaggagctcaatcggcaccttagttgcacggtcggagacctgcagacaaagattgacggcttagagaagacgaattctaaactgcaggaagaggaggagcgtatgaaaggccaggacaaaggtggactgtcaagaggccgtgaacttgctgccagttgtcccgcagtctctctgctggacacctcatgtctgttgctcgctggcgggggatgctccgctctgctcaggctgtccaccgcattctcttgtaaccggcctaatctcttgacatctcggcgaacagccgccgtgaaacgtaccaagtag

SEQ ID NO: 329124 - DNA, 1239 bp, Artificial Sequence
  derived and/or modified sequence
atggctgaccgggagggcggctgtgccgccggccggggccgggagctggagcctgagctggagcccggccctggccctggcagcgccctggagcccggggaggagtttgagatcgtggacaggagccagctgcccggccctggggacctgcggagcgccacccggcccagggctgctgagggctggagcgcccccatcctgaccctggcccggcgggccaccggcaacctgagcgccagctgtggcagcgccctgcgggctgctgctggcctgggcggcggggacagcggagatggaacagcccgggccgccagcaagtgccagatgatggaggagcgggccaacctgatgcacatgatgaagctgagcatcaaggtgctgctgcagagcgccctgagcctgggccgcagcctggatgctgaccacgcccccctgcagcagttctttgtggtgatggagcactgcctgaagcacggcctgaaggtgaagaagagcttcatcggccagaacaagagcttcttcggccccctggagctggtggagaagctgtgcccagaggccagtgacatcgccacctctgtgaggaacctgcctgagctgaagacagctgtgggccggggccgggcctggctgtacctggccctgatgcagaagaagctggccgactacctgaaggtgctgattgacaacaagcacctgctgtctgagttctatgagcctgaggccctgatgatggaggaggagggcatggtgattgtgggcctgctggtgggcctgaatgtgctggatgccaacctgtgcctgaagggggaggacctggacagccaggtgggcgtcatcgacttcagcctgtacctgaaggatgtgcaggacctggatggcggcaaggagcacgagcgcatcacagatgtgctggaccagaagaactacgtggaggagctgaacagacacctgagctgcaccgtgggggacctgcagaccaagattgatggcctggagaagaccaacagcaagctgcaggaggaggaggagaggatgaagggccaggacaagggcggcctgagccggggccgggagctggccgccagctgcccagctgtgtccctgctggacaccagctgcctgctgctggccggcggcggctgcagcgccctgctgcggctgagcacagccttcagctgcaaccggcccaacctgctgaccagcagaagaacagctgctgtgaagaggaccaagtag

SEQ ID NO: 329125 - DNA, 1239 bp, Artificial Sequence
  derived and/or modified sequence
atggccgaccgggagggcggctgcgccgccggccggggccgggagctagaacccgaactcgagcctggacctggcccaggatctgccctggaaccaggggaagagtttgagatagtggatcggtcccagctccctgggcctggcgacctacggtcagctacgcgccccagagctgcggaaggctggagtgcccccatcctgacccttgctagacgggccaccgggaatttatcagcctcatgcggatccgctctcagagccgccgcggggctaggcggcggcgactctggggacgggacagccagagcggccagcaaatgtcagatgatggaagagagggcgaacctgatgcacatgatgaaactgagtattaaagtgttgttacagtcagctttgtcgttggggcgatcactagatgcggatcacgccccactccagcagttcttcgtcgttatggaacactgtctgaagcacggcttaaaggtcaagaagagttttataggtcagaacaaaagcttctttgggcccctggaactggtcgagaagctgtgcccagaggccagcgatattgccactagcgtgagaaacctccctgaactcaagacggcagtcggtcgggggcgcgcctggctgtatctggcactcatgcagaagaagctcgccgactatctgaaggtccttatcgacaataagcatctgttatccgagttctacgagcccgaggcactgatgatggaggaggagggcatggtgatcgttggcctgttagtcggtttgaacgtgttggatgcgaatctctgtctgaagggcgaggacttggattcccaggtgggcgtgatcgactttagcttgtacctaaaagacgtgcaagatctagacgggggcaaagagcacgagaggatcaccgacgtgcttgaccagaaaaactacgtggaagagctaaaccgacacctcagctgtacagtaggagatctccaaaccaagatagatgggttggaaaagaccaacagcaagttgcaggaagaggaggagcgaatgaaaggccaggataaggggggactttctcggggccgcgaactagcggcatcttgtccagccgtaagtctgctcgatactagctgtctcctgcttgccggcggcggatgcagcgcattgctgagattatccacagcattttcatgcaataggcccaatctcctcacttcccgacgcacagctgccgtaaaaaggaccaagtag

SEQ ID NO: 329126 - DNA, 1239 bp, Artificial Sequence
  derived and/or modified sequence
atggcagacagggaaggagggtgtgcagccggtcgcggaagggagcttgagccagagctggagcccggaccagggccaggctcagcactggagcctggcgaggagtttgaaatagtagatcgatcgcagctgccaggacctggcgatctccgcagcgccactaggccacgcgcagccgagggatggtctgcccctattctgaccctcgcgaggagggcaaccggaaatctatctgcctcttgtgggagcgcccttcgtgccgctgccggattgggcggtggagatagtggggacggcactgcccgagcggcatccaagtgccagatgatggaagagcgcgctaacttgatgcatatgatgaagcttagtatcaaggtcctgttgcaatccgccctgtccttaggcagaagcctggacgcagaccacgcgcctctgcagcagttcttcgtggtgatggagcactgtctcaagcacgggttgaaggtgaagaaatcttttatcggacaaaataaatctttctttggacccttggagctagttgaaaaattatgcccagaagcttcagacattgcaacgagtgtccgcaacctgccagaactgaagaccgcagtgggccgtggacgagcctggctctatctagctctaatgcagaaaaagctcgccgactatctcaaggtcctgatagataacaaacatctgctctctgaattttacgagccagaggccctgatgatggaggaggagggcatggtgattgtgggattgctagtgggcctcaacgtactggacgctaatctgtgcctgaaaggtgaggacttggattcccaggttggggtgatcgatttcagcttgtacctgaaggacgtccaggatctggacgggggaaaggagcatgaaaggataacagatgtccttgatcagaaaaactatgtggaggagcttaaccgccatctttcctgtaccgtaggagacctgcagaccaaaatagatggcctggaaaagactaatagcaaactgcaagaggaggaggagaggatgaaggggcaggataaggggggtctgtcaagagggagagaactggccgcttcttgtccagcggttagcctgctggacacctcatgcctgctgctggcaggaggcggatgttcggctctgttaaggcttagtaccgcattctcctgcaacaggcctaacctgctcacctcccgcaggaccgccgctgttaaacgcaccaagtag

SEQ ID NO: 329127 - protein, 592 aa, Artificial Sequence
  derived and/or modified sequence
MEGKWLLCMLLVLGTAIVEAHDGHDDDVIDIEDDLDDVIEEVEDSKPDTTAPPSSPKVTYKAPVPTGEVYFADSFDRGTLSGWILSKAKKDDTDDEIAKYDGKWEVEEMKESKLPGDKGLVLMSRAKHHAISAKLNKPFLFDTKPLIVQYEVNFQNGIECGGAYVKLLSKTPELNLDQFHDKTPYTIMFGPDKCGEDYKLHFIFRHKNPKTGIYEEKHAKRPDADLKTYFTDKKTHLYTLILNPDNSFEILVDQSVVNSGNLLNDMTPPVNPSREIEDPEDRKPEDWDERPKIPDPEAVKPDDWDEDAPAKIPDEEATKPEGWLDDEPEYVPDPDAEKPEDWDEDMDGEWEAPQIANPRCESAPGCGVWQRPVIDNPNYKGKWKPPMIDNPSYQGIWKPRKIPNPDFFEDLEPFRMTPFSAIGLELWSMTSDIFFDNFIICADRRIVDDWANDGWGLKKAADGAAEPGVVGQMIEAAEERPWLWVVYILTVALPVFLVILFCCSGKKQTSGMEYKKTDAPQPDVKEEEEEKEEEKDKGDEEEEGEEKLEEKQKSDAEEDGGTVSQEEEDRKPKAEEDEILNRSPRNRKPRRE

SEQ ID NO: 329128 - protein, 283 aa, Artificial Sequence
  derived and/or modified sequence
MLLVLGTAIVEAHDGHDDDVIDIEDDLDDVIEEVEDSKPDTTAPPSSPKVTYKAPVPTGEVYFADSFDRGTLSGWILSKAKKDDTDDEIAKYDGKWEVEEMKESKLPGDKGLVLMSRAKHHAISAKLNKPFLFDTKPLIVQYEVNFQNGIECGGAYNCFLKHQNSTWDQFHDKTPYTIMFGPDKCGEDYKLHFIFRHKNPKTGIYEEKHAKRPDADLKTYFTDKKTHLYTLILNPDNSFEILVDQSVPPVNPSREIEDPEDRKPEDWDERPKIPDPEAVKPDD

SEQ ID NO: 329129 - protein, 327 aa, Artificial Sequence
  derived and/or modified sequence
MEGKWLLCMLLVLGTAIVEAHDGHDDDVIDIEDDLDDVIEEVEEMKESKLPGDKGLVLMSRAKHHAISAKLNKPFLFDTKPLIVQYEVNFQNGIECGGAYVKLLSKTPELNLDQFHDKTPYTIMFGPDKCGEDYKLHFIFRHKNPKTGIYEEKHAKRPDADLKTYFTDKKTHLYTLILNPDNSFEILVDQSVVNSGNLLNDMTPPVNPSREIEDPEDRKPEDWDERPKIPDPEAVKPDDWDEDAPAKIPDEEATKPEGWLDDEPEYVPDPDAEKPEDWDEDMDGEWEAPQIANPRCESAPGCGVWQRPVVDIQKTSRHHHQQAPVEH

SEQ ID NO: 329130 - protein, 627 aa, Artificial Sequence
  derived and/or modified sequence
MADRRTPTPFAGCRLPRQRRARDASQVSAPGTRRIMEGKWLLCMLLVLGTAIVEAHDGHDDDVIDIEDDLDDVIEEVEDSKPDTTAPPSSPKVTYKAPVPTGEVYFADSFDRGTLSGWILSKAKKDDTDDEIAKYDGKWEVEEMKESKLPGDKGLVLMSRAKHHAISAKLNKPFLFDTKPLIVQYEVNFQNGIECGGAYVKLLSKTPELNLDQFHDKTPYTIMFGPDKCGEDYKLHFIFRHKNPKTGIYEEKHAKRPDADLKTYFTDKKTHLYTLILNPDNSFEILVDQSVVNSGNLLNDMTPPVNPSREIEDPEDRKPEDWDERPKIPDPEAVKPDDWDEDAPAKIPDEEATKPEGWLDDEPEYVPDPDAEKPEDWDEDMDGEWEAPQIANPRCESAPGCGVWQRPVIDNPNYKGKWKPPMIDNPSYQGIWKPRKIPNPDFFEDLEPFRMTPFSAIGLELWSMTSDIFFDNFIICADRRIVDDWANDGWGLKKAADGAAEPGVVGQMIEAAEERPWLWVVYILTVALPVFLVILFCCSGKKQTSGMEYKKTDAPQPDVKEEEEEKEEEKDKGDEEEEGEEKLEEKQKSDAEEDGGTVSQEEEDRKPKAEEDEILNRSPRNRKPRRE

SEQ ID NO: 329131 - protein, 134 aa, Artificial Sequence
  derived and/or modified sequence
MEGKWLLCMLLVLGTAIVEAHDGHDDDVIDIEDDLDDVIEEVEDSKPDTTAPPSSPKVTYKAPVPTGEVYFADSFDRGTLSGWILSKAKKDDTDDEIAKYDGKWEVEEMKESKLPGDKGLVLMSRAKHHAISAK

SEQ ID NO: 329132 - protein, 168 aa, Artificial Sequence
  derived and/or modified sequence
MEGKWLLCMLLVLGTAIVEAHDGHDDDVIDIEDDLDDVIEEVEDSKPDTTAPPSSPKVTYKAPVPTGEVYFADSFDRGTLSGWILSKAKKDDTDDEIAKYDGKWEVEEMKESKLPGDKGLVLMSRAKHHAISAKLNKPFLFDTKPLIVQYEVNFQNGIECGGAYVKLL

SEQ ID NO: 329133 - protein, 79 aa, Artificial Sequence
  derived and/or modified sequence
MEGKWLLCMLLVLGTAIVEAHDGHDDDVIDIEDDLDDVIEEVEDSKPDTTAPPSSPKVTYKAPVPTGEVYFADSFDRGT

SEQ ID NO: 329134 - protein, 32 aa, Artificial Sequence
  derived and/or modified sequence
MEGKWLLCMLLVLGTAIVEAHDGHDDDVIDIE

SEQ ID NO: 329135 - protein, 484 aa, Artificial Sequence
  derived and/or modified sequence
MKESKLPGDKGLVLMSRAKHHAISAKLNKPFLFDTKPLIVQYEVNFQNGIECGGAYVKLLSKTPELNLDQFHDKTPYTIMFGPDKCGEDYKLHFIFRHKNPKTGIYEEKHAKRPDADLKTYFTDKKTHLYTLILNPDNSFEILVDQSVVNSGNLLNDMTPPVNPSREIEDPEDRKPEDWDERPKIPDPEAVKPDDWDEDAPAKIPDEEATKPEGWLDDEPEYVPDPDAEKPEDWDEDMDGEWEAPQIANPRCESAPGCGVWQRPVIDNPNYKGKWKPPMIDNPSYQGIWKPRKIPNPDFFEDLEPFRMTPFSAIGLELWSMTSDIFFDNFIICADRRIVDDWANDGWGLKKAADGAAEPGVVGQMIEAAEERPWLWVVYILTVALPVFLVILFCCSGKKQTSGMEYKKTDAPQPDVKEEEEEKEEEKDKGDEEEEGEEKLEEKQKSDAEEDGGTVSQEEEDRKPKAEEDEILNRSPRNRKPRRE

SEQ ID NO: 329136 - protein, 107 aa, Artificial Sequence
  derived and/or modified sequence
MEGKWLLCMLLVLGTAIVEAHDGHDDDVIDIEDDLDDVIEEVEDSKPDTTAPPSSPKVTYKAPVPTGEVYFADSFDRGTLSGWILSKAKKDDTDDEIAKYDGKWEVE

SEQ ID NO: 329137 - protein, 144 aa, Artificial Sequence
  derived and/or modified sequence
MEGKWLLCMLLVLGTAIVEAHDGHDDDVIDIEDDLDDVIEEVEDSKPDTTAPPSSPKVTYKAPVPTGEVYFADSFDRGTLSGWILSKAKKDDTDDEIAKYDGKWEVEEMKESKLPGDKGLVLMSRAKHHAISAKLNKPFLFDTK

SEQ ID NO: 329138 - DNA, 1884 bp, Artificial Sequence
  derived and/or modified sequence
atggcagatagaaggactccaaccccattcgctggttgcaggctgccgcgccagcgcagagcccgcgacgccagccaggtttccgcccctgggaccaggcggatcatggagggcaaatggttattatgcatgttactggtgctcggcacagcaatagtggaagcgcatgatggtcacgatgatgatgtaatcgatattgaggatgaccttgacgacgtgatagaggaggtggaggactccaaaccagatacaaccgcccctccttccagtccgaaagtcacctacaaggcacccgtccctactggcgaggtgtacttcgccgactcttttgacagagggacactgtcaggctggatcctgtctaaagccaaaaaggatgataccgacgatgaaattgcgaaatatgatgggaaatgggaggtggaagagatgaaggagagcaaactgccgggcgataagggactcgtcctaatgtctcgggctaaacatcatgctatcagtgcaaagctcaataagccctttctgtttgacaccaaaccgctgatcgtacaatacgaggtgaatttccagaacggtatcgagtgcggaggtgcctacgtgaagctgctcagcaagacgcctgaattgaacctggatcagttccacgacaaaacaccttacactattatgtttggtcctgacaagtgcggcgaagattacaagctgcacttcatcttcagacataagaatcccaaaactggtatctacgaggaaaaacatgcaaaaaggccagacgccgatttgaagacctacttcacagataagaaaactcacctgtataccctgattctcaaccctgacaattccttcgagatcctcgtggaccagtccgtggttaattctggcaacctcctaaacgacatgacaccacccgtcaacccttcacgcgagatcgaggaccctgaggaccgtaaaccagaggattgggacgagcggcccaaaatcccagatcccgaggccgtaaagcccgatgactgggacgaagatgcaccggctaagatcccggatgaggaagccacaaaaccagagggctggctagacgatgaaccggagtacgttccagatcctgacgctgagaagcctgaggactgggacgaggatatggacggcgaatgggaagcaccacaaatcgccaatccacgttgtgagtccgcccctggatgtggcgtttggcagagaccagtgatagacaaccctaattacaaagggaagtggaaacctccaatgatagataatcccagttaccagggtatctggaagccacgcaaaattcccaatcccgattttttcgaggacttggagccattccggatgaccccatttagcgctattggactggaactgtggtccatgaccagtgacatttttttcgacaattttataatctgtgcagacaggagaattgtggacgattgggccaacgacggttggggcctcaagaaggctgccgacggtgccgctgagccaggagtggtcggccagatgatagaggctgcggaagagcggccttggctctgggtggtgtacatccttaccgtagcacttcccgtgtttcttgttattctcttttgttgcagcgggaagaagcagacatcgggtatggagtacaagaaaactgacgccccccaacccgacgtgaaggaggaagaggaagagaaggaagaagagaaagacaagggtgacgaggaggaggaaggggaggaaaaactggaagagaaacaaaagagcgacgcagaggaggatggcgggacagtgagccaggaagaagaggatcgcaagccgaaagcggaggaagatgaaatcttgaacaggtcacccagaaaccgaaagccccgtagagaatag

SEQ ID NO: 329139 - DNA, 99 bp, Artificial Sequence
  derived and/or modified sequence
atggaaggcaagtggctgctatgtatgctactagtcttagggaccgccatcgtggaggctcacgatggacatgacgacgatgttatagacatagagtag

SEQ ID NO: 329140 - DNA, 1884 bp, Artificial Sequence
  derived and/or modified sequence
atggctgacaggaggacccccaccccatttgctggctgccgcctgccccggcagaggcgggccagagatgccagccaggtgtctgcccctggcacccggcgcatcatggagggcaagtggctgctgtgcatgctgctggtgctgggcacagccatcgtggaggcccatgatggccatgatgatgatgtgattgatattgaagatgacctggatgatgtgattgaggaggtggaggacagcaagccagacaccacagccccacccagcagccccaaggtgacctacaaggcccctgtgcccactggagaggtgtactttgctgacagctttgaccggggcaccctgagcggctggatcctgagcaaggccaagaaggatgacacagatgatgagatcgccaagtatgatggcaagtgggaggtggaggagatgaaggagagcaagctgcccggggacaagggcctggtgctgatgagccgggccaagcaccacgccatcagcgccaagctgaacaagcccttcctgtttgacaccaagcccctcatcgtgcagtatgaggtgaacttccagaatggaattgaatgtggcggggcctacgtgaagctgctgagcaagaccccagagctgaacctggaccagttccatgacaagaccccctacaccatcatgtttggaccagacaagtgtggggaggactacaagctgcacttcatcttccgccacaagaaccccaagacaggcatctatgaggagaagcacgccaagaggccagatgctgacctgaagacctacttcacagacaagaagacccacctgtacaccctcatcctgaacccagacaacagctttgagatcctggtggaccagagcgtggtgaacagcggcaacctgctgaatgacatgaccccacctgtgaaccccagccgggagattgaggaccctgaggacaggaagccagaggactgggatgagcggcccaagatcccagaccctgaggccgtgaagccagatgactgggatgaagatgccccagccaagatcccagatgaggaggccaccaagccagagggctggctggatgatgagccagaatatgtgcctgaccctgatgctgagaagccagaggactgggatgaggacatggatggagagtgggaggccccccagatcgccaacccccgctgtgagagcgcccctggctgcggcgtgtggcagaggcctgtgattgacaaccccaactacaagggcaagtggaagccacccatgattgacaaccccagctaccagggcatctggaagcccaggaagatccccaacccagacttctttgaggacctggagcccttcaggatgacccccttcagcgccatcggcctggagctgtggagcatgaccagtgacatcttctttgacaacttcatcatctgtgccgacagaagaattgtggatgactgggccaatgatggctggggcctgaagaaggccgcagatggagctgctgagcccggggtggtgggccagatgattgaagctgctgaggagcggccctggctgtgggtggtgtacatcctgactgtggccctgcctgtgttcctggtgatcctcttctgctgcagcggcaagaagcagaccagcggcatggagtacaagaagacagatgccccccagccagatgtgaaggaggaggaggaggagaaggaggaggagaaggacaagggagatgaggaggaggagggggaggagaagctggaggagaagcagaagagtgatgctgaagaagatggcggcaccgtgtcccaggaggaggaggacaggaagcccaaggccgaggaggatgagatcctgaacagaagccccaggaacaggaagccccggcgggagtag

SEQ ID NO: 329141 - DNA, 99 bp, Artificial Sequence
  derived and/or modified sequence
atggagggcaagtggctgctgtgcatgctgctggtgctgggcacagccatcgtggaggcccatgatggccatgatgatgatgtgattgatattgaatag

SEQ ID NO: 329142 - DNA, 1884 bp, Artificial Sequence
  derived and/or modified sequence
atggccgaccggcggacccccacccccttcgccggctgccggctgcccagacaaagacgggcgcgcgacgctagccaagtaagcgcccccggcaccagaagaattatggaggggaaatggctgttgtgtatgcttctagtgctcgggaccgccatcgtggaggcgcacgatggccacgacgatgacgttatcgacatcgaagacgatttggacgatgtgattgaagaggtcgaagattcaaagcccgacaccacagcaccgccttctagcccaaaagtgacatacaaggccccagtgcccaccggcgaagtctatttcgccgattccttcgaccgtggcacactctcgggctggatcctgagcaaggcgaagaaagatgataccgacgatgagatagctaagtatgacggtaagtgggaggtggaggagatgaaagagtcaaaactgcctggtgataagggtctagtgctaatgagcagagcaaaacatcatgccatttctgcgaaactcaacaaaccatttctatttgatacaaagccactcatagttcaatacgaggtcaacttccagaacgggatcgaatgcggaggtgcctatgtcaagctgttatctaaaacacccgaactgaatctcgaccaatttcatgataagaccccatatacgattatgttcggccccgacaaatgcggcgaagactacaagctgcactttatattccgacacaaaaacccaaagactggcatttacgaggaaaagcatgcaaagcgcccagatgccgatctaaaaacttactttacagataaaaagactcacttatacactctgatacttaacccagataactccttcgaaatcctagtggatcagtcggtggtgaactcaggaaatctgctgaacgacatgaccccgccagtaaacccaagcagagaaatagaggatcccgaagaccggaagccagaagattgggacgagaggcccaaaattccagaccctgaggctgtgaagccggacgattgggacgaagatgcccccgcgaagataccagacgaagaggccactaagcccgagggatggctggatgacgaaccagaatatgtgccagacccagacgctgagaagcccgaggattgggatgaggatatggacggcgagtgggaagccccgcaaatcgccaacccacggtgcgagagtgctcctggctgcggagtgtggcagagacctgtaatcgacaatcccaattacaaagggaagtggaagcctccgatgattgacaacccctcatatcagggaatctggaaaccacgcaagattcccaaccccgacttctttgaagatctcgaaccgtttcgtatgaccccattcagtgcaatcggtcttgagctatggtcaatgacatctgatattttcttcgataatttcataatttgcgctgaccggcgaatcgtggacgattgggcgaacgacggttggggactgaagaaggcagcggatggcgccgccgagccaggtgtggttggtcaaatgattgaagccgcggaagaacggccatggctttgggtggtgtatatactgaccgtggccctgcccgtcttcttagtaatcttgttctgctgtagtggtaaaaagcagaccagcgggatggagtataagaagacagacgcaccgcaacccgacgtaaaggaggaggaggaagagaaggaggaagaaaaagacaagggagatgaagaagaggagggtgaagaaaaactcgaggaaaaacagaagtctgatgcggaggaggatggggggaccgtgtcacaggaagaggaagaccgcaagccaaaagccgaggaagatgaaatattgaaccgttccccacggaaccgaaagcctagacgggagtag

SEQ ID NO: 329143 - DNA, 99 bp, Artificial Sequence
  derived and/or modified sequence
atggagggcaagtggctgctgtgcatgctgctggtgctgggcaccgcaatcgtcgaagcacacgacggtcatgacgatgatgtcatagatattgaatag

SEQ ID NO: 329144 - DNA, 1884 bp, Artificial Sequence
  derived and/or modified sequence
atggcggacaggaggacacccacacccttcgccggatgccgtctgccacggcagagacgcgcaagggatgcaagccaagtttcagctcctggtaccaggagaatcatggaaggcaagtggctcctgtgtatgctgctcgtgttgggaacagccatagttgaagcccatgacggccatgacgacgatgtgatagacatcgaggatgacctggatgacgtcattgaggaggtagaagacagcaagcccgacactaccgctccacctagcagcccaaaagtgacctacaaggcgccagtgcccacaggcgaggtgtatttcgcagattcctttgaccgagggactctgtccgggtggatactatcaaaggccaaaaaggatgacaccgacgatgaaatagctaagtatgatgggaagtgggaagtggaggagatgaaagagtccaaactgccaggcgataagggactcgtgttgatgtctcgggcaaagcaccatgccatcagcgcaaaactgaacaagcctttcctttttgacactaagccactgattgtacagtacgaagttaacttccagaatggcatcgagtgcggcggagcctacgtcaagctgctgagtaaaacacctgaactaaaccttgatcaattccatgacaagaccccctacacaattatgttcgggcctgataaatgtggggaggactataagttgcacttcattttccgtcacaagaaccccaaaacgggaatatatgaggagaagcacgcaaaacggccagatgccgacctgaaaacatattttaccgacaaaaagacacacctttacacccttatcctaaatccagacaatagctttgaaatccttgtagaccaatccgttgtaaattctggcaacttgttgaatgatatgacacctccggtgaatccctctcgtgaaatcgaggacccagaggaccgcaaaccagaggactgggacgaacgtcccaagatcccggatcctgaggccgtgaagcccgacgactgggacgaggacgcgcctgcgaagattccagatgaagaggcaaccaagcccgaggggtggctggacgatgaacccgagtatgtgcccgaccctgatgctgagaagcccgaggactgggacgaggacatggacggtgaatgggaggctccccagattgccaacccacgctgcgagtccgccccaggctgtggcgtgtggcagcgcccagtgatcgacaatccaaactacaaggggaaatggaagcctcccatgatcgacaatcccagctaccagggcatctggaagcccaggaagattcccaacccagactttttcgaggacctggaaccctttcgtatgacacccttctctgctatcgggctggaactgtggagcatgacaagcgacattttctttgataattttatcatctgcgccgatcgcagaattgtcgacgattgggccaacgacggttgggggctcaaaaaggcagcagatggggcagctgaaccgggagtggtgggccagatgattgaggctgccgaggaacgcccatggctttgggttgtgtatatcctcaccgttgcactgcccgtcttccttgtgatactattttgttgctccgggaaaaagcagactagcgggatggaatacaagaaaacagatgcaccacaaccagacgtaaaggaagaagaagaggagaaagaagaagagaaggataagggagatgaggaggaagaaggagaggagaagttggaggagaagcagaaaagcgatgctgaagaggacggaggtacagtttcccaggaggaggaggacagaaagcccaaggccgaagaggatgaaattctgaatcggtcaccacgaaatcgaaaacctcgtcgggagtag

SEQ ID NO: 329145 - DNA, 99 bp, Artificial Sequence
  derived and/or modified sequence
atggaggggaagtggctgctgtgtatgctgttggtgttgggcacggccattgtggaggcccacgacggacacgatgacgatgtgatagacatagaatag

SEQ ID NO: 329146 - DNA, 4260 bp, Artificial Sequence
  derived and/or modified sequence
actcaggggccaggggcgggcacagggccgggcttcgtgcggtggggctcgctcgcgcggcagcggtggccgaggcctcttggttctgcggcacgtgacggtcgggccgcctccgcctctctctttactgcggcgcggggcaaggtgtgcgggcgggaaggggcacgggcacccccgcggtccccgggaggctagagatcatggaagggaagtggttgctgtgtatgttactggtgcttggaactgctattgttgaggctcatgatggacatgatgatgatgtgattgatattgaggatgaccttgacgatgtcattgaagaggtagaagactcaaaaccagataccactgctcctccttcatctcccaaggttacttacaaagctccagttccaacaggggaagtatattttgctgattcttttgacagaggaactctgtcagggtggattttatccaaagccaagaaagacgataccgatgatgaaattgccaaatatgatggaaagtgggaggtagaggaaatgaaggagtcaaagcttccaggtgataaaggacttgtgttgatgtctcgggccaagcatcatgccatctctgctaaactgaacaagcccttcctgtttgacaccaagcctctcattgttcagtatgaggttaatttccaaaatggaatagaatgtggtggtgcctatgtgaaactgctttctaaaacaccagaactcaacctggatcagttccatgacaagaccccttatacgattatgtttggtccagataaatgtggagaggactataaactgcacttcatcttccgacacaaaaaccccaaaacgggtatctatgaagaaaaacatgctaagaggccagatgcagatctgaagacctattttactgataagaaaacacatctttacacactaatcttgaatccagataatagttttgaaatactggttgaccaatctgtggtgaatagtggaaatctgctcaatgacatgactcctcctgtaaatccttcacgtgaaattgaggacccagaagaccggaagcccgaggattgggatgaaagaccaaaaatcccagatccagaagctgtcaagccagatgactgggatgaagatgcccctgctaagattccagatgaagaggccacaaaacccgaaggctggttagatgatgagcctgagtacgtacctgatccagacgcagagaaacctgaggattgggatgaagacatggatggagaatgggaggctcctcagattgccaaccctagatgtgagtcagctcctggatgtggtgtctggcagcgacctgtgattgacaaccccaattataaaggcaaatggaagcctcctatgattgacaatcccagttaccagggaatctggaaacccaggaaaataccaaatccagatttctttgaagatctggaacctttcagaatgactccttttagtgctattggtttggagctgtggtccatgacctctgacattttttttgacaactttatcatttgtgctgatcgaagaatagttgatgattgggccaatgatggatggggcctgaagaaagctgctgatggggctgctgagccaggcgttgtggggcagatgatcgaggcagctgaagagcgcccgtggctgtgggtagtctatattctaactgtagcccttcctgtgttcctggttatcctcttctgctgttctggaaagaaacagaccagtggtatggagtataagaaaactgatgcacctcaaccggatgtgaaggaagaggaagaagagaaggaagaggaaaaggacaagggagatgaggaggaggaaggagaagagaaacttgaagagaaacagaaaagtgatgctgaagaagatggtggcactgtcagtcaagaggaggaagacagaaaacctaaagcagaggaggatgaaattttgaacagatcaccaagaaacagaaagccacgaagagagtgaaacaatcttaagagcttgatctgtgatttcttctccctcctcccctgcaagagtggtcctaggagaggacctggcacaccttaggttgacattcagaaaacttcaagacatcaccatcagcaggctccagttgaacactagtctgtgtaactttaaacatctagcagtaaatacttgcagttgtgatataaaggaccctgtttctgtagaaaagaaaacatttaacataatggttgtgaaatgtaacatgaagcaaactaacttttttttttttaacatctttgtttttaaaatagaatgatagaactttgccagtctttaagatcttggcttaatttaatgtattaatctgtttgtgcaaacataataccaccatttaaaaatgttagggagatgagttgcagtttttataatagattttttttaaagtttggtattgtaaaacattcacacctctgtccctcaaaattgataattacgtttaaagtgcagtcatttgtggttagaatcttgttttgtttgcttccattattgagttcctcctaaggaaattgaggagagggactgaatagaagcccaaattcatataaaagttgcgtttaagttgtattaaaaatagatatataagaaaaaattctttcacttgatgtttgttagaccagaaagtgtgtgtgttctgtagctcagttcccagacagctttttaggtagtggaggaggtggcttcatgtggcacttgggcatttatattccacttgggagggtcaggctgtggccttctggagcaggtggcttgttaaggaatgctagcagggcatggcacgtgagctccggaatagatgtcttcatcacttcttccactgtgtgttgacactgttttccttacctatttcctcagatccccagctttctcctctgctatgcattttcttcacagtgcagcttgcagtccgttgctgaaaatgattataagccctgcataatgttaagctttattgtgattacgtgtatgtttcttctttcttttaagcagacccatacctttccagggtcaaagtacagaatagaatacattgatacaaagtacagaaaaatactttgatttttatccatttcttttactctgtgtaaagacttgagaagtctaattcacaggcaaaccaatacagaattgactgcagttgaacagactagaagtatttgtgggaggagtgacatgaagcatgagttatctgattttttttgtagctgctatatattttaagccttcatttgcaattcatgtaacagttgtgtcataaattacacaataaagcagtcctgttcaaatttttttttaacgtggcttgtagaatttttaaaaaagtgatcttaggtttgttttttcatgcgggatgcagatgggtgctatcagagcctctcccacaccactatagtgtaataatgttattattactctacactgaaacgtattcagagttagatattattttagcttcagttgttctttagaggctttcaaatgtaccgatgatactgtttcttgcactgaatatataaacactccacagtgtttatattgggaagatattgggaaggaaatatatttgtaaaagatgaaggctgtatctatttttttttctttttaaagtttgttcacttaaattcttttgaggatgggatgtatttttcttgctgttcagtgctttttccttttcatctgttgttctgtggtcacagtgaccttagctacatagcagactttcccaaatgtattgattacaaataaacagttgttacttagcaagacctgaaaatatgtctgcaggtttctccttgaagcaaatgtgtgggatcattgcatttccagaaatctgcctccttcaccctccgttgacagtatatgtcatgcctcactttcttctagctgagctttaaatcattagagcttaaattgtcagatcgttcattgcctttccagggttatttagtaaagtttgttgaaaacaaaaacgccttttcttggttcttttttcagttattttgaaggtccagcatcctgattaaatgtctgacacattaatgaatgaccagcagcagctttcagctcttaaaaagacacttatattttgattttacatgctggttacctgttccattgttgtcaaatgcccactctccatcagatgtgttcctccattttcttatccacaaagtactcctcacttttcaatttgtcatgttactaaatggtgttacattaaagccctgtgttaagtgtc

SEQ ID NO: 329147 - DNA, 984 bp, Artificial Sequence
  derived and/or modified sequence
ggcacgtgacggtcgggccgcctccgcctctctctttactgcggcgcggggcaaggtgtgcgggcgggaaggggcacgggcacccccgcggtccccgggaggctagagatcatggaagggaagtggttgctgtgtatgttactggtgcttggaactgctattgttgaggctcatgatggacatgatgatgatgtgattgatattgaggatgaccttgacgatgtcattgaagaggtagaagactcaaaaccagataccactgctcctccttcatctcccaaggttacttacaaagctccagttccaacaggggaagtatattttgctgattcttttgacagaggaactctgtcagggtggattttatccaaagccaagaaagacgataccgatgatgaaattgccaaatatgatggaaagtgggaggtagaggaaatgaaggagtcaaagcttccaggtgataaaggacttgtgttgatgtctcgggccaagcatcatgccatctctgctaaactgaacaagcccttcctgtttgacaccaagcctctcattgttcagtatgaggttaatttccaaaatggaatagaatgtggtggtgcctataactgctttctaaaacaccagaactcaacctgggatcagttccatgacaagaccccttatacgattatgtttggtccagataaatgtggagaggactataaactgcacttcatcttccgacacaaaaaccccaaaacgggtatctatgaagaaaaacatgctaagaggccagatgcagatctgaagacctattttactgataagaaaacacatctttacacactaatcttgaatccagataatagttttgaaatactggttgaccaatctgtgcctcctgtaaatccttcacgtgaaattgaggacccagaagaccggaagcccgaggattgggatgaaagaccaaaaatcccagatccagaagctgtcaagccagatgac

SEQ ID NO: 329148 - DNA, 2222 bp, Artificial Sequence
  derived and/or modified sequence
aatccggccaggcgctcgcgctgggttctgctcacgcccgtaggggcccgcgttcgctgcaacgggcccttcctgatggccgatcgtcggactcctaccccttttgccggctgccgtttgccccgtcagcgaagggcgcgcgatgcgtcccaagtctcggctccaggaaccagacggatcatggaagggaagtggttgctgtgtatgttactggtgcttggaactgctattgttgaggctcatgatggacatgatgatgatgtgattgatattgaggatgaccttgacgatgtcattgaagaggtagaagactcaaaaccagataccactgctcctccttcatctcccaaggttacttacaaagctccagttccaacaggggaagtatattttgctgattcttttgacagaggaactctgtcagggtggattttatccaaagccaagaaagacgataccgatgatgaaattgccaaatatgatggaaagtgggaggtagaggaaatgaaggagtcaaagcttccaggtgataaaggacttgtgttgatgtctcgggccaagcatcatgccatctctgctaaactgaacaagcccttcctgtttgacaccaagcctctcattgttcagtatgaggttaatttccaaaatggaatagaatgtggtggtgcctatgtgaaactgctttctaaaacaccagaactcaacctggatcagttccatgacaagaccccttatacgattatgtttggtccagataaatgtggagaggactataaactgcacttcatcttccgacacaaaaaccccaaaacgggtatctatgaagaaaaacatgctaagaggccagatgcagatctgaagacctattttactgataagaaaacacatctttacacactaatcttgaatccagataatagttttgaaatactggttgaccaatctgtggtgaatagtggaaatctgctcaatgacatgactcctcctgtaaatccttcacgtgaaattgaggacccagaagaccggaagcccgaggattgggatgaaagaccaaaaatcccagatccagaagctgtcaagccagatgactgggatgaagatgcccctgctaagattccagatgaagaggccacaaaacccgaaggctggttagatgatgagcctgagtacgtacctgatccagacgcagagaaacctgaggattgggatgaagacatggatggagaatgggaggctcctcagattgccaaccctagatgtgagtcagctcctggatgtggtgtctggcagcgacctgtgattgacaaccccaattataaaggcaaatggaagcctcctatgattgacaatcccagttaccagggaatctggaaacccaggaaaataccaaatccagatttctttgaagatctggaacctttcagaatgactccttttagtgctattggtttggagctgtggtccatgacctctgacattttttttgacaactttatcatttgtgctgatcgaagaatagttgatgattgggccaatgatggatggggcctgaagaaagctgctgatggggctgctgagccaggcgttgtggggcagatgatcgaggcagctgaagagcgcccgtggctgtgggtagtctatattctaactgtagcccttcctgtgttcctggttatcctcttctgctgttctggaaagaaacagaccagtggtatggagtataagaaaactgatgcacctcaaccggatgtgaaggaagaggaagaagagaaggaagaggaaaaggacaagggagatgaggaggaggaaggagaagagaaacttgaagagaaacagaaaagtgatgctgaagaagatggtggcactgtcagtcaagaggaggaagacagaaaacctaaagcagaggaggatgaaattttgaacagatcaccaagaaacagaaagccacgaagagagtgaaacaatcttaagagcttgatctgtgatttcttctccctcctcccctgcaagagtggtcctaggagaggacctggcacaccttaggttgacattcagaaaacttcaagacatcaccatcagcaggctccagttgaacactagtctgtgtaactttaaacatctagcagtaaatacttgcagttgtgatataaaggaccctgtttctgtagaaaagaaaacatttaacataatggttgtgaaatgtaacatgaagcaaactaact

SEQ ID NO: 329149 - DNA, 4207 bp, Artificial Sequence
  derived and/or modified sequence
actcaggggccaggggcgggcacagggccgggcttcgtgcggtggggctcgctcgcgcggcagcggtggccgaggcctcttggttctgcggcacgtgacggtcgggccgcctccgcctctctctttactgcggcgcggggcaagatcatggaagggaagtggttgctgtgtatgttactggtgcttggaactgctattgttgaggctcatgatggacatgatgatgatgtgattgatattgaggatgaccttgacgatgtcattgaagaggtagaagactcaaaaccagataccactgctcctccttcatctcccaaggttacttacaaagctccagttccaacaggggaagtatattttgctgattcttttgacagaggaactctgtcagggtggattttatccaaagccaagaaagacgataccgatgatgaaattgccaaatatgatggaaagtgggaggtagaggaaatgaaggagtcaaagcttccaggtgataaaggacttgtgttgatgtctcgggccaagcatcatgccatctctgctaaactgaacaagcccttcctgtttgacaccaagcctctcattgttcagtatgaggttaatttccaaaatggaatagaatgtggtggtgcctatgtgaaactgctttctaaaacaccagaactcaacctggatcagttccatgacaagaccccttatacgattatgtttggtccagataaatgtggagaggactataaactgcacttcatcttccgacacaaaaaccccaaaacgggtatctatgaagaaaaacatgctaagaggccagatgcagatctgaagacctattttactgataagaaaacacatctttacacactaatcttgaatccagataatagttttgaaatactggttgaccaatctgtggtgaatagtggaaatctgctcaatgacatgactcctcctgtaaatccttcacgtgaaattgaggacccagaagaccggaagcccgaggattgggatgaaagaccaaaaatcccagatccagaagctgtcaagccagatgactgggatgaagatgcccctgctaagattccagatgaagaggccacaaaacccgaaggctggttagatgatgagcctgagtacgtacctgatccagacgcagagaaacctgaggattgggatgaagacatggatggagaatgggaggctcctcagattgccaaccctagatgtgagtcagctcctggatgtggtgtctggcagcgacctgtgattgacaaccccaattataaaggcaaatggaagcctcctatgattgacaatcccagttaccagggaatctggaaacccaggaaaataccaaatccagatttctttgaagatctggaacctttcagaatgactccttttagtgctattggtttggagctgtggtccatgacctctgacattttttttgacaactttatcatttgtgctgatcgaagaatagttgatgattgggccaatgatggatggggcctgaagaaagctgctgatggggctgctgagccaggcgttgtggggcagatgatcgaggcagctgaagagcgcccgtggctgtgggtagtctatattctaactgtagcccttcctgtgttcctggttatcctcttctgctgttctggaaagaaacagaccagtggtatggagtataagaaaactgatgcacctcaaccggatgtgaaggaagaggaagaagagaaggaagaggaaaaggacaagggagatgaggaggaggaaggagaagagaaacttgaagagaaacagaaaagtgatgctgaagaagatggtggcactgtcagtcaagaggaggaagacagaaaacctaaagcagaggaggatgaaattttgaacagatcaccaagaaacagaaagccacgaagagagtgaaacaatcttaagagcttgatctgtgatttcttctccctcctcccctgcaagagtggtcctaggagaggacctggcacaccttaggttgacattcagaaaacttcaagacatcaccatcagcaggctccagttgaacactagtctgtgtaactttaaacatctagcagtaaatacttgcagttgtgatataaaggaccctgtttctgtagaaaagaaaacatttaacataatggttgtgaaatgtaacatgaagcaaactaacttttttttttttaacatctttgtttttaaaatagaatgatagaactttgccagtctttaagatcttggcttaatttaatgtattaatctgtttgtgcaaacataataccaccatttaaaaatgttagggagatgagttgcagtttttataatagattttttttaaagtttggtattgtaaaacattcacacctctgtccctcaaaattgataattacgtttaaagtgcagtcatttgtggttagaatcttgttttgtttgcttccattattgagttcctcctaaggaaattgaggagagggactgaatagaagcccaaattcatataaaagttgcgtttaagttgtattaaaaatagatatataagaaaaaattctttcacttgatgtttgttagaccagaaagtgtgtgtgttctgtagctcagttcccagacagctttttaggtagtggaggaggtggcttcatgtggcacttgggcatttatattccacttgggagggtcaggctgtggccttctggagcaggtggcttgttaaggaatgctagcagggcatggcacgtgagctccggaatagatgtcttcatcacttcttccactgtgtgttgacactgttttccttacctatttcctcagatccccagctttctcctctgctatgcattttcttcacagtgcagcttgcagtccgttgctgaaaatgattataagccctgcataatgttaagctttattgtgattacgtgtatgtttcttctttcttttaagcagacccatacctttccagggtcaaagtacagaatagaatacattgatacaaagtacagaaaaatactttgatttttatccatttcttttactctgtgtaaagacttgagaagtctaattcacaggcaaaccaatacagaattgactgcagttgaacagactagaagtatttgtgggaggagtgacatgaagcatgagttatctgattttttttgtagctgctatatattttaagccttcatttgcaattcatgtaacagttgtgtcataaattacacaataaagcagtcctgttcaaatttttttttaacgtggcttgtagaatttttaaaaaagtgatcttaggtttgttttttcatgcgggatgcagatgggtgctatcagagcctctcccacaccactatagtgtaataatgttattattactctacactgaaacgtattcagagttagatattattttagcttcagttgttctttagaggctttcaaatgtaccgatgatactgtttcttgcactgaatatataaacactccacagtgtttatattgggaagatattgggaaggaaatatatttgtaaaagatgaaggctgtatctatttttttttctttttaaagtttgttcacttaaattcttttgaggatgggatgtatttttcttgctgttcagtgctttttccttttcatctgttgttctgtggtcacagtgaccttagctacatagcagactttcccaaatgtattgattacaaataaacagttgttacttagcaagacctgaaaatatgtctgcaggtttctccttgaagcaaatgtgtgggatcattgcatttccagaaatctgcctccttcaccctccgttgacagtatatgtcatgcctcactttcttctagctgagctttaaatcattagagcttaaattgtcagatcgttcattgcctttccagggttatttagtaaagtttgttgaaaacaaaaacgccttttcttggttcttttttcagttattttgaaggtccagcatcctgattaaatgtctgacacattaatgaatgaccagcagcagctttcagctcttaaaaagacacttatattttgattttacatgctggttacctgttccattgttgtcaaatgcccactctccatcagatgtgttcctccattttcttatccacaaagtactcctcacttttcaatttgtcatgttactaaatggtgttacattaaagccctgtgttaagtgtc

SEQ ID NO: 329150 - DNA, 825 bp, Artificial Sequence
  derived and/or modified sequence
cagcgcggagcagtgcacgccaatccggccaggcgctcgcgctgggttctgctcacgcccgtaggggcccgcgttcgctgcaacgggcccttcctgatggccgatcgtcggactcctaccccttttgccggctgccgtttgccccgtcagcgaagggcgcgcgatgcgtcccaagtctcggctccaggaaccagacgggtgagggctactgggggttgggttggaacgccccgaaggcaccacagcaaccgacgcgggaacgcctgttaaaccagccccgccccgagacgcgcgcgcccggcggtctcgatccagcgtggcccgcccctcacctcccgcccaaccaacagccacttcctgcctcactcccggccaatcttcacactccacgaagaatagccgtagggggcgtatgggacgatcatggaagggaagtggttgctgtgtatgttactggtgcttggaactgctattgttgaggctcatgatggacatgatgatgatgtgattgatattgaggatgaccttgacgatgtcattgaagaggtagaagactcaaaaccagataccactgctcctccttcatctcccaaggttacttacaaagctccagttccaacaggggaagtatattttgctgattcttttgacagaggaactctgtcagggtggattttatccaaagccaagaaagacgataccgatgatgaaattgccaaatatgatggaaagtgggaggtagaggaaatgaaggagtcaaagcttccaggtgataaaggacttgtgttgatgtctcgggccaagcatcatgccatctctgctaaa

SEQ ID NO: 329151 - DNA, 570 bp, Artificial Sequence
  derived and/or modified sequence
gcggtggggctcgctcgcgcggcagcggtggccgaggcctcttggttctgcggcacgtgacgatcatggaagggaagtggttgctgtgtatgttactggtgcttggaactgctattgttgaggctcatgatggacatgatgatgatgtgattgatattgaggatgaccttgacgatgtcattgaagaggtagaagactcaaaaccagataccactgctcctccttcatctcccaaggttacttacaaagctccagttccaacaggggaagtatattttgctgattcttttgacagaggaactctgtcagggtggattttatccaaagccaagaaagacgataccgatgatgaaattgccaaatatgatggaaagtgggaggtagaggaaatgaaggagtcaaagcttccaggtgataaaggacttgtgttgatgtctcgggccaagcatcatgccatctctgctaaactgaacaagcccttcctgtttgacaccaagcctctcattgttcagtatgaggttaatttccaaaatggaatagaatgtggtggtgcctatgtgaaactgcttt

SEQ ID NO: 329152 - DNA, 2232 bp, Artificial Sequence
  derived and/or modified sequence
agtgcacgccaatccggccaggcgctcgcgctgggttctgctcacgcccgtaggggcccgcgttcgctgcaacgggcccttcctgatggccgatcgtcggactcctaccccttttgccggctgccgtttgccccgtcagcgaagggcgcgcgatgcgtcccaagtctcggctccaggaaccagacggatcatggaagggaagtggttgctgtgtatgttactggtgcttggaactgctattgttgaggctcatgatggacatgatgatgatgtgattgatattgaggatgaccttgacgatgtcattgaagaggtagaagactcaaaaccagataccactgctcctccttcatctcccaaggttacttacaaagctccagttccaacaggggaagtatattttgctgattcttttgacagaggaactctgtcagggtggattttatccaaagccaagaaagacgataccgatgatgaaattgccaaatatgatggaaagtgggaggtagaggaaatgaaggagtcaaagcttccaggtgataaaggacttgtgttgatgtctcgggccaagcatcatgccatctctgctaaactgaacaagcccttcctgtttgacaccaagcctctcattgttcagtatgaggttaatttccaaaatggaatagaatgtggtggtgcctatgtgaaactgctttctaaaacaccagaactcaacctggatcagttccatgacaagaccccttatacgattatgtttggtccagataaatgtggagaggactataaactgcacttcatcttccgacacaaaaaccccaaaacgggtatctatgaagaaaaacatgctaagaggccagatgcagatctgaagacctattttactgataagaaaacacatctttacacactaatcttgaatccagataatagttttgaaatactggttgaccaatctgtggtgaatagtggaaatctgctcaatgacatgactcctcctgtaaatccttcacgtgaaattgaggacccagaagaccggaagcccgaggattgggatgaaagaccaaaaatcccagatccagaagctgtcaagccagatgactgggatgaagatgcccctgctaagattccagatgaagaggccacaaaacccgaaggctggttagatgatgagcctgagtacgtacctgatccagacgcagagaaacctgaggattgggatgaagacatggatggagaatgggaggctcctcagattgccaaccctagatgtgagtcagctcctggatgtggtgtctggcagcgacctgtgattgacaaccccaattataaaggcaaatggaagcctcctatgattgacaatcccagttaccagggaatctggaaacccaggaaaataccaaatccagatttctttgaagatctggaacctttcagaatgactccttttagtgctattggtttggagctgtggtccatgacctctgacattttttttgacaactttatcatttgtgctgatcgaagaatagttgatgattgggccaatgatggatggggcctgaagaaagctgctgatggggctgctgagccaggcgttgtggggcagatgatcgaggcagctgaagagcgcccgtggctgtgggtagtctatattctaactgtagcccttcctgtgttcctggttatcctcttctgctgttctggaaagaaacagaccagtggtatggagtataagaaaactgatgcacctcaaccggatgtgaaggaagaggaagaagagaaggaagaggaaaaggacaagggagatgaggaggaggaaggagaagagaaacttgaagagaaacagaaaagtgatgctgaagaagatggtggcactgtcagtcaagaggaggaagacagaaaacctaaagcagaggaggatgaaattttgaacagatcaccaagaaacagaaagccacgaagagagtgaaacaatcttaagagcttgatctgtgatttcttctccctcctcccctgcaagagtggtcctaggagaggacctggcacaccttaggttgacattcagaaaacttcaagacatcaccatcagcaggctccagttgaacactagtctgtgtaactttaaacatctagcagtaaatacttgcagttgtgatataaaggaccctgtttctgtagaaaagaaaacatttaacataatggttgtgaaatgtaacatgaagcaaactaact

SEQ ID NO: 329153 - DNA, 582 bp, Artificial Sequence
  derived and/or modified sequence
gctcgcgcggcagcggtggccgaggcctcttggttctgcggcacgtgacggtcgggccgcctccgcctctctctttactgcggcgcggggcaaggtgtgcgggcgggaaggggcacgggcacccccgcggtccccgggaggctagagcggagactggaccctagttccctgaagagaaaggggaatgtaccagaaggagaacacgcagtggttgagaaacttagcagttacagcacctattctggaggcgagtaatccagttggagagggacagggcgttaaaagcaggaaagcccccgaaagctcatctaagtgcatctctttccacaccggaggcctggagatcatggaagggaagtggttgctgtgtatgttactggtgcttggaactgctattgttgaggctcatgatggacatgatgatgatgtgattgatattgaggatgaccttgacgatgtcattgaagaggtagaagactcaaaaccagataccactgctcctccttcatctcccaaggttacttacaaagctccagttccaacaggggaagtatattttgctgattcttttgacagaggaac

SEQ ID NO: 329154 - DNA, 727 bp, Artificial Sequence
  derived and/or modified sequence
gaggcctcttggttctgcggcacgtgacggtcgggccgcctccgcctctctctttactgcggcgcggggcaaggtgtgcgggcgggaaggggcacgggcacccccgcggtccccgggaggctagagatctgtggtcctccgtggaaagagagccactaccccaagacacatctaatataatacacagggcgcttacgtggttagaaaagaagagataagccgggtgcggtggctcactcctgtaatcccagcactttggaaggccgaggcgggcagatcacgacgtcaagagattgagactatcctggccaacacggtgaaaccctgtctctattaaaaataacaaaaattagctggatgtggtggtgcacacctgtcatcccacctacttgggaggctgagatcatggaagggaagtggttgctgtgtatgttactggtgcttggaactgctattgttgaggctcatgatggacatgatgatgatgtgattgatattgaggatgaccttgacgatgtcattgaagaggtagaagactcaaaaccagataccactgctcctccttcatctcccaaggttacttacaaagctccagttccaacaggggaagtatattttgctgattcttttgacagaggaactctgtcagggtggattttatccaaagccaagaaagacgataccgatgatgaaattgccaaatatgatggaaagtgggaggtagagg

SEQ ID NO: 329155 - DNA, 585 bp, Artificial Sequence
  derived and/or modified sequence
gctggcgcctgcgcgcttgcgcatcttcctctgcccggcgcgcgccgcagccgtcgggatcacctcggggttgcgctgcttctccagcaagtgcatgcgcgccatggtctcagtcagcatgtctatgagcagttcctgctgcagcttcagatcatggaagggaagtggttgctgtgtatgttactggtgcttggaactgctattgttgaggctcatgatggacatgatgatgatgtgattgatattgaggatgaccttgacgatgtcattgaagaggtagaagactcaaaaccagataccactgctcctccttcatctcccaaggttacttacaaagctccagttccaacaggggaagtatattttgctgattcttttgacagaggaactctgtcagggtggattttatccaaagccaagaaagacgataccgatgatgaaattgccaaatatgatggaaagtgggaggtagaggaaatgaaggagtcaaagcttccaggtgataaaggacttgtgttgatgtctcgggccaagcatcatgccatctctgctaaactgaacaagcccttcctgtttgacaccaag

SEQ ID NO: 329156 - DNA, 1884 bp, Artificial Sequence
  derived and/or modified sequence
atggccgacagaagaacccccacccccttcgccggctgcagactgcccagacagagaagagccagagacgccagccaggtgagcgcccccggcaccagaagaatcatggagggcaagtggctgctgtgcatgctgctggtgctgggcaccgccatcgtggaggcccacgacggccacgacgacgacgtgatcgacatcgaggacgacctggacgacgtgatcgaggaggtggaggacagcaagcccgacaccaccgccccccccagcagccccaaggtgacctacaaggcccccgtgcccaccggcgaggtgtacttcgccgacagcttcgacagaggcaccctgagcggctggatcctgagcaaggccaagaaggacgacaccgacgacgagatcgccaagtacgacggcaagtgggaggtggaggagatgaaggagagcaagctgcccggcgacaagggcctggtgctgatgagcagagccaagcaccacgccatcagcgccaagctgaacaagcccttcctgttcgacaccaagcccctgatcgtgcagtacgaggtgaacttccagaacggcatcgagtgcggcggcgcctacgtgaagctgctgagcaagacccccgagctgaacctggaccagttccacgacaagaccccctacaccatcatgttcggccccgacaagtgcggcgaggactacaagctgcacttcatcttcagacacaagaaccccaagaccggcatctacgaggagaagcacgccaagagacccgacgccgacctgaagacctacttcaccgacaagaagacccacctgtacaccctgatcctgaaccccgacaacagcttcgagatcctggtggaccagagcgtggtgaacagcggcaacctgctgaacgacatgaccccccccgtgaaccccagcagagagatcgaggaccccgaggacagaaagcccgaggactgggacgagagacccaagatccccgaccccgaggccgtgaagcccgacgactgggacgaggacgcccccgccaagatccccgacgaggaggccaccaagcccgagggctggctggacgacgagcccgagtacgtgcccgaccccgacgccgagaagcccgaggactgggacgaggacatggacggcgagtgggaggccccccagatcgccaaccccagatgcgagagcgcccccggctgcggcgtgtggcagagacccgtgatcgacaaccccaactacaagggcaagtggaagccccccatgatcgacaaccccagctaccagggcatctggaagcccagaaagatccccaaccccgacttcttcgaggacctggagcccttcagaatgacccccttcagcgccatcggcctggagctgtggagcatgaccagcgacatcttcttcgacaacttcatcatctgcgccgacagaagaatcgtggacgactgggccaacgacggctggggcctgaagaaggccgccgacggcgccgccgagcccggcgtggtgggccagatgatcgaggccgccgaggagagaccctggctgtgggtggtgtacatcctgaccgtggccctgcccgtgttcctggtgatcctgttctgctgcagcggcaagaagcagaccagcggcatggagtacaagaagaccgacgccccccagcccgacgtgaaggaggaggaggaggagaaggaggaggagaaggacaagggcgacgaggaggaggagggcgaggagaagctggaggagaagcagaagagcgacgccgaggaggacggcggcaccgtgagccaggaggaggaggacagaaagcccaaggccgaggaggacgagatcctgaacagaagccccagaaacagaaagcccagaagagagtag

SEQ ID NO: 329157 - DNA, 99 bp, Artificial Sequence
  derived and/or modified sequence
atggagggcaagtggctgctgtgcatgctgctggtgctgggcaccgccatcgtggaggcccacgacggccacgacgacgacgtgatcgacatcgagtag

SEQ ID NO: 329158 - DNA, 1779 bp, Artificial Sequence
  derived and/or modified sequence
atggagggtaaatggctcctatgcatgttactggtgctgggtacggccatcgttgaggctcacgacggacacgacgatgatgtgatagatattgaggacgatctggatgacgttatagaggaagtggaagattccaaaccagacactactgcacccccgagcagtcctaaagtcacttacaaggcccctgtgccgacaggcgaagtctattttgccgatagcttcgatagaggcacccttagcggttggatactgtcaaaagcgaaaaaggacgacaccgacgacgaaatcgcaaagtatgatggtaaatgggaggtggaggaaatgaaagagagtaaattgcccggtgacaaaggcctcgttctcatgagcagagctaagcaccatgctatctcggctaaactcaacaagcctttcctgttcgacacaaagccacttatcgtacaatatgaggtaaactttcaaaatggaatcgagtgcggtggcgcctatgtcaagctcctaagtaagaccccggagttgaacctggaccagttccatgataaaaccccgtacaccattatgttcggccctgataaatgtggggaggattataaattgcattttattttccgccacaaaaacccaaagacagggatttatgaggagaagcacgcgaaaagacccgacgctgatttgaagacatattttactgacaagaaaacccacctctatacactcatcttgaaccccgataattccttcgagatccttgtggaccagtccgtggtcaatagcggtaacctattgaacgacatgaccccaccagtaaacccctccagggaaattgaagacccagaggatcgaaaaccggaggattgggacgagaggcccaagatacccgatccggaagccgtcaaacccgatgattgggacgaggacgcacccgccaaaatcccagacgaggaggccaccaagccagagggctggctggacgacgagcccgagtatgtgcccgatccagacgccgagaaacctgaggactgggacgaggacatggacggggagtgggaagctcctcaaatagccaaccctcgatgcgaaagtgcaccaggatgcggagtttggcagcggccagtgatagacaatcctaactataaggggaagtggaaacctcccatgatagacaaccctagttatcaggggatttggaagcccagaaaaatacctaacccagacttttttgaagacctcgagccttttcgtatgacaccgttctccgccattgggctcgaactgtggtcaatgacatccgatattttcttcgacaatttcatcatttgtgcagaccgccgcattgtggatgattgggccaacgatggttggggactgaagaaggcggccgatggtgctgccgaaccaggtgttgtcggacaaatgatcgaagccgcggaagagcgcccctggctgtgggtggtgtatatcctgaccgtggctctgcccgtgttcttggtaattctcttctgttgctctgggaaaaagcagacatccggaatggaatataagaaaactgacgcccctcagccggatgtcaaagaggaagaggaggagaaggaggaagagaaagacaagggggatgaagaggaggagggggaggagaagttggaggagaaacaaaaaagcgacgcggaagaggacggagggactgtgtcccaggaggaagaagaccgcaagccgaaagctgaagaggatgagatcctgaataggagtccgagaaatcgaaagccaaggagggagtag

SEQ ID NO: 329159 - DNA, 852 bp, Artificial Sequence
  derived and/or modified sequence
atgctgctagttctaggaacagcaatcgtcgaagctcacgatggccacgatgacgatgtgatcgacattgaagacgaccttgacgacgtgattgaggaagttgaggattccaagccggataccaccgcaccaccaagtagtccaaaagtaacctacaaagcaccagtgccaacaggagaagtctattttgcggactcgttcgaccggggaacgctgagtggctggatcctctccaaggcaaaaaaggatgacacagatgacgaaatcgctaagtatgatgggaagtgggaagtcgaagaaatgaaggagtctaaactgccaggggataaaggactggtcttgatgagccgcgccaagcaccatgctatctccgccaaactaaacaagccgttcctgtttgataccaagcccctgatagttcagtacgaggtcaactttcagaatgggatagagtgtggaggcgcatataactgcttcctgaagcatcagaactctacctgggatcagtttcatgacaaaactccatacacaatcatgttcgggccagataaatgtggagaggactacaagctgcacttcatctttcgacacaagaatcccaagaccggtatctatgaagaaaagcatgcaaagcgacccgacgccgatctaaagacctatttcaccgacaaaaagacccatctgtatactttaatcctcaaccctgacaactccttcgaaattcttgtggatcagagcgtcccacctgtaaacccatccagggagatagaagacccggaggaccggaaaccagaggactgggacgaaagacccaaaattcctgaccctgaggcagtgaagcccgacgattag

SEQ ID NO: 329160 - DNA, 984 bp, Artificial Sequence
  derived and/or modified sequence
atggaaggcaagtggctcctttgcatgcttttggtgcttggaacagccattgtagaagcacatgacggtcacgatgacgatgtcatcgacattgaggatgaccttgacgacgtaatcgaagaagtagaggaaatgaaggagagtaagttgccaggtgacaagggcttagtgctgatgtcccgagccaagcaccacgctataagtgcaaagctaaacaagcccttcttgtttgacacaaagccgctgatcgtgcagtacgaggtgaactttcagaacggcatcgaatgcggcggagcctacgtgaagttgctaagcaagactccagagctgaatctggatcagtttcacgacaagaccccgtacactataatgttcgggcccgataagtgtggcgaggactacaaattgcatttcattttcaggcataagaatcctaagacaggaatctacgaggaaaaacacgccaagcggcctgacgcagatttaaagacgtactttacagataaaaagacgcacttatataccctcatcttaaatccggataatagctttgagatcctagtcgatcaatctgttgtgaatagtggcaacctcctgaacgacatgaccccacccgtaaatccatcaagggaaatagaagacccagaggatcggaagcctgaggactgggatgaaagaccaaagatccctgaccctgaagctgtgaaaccagacgattgggacgaagacgcaccggcaaaaatcccagatgaggaagccacaaaacctgaaggatggttggatgacgagccggagtatgtgcccgaccctgacgctgaaaaacctgaagattgggatgaggatatggatggagagtgggaagcccctcagattgctaacccaagatgcgagtcagcaccaggttgtggggtttggcagcgtccggtagtagacatacaaaaaacctctagacatcaccatcagcaggcaccagtggaacactag

SEQ ID NO: 329161 - DNA, 1779 bp, Artificial Sequence
  derived and/or modified sequence
atggaaggaaaatggctgctgtgtatgttattggttctcggcactgcgatagtagaggcccacgatggtcacgacgacgatgtcatcgacattgaagacgacctcgatgacgtgattgaggaagttgaagattccaagcctgatacaacagctcctccgagttccccaaaagtcacgtataaggctcccgtgcccactggagaagtctattttgcggactctttcgacagggggacactgtcaggctggattctgagtaaggctaaaaaagatgacaccgatgacgaaattgccaagtacgatggtaagtgggaagtagaggaaatgaaggaaagcaagctgccaggggataagggtctggttctgatgagcagagcaaagcaccatgctatatctgccaagctaaataagccctttttgttcgataccaaaccccttattgtgcagtatgaagtgaactttcagaacggtatagagtgcggcggagcctacgtgaagctactcagtaagacccctgagctgaatctagatcagttccacgacaaaacaccctacacgatcatgtttgggcccgacaaatgtggcgaggattacaagctccacttcattttccggcataagaaccccaagactgggatatatgaagaaaagcacgcaaagagaccggacgctgacctgaaaacttattttacagacaaaaagacccacctctacactcttatcttaaaccctgacaattccttcgagattctggttgaccaaagtgtggtaaatagcggcaacctgctcaatgatatgaccccgcccgttaatccttctcgcgaaattgaggacccagaagatcggaagcccgaagactgggacgagcgaccaaaaattcccgatccagaagcagtgaagccagacgactgggacgaagacgcccctgcaaagattcctgatgaagaggctaccaagccagaggggtggcttgatgacgagcctgagtacgtgcccgaccccgatgctgaaaaacccgaagattgggatgaggacatggacggagagtgggaagctcctcaaatcgctaacccccggtgtgaatctgcccccggttgtggtgtttggcaacggcccgtcatcgacaaccccaattacaagggcaagtggaagccccctatgatcgataacccctcgtatcaggggatttggaagccccggaagatccccaaccctgacttctttgaagatcttgaacccttccggatgacccccttctcggccataggactggaactgtggtcaatgacatctgatatattttttgacaatttcattatctgcgctgacagacgcattgtcgacgactgggcaaatgacggatggggtctgaagaaagccgcagacggtgcggccgaacccggagtggtgggacagatgattgaggcagctgaggagcggccgtggttatgggtggtgtatatcctgactgtagccttgccagtgtttctggtgattttattctgctgcagcggcaaaaagcagacttccggcatggagtacaagaaaactgacgctccacagccagacgtgaaggaagaggaggaggagaaagaggaggaaaaagacaaaggggatgaggaagaggaaggagaggaaaagctggaagagaaacagaaaagcgatgcagaggaagacggcggcacggtatctcaggaagaggaagaccgaaagccgaaagccgaggaggacgaaatccttaacaggtctccaaggaatcgcaaacctcgccgcgagtag

SEQ ID NO: 329162 - DNA, 405 bp, Artificial Sequence
  derived and/or modified sequence
atggagggaaagtggttgctgtgcatgctcttggttttgggaaccgcgatagtcgaggcgcatgatggacatgacgacgatgtgatagacatagaggacgacctggatgacgttattgaagaagtggaggatagtaaaccagacacaaccgcgccccctagctcgccgaaagtcacatataaggcgcccgtgcccacgggagaagtgtattttgctgacagcttcgacagaggaaccctgtctggttggatactgtccaaggccaagaaggatgacacagacgatgagattgccaagtacgacggtaagtgggaagttgaggagatgaaagaatctaaacttcctggagacaaaggcctcgtcctgatgtcccgtgccaaacaccatgccatcagtgctaagtag

SEQ ID NO: 329163 - DNA, 507 bp, Artificial Sequence
  derived and/or modified sequence
atggaaggcaagtggttgctttgcatgttgcttgtgttgggtacagcaatagtggaagcacacgatggccatgatgatgatgtgatcgatatcgaggacgacctcgacgatgtgatagaggaggttgaagattctaagccagatactactgcgcctcctagttcccctaaggtcacatacaaagctccagtgcccaccggggaggtgtacttcgctgactcattcgatcgcggaactcttagcgggtggatactgagcaaggccaaaaaggatgatacagatgacgagatagcaaagtatgacggaaagtgggaagttgaagagatgaaggagagcaagctcccaggcgacaaggggctcgtactgatgagtagggccaagcatcatgctatatccgctaagctaaataaacccttcttgttcgatactaaacccctgattgtccagtacgaggttaattttcagaacggcatagagtgtggcggcgcttatgtgaagcttttatag

SEQ ID NO: 329164 - DNA, 1779 bp, Artificial Sequence
  derived and/or modified sequence
atggagggaaaatggcttttatgcatgttattggtgcttggaaccgccattgtagaagctcacgatgggcacgacgacgatgttatcgatatcgaggacgacttggacgacgtgatagaggaggtagaagattccaaacccgacacgacggccccaccttctagtccaaaggtgacttataaggctccggtgcctaccggagaggtttacttcgcggatagcttcgatcgggggacactgtctggttggattctctcaaaagccaaaaaagatgacaccgacgacgagatagcaaagtatgacggaaaatgggaagtggaagaaatgaaagagtccaagctgcctggcgataaagggttggtgctgatgtctagggccaagcatcacgcgatttcagccaagctaaacaagcccttcctgttcgacactaagccacttatagttcagtacgaagtgaacttccagaatggaatcgaatgcggcggagcctatgtgaagcttctcagcaagactcctgaattaaatctcgaccaattccacgacaagacaccatacaccatcatgttcggtccggataaatgtggcgaggactacaaactccacttcattttccgccacaaaaatccaaaaacaggtatctatgaagagaaacatgccaagagacccgatgccgaccttaagacatacttcacagacaaaaagactcatctgtacactctcatactgaacccagacaactcgtttgagatcctggtggatcagagcgtagtgaacagtggtaacctgctcaacgacatgacaccccccgtaaacccgtcaagagaaattgaagacccggaggaccgcaagcccgaggactgggacgagcgccctaaaattccagatcccgaggcagttaagccagacgattgggatgaggatgctcccgccaagatccccgacgaggaggccaccaagcccgaagggtggttagacgacgaaccagaatacgttcctgatcctgacgccgagaaacccgaggactgggatgaggacatggatggagagtgggaagcaccacaaatcgccaatccccgctgcgagagtgctccaggatgcggtgtgtggcaacgcccagtcatcgacaatcccaactacaagggaaaatggaagcctcccatgatcgataatcctagctaccaagggatctggaaacctcgaaagattcctaaccctgacttcttcgaggatctggagccatttcgaatgacgccattcagtgcgatcgggctggagctgtggagtatgaccagtgatatttttttcgacaattttattatttgcgcagacagaaggattgtagatgactgggccaacgatggctgggggctgaagaaggcggctgatggtgcagcggagcccggtgtggtcggccagatgattgaggctgccgaggagcggccatggctgtgggtggtgtatattctcactgtagctctccctgtgtttctggtgatcctgttttgctgctctggcaagaaacagacctctggaatggagtacaaaaaaacggacgctcctcagcccgacgtgaaggaagaggaagaagagaaagaggaggaaaaggataaaggcgacgaagaggaggagggcgaggaaaaattggaggagaagcaaaaatctgatgccgaggaggacgggggcacagtttcccaggaggaggaagaccgaaagcctaaagctgaagaggatgagattttgaaccgcagccctcgcaaccgaaagcctcgacgcgaatag

SEQ ID NO: 329165 - DNA, 240 bp, Artificial Sequence
  derived and/or modified sequence
atggagggaaagtggctgctgtgcatgctgctggtgcttggcacagcaatcgtcgaagcgcacgatggtcacgacgacgatgtcatagacatcgaggatgacctggacgatgttatcgaggaggtagaggatagcaagcccgatacaactgctcctccgagctcgcctaaagtgacgtataaggccccagttccaactggtgaagtgtattttgccgactcattcgacaggggcacatag

SEQ ID NO: 329166 - DNA, 1455 bp, Artificial Sequence
  derived and/or modified sequence
atgaaagagtccaaactgcccggggataaggggctggtccttatgtcgcgagctaagcaccatgccattagcgcgaagctcaacaagccttttttgttcgataccaaaccactgattgtccagtatgaagtcaatttccaaaatggtatcgagtgtggaggagcctacgtcaagcttttgagtaagacacccgagctgaatcttgaccagtttcatgacaagaccccttatactatcatgtttggacctgataaatgtggtgaggattataagctgcatttcatcttcagacacaaaaacccaaaaactggaatttatgaggaaaaacacgccaaacgcccggatgctgacctcaaaacatactttaccgacaaaaagacccacttatatacactgattctgaaccccgacaactcgtttgaaattctcgtagatcagtccgtggtgaactcaggaaatttactgaatgatatgactcctcccgtgaatccgtccagagagatcgaagacccagaggataggaaacctgaggattgggatgaacggcctaagattcctgaccccgaagccgttaaacccgatgactgggacgaagatgccccagccaagattcccgatgaggaagcaaccaagcccgaaggctggcttgacgatgagcctgagtacgtgcctgatccagacgccgagaagcccgaagattgggatgaagacatggacggggagtgggaagccccacagatcgccaacccaaggtgtgagtcagcaccgggttgtggggtgtggcagagaccagtaatcgacaaccctaactacaagggcaaatggaaacctcctatgattgataatccatcttatcagggtatttggaagcccaggaaaattcctaatccagatttttttgaggacctcgagccattcaggatgactcccttttcggccatagggctggaactttggagcatgactagcgatatcttcttcgacaattttattatctgcgctgacagaagaatcgtggatgattgggctaacgatggttggggcctgaaaaaggctgcagatggcgccgctgaaccaggcgtggtgggacagatgattgaggcagccgaagagcgaccgtggctgtgggtggtgtatatcctgacggtggcgctgcctgtgttcctggtgattctattttgttgttcagggaaaaaacagacatcaggaatggagtataagaagacagatgcgccccagccagacgtcaaggaagaggaagaggaaaaagaagaagaaaaggataagggtgatgaagaagaggaaggcgaggagaaattagaagagaagcagaaatctgacgcagaggaggacggaggcacggtgtcacaggaagaggaagacagaaagccaaaagcggaagaagacgagatactgaatcgcagtccacggaatagaaaacctcgacgggagtag

SEQ ID NO: 329167 - DNA, 324 bp, Artificial Sequence
  derived and/or modified sequence
atggaaggaaagtggctgctatgcatgctgctcgttctcggcacagccatcgttgaagcccatgacggccatgatgatgacgtcatcgatatcgaggatgatctggacgacgtaatcgaagaagtcgaagatagcaagccagatactactgcgccgccaagctctcctaaggtgacatacaaggcccctgtcccaacaggcgaagtctacttcgcagattcctttgatagaggaaccctcagcggctggatcttgtcaaaggcgaagaaggatgacacagacgacgagatagctaagtatgatggcaagtgggaagtggaatag

SEQ ID NO: 329168 - DNA, 435 bp, Artificial Sequence
  derived and/or modified sequence
atggaaggaaaatggctgctgtgtatgttacttgtgttggggactgcaatcgtggaggctcacgatggccacgacgacgacgtgatagacatcgaagatgacctggacgacgtcattgaagaagtggaagattctaaaccagacaccacagctcctccctcatccccaaaagtcacatataaggccccggtccctaccggggaggtctactttgccgattcctttgatcgggggacgctttctggttggatcctctccaaagctaaaaaggacgataccgacgatgagatcgctaagtatgatgggaagtgggaagttgaagaaatgaaagagagcaaactccctggggacaagggactcgtgctgatgtcacgcgccaagcatcacgccatctccgctaagttgaacaagcctttcctgttcgacacaaaatag

SEQ ID NO: 329169 - DNA, 1779 bp, Artificial Sequence
  derived and/or modified sequence
atggagggcaagtggctgctgtgcatgctgctggtgctgggcacagccatcgtggaggcccatgatggccatgatgatgatgtgattgatattgaagatgacctggatgatgtgattgaggaggtggaggacagcaagccagacaccacagccccacccagcagccccaaggtgacctacaaggcccctgtgcccaccggggaggtgtactttgctgacagctttgaccggggcaccctgagcggctggatcctgagcaaggccaagaaggatgacacagatgatgaaattgccaagtatgatggcaagtgggaggtggaggagatgaaggagagcaagctgcccggggacaagggcctggtgctgatgagccgggccaagcaccacgccatcagcgccaagctgaacaagcccttcctgtttgacaccaagcccctgattgtgcagtatgaggtgaacttccagaatggaattgaatgtggcggggcctacgtgaagctgctgagcaagaccccagagctgaacctggaccagttccatgacaagaccccctacaccatcatgtttggaccagacaagtgtggggaggactacaagctgcacttcatcttccgccacaagaaccccaagacaggcatctatgaggagaagcacgccaagaggccagatgctgacctgaagacctacttcacagacaagaagacccacctgtacaccctcatcctgaacccagacaacagctttgagatcctggtggaccagagcgtggtgaacagcggcaacctgctgaatgacatgaccccacctgtgaaccccagccgggagattgaagatcctgaggacaggaagccagaggactgggatgagcggcccaagatcccagaccctgaggccgtgaagccagatgactgggatgaagatgccccagccaagatcccagatgaggaggccaccaagccagagggctggctggatgatgagccagaatatgtgcctgaccctgatgctgagaagccagaggactgggatgaggacatggatggagagtgggaggccccccagatcgccaacccccgctgtgagagcgcccctggctgcggcgtgtggcagaggcctgtgattgacaaccccaactacaagggcaagtggaagccacccatgattgacaaccccagctaccagggcatctggaagcccaggaagatccccaacccagacttctttgaggacctggagcccttcaggatgacccccttcagcgccatcggcctggagctgtggagcatgaccagtgacatcttctttgacaacttcatcatctgtgccgaccggcgcatcgtggatgactgggccaatgatggctggggcctgaagaaggctgctgatggagctgctgagcccggggtggtgggccagatgattgaggccgctgaggagcggccctggctgtgggtggtgtacatcctgactgtggccctgcccgtcttcctggtgatcctcttctgctgcagcggcaagaagcagaccagcggcatggagtacaagaagacagatgccccccagccagatgtgaaggaggaggaggaggagaaggaggaggagaaggacaagggagatgaggaggaggagggggaggagaagctggaggagaagcagaagagtgatgctgaggaggatggcggcaccgtgtcccaggaggaggaggacaggaagcccaaggccgaggaggatgagatcctgaacagaagccccaggaacaggaagccccggcgggagtag

SEQ ID NO: 329170 - DNA, 852 bp, Artificial Sequence
  derived and/or modified sequence
atgctgctggtgctgggcacagccatcgtggaggcccatgatggccatgatgatgatgtgattgatattgaagatgacctggatgatgtgattgaggaggtggaggacagcaagccagacaccacagccccacccagcagccccaaggtgacctacaaggcccctgtgcccaccggggaggtgtactttgctgacagctttgaccggggcaccctgagcggctggatcctgagcaaggccaagaaggatgacacagatgatgaaattgccaagtatgatggcaagtgggaggtggaggagatgaaggagagcaagctgcccggggacaagggcctggtgctgatgagccgggccaagcaccacgccatcagcgccaagctgaacaagcccttcctgtttgacaccaagcccctgattgtgcagtatgaggtgaacttccagaatggaattgaatgtggcggggcctacaactgcttcctgaagcaccagaacagcacctgggaccagttccatgacaagaccccctacaccatcatgtttggaccagacaagtgtggggaggactacaagctgcacttcatcttccgccacaagaaccccaagacaggcatctatgaggagaagcacgccaagaggccagatgctgacctgaagacctacttcacagacaagaagacccacctgtacaccctcatcctgaacccagacaacagctttgagatcctggtggaccagagcgtgccccctgtgaaccccagccgggagattgaagatcctgaggacaggaagccagaggactgggatgagcggcccaagatcccagaccctgaggccgtgaagccagatgactag

SEQ ID NO: 329171 - DNA, 984 bp, Artificial Sequence
  derived and/or modified sequence
atggagggcaagtggctgctgtgcatgctgctggtgctgggcacagccatcgtggaggcccatgatggccatgatgatgatgtgattgatattgaagatgacctggatgatgtgattgaggaggtggaggagatgaaggagagcaagctgcccggggacaagggcctggtgctgatgagccgggccaagcaccacgccatcagcgccaagctgaacaagcccttcctgtttgacaccaagcccctgattgtgcagtatgaggtgaacttccagaatggaattgaatgtggcggggcctacgtgaagctgctgagcaagaccccagagctgaacctggaccagttccatgacaagaccccctacaccatcatgtttggaccagacaagtgtggggaggactacaagctgcacttcatcttccgccacaagaaccccaagacaggcatctatgaggagaagcacgccaagaggccagatgctgacctgaagacctacttcacagacaagaagacccacctgtacaccctcatcctgaacccagacaacagctttgagatcctggtggaccagagcgtggtgaacagcggcaacctgctgaatgacatgaccccacctgtgaaccccagccgggagattgaagatcctgaggacaggaagccagaggactgggatgagcggcccaagatcccagaccctgaggccgtgaagccagatgactgggatgaagatgccccagccaagatcccagatgaggaggccaccaagccagagggctggctggatgatgagccagaatatgtgcctgaccctgatgctgagaagccagaggactgggatgaggacatggatggagagtgggaggccccccagatcgccaacccccgctgtgagagcgcccctggctgcggcgtgtggcagaggcctgtggtggacatccagaagaccagccgccaccaccaccagcaggcccctgtggagcactag

SEQ ID NO: 329172 - DNA, 405 bp, Artificial Sequence
  derived and/or modified sequence
atggagggcaagtggctgctgtgcatgctgctggtgctgggcacagccatcgtggaggcccatgatggccatgatgatgatgtgattgatattgaagatgacctggatgatgtgattgaggaggtggaggacagcaagccagacaccacagccccacccagcagccccaaggtgacctacaaggcccctgtgcccaccggggaggtgtactttgctgacagctttgaccggggcaccctgagcggctggatcctgagcaaggccaagaaggatgacacagatgatgaaattgccaagtatgatggcaagtgggaggtggaggagatgaaggagagcaagctgcccggggacaagggcctggtgctgatgagccgggccaagcaccacgccatcagcgccaagtag

SEQ ID NO: 329173 - DNA, 507 bp, Artificial Sequence
  derived and/or modified sequence
atggagggcaagtggctgctgtgcatgctgctggtgctgggcacagccatcgtggaggcccatgatggccatgatgatgatgtgattgatattgaagatgacctggatgatgtgattgaggaggtggaggacagcaagccagacaccacagccccacccagcagccccaaggtgacctacaaggcccctgtgcccaccggggaggtgtactttgctgacagctttgaccggggcaccctgagcggctggatcctgagcaaggccaagaaggatgacacagatgatgaaattgccaagtatgatggcaagtgggaggtggaggagatgaaggagagcaagctgcccggggacaagggcctggtgctgatgagccgggccaagcaccacgccatcagcgccaagctgaacaagcccttcctgtttgacaccaagcccctgattgtgcagtatgaggtgaacttccagaatggaattgaatgtggcggggcctacgtgaagctgctgtag

SEQ ID NO: 329174 - DNA, 240 bp, Artificial Sequence
  derived and/or modified sequence
atggagggcaagtggctgctgtgcatgctgctggtgctgggcacagccatcgtggaggcccatgatggccatgatgatgatgtgattgatattgaagatgacctggatgatgtgattgaggaggtggaggacagcaagccagacaccacagccccacccagcagccccaaggtgacctacaaggcccctgtgcccaccggggaggtgtactttgctgacagctttgaccggggcacctag

SEQ ID NO: 329175 - DNA, 1455 bp, Artificial Sequence
  derived and/or modified sequence
atgaaggagagcaagctgcccggggacaagggcctggtgctgatgagccgggccaagcaccacgccatcagcgccaagctgaacaagcccttcctgtttgacaccaagcccctgattgtgcagtatgaggtgaacttccagaatggaattgaatgtggcggggcctacgtgaagctgctgagcaagaccccagagctgaacctggaccagttccatgacaagaccccctacaccatcatgtttggaccagacaagtgtggggaggactacaagctgcacttcatcttccgccacaagaaccccaagacaggcatctatgaggagaagcacgccaagaggccagatgctgacctgaagacctacttcacagacaagaagacccacctgtacaccctcatcctgaacccagacaacagctttgagatcctggtggaccagagcgtggtgaacagcggcaacctgctgaatgacatgaccccacctgtgaaccccagccgggagattgaagatcctgaggacaggaagccagaggactgggatgagcggcccaagatcccagaccctgaggccgtgaagccagatgactgggatgaagatgccccagccaagatcccagatgaggaggccaccaagccagagggctggctggatgatgagccagaatatgtgcctgaccctgatgctgagaagccagaggactgggatgaggacatggatggagagtgggaggccccccagatcgccaacccccgctgtgagagcgcccctggctgcggcgtgtggcagaggcctgtgattgacaaccccaactacaagggcaagtggaagccacccatgattgacaaccccagctaccagggcatctggaagcccaggaagatccccaacccagacttctttgaggacctggagcccttcaggatgacccccttcagcgccatcggcctggagctgtggagcatgaccagtgacatcttctttgacaacttcatcatctgtgccgaccggcgcatcgtggatgactgggccaatgatggctggggcctgaagaaggctgctgatggagctgctgagcccggggtggtgggccagatgattgaggccgctgaggagcggccctggctgtgggtggtgtacatcctgactgtggccctgcccgtcttcctggtgatcctcttctgctgcagcggcaagaagcagaccagcggcatggagtacaagaagacagatgccccccagccagatgtgaaggaggaggaggaggagaaggaggaggagaaggacaagggagatgaggaggaggagggggaggagaagctggaggagaagcagaagagtgatgctgaggaggatggcggcaccgtgtcccaggaggaggaggacaggaagcccaaggccgaggaggatgagatcctgaacagaagccccaggaacaggaagccccggcgggagtag

SEQ ID NO: 329176 - DNA, 324 bp, Artificial Sequence
  derived and/or modified sequence
atggagggcaagtggctgctgtgcatgctgctggtgctgggcacagccatcgtggaggcccatgatggccatgatgatgatgtgattgatattgaagatgacctggatgatgtgattgaggaggtggaggacagcaagccagacaccacagccccacccagcagccccaaggtgacctacaaggcccctgtgcccaccggggaggtgtactttgctgacagctttgaccggggcaccctgagcggctggatcctgagcaaggccaagaaggatgacacagatgatgaaattgccaagtatgatggcaagtgggaggtggagtag

SEQ ID NO: 329177 - DNA, 435 bp, Artificial Sequence
  derived and/or modified sequence
atggagggcaagtggctgctgtgcatgctgctggtgctgggcacagccatcgtggaggcccatgatggccatgatgatgatgtgattgatattgaagatgacctggatgatgtgattgaggaggtggaggacagcaagccagacaccacagccccacccagcagccccaaggtgacctacaaggcccctgtgcccaccggggaggtgtactttgctgacagctttgaccggggcaccctgagcggctggatcctgagcaaggccaagaaggatgacacagatgatgaaattgccaagtatgatggcaagtgggaggtggaggagatgaaggagagcaagctgcccggggacaagggcctggtgctgatgagccgggccaagcaccacgccatcagcgccaagctgaacaagcccttcctgtttgacaccaagtag

SEQ ID NO: 329178 - DNA, 1779 bp, Artificial Sequence
  derived and/or modified sequence
atggagggcaagtggctgctgtgcatgctgctggtgctgggcaccgccatagtggaggctcatgacggccacgacgacgacgtaatcgatatcgaggacgatcttgatgacgtgatagaagaagttgaggatagtaagccggatactaccgcccctccatccagccctaaagtcacttataaggctcctgtccccactggagaagtctactttgctgacagctttgaccggggaaccctttcgggatggatcctctccaaggcaaaaaaagacgatacagatgacgaaatcgcaaagtatgatggcaaatgggaggttgaggagatgaaagaatccaagctcccaggggacaaagggctggtcctgatgtctcgcgccaagcatcacgccatcagcgctaaactgaacaagccattcctcttcgacaccaagccactgatcgtccagtacgaggtgaattttcagaatggtattgaatgtggtggagcatatgttaaactgctgtcaaaaactccggaactgaaccttgatcagttccatgacaagactccctacaccattatgttcgggcccgataaatgcggagaggattataagctgcacttcatttttcggcataaaaacccaaagacgggcatctacgaggagaagcatgctaagcgtcccgacgccgatctcaaaacatactttaccgacaagaaaacacatctctataccctgatactcaatcctgataatagcttcgaaattctcgtagaccaatcagttgtcaactctggaaatctgcttaatgacatgaccccccctgtaaacccttcacgtgagattgaggacccagaagacagaaagcctgaagactgggacgagcgtccaaagatcccggaccctgaggccgtcaaacctgacgattgggatgaagatgcacccgctaaaatacccgacgaagaggcaacaaaacccgaaggatggctagacgatgagcccgagtatgtgccagacccagacgctgagaagccagaagattgggacgaggacatggacggagaatgggaggctccacagatagccaacccaagatgcgaatccgcacccggatgtggcgtgtggcagcggccggtgatagataatccaaactataaggggaagtggaaaccaccaatgatcgacaacccgtcttatcaggggatctggaaacccagaaaaatcccaaatcctgacttttttgaagacttggaacctttccggatgaccccatttagcgctataggcctcgagctctggtctatgacaagcgacatctttttcgacaacttcatcatttgcgccgaccggagaatcgtggacgactgggcaaacgatggatggggcctcaagaaggccgccgatggggcagctgaacccggagttgtgggtcaaatgatagaggccgccgaagaaagaccgtggttgtgggtagtgtacatattaactgttgccctgccagtattcttggtgattcttttttgttgctctgggaaaaaacaaacatcaggaatggaatacaagaaaactgatgcacctcagcccgatgtaaaagaggaggaagaggagaaagaggaggagaaagacaaaggggacgaggaagaagagggagaagagaaacttgaggagaagcagaaaagtgacgcggaggaggatggcggcaccgtctcccaggaagaggaggaccgcaagcccaaggcggaggaagatgaaatcctaaacaggtcaccccgcaataggaaacctcgccgtgagtag

SEQ ID NO: 329179 - DNA, 852 bp, Artificial Sequence
  derived and/or modified sequence
atgctgctggtgctgggcaccgccatcgtggaggcccacgacggccacgacgatgatgtgatcgacatcgaagatgatttggatgacgtgatcgaagaggtcgaggattccaaacccgataccaccgcgccccccagttctccaaaagtcacctataaggccccggtgcctacgggcgaagtgtacttcgcagactcctttgatcgtggcacactgagtgggtggattctgagtaaagcaaagaaggatgatacagacgatgagatcgcaaaatacgacggcaaatgggaagtcgaagagatgaaggagtccaaactccccggggataaaggcctcgtcctgatgtctagggctaagcaccatgcaatatccgctaaactgaacaaacctttcctgtttgacacaaagcccttgatcgtgcagtacgaggtcaatttccagaacggaattgaatgtggcggcgcttacaactgctttctcaagcaccagaacagcacctgggatcagttccacgacaagacaccctacaccatcatgttcggtcccgataaatgtggggaagattataagttgcattttattttcaggcataagaacccaaagaccggaatctacgaggagaaacacgcaaagcgtcccgacgccgacttgaaaacatactttaccgataaaaaaacacacctctatactcttattcttaacccagacaattctttcgagattcttgtggaccagtccgttccacctgtgaacccatcacgcgagatcgaggatcccgaggataggaaacccgaggattgggacgagagacccaaaatcccggatcccgaggctgtgaaacctgacgactag

SEQ ID NO: 329180 - DNA, 984 bp, Artificial Sequence
  derived and/or modified sequence
atggagggcaagtggctgctgtgcatgctgctggtgctgggcaccgcaatagtggaggctcacgacggccacgacgacgatgtcatcgacatcgaagatgaccttgatgatgtgatcgaggaagtcgaggagatgaaggagagtaagctaccaggtgacaaggggctggtcctgatgtcacgggccaagcatcatgcgatcagtgctaagctgaataagcccttcctctttgacacaaaaccactgatcgtgcagtacgaggtaaatttccagaatgggatcgaatgtggcggggcctacgtcaaattgctgtctaaaacgccggagctgaatctggatcagttccacgataaaactccctatactattatgtttggaccagataagtgcggtgaggattataaactgcacttcattttccggcataaaaatcccaagactggaatctatgaagagaaacatgccaaacgccccgatgctgacctcaaaacttactttacggataaaaagacacatctatacaccctcatcttgaatcctgacaattctttcgaaattctagttgatcaatcagtggtgaattcgggtaatcttctcaacgacatgactccaccagtgaacccgtctcgtgagatcgaagacccagaagatagaaaacctgaggactgggacgaacggcccaaaattccagatcccgaagcagtgaaaccagacgactgggatgaggacgcacccgccaaaatacccgacgaggaagcaacaaaacctgaaggctggctggatgacgaacccgaatatgtacccgatccagatgccgagaaacctgaggactgggatgaagatatggatggagagtgggaagctccacaaatcgccaaccccagatgtgaaagcgcccctgggtgtggcgtgtggcagagacctgtggtcgatatccagaagactagcaggcatcaccaccagcaggctcctgtggagcactag

SEQ ID NO: 329181 - DNA, 1779 bp, Artificial Sequence
  derived and/or modified sequence
atggagggcaagtggctgctgtgcatgctgctggtgctgggcaccgccattgttgaggctcatgacgggcatgacgatgatgtgatcgacatcgaggatgacttggacgacgtgatagaagaggtggaggacagtaaacccgacactacagccccaccgtcctccccaaaggtgacttacaaagcccccgtgccaactggcgaggtgtactttgcggactcgttcgaccgaggaaccctgtccggctggatcctgtccaaggcaaagaaagacgacacagatgacgaaatcgctaaatatgatgggaagtgggaggtggaggagatgaaagagagcaaacttcccggcgataaaggtttagtcttgatgagccgggcaaaacatcatgctattagtgccaaactgaacaagcccttcctctttgatacgaaacccctcattgtgcaatatgaagtcaactttcagaatgggatcgagtgtggcggtgcttatgttaagcttctgtccaaaactcctgagctcaatcttgatcagttccacgacaagaccccctatactataatgtttggccccgacaagtgcggtgaggattacaaactgcattttatttttaggcacaagaacccaaaaaccggtatatatgaggagaagcatgccaaaagacctgacgctgacctcaagacatacttcacagacaagaaaacccatctgtataccctgattctcaatcctgataatagctttgaaatcttagtggatcagagcgtcgtaaattccggtaacctgttaaatgatatgaccccccccgtgaatccaagccgcgaaatagaggacccagaagatcgtaaacctgaggattgggatgagaggccgaagattcccgatcctgaggcagtcaaacctgatgactgggacgaagacgctcctgcgaaaattccggacgaagaagctaccaagcctgaagggtggctcgacgacgagcctgagtacgttcccgaccctgacgctgagaaaccagaagactgggacgaggacatggatggagagtgggaagctccccagatagccaatccgcgatgtgaatctgcacccgggtgcggggtttggcagaggcctgtaattgacaatcccaattacaaaggaaagtggaagcctcccatgatcgataatccctcatatcagggcatctggaaaccaagaaaaatacccaatcctgatttttttgaggacctggagcccttcaggatgacacccttttctgccatcggattggaactctggtcgatgacctcagacatcttcttcgacaactttatcatttgcgcggaccgacgaattgtggacgactgggccaatgatggctggggtctgaaaaaggccgctgatggagccgccgaacctggtgtggtgggtcagatgatcgaggcggcggaggagaggccatggttatgggtggtgtatatcctcacggttgccctccctgtttttctcgtgatcttgttctgctgctcaggcaagaagcagacgtctggtatggagtataagaagacagatgcaccccagccagatgtgaaggaggaggaggaggaaaaagaagaggaaaaagataaaggagacgaggaggaggaaggggaagagaagttagaagaaaagcagaaaagcgatgctgaggaggacggtggaactgttagccaggaggaagaagaccgcaagccaaaggccgaagaagatgagattttaaatcggtcccccagaaatcgcaagcctcggcgggaatag

SEQ ID NO: 329182 - DNA, 405 bp, Artificial Sequence
  derived and/or modified sequence
atggagggcaagtggctgctgtgcatgctgctggtgctgggcaccgctatagtcgaagcccacgatggccacgatgacgatgtgatagacatcgaggatgatctggacgacgtgatagaagaggtggaagactccaagcccgatacaaccgcccctccctccagtccgaaggtgacctataaagctcccgttcccacgggggaagtatacttcgccgactctttcgatagggggacgctgtccggatggattttgagcaaggccaaaaaagatgacacagatgacgaaattgccaagtacgatgggaagtgggaggtggaggaaatgaaggaatcaaagttgccaggggacaaaggcctcgtcctgatgagccgggccaaacatcacgccatcagtgctaaatag

SEQ ID NO: 329183 - DNA, 507 bp, Artificial Sequence
  derived and/or modified sequence
atggagggcaagtggctgctgtgcatgctgctggtgctgggcaccgcaattgtagaggcacacgacgggcacgacgatgacgtgattgatattgaggatgaccttgacgatgttatcgaggaggttgaggactctaagccagacactactgcccctccctccagtccaaaggtgacttacaaggcgcctgtacctacaggagaagtatatttcgcggactcatttgaccgcgggactctgtccggttggatcctgagtaaggcgaagaaagacgatacagacgatgagatcgccaaatacgatgggaaatgggaagtcgaggagatgaaggaaagtaaactgccaggggacaagggactagttctgatgtcgagggccaaacaccatgcaatttcagctaagctgaacaagccctttctctttgacacaaagccccttatagtgcagtacgaagtgaacttccagaacggtattgagtgcggcggtgcttatgtgaagttgctgtag

SEQ ID NO: 329184 - DNA, 1779 bp, Artificial Sequence
  derived and/or modified sequence
atggagggcaagtggctgctgtgcatgctgctggtgctgggcaccgcaatcgtggaagctcatgatgggcatgatgacgacgtcatcgacatcgaggatgatctcgatgacgtaatcgaggaggtggaagactcgaagcccgatacaacggctccacccagttccccgaaagtgacttacaaggcaccagtgcccacaggcgaggtctacttcgccgacagttttgatcgagggacgttgtcaggatggattctgtctaaagcaaagaaagacgacactgatgatgagatcgctaaatacgacggcaagtgggaagtagaagaaatgaaagagtctaagttgcccggagataaggggctggtccttatgagccgcgccaagcaccacgccatctctgctaagctgaataagccctttctgttcgacaccaaaccactgattgtgcaatacgaagtcaacttccagaacggcatcgagtgcgggggggcatacgtgaagctactgtcaaagacccctgaactcaacctggatcaattccatgacaaaaccccgtatacaatcatgttcggcccggacaagtgtggggaagactacaagctgcacttcatttttcgccacaagaaccctaagacaggaatttacgaagagaagcacgcaaagaggcccgatgccgacctgaagacctactttacagacaagaagacccacctgtacaccctcatcctgaacccagataactcttttgaaatcctggtagatcaaagcgtggttaactctggcaatctcttaaacgacatgaccccccccgttaatccatcccgggagattgaagacccagaagacaggaagcccgaggactgggacgaacggccaaagattccagatccagaagccgtgaagcctgacgactgggatgaggatgcccccgcaaagataccggacgaagaggccacaaagcctgaaggttggctcgacgacgagcctgaatacgtgccagatccagacgccgaaaagcccgaggactgggatgaagatatggatggagagtgggaggcgccgcaaatcgccaatcctagatgcgaatctgcccccgggtgcggcgtgtggcaacggcccgtcattgataatcccaactacaagggtaaatggaagccccccatgatcgataatcctagttatcagggaatctggaaaccaagaaagattcctaaccctgactttttcgaagatctggagcccttccgcatgacacccttctccgcaattggactggaactctggagcatgacgagcgacatattcttcgacaatttcataatctgcgccgaccgccggatagtagatgactgggccaatgatggctggggattgaagaaggcggctgacggggcagccgaaccaggggtggtcgggcaaatgattgaggccgccgaagagaggccatggctctgggtggtatatatcttgaccgtcgcgttacctgtattcctggtcattctcttttgttgttctggaaaaaagcagacatctgggatggagtacaaaaaaactgacgctccacagccggatgtaaaggaggaggaggaggaaaaggaggaggaaaaagataagggcgacgaagaggaggagggagaggagaagcttgaagagaagcagaaatccgacgctgaagaagatggggggaccgtgagccaagaagaggaggaccggaaaccaaaagctgaagaggacgagatcttgaaccggtccccgcggaaccggaagccccgccgggagtag

SEQ ID NO: 329185 - DNA, 240 bp, Artificial Sequence
  derived and/or modified sequence
atggagggcaagtggctgctgtgcatgctgctggtgctgggcaccgctattgtcgaggcccacgatggccatgacgatgatgtgattgacatcgaggacgacttggatgacgtgatcgaggaggttgaagatagcaagcctgatactaccgcccctccaagtagcccaaaggtgacgtataaggcccctgttcctactggtgaggtatacttcgcagacagttttgatagggggacttag

SEQ ID NO: 329186 - DNA, 1455 bp, Artificial Sequence
  derived and/or modified sequence
atgaaggagagcaagctgcccggcgacaagggcctggtgctgatgtcacgagccaagcatcacgcgatcagcgccaaattgaacaaaccattcctgtttgacaccaagcctctgatcgtgcaatacgaagtaaatttccaaaatggcattgaatgcggaggcgcatatgtgaaactgttgtccaaaaccccagagctaaacttggatcagtttcatgataaaactccatacaccatcatgtttggacccgacaagtgcggcgaagattacaagttgcatttcatctttcgacataaaaaccctaaaactgggatatacgaagaaaaacacgcgaaaagaccggatgccgacctcaaaacctatttcacagataaaaagacacatctgtataccctaatcctaaacccggacaactcgtttgaaatcttggttgaccagagtgtagttaattctggaaacctgttgaatgacatgactccgccagtgaatccatctagagaaattgaggaccccgaagataggaaacctgaggattgggacgaacgaccgaaaattcctgatccagaagcagtcaagcctgacgactgggacgaagacgccccagccaaaatccctgacgaagaggctactaaacctgagggctggctggatgatgagccagagtacgtaccggatcctgatgctgaaaaacccgaagactgggatgaagatatggatggggagtgggaggccccccagatagccaacccgagatgcgagtctgcgccggggtgtggagtgtggcaacgtccggtcatagacaaccccaactacaaaggcaagtggaagccacccatgatcgacaacccctcctaccagggaatctggaagccgaggaagatccccaatcccgattttttcgaagatctcgagccttttcgcatgactcctttcagcgccatcggtctagagctttggagcatgacatcagacatctttttcgataacttcattatctgcgccgaccgccgcatcgtagacgactgggccaatgatggttggggactaaaaaaagccgcggatggagcggccgagccgggagtggtcgggcagatgattgaggctgctgaggagagaccttggttatgggtggtgtatatactgactgtggcccttcctgtgtttctggtaattctcttttgctgctccggcaaaaagcagacttccgggatggagtataagaaaacagatgccccccagcccgacgttaaagaagaagaagaagaaaaagaagaggagaaagacaaaggggatgaggaggaagagggggaagagaagttggaagagaaacagaagtctgacgccgaggaagacggaggcactgtatcccaagaagaagaagacaggaagcccaaggctgaagaggatgagatcctcaaccggagtcctcgcaacagaaagccacgcagggagtag

SEQ ID NO: 329187 - DNA, 324 bp, Artificial Sequence
  derived and/or modified sequence
atggagggcaagtggctgctgtgcatgctgctggtgctgggcaccgctatcgttgaagcgcatgatgggcacgatgatgacgtgatcgacatcgaagacgacctcgacgatgttatcgaagaggtagaagacagcaaaccagacactacggctccgcctagcagccctaaagtcacatataaagcccccgtcccaacgggcgaggtttatttcgctgacagcttcgatcgcgggaccttgtcgggctggattttgtccaaagccaagaaagacgacacagacgacgagattgcaaagtatgatggcaagtgggaggttgaatag

SEQ ID NO: 329188 - DNA, 435 bp, Artificial Sequence
  derived and/or modified sequence
atggagggcaagtggctgctgtgcatgctgctggtgctgggcaccgccattgttgaggcacacgatggccacgatgatgatgtgatcgacattgaagatgaccttgatgatgttatagaagaggtcgaggactctaagcctgacactacagcgccaccctcctcacctaaggttacatacaaggcccccgttcctactggagaggtctacttcgctgactcctttgacagaggcacattgagcgggtggatactttccaaggcgaagaaggacgacactgatgacgagatcgcaaagtatgacggaaaatgggaagtcgaagagatgaaggagtctaagcttcccggagataagggattagtgctcatgagtcgtgcaaagcaccacgctatatccgcaaagcttaataaacccttcctgttcgacacgaagtag

SEQ ID NO: 329189 - DNA, 1779 bp, Artificial Sequence
  derived and/or modified sequence
atggagggcaaatggcttctttgcatgcttctcgtgttagggacagccattgtggaggcccacgatggccatgatgacgatgtgatcgacatcgaggatgacctggatgatgttatcgaggaagttgaggacagcaagccagacactaccgccccaccgtcctctccgaaggtcacatataaagctcccgttccaacaggtgaggtatatttcgccgacagctttgacaggggaactctgagtgggtggatcctgtccaaggctaaaaaggacgatacagacgatgagatcgccaagtacgatggcaagtgggaggtggaagagatgaaggagagtaagctcccaggagataaaggtctcgtgttgatgagcagggcaaaacaccacgccatatcagccaagctaaacaagccattcttattcgacacaaagccattgatcgtgcagtatgaagtcaacttccagaacggaattgaatgcggcggagcctatgtaaagctcctctccaagacacccgagctgaacctcgaccagttccacgataagaccccgtatacaattatgttcgggccagataaatgcggggaggattacaaactacatttcatattcagacacaaaaaccctaagaccgggatttatgaagaaaagcacgcaaaacgacctgacgccgatctaaaaacctacttcacagacaagaaaacccacctttacaccctgattctcaacccggacaactcctttgaaatcttagtcgaccagagtgtggttaatagcggcaatttgttgaacgacatgacacctcctgtgaacccatctcgagaaattgaggatcctgaggaccggaaacccgaggattgggacgaaagacccaaaatcccagatccagaggctgttaaacccgatgactgggatgaggacgcaccggctaaaatcccagacgaggaagccaccaaacccgaaggctggctggacgatgagcccgaatatgtaccggacccggacgctgaaaagcccgaggattgggatgaggatatggacggtgagtgggaggcccctcagatagcaaacccccgatgcgagtctgccccaggatgtggggtctggcaaagacctgtgatcgacaaccccaattacaaggggaagtggaaaccgccaatgattgacaatcctagctaccaggggatctggaagccaagaaagatccccaaccccgatttttttgaagacctggagcccttccgtatgacacccttctcggcaatcggactggaactgtggagcatgacgagtgacatctttttcgacaactttataatctgcgccgatcgcaggatcgtggacgactgggccaatgacggttggggcctcaaaaaggctgcagacggtgccgcagagcctggagtagtgggacagatgattgaggcagcagaagagagaccatggctctgggtggtttatatcctcacggtggccctgcccgtgtttctcgtaatcctgttttgctgctccggtaagaagcagactagtggcatggagtacaagaagactgacgctccacaaccagacgtgaaggaagaagaagaggagaaggaagaggagaaggataagggggatgaggaagaggagggggaggagaagcttgaagagaagcagaagtctgacgcagaggaggacggtggaacagtctcacaggaggaggaggacagaaagccaaaggcagaagaagatgaaatattaaacagatcaccccgtaaccggaaaccgagaagagagtag

SEQ ID NO: 329190 - DNA, 852 bp, Artificial Sequence
  derived and/or modified sequence
atgctcctagtcttggggacggccatcgttgaggctcatgacggacatgacgacgatgtaatcgacatcgaggatgacctggacgatgttatcgaagaggtagaagattctaaacccgacacgactgcacccccatctagtcctaaggtgacttacaaagccccagtgcctaccggggaggtctactttgcagattccttcgacagaggtaccctgtcgggctggatcctgagcaaggccaagaaggacgacacggacgacgagatagcaaagtacgatggcaagtgggaggtcgaggaaatgaaggagtccaaactgcctggtgacaaggggctcgtgctgatgagtcgggcaaagcaccacgccatcagtgcaaaactcaacaagcccttcttgttcgacaccaagccacttattgtgcagtacgaggtaaacttccagaacggaattgagtgcgggggagcatacaactgttttctgaaacaccagaactccacctgggaccagttccacgacaagacaccctacacaattatgtttgggccagataagtgcggagaggattacaagcttcactttatctttaggcataagaatcctaaaaccgggatctatgaagaaaagcacgcgaagcgtccggatgctgatctcaagacatactttaccgacaagaaaactcatttatacactttgattttgaacccggacaactcatttgagatacttgttgaccagagcgttccccctgtcaacccatccagagagatcgaagatccggaagatcgaaagcccgaagactgggacgagagacctaagattcccgatcctgaagcagtgaaaccagacgattag

SEQ ID NO: 329191 - DNA, 984 bp, Artificial Sequence
  derived and/or modified sequence
atggaaggcaaatggcttttgtgtatgctcctggttctcggtacagccattgtcgaggctcacgacgggcatgatgacgatgtgatcgacatcgaagacgacctcgacgacgttatcgaagaagtcgaggaaatgaaggaaagcaagcttcctggcgataaggggctcgtgcttatgtctcgagcaaagcatcacgctatttctgcaaagctaaacaagcctttcctgttcgacaccaaaccactgattgtccagtacgaagttaacttccagaacggtattgagtgcgggggagcctacgtcaagctccttagtaaaacccccgagttaaacttggatcagtttcatgataaaactccctacaccattatgttcgggccagataaatgtggagaggactataagctgcactttattttcagacacaagaatccgaaaaccggaatctatgaagaaaagcatgcaaagaggcctgatgcagacctcaaaacatattttacagataagaagacacatctctacacgctcatcttgaaccctgataattcttttgagatcctggtggatcagtcagtggttaacagcggcaatcttctgaatgacatgacaccgccagtgaatccttcccgagagatagaagatccagaagaccgcaagcctgaggattgggatgagaggcccaaaatacctgaccccgaggccgtgaaacccgatgattgggatgaggacgccccagctaaaatccccgatgaggaggcaacgaaaccggaggggtggctggacgacgaacccgagtatgttcctgaccccgacgctgagaaacctgaagattgggatgaggacatggatggggagtgggaggctcctcagattgctaaccctcggtgcgagtcagctcccggatgcggcgtctggcagagaccagtggttgatatccagaagacctccagacatcaccatcaacaggctccagtcgagcactag

SEQ ID NO: 329192 - DNA, 1779 bp, Artificial Sequence
  derived and/or modified sequence
atggagggcaagtggttgctctgcatgctgctagtgctgggcacagcaatcgtggaggcgcacgacgggcacgacgacgatgtgatcgacatcgaagatgatttagatgacgtgatcgaggaggtggaagattccaagcccgatacaactgccccaccttcgagtccaaaggtaacctacaaggcaccagtgcctactggcgaagtctactttgctgacagcttcgatagaggaaccctaagcgggtggatactgagcaaggcgaaaaaagatgataccgacgacgaaattgccaaatacgacggaaaatgggaggtggaagaaatgaaagagtctaagttgccaggagataaaggactggtcctgatgtcccgcgcaaaacatcatgcaatcagcgcgaagttgaacaagccctttctcttcgatactaagccacttatcgtgcaatatgaagtaaactttcagaacggcatagaatgtggcggtgcttacgttaaattgctatccaagacccccgaattaaatctcgaccagttccacgataaaactccttataccattatgtttggcccagacaaatgcggtgaagattacaagctacacttcatatttcgacataaaaatccaaaaaccggcatctacgaagagaaacatgctaagcgtccagatgctgacttgaaaacctattttaccgacaaaaagacacacctctatacactcatacttaaccctgacaactctttcgagatccttgtggatcaatcagtggttaattctggtaatctcctaaacgacatgacccccccagtgaatccaagtcgggaaatcgaggaccctgaggaccggaagccagaggattgggacgagagaccgaaaatcccagatcctgaggccgtgaagcctgacgactgggatgaagacgcgccagcaaaaattccagatgaagaggcaactaaacctgaaggttggttagacgacgagccagagtacgtacccgatccagacgcagagaaacctgaggactgggatgaggacatggacggggagtgggaagcacctcagattgccaaccctcgatgtgaaagtgcaccagggtgcggagtttggcaacgccctgttattgacaatccaaactataagggcaaatggaagccccctatgatcgataacccaagctatcaggggatttggaagccgcgaaagatacctaatccagatttcttcgaggatctggaaccatttcggatgactccgttctcagccatcggcctggaactatggtcaatgactagtgatattttttttgacaacttcatcatctgtgccgatcgcaggattgtggatgactgggccaatgacggctggggtctgaagaaggccgctgatggcgcagctgaaccgggtgtcgtaggccagatgatcgaggcggctgaggaacggccatggctgtgggtggtttatatcttaacagtggctttacccgtgtttctggtgattttgttttgctgtagcggcaaaaagcagacgagcggcatggagtacaagaaaaccgatgcaccccagccagacgtaaaggaggaggaagaggagaaagaagaggagaaagacaagggcgacgaagaggaagagggtgaagaaaagttggaggagaagcaaaagagcgatgccgaggaggacggtggcacagtttcccaggaagaggaggataggaagccaaaggctgaagaagacgagatattaaataggtcacctcgcaacaggaagcctcgacgtgaatag

SEQ ID NO: 329193 - DNA, 405 bp, Artificial Sequence
  derived and/or modified sequence
atggaaggtaagtggctattgtgcatgctactggtcctggggacagctattgtggaagcccatgatggacatgatgacgatgttatcgacatagaggacgacctggacgacgttattgaagaggtggaggactcaaagcctgacacaactgccccaccgtcaagcccgaaagtcacctataaggccccagttcccaccggtgaggtatatttcgctgattccttcgatcgcggtacgctctcaggctggattctcagtaaagccaagaaggacgacacagatgatgaaattgccaaatacgacgggaagtgggaggtggaggaaatgaaagagtccaaactaccgggagacaaggggctggtgctgatgagtcgggctaaacaccacgccattagcgctaagtag

SEQ ID NO: 329194 - DNA, 507 bp, Artificial Sequence
  derived and/or modified sequence
atggaggggaaatggctgttgtgtatgctcttagtactcggcacggcaatcgtggaggcccacgacggccatgatgacgacgtcatcgacatcgaagacgacttggacgacgtgatcgaggaagtagaggactcgaagcccgacacaacggcgccaccgtcatctccaaaggtgacatacaaggctcccgttcccacaggtgaggtgtatttcgccgattcttttgatagggggaccctcagtggctggatcctctcaaaagccaaaaaagacgataccgatgacgagatagctaagtatgacggaaagtgggaggtggaagagatgaaagaaagcaagctgcctggcgacaagggcctcgtgctgatgagtcgcgctaagcaccatgcgatttcagctaaactaaataagcctttcttattcgatactaagccacttatcgtgcagtacgaggtcaacttccaaaacgggatcgaatgcggtggcgcttacgttaagttgctttag

SEQ ID NO: 329195 - DNA, 1779 bp, Artificial Sequence
  derived and/or modified sequence
atggagggtaagtggctgctctgcatgctgctcgttctggggactgccatcgtggaagcacatgacggccacgatgatgacgtaattgatattgaagatgatttggacgatgtgattgaggaagtggaagattcgaagcccgataccactgcgccaccatcctctccaaaggttacatataaggcaccagtcccgaccggcgaggtatactttgcggatagcttcgatcggggaactctgagtggatggatcttatccaaggctaaaaaggacgacaccgacgatgaaatcgccaaatacgacggcaaatgggaggttgaggagatgaaagagagtaagctccctggtgacaaaggactggttctgatgtccagggccaaacaccatgccataagtgctaagttaaataaaccatttctctttgacacgaagccgttgattgtacagtatgaggtcaatttccagaacgggatagagtgcgggggagcctatgtgaagctgctgtcaaagaccccagagctcaatctcgatcaattccatgataaaacaccttatacaatcatgttcggacctgataaatgcggagaagattataaactacactttatcttccggcataaaaaccccaaaactggaatctacgaggagaaacatgctaagcgtcccgatgccgaccttaagacctatttcactgataagaaaacacatctgtataccctcatcttaaaccccgataatagctttgaaatacttgtcgatcagagcgtcgtcaattcaggcaacctgctgaatgacatgactccccctgtgaatccaagccgcgaaattgaagaccccgaggatcgaaaacccgaggattgggacgagcgaccaaaaattcctgatcctgaggcggtgaagcccgatgattgggacgaggatgcccctgctaagatcccagatgaggaggccacaaaacccgagggatggctggatgacgagcctgagtatgtcccagatcctgatgctgagaagcctgaggactgggatgaggacatggatggggaatgggaggcaccccagattgcgaatccacggtgcgagagcgcccctggatgtggggtttggcagagaccagtaatagataatccaaactacaagggcaagtggaagcctcccatgatcgataacccaagctaccaagggatctggaagccgaggaagattcccaacccagactttttcgaggatctcgagccgtttcgcatgacccccttctcagccatcggacttgaactgtggtctatgacgtctgatatctttttcgataactttattatttgcgccgaccggaggatcgtggacgactgggccaacgacgggtggggcttaaagaaggcagctgatggtgcagctgagccaggagtggttggacaaatgattgaagccgcagaagaaagaccttggctttgggtcgtctatattctcaccgtagctcttccagtcttcttagtgattctgttttgttgctccggtaaaaaacaaacatccggaatggaatataaaaagactgacgcccctcagccagacgtgaaagaagaggaagaggaaaaggaggaggaaaaagataaaggagatgaggaagaggagggagaagaaaaacttgaagaaaaacagaagagcgatgctgaggaggacggcggtacggtgtcacaagaggaagaggacagaaaacccaaggcagaggaagacgagatcctcaatcgaagtcctaggaatcggaagcccaggagagagtag

SEQ ID NO: 329196 - DNA, 240 bp, Artificial Sequence
  derived and/or modified sequence
atggaggggaagtggcttctctgtatgctcctggtgcttggtaccgccattgtagaagctcatgacggtcacgatgacgacgtgatcgacatcgaggatgatctcgatgatgtcatcgaggaggttgaagactctaaaccggatactacagctccacctagtagtcccaaggtgacatacaaagctcctgtccctactggagaagtctattttgccgactcctttgacaggggaacctag

SEQ ID NO: 329197 - DNA, 1455 bp, Artificial Sequence
  derived and/or modified sequence
atgaaggaatccaagctacccggagataagggactggttctgatgagcagggcaaaacaccatgcaattagcgccaagttgaataagcctttcttgtttgacaccaaacccttgatcgtgcagtacgaagttaattttcagaatggaatcgagtgcggaggagcatacgtgaaactgctgtcgaaaactcctgagttgaatctcgaccagtttcatgacaagaccccatacacgatcatgttcgggcctgataaatgcggggaagactacaagctgcatttcatattcaggcataaaaatcctaagacaggcatttatgaagagaagcatgcaaagcgtccggacgcagaccttaaaacctactttaccgacaagaagacgcacttatacacgctgatcctgaacccagacaactcatttgaaatccttgttgatcagagcgtcgtgaactcaggtaatcttctgaacgacatgacgccccctgtgaaccccagccgcgagattgaggacccagaggaccgcaagccagaagactgggatgagcgccctaaaattcccgacccagaggccgttaaaccggacgactgggacgaagatgccccagctaaaattcctgacgaggaggccactaaacccgagggctggctggacgatgaaccagaatatgtccccgaccccgacgccgagaaacccgaggactgggacgaagacatggatggcgagtgggaagcgccacagattgcaaatccgagatgcgagagcgcccctgggtgtggggtctggcagcggccagtgattgataacccgaactacaaaggaaagtggaagccccctatgatcgacaacccatcctaccaaggaatctggaaaccacgtaaaatccccaaccctgacttttttgaggacttggaaccctttagaatgacgcctttttcagcaattgggctggaactgtggtcaatgacctcagatatattttttgataacttcataatttgcgcggaccggaggatagtggatgactgggcgaatgacggctggggcctcaaaaaggcagcagacggggctgccgagccgggagtggtaggccagatgattgaggccgctgaagaaagaccctggctttgggtggtgtatatcctgacagtcgctctgcctgtgtttctggtgatccttttctgttgttccggcaagaaacagacaagcggaatggagtataagaagacggatgccccacagccagacgtcaaagaagaagaagaagagaaagaagaggaaaaagacaagggtgatgaggaggaggaaggagaagagaaacttgaggaaaagcagaaaagtgacgccgaggaggatggcggaacagtgtctcaggaggaagaggaccggaaacctaaagctgaggaggatgagatcctcaatagatcaccgagaaaccgcaagccccgaagagagtag

SEQ ID NO: 329198 - DNA, 324 bp, Artificial Sequence
  derived and/or modified sequence
atggagggaaaatggctactgtgtatgctcttagtcctggggacagctattgtggaggctcatgatgggcacgatgatgatgtgatcgacatcgaggacgatctggatgacgtaatagaagaagtagaggacagcaagcccgacactacagcccctccctccagtcccaaagtgacctataaggcaccagtccccactggagaagtctactttgctgatagttttgacaggggtacccttagcggctggattcttagcaaggctaagaaggacgacactgatgatgagattgctaagtatgatggcaagtgggaagtggaatag

SEQ ID NO: 329199 - DNA, 435 bp, Artificial Sequence
  derived and/or modified sequence
atggaagggaaatggctcctgtgcatgctgttggttcttggaacagcaatcgtggaagcacacgatggccacgacgacgacgtgatcgatatcgaagatgacttggacgacgtaatagaggaagtggaggactccaagcctgacacaactgcccctccatcctctcctaaggtgacatataaggctcctgtgcctaccggcgaagtgtactttgcggactcctttgaccggggtactttgagcggctggattctgagcaaggccaagaaggatgatacggacgacgaaattgctaaatacgacggcaagtgggaagtggaagagatgaaggagtcaaagcttcctggggacaagggcctggtcctgatgtcgagggccaagcatcacgccatttcagccaagctgaataagccttttctgttcgatactaagtag

SEQ ID NO: 329200 - DNA, 984 bp, Artificial Sequence
  derived and/or modified sequence
atggaagggaagtggttgctgtgtatgttactggtgcttggaactgctattgttgaggctcatgatggacatgatgatgatgtgattgatattgaggatgaccttgacgatgtcattgaagaggtagaggaaatgaaggagtcaaagcttccaggtgataaaggacttgtgttgatgtctcgggccaagcatcatgccatctctgctaaactgaacaagcccttcctgtttgacaccaagcctctcattgttcagtatgaggttaatttccaaaatggaatagaatgtggtggtgcctatgtgaaactgctttctaaaacaccagaactcaacctggatcagttccatgacaagaccccttatacgattatgtttggtccagataaatgtggagaggactataaactgcacttcatcttccgacacaaaaaccccaaaacgggtatctatgaagaaaaacatgctaagaggccagatgcagatctgaagacctattttactgataagaaaacacatctttacacactaatcttgaatccagataatagttttgaaatactggttgaccaatctgtggtgaatagtggaaatctgctcaatgacatgactcctcctgtaaatccttcacgtgaaattgaggacccagaagaccggaagcccgaggattgggatgaaagaccaaaaatcccagatccagaagctgtcaagccagatgactgggatgaagatgcccctgctaagattccagatgaagaggccacaaaacccgaaggctggttagatgatgagcctgagtacgtacctgatccagacgcagagaaacctgaggattgggatgaagacatggatggagaatgggaggctcctcagattgccaaccctagatgtgagtcagctcctggatgtggtgtctggcagcgacctgtggttgacattcagaaaacttcaagacatcaccatcagcaggctccagttgaacactag

SEQ ID NO: 329201 - DNA, 1876 bp, Artificial Sequence
  derived and/or modified sequence
gttctgcggcacgtgacggtcgggccgcctccgcctctctctttactgcggcgcggggcaaggtgtgcgggcgggaaggggcacgggcacccccgcggtccccgggaggctagagatcatggaagggaagtggttgctgtgtatgttactggtgcttggaactgctattgttgaggctcatgatggacatgatgatgatgtgattgatattgaggatgaccttgacgatgtcattgaagaggtagaagactcaaaaccagataccactgctcctccttcatctcccaaggttacttacaaagctccagttccaacaggggaagtatattttgctgattcttttgacagaggaactctgtcagggaaagtgggaggtagaggaaatgaaggagtcaaagcttccaggtgataaaggacttgtgttgatgtctcgggccaagcatcatgccatctctgctaaactgaacaagcccttcctgtttgacaccaagcctctcattgttcagtatgaggttaatttccaaaatggaatagaatgtggtggtgcctatgtgaaactgctttctaaaacaccagaactcaacctggatcagttccatgacaagaccccttatacgattatgtttggtccagataaatgtggagaggactataaactgcacttcatcttccgacacaaaaaccccaaaacgggtatctatgaagaaaaacatgctaagaggccagatgcagatctgaagacctattttactgataagaaaacacatctttacacactaatcttgaatccagataatagttttgaaatactggttgaccaatctgtggtgaatagtggaaatctgctcaatgacatgactcctcctgtaaatccttcacgtgaaattgaggacccagaagaccggaagcccgaggattgggatgaaagaccaaaaatcccagatccagaagctgtcaagccagatgactgggatgaagatgcccctgctaagattccagatgaagaggccacaaaacccgaaggctggttagatgatgagcctgagtacgtacctgatccagacgcagagaaacctgaggattgggatgaagacatggatggagaatgggaggctcctcagattgccaaccctagatgtgagtcagctcctggatgtggtgtctggcagcgacctgtgattgacaaccccaattataaaggcaaatggaagcctcctatgattgacaatcccagttaccagggaatctggaaacccaggaaaataccaaatccagatttctttgaagatctggaacctttcagaatgactccttttagtgctattggtttggagctgtggtccatgacctctgacattttttttgacaactttatcatttgtgctgatcgaagaatagttgatgattgggccaatgatggatggggcctgaagaaagctgctgatggggctgctgagccaggcgttgtggggcagatgatcgaggcagctgaagagcgcccgtggctgtgggtagtctatattctaactgtagcccttcctgtgttcctggttatcctcttctgctgttctggaaagaaacagaccagtggtatggagtataagaaaactgatgcacctcaaccggatgtgaaggaagaggaagaagagaaggaagaggaaaaggacaagggagatgaggaggaggaaggagaagagaaacttgaagagaaacagaaaagtgatgctgaagaagatggtggcactgtcagtcaagaggaggaagacagaaaacctaaagcagaggaggatgaaattttgaacagatcaccaagaaacagaaagccacgaagagagtgaaacaatcttaagagcttgatctgtgatttcttctccct

SEQ ID NO: 329202 - DNA, 1779 bp, Artificial Sequence
  derived and/or modified sequence
atggagggcaagtggctgctgtgcatgctgctggtgctgggcaccgccatcgtggaggcccacgacggccacgacgacgacgtgatcgacatcgaggacgacctggacgacgtgatcgaggaggtggaggacagcaagcccgacaccaccgccccccccagcagccccaaggtgacctacaaggcccccgtgcccaccggcgaggtgtacttcgccgacagcttcgacagaggcaccctgagcggctggatcctgagcaaggccaagaaggacgacaccgacgacgagatcgccaagtacgacggcaagtgggaggtggaggagatgaaggagagcaagctgcccggcgacaagggcctggtgctgatgagcagagccaagcaccacgccatcagcgccaagctgaacaagcccttcctgttcgacaccaagcccctgatcgtgcagtacgaggtgaacttccagaacggcatcgagtgcggcggcgcctacgtgaagctgctgagcaagacccccgagctgaacctggaccagttccacgacaagaccccctacaccatcatgttcggccccgacaagtgcggcgaggactacaagctgcacttcatcttcagacacaagaaccccaagaccggcatctacgaggagaagcacgccaagagacccgacgccgacctgaagacctacttcaccgacaagaagacccacctgtacaccctgatcctgaaccccgacaacagcttcgagatcctggtggaccagagcgtggtgaacagcggcaacctgctgaacgacatgaccccccccgtgaaccccagcagagagatcgaggaccccgaggacagaaagcccgaggactgggacgagagacccaagatccccgaccccgaggccgtgaagcccgacgactgggacgaggacgcccccgccaagatccccgacgaggaggccaccaagcccgagggctggctggacgacgagcccgagtacgtgcccgaccccgacgccgagaagcccgaggactgggacgaggacatggacggcgagtgggaggccccccagatcgccaaccccagatgcgagagcgcccccggctgcggcgtgtggcagagacccgtgatcgacaaccccaactacaagggcaagtggaagccccccatgatcgacaaccccagctaccagggcatctggaagcccagaaagatccccaaccccgacttcttcgaggacctggagcccttcagaatgacccccttcagcgccatcggcctggagctgtggagcatgaccagcgacatcttcttcgacaacttcatcatctgcgccgacagaagaatcgtggacgactgggccaacgacggctggggcctgaagaaggccgccgacggcgccgccgagcccggcgtggtgggccagatgatcgaggccgccgaggagagaccctggctgtgggtggtgtacatcctgaccgtggccctgcccgtgttcctggtgatcctgttctgctgcagcggcaagaagcagaccagcggcatggagtacaagaagaccgacgccccccagcccgacgtgaaggaggaggaggaggagaaggaggaggagaaggacaagggcgacgaggaggaggagggcgaggagaagctggaggagaagcagaagagcgacgccgaggaggacggcggcaccgtgagccaggaggaggaggacagaaagcccaaggccgaggaggacgagatcctgaacagaagccccagaaacagaaagcccagaagagagtag

SEQ ID NO: 329203 - DNA, 852 bp, Artificial Sequence
  derived and/or modified sequence
atgctgctggtgctgggcaccgccatcgtggaggcccacgacggccacgacgacgacgtgatcgacatcgaggacgacctggacgacgtgatcgaggaggtggaggacagcaagcccgacaccaccgccccccccagcagccccaaggtgacctacaaggcccccgtgcccaccggcgaggtgtacttcgccgacagcttcgacagaggcaccctgagcggctggatcctgagcaaggccaagaaggacgacaccgacgacgagatcgccaagtacgacggcaagtgggaggtggaggagatgaaggagagcaagctgcccggcgacaagggcctggtgctgatgagcagagccaagcaccacgccatcagcgccaagctgaacaagcccttcctgttcgacaccaagcccctgatcgtgcagtacgaggtgaacttccagaacggcatcgagtgcggcggcgcctacaactgcttcctgaagcaccagaacagcacctgggaccagttccacgacaagaccccctacaccatcatgttcggccccgacaagtgcggcgaggactacaagctgcacttcatcttcagacacaagaaccccaagaccggcatctacgaggagaagcacgccaagagacccgacgccgacctgaagacctacttcaccgacaagaagacccacctgtacaccctgatcctgaaccccgacaacagcttcgagatcctggtggaccagagcgtgccccccgtgaaccccagcagagagatcgaggaccccgaggacagaaagcccgaggactgggacgagagacccaagatccccgaccccgaggccgtgaagcccgacgactag

SEQ ID NO: 329204 - DNA, 984 bp, Artificial Sequence
  derived and/or modified sequence
atggagggcaagtggctgctgtgcatgctgctggtgctgggcaccgccatcgtggaggcccacgacggccacgacgacgacgtgatcgacatcgaggacgacctggacgacgtgatcgaggaggtggaggagatgaaggagagcaagctgcccggcgacaagggcctggtgctgatgagcagagccaagcaccacgccatcagcgccaagctgaacaagcccttcctgttcgacaccaagcccctgatcgtgcagtacgaggtgaacttccagaacggcatcgagtgcggcggcgcctacgtgaagctgctgagcaagacccccgagctgaacctggaccagttccacgacaagaccccctacaccatcatgttcggccccgacaagtgcggcgaggactacaagctgcacttcatcttcagacacaagaaccccaagaccggcatctacgaggagaagcacgccaagagacccgacgccgacctgaagacctacttcaccgacaagaagacccacctgtacaccctgatcctgaaccccgacaacagcttcgagatcctggtggaccagagcgtggtgaacagcggcaacctgctgaacgacatgaccccccccgtgaaccccagcagagagatcgaggaccccgaggacagaaagcccgaggactgggacgagagacccaagatccccgaccccgaggccgtgaagcccgacgactgggacgaggacgcccccgccaagatccccgacgaggaggccaccaagcccgagggctggctggacgacgagcccgagtacgtgcccgaccccgacgccgagaagcccgaggactgggacgaggacatggacggcgagtgggaggccccccagatcgccaaccccagatgcgagagcgcccccggctgcggcgtgtggcagagacccgtggtggacatccagaagaccagcagacaccaccaccagcaggcccccgtggagcactag

SEQ ID NO: 329205 - DNA, 405 bp, Artificial Sequence
  derived and/or modified sequence
atggagggcaagtggctgctgtgcatgctgctggtgctgggcaccgccatcgtggaggcccacgacggccacgacgacgacgtgatcgacatcgaggacgacctggacgacgtgatcgaggaggtggaggacagcaagcccgacaccaccgccccccccagcagccccaaggtgacctacaaggcccccgtgcccaccggcgaggtgtacttcgccgacagcttcgacagaggcaccctgagcggctggatcctgagcaaggccaagaaggacgacaccgacgacgagatcgccaagtacgacggcaagtgggaggtggaggagatgaaggagagcaagctgcccggcgacaagggcctggtgctgatgagcagagccaagcaccacgccatcagcgccaagtag

SEQ ID NO: 329206 - DNA, 507 bp, Artificial Sequence
  derived and/or modified sequence
atggagggcaagtggctgctgtgcatgctgctggtgctgggcaccgccatcgtggaggcccacgacggccacgacgacgacgtgatcgacatcgaggacgacctggacgacgtgatcgaggaggtggaggacagcaagcccgacaccaccgccccccccagcagccccaaggtgacctacaaggcccccgtgcccaccggcgaggtgtacttcgccgacagcttcgacagaggcaccctgagcggctggatcctgagcaaggccaagaaggacgacaccgacgacgagatcgccaagtacgacggcaagtgggaggtggaggagatgaaggagagcaagctgcccggcgacaagggcctggtgctgatgagcagagccaagcaccacgccatcagcgccaagctgaacaagcccttcctgttcgacaccaagcccctgatcgtgcagtacgaggtgaacttccagaacggcatcgagtgcggcggcgcctacgtgaagctgctgtag

SEQ ID NO: 329207 - DNA, 240 bp, Artificial Sequence
  derived and/or modified sequence
atggagggcaagtggctgctgtgcatgctgctggtgctgggcaccgccatcgtggaggcccacgacggccacgacgacgacgtgatcgacatcgaggacgacctggacgacgtgatcgaggaggtggaggacagcaagcccgacaccaccgccccccccagcagccccaaggtgacctacaaggcccccgtgcccaccggcgaggtgtacttcgccgacagcttcgacagaggcacctag

SEQ ID NO: 329208 - DNA, 1455 bp, Artificial Sequence
  derived and/or modified sequence
atgaaggagagcaagctgcccggcgacaagggcctggtgctgatgagcagagccaagcaccacgccatcagcgccaagctgaacaagcccttcctgttcgacaccaagcccctgatcgtgcagtacgaggtgaacttccagaacggcatcgagtgcggcggcgcctacgtgaagctgctgagcaagacccccgagctgaacctggaccagttccacgacaagaccccctacaccatcatgttcggccccgacaagtgcggcgaggactacaagctgcacttcatcttcagacacaagaaccccaagaccggcatctacgaggagaagcacgccaagagacccgacgccgacctgaagacctacttcaccgacaagaagacccacctgtacaccctgatcctgaaccccgacaacagcttcgagatcctggtggaccagagcgtggtgaacagcggcaacctgctgaacgacatgaccccccccgtgaaccccagcagagagatcgaggaccccgaggacagaaagcccgaggactgggacgagagacccaagatccccgaccccgaggccgtgaagcccgacgactgggacgaggacgcccccgccaagatccccgacgaggaggccaccaagcccgagggctggctggacgacgagcccgagtacgtgcccgaccccgacgccgagaagcccgaggactgggacgaggacatggacggcgagtgggaggccccccagatcgccaaccccagatgcgagagcgcccccggctgcggcgtgtggcagagacccgtgatcgacaaccccaactacaagggcaagtggaagccccccatgatcgacaaccccagctaccagggcatctggaagcccagaaagatccccaaccccgacttcttcgaggacctggagcccttcagaatgacccccttcagcgccatcggcctggagctgtggagcatgaccagcgacatcttcttcgacaacttcatcatctgcgccgacagaagaatcgtggacgactgggccaacgacggctggggcctgaagaaggccgccgacggcgccgccgagcccggcgtggtgggccagatgatcgaggccgccgaggagagaccctggctgtgggtggtgtacatcctgaccgtggccctgcccgtgttcctggtgatcctgttctgctgcagcggcaagaagcagaccagcggcatggagtacaagaagaccgacgccccccagcccgacgtgaaggaggaggaggaggagaaggaggaggagaaggacaagggcgacgaggaggaggagggcgaggagaagctggaggagaagcagaagagcgacgccgaggaggacggcggcaccgtgagccaggaggaggaggacagaaagcccaaggccgaggaggacgagatcctgaacagaagccccagaaacagaaagcccagaagagagtag

SEQ ID NO: 329209 - DNA, 324 bp, Artificial Sequence
  derived and/or modified sequence
atggagggcaagtggctgctgtgcatgctgctggtgctgggcaccgccatcgtggaggcccacgacggccacgacgacgacgtgatcgacatcgaggacgacctggacgacgtgatcgaggaggtggaggacagcaagcccgacaccaccgccccccccagcagccccaaggtgacctacaaggcccccgtgcccaccggcgaggtgtacttcgccgacagcttcgacagaggcaccctgagcggctggatcctgagcaaggccaagaaggacgacaccgacgacgagatcgccaagtacgacggcaagtgggaggtggagtag

SEQ ID NO: 329210 - DNA, 435 bp, Artificial Sequence
  derived and/or modified sequence
atggagggcaagtggctgctgtgcatgctgctggtgctgggcaccgccatcgtggaggcccacgacggccacgacgacgacgtgatcgacatcgaggacgacctggacgacgtgatcgaggaggtggaggacagcaagcccgacaccaccgccccccccagcagccccaaggtgacctacaaggcccccgtgcccaccggcgaggtgtacttcgccgacagcttcgacagaggcaccctgagcggctggatcctgagcaaggccaagaaggacgacaccgacgacgagatcgccaagtacgacggcaagtgggaggtggaggagatgaaggagagcaagctgcccggcgacaagggcctggtgctgatgagcagagccaagcaccacgccatcagcgccaagctgaacaagcccttcctgttcgacaccaagtag

SEQ ID NO: 329211 - DNA, 1917 bp, Artificial Sequence
  derived and/or modified sequence
atgtgcgaggtcagcgaaaatccatacagcacgctgtggagcttcctgtcatggcgcaggaagctgctcgctcagaagtatcatgataacgcacagctcataaccggcatgagtttccatgggaccacaatcggcctagcgcctctgatggccatgtgtagcgtctatcaaagcgggggggtgaacatggaccattcagaaaatgccattggagtggccgctacaatggctcacgagatggggcacaattttggcatgacacatgactcagctgattgttgtagtgcttcggccgcagatggtggctgcattatggctgccgccacggggcacccattcccaaaagtcttcaacggttgcaaccggagggagcttgatagataccttcagtctggaggcggaatgtgcctctctaacatgccggatactcggatgctgtacggtggtaggaggtgcggtaatggttacctggaagatggagaggagtgcgattgtggtgaggaggaggagtgcaacaatccatgctgcaatgctagtaactgcacgctgagacctggtgcagaatgtgctcatgggtcttgctgtcatcagtgcaaactactcgcacccgggaccctatgtcgcgagcaggctcggcagtgtgatctgcccgagttctgtacaggtaagagtccccactgtccaacaaacttctatcagatggacggaactccttgcgagggaggccaggcttattgctacaatggcatgtgtctcacttatcaggagcagtgtcagcagctgtggggccctggagctcgacccgcccctgatctctgctttgagaaggttaatgtggccggggataccttcgggaattgtgggaaggatatgaacggggaacataggaaatgtaatatgcgtgacgctaagtgcggtaagatacagtgtcaatcaagtgaagccaggccactggagtccaatgccgtcccaattgacactaccataattatgaacggacgacaaattcagtgccgaggtacccacgtgtatagaggacctgaggaagagggagacatgctggatcccgggctcgtgatgacaggcactaagtgtggctacaatcatatctgcttcgaaggacaatgtagaaatacaagcttctttgagaccgaagggtgtggaaaaaaatgtaacggacatggtgtgtgtaacaacaaccagaattgccattgtctgcctggctgggcacctccattctgcaacaccccagggcacggtggctccatcgattctggtcccatgccccctgagtccgtcgggcctgtggtcgccggcgtgttggtggctatactggtccttgctgtcctgatgcttatgtactattgttgtcgccaaaataataagctgggccaattgaagccatcagccttgccgtctaaactgcggcaacaattttcatgtccattccgggtttcacagaacagcggaaccgggcatgcgaacccgactttcaagctgcagacaccccaggggaaacggaaggtgattaacactcctgagatccttaggaagccttctcagccgccgcctcggcctcctcccgattatctgcgagggggctcaccccccgcgcccttgccagcacatcttagccgggcggcccgaaatagcccgggccccgggtctcagatcgaaaggaccgaatcgtcacgaagacccccgccatcaaggcccatcccacctgcccctaattgcatcgtgagccagaagtgtctgctaccccctgcaatgatcctaagagccccacagccatccgggaccgttgtatgcttagttatcagttttaatatggccttttacagatccatgcgcattcgcattgagccgggcatcaaaaccaaactgctcgttcttctggtctggaagcaattctag

SEQ ID NO: 329212 - DNA, 1917 bp, Artificial Sequence
  derived and/or modified sequence
atgtgtgaggtgtctgagaacccctacagcaccctgtggagcttcctgtcctggaggaggaagctgctggcccagaagtaccatgacaatgcccagctgatcaccggcatgtccttccacggcaccaccatcggcctggcccccctgatggccatgtgcagcgtgtaccagagcggcggcgtgaacatggaccacagtgaaaatgccatcggcgtggccgccaccatggcccacgagatgggccacaactttggcatgacccatgacagcgctgactgctgcagcgccagcgctgctgatggcggctgcatcatggctgctgccaccggccaccccttccccaaggtgttcaacggctgcaacagaagagagctggaccgctacctgcagagcggcggcggcatgtgcctgagcaacatgccagacaccaggatgctgtatggaggccgccgctgtggaaatggctacctggaggatggagaggagtgtgactgtggggaggaggaggagtgcaacaacccctgctgcaatgccagcaactgcaccctgcggcctggagcagaatgtgcccacggcagctgctgccaccagtgcaagctgctggcccctggcaccctgtgccgggagcaggcccggcagtgtgacctgcctgagttctgcaccgggaagagcccccactgccccaccaacttctaccagatggatggcaccccctgtgagggcggccaggcctactgctacaacggcatgtgcctgacctaccaggagcagtgccagcagctgtggggccctggggcccggcctgccccagacctgtgctttgagaaggtgaatgtggccggggacaccttcggcaactgtgggaaggacatgaatggagagcacaggaagtgcaacatgagagatgccaagtgtgggaagatccagtgccagagcagcgaggcccggcccctggagagcaatgctgtgcccatcgacaccaccatcatcatgaatggccggcagatccagtgccggggcacccacgtgtaccggggccctgaggaggagggggacatgctggaccccggcctggtgatgacaggcaccaagtgtggctacaaccacatctgctttgagggccagtgcaggaacaccagcttctttgaaacagagggctgcggcaagaagtgcaatggccacggcgtgtgcaacaacaaccagaactgccactgcctgcccggctgggccccacccttctgcaacaccccaggccatggaggcagcattgattctggccccatgcctcctgagagcgtgggccctgtggtggccggcgtgctggtggccatcctggtgctggccgtgctgatgctgatgtactactgctgccggcagaacaacaagctgggccagctgaagcccagcgccctgcccagcaagctgcggcagcagttcagctgccccttccgggtgtcccagaacagcggcactggacatgccaaccccaccttcaagctgcagaccccccagggcaagaggaaggtgatcaacaccccagagatcctgaggaagcccagccagcccccaccccggcccccaccagactacctgcggggcggcagccccccagcccccctgcctgcccacctgagcagagctgccaggaacagccctggccctggcagccagatcgagaggacagagagcagcagaagacctccacccagccggcccatccccccagcccccaactgcatcgtgtcccagaagtgcctgctgcccccagccatgatcctgcgggccccccagcccagcggcaccgtggtgtgcctggtgatctccttcaacatggccttctaccgctccatgaggatcagaattgagcccggcatcaagaccaagctgctggtgctgctggtgtggaagcagttctag

SEQ ID NO: 329213 - DNA, 1917 bp, Artificial Sequence
  derived and/or modified sequence
atgtgcgaggtgagcgagaacccctacagcaccctgtggagcttcctctcatggaggagaaagctgctggctcagaaataccatgataacgcccagttgatcacaggtatgtctttccatggtacaacaattgggttggctccactcatggccatgtgctccgtgtaccagtctgggggggtgaacatggatcattccgagaatgcaatcggggtggctgcgaccatggctcacgaaatgggccataatttcggtatgacacatgacagtgccgactgctgttcagcttcagccgcggatggagggtgtatcatggccgcagccacaggacacccgttccccaaggttttcaacggatgtaatcgcagggaattggataggtatctgcagtctggaggcggtatgtgtcttagtaatatgcccgacacgcgaatgctgtatgggggccggcggtgcggtaacggctacttggaagatggcgaagagtgcgactgtggtgaagaggaggagtgtaataacccctgctgcaatgccagcaattgcaccctcagacccggcgccgagtgtgcacatggtagctgttgccatcagtgcaaactgttggcgcctggcacactgtgtcgtgagcaggcacgacaatgtgatctgcctgagttctgcactggaaagagcccccattgtcccactaatttttaccagatggacggaacgccatgtgaggggggacaagcctattgttataatgggatgtgcctgacttaccaggaacagtgccagcagctgtggggacccggcgcccgcccggctcccgacctatgcttcgagaaggtcaatgtcgccggcgacacgtttggaaattgcgggaaggacatgaacggggaacaccgtaaatgtaacatgcgcgatgcgaagtgtggaaagatccagtgccagagctcagaagcgcgaccactcgagtcaaacgcggtgccaattgatacaacaataatcatgaacggtagacagatccagtgcagaggcacccatgtctaccgcggccctgaggaggagggagatatgctggacccgggcctggtgatgaccggaaccaagtgcggatataaccatatctgctttgaggggcaatgtcgcaatactagtttcttcgaaactgagggatgcggtaaaaaatgtaatggccatggtgtctgcaacaataaccagaactgccactgcctgcctggttgggctcccccattctgtaatactcccgggcacgggggaagcatcgattcagggcccatgcctcccgaatctgtgggtccagtggtcgccggggttttagtagccattctcgtgcttgccgtgctgatgctaatgtattattgctgtcgccagaacaataagttgggacagcttaaaccaagcgccttgccctccaaattacggcaacagttctcttgtcccttccgggtcagccagaattccggcactggccatgctaatccgactttcaaacttcaaacaccgcagggtaagcgaaaagtcataaacactcccgagattctgcgaaagccttcacagccacctccaaggcctccgccagattatctacggggcggtagtccgcctgcgcctctgccagcccacctttcccgggcagcccgtaactccccagggcctggttcccagatagaacgaacagagtcatctcgacgcccacctccctccaggcccatccccccagcgcccaattgcatcgtttctcagaaatgtctacttccgcctgccatgatcctccgggctccccaacctagcggcactgtggtctgccttgtaataagcttcaacatggccttttataggtcgatgaggatccggatagagcccggtattaaaaccaaacttctggtgctcctcgtgtggaaacagttttag

SEQ ID NO: 329214 - DNA, 1917 bp, Artificial Sequence
  derived and/or modified sequence
atgtgtgaagtgtccgaaaacccgtactccacattgtggtcattcttatcgtggcggaggaagctgcttgcccagaagtaccacgataatgcccagctcatcacaggaatgagcttccacggcacaacaatcggcctagcgcctctgatggcgatgtgttctgtgtaccagagtgggggagtgaacatggatcattcggagaatgcaatcggagtcgcggctactatggctcatgagatggggcacaacttcggaatgacacacgattccgcagactgctgttccgcttccgcggctgacgggggatgtattatggccgctgctactggccaccctttccctaaggttttcaatggctgtaaccgaagggagcttgaccggtatctacaatctgggggaggaatgtgcttgtctaacatgccggacacccggatgctgtacggcggacgcaggtgcggtaacggttacctcgaggacggagaagagtgcgattgtggcgaagaagaagaatgcaataacccgtgctgcaatgcctctaactgcaccctgcgccctggagctgagtgcgcacacggttcatgctgtcaccaatgtaaacttttggcgccaggcactctctgtagagaacaggccaggcagtgcgatctcccggagttttgtacagggaaaagtccacactgtcccactaatttctatcaaatggacggcacgccatgcgaagggggacaggcctattgttacaacggcatgtgtttgacctaccaggagcagtgccaacagctctggggtccaggggctcgtcccgctcctgatctctgcttcgaaaaggtaaacgtggcaggcgatacattcgggaattgcggcaaggacatgaatggggagcacagaaagtgtaacatgcgggatgccaagtgcggcaagatccagtgccagtcctccgaagcacgccctcttgaatccaacgctgtgcctatcgacacaaccatcatcatgaatggacggcagattcagtgtcggggaacacacgtgtacaggggacctgaggaagagggtgatatgctggacccaggtttggtgatgacaggcactaagtgcgggtacaaccacatctgctttgagggacagtgtcggaacacctcctttttcgagaccgaaggttgtggtaaaaaatgcaacggtcatggggtctgcaacaacaatcagaactgccactgccttcccggatgggctcctcctttttgcaacacacccggtcacggcggaagcatcgatagcggcccaatgcctcccgaatctgtgggcccagtcgtcgccggagtcctcgtggccattctggttcttgcagtgctgatgttaatgtattattgctgccgacaaaataacaaacttggacaactcaaaccttcagcgctaccttctaagctgaggcagcagttctcctgtccatttagggtctctcagaatagtggcacaggccatgccaacccgacctttaagctccagaccccccagggtaagagaaaggtgataaacacacctgaaatcctgaggaagccttctcagccccctcccaggccacctcctgattatcttagaggcggaagtccccctgcccctctgccggcacatctgagccgggcagctaggaactcccctggaccaggttcccagatagaacgaactgagtcatccagaagacctccgcctagtagaccaatccccccagcgccaaactgcatagtgtcccagaaatgtttattgcccccagccatgattctccgggcaccccaaccttctggaaccgtggtgtgccttgtgatttctttcaatatggctttctaccggtcaatgaggatccgcatcgagcccggaattaaaactaaattactggtcttactggtctggaaacagttctag

SEQ ID NO: 329215 - DNA, 1917 bp, Artificial Sequence
  derived and/or modified sequence
atgtgcgaggtgagcgagaacccctacagcaccctgtggagcttcctgagctggagaagaaagctgctggcccagaagtaccacgacaacgcccagctgatcaccggcatgagcttccacggcaccaccatcggcctggcccccctgatggccatgtgcagcgtgtaccagagcggcggcgtgaacatggaccacagcgagaacgccatcggcgtggccgccaccatggcccacgagatgggccacaacttcggcatgacccacgacagcgccgactgctgcagcgccagcgccgccgacggcggctgcatcatggccgccgccaccggccaccccttccccaaggtgttcaacggctgcaacagaagagagctggacagatacctgcagagcggcggcggcatgtgcctgagcaacatgcccgacaccagaatgctgtacggcggcagaagatgcggcaacggctacctggaggacggcgaggagtgcgactgcggcgaggaggaggagtgcaacaacccctgctgcaacgccagcaactgcaccctgagacccggcgccgagtgcgcccacggcagctgctgccaccagtgcaagctgctggcccccggcaccctgtgcagagagcaggccagacagtgcgacctgcccgagttctgcaccggcaagagcccccactgccccaccaacttctaccagatggacggcaccccctgcgagggcggccaggcctactgctacaacggcatgtgcctgacctaccaggagcagtgccagcagctgtggggccccggcgccagacccgcccccgacctgtgcttcgagaaggtgaacgtggccggcgacaccttcggcaactgcggcaaggacatgaacggcgagcacagaaagtgcaacatgagagacgccaagtgcggcaagatccagtgccagagcagcgaggccagacccctggagagcaacgccgtgcccatcgacaccaccatcatcatgaacggcagacagatccagtgcagaggcacccacgtgtacagaggccccgaggaggagggcgacatgctggaccccggcctggtgatgaccggcaccaagtgcggctacaaccacatctgcttcgagggccagtgcagaaacaccagcttcttcgagaccgagggctgcggcaagaagtgcaacggccacggcgtgtgcaacaacaaccagaactgccactgcctgcccggctgggccccccccttctgcaacacccccggccacggcggcagcatcgacagcggccccatgccccccgagagcgtgggccccgtggtggccggcgtgctggtggccatcctggtgctggccgtgctgatgctgatgtactactgctgcagacagaacaacaagctgggccagctgaagcccagcgccctgcccagcaagctgagacagcagttcagctgccccttcagagtgagccagaacagcggcaccggccacgccaaccccaccttcaagctgcagaccccccagggcaagagaaaggtgatcaacacccccgagatcctgagaaagcccagccagcccccccccagacccccccccgactacctgagaggcggcagcccccccgcccccctgcccgcccacctgagcagagccgccagaaacagccccggccccggcagccagatcgagagaaccgagagcagcagaagacccccccccagcagacccatcccccccgcccccaactgcatcgtgagccagaagtgcctgctgccccccgccatgatcctgagagccccccagcccagcggcaccgtggtgtgcctggtgatcagcttcaacatggccttctacagaagcatgagaatcagaatcgagcccggcatcaagaccaagctgctggtgctgctggtgtggaagcagttctag

SEQ ID NO: 329216 - DNA, 504 bp, Artificial Sequence
  derived and/or modified sequence
atgagcgccaaggacctgatgagaatggagaagatcgtgctggagaaggtgtgctggaaggtgaaggccaccaccgccttccagttcctgcagctgtactacagcctgctgcaggagaacctgcccctggagagaagaaacagcatcaacttcgagagactggaggcccagctgaaggcctgccactgcagaatcatcttcagcaaggccaagcccagcgtgctggccctgagcatcatcgccctggagatccaggcccagaagtgcgtggagctgaccgagggcatcgagtgcctgcagaagcacagcaagatcaacggcagagacctgaccttctggcaggagctggtgagcaagtgcctgaccgagtacagcagcaacaagtgcagcaagcccaacgtgcagaagctgaagtggatcgtgagcggcagaaccgccagacagctgaagcacagctactacagaatcacccacctgcccaccatccccgagatggtgccctag

SEQ ID NO: 329217 - DNA, 486 bp, Artificial Sequence
  derived and/or modified sequence
atgagaatggagaagatcgtgctggagaaggtgtgctggaaggtgaaggccaccaccgccttccagttcctgcagctgtactacagcctgctgcaggagaacctgcccctggagagaagaaacagcatcaacttcgagagactggaggcccagctgaaggcctgccactgcagaatcatcttcagcaaggccaagcccagcgtgctggccctgagcatcatcgccctggagatccaggcccagaagtgcgtggagctgaccgagggcatcgagtgcctgcagaagcacagcaagatcaacggcagagacctgaccttctggcaggagctggtgagcaagtgcctgaccgagtacagcagcaacaagtgcagcaagcccaacgtgcagaagctgaagtggatcgtgagcggcagaaccgccagacagctgaagcacagctactacagaatcacccacctgcccaccatccccgagatggtgccctag

SEQ ID NO: 329218 - DNA, 994 bp, Artificial Sequence
  derived and/or modified sequence
ccctgatcagggccgagttgtctcggcggcgctgccgaggcctccacccaggacagtccccctccccgggcctctctcctcttgcctacgagtcccctctcctcgtaggcctctcggatctgatatcgtggggtgaggtgagcaggcccggggagggtggttaccgctgaggagctgcagtctctgtcaagatgatagaggtactgacaacaactgactctcagaaactgctacaccagctgaatgccctgttggaacaggagtctagatgtcagccaaagacttgatgagaatggaaaagattgtattggagaaggtgtgttggaaagtcaaagctactactgcctttcaatttctgcaactgtattattcactccttcaagagaacttgccacttgaaaggagaaatagcattaattttgaaagactagaagctcaactgaaggcatgtcattgcaggatcatattttctaaagcaaagccttctgtgttggcattgtctatcattgcattagagatccaagcacagaagtgtgtagagttaacagaaggaatagaatgtcttcagaaacattccaagataaatggcagagatctgaccttctggcaagagcttgtatccaaatgtttaactgaatattcatcaaataagtgttccaaaccaaatgttcagaagttgaaatggattgtttctgggcgtactgcacggcaattgaagcatagctactacagaataactcaccttccaacaattcctgaaatggtcccttaactggattattacagcaccaaaaaacttctctgaagcctttctccacaaccttgttctatggattccataatgttacaatggatttaagctatgaagcctcaaaacatcacgagataagcatgatggtctcagacttgggaaaactgcctaatattatgctgtagtggaattatgtttagatttgaattcatctgtgaagcattcaaatcaaagctaaaagcc

SEQ ID NO: 329219 - DNA, 504 bp, Artificial Sequence
  derived and/or modified sequence
atgtccgcgaaagatcttatgcgtatggagaagattgtcctagagaaagtttgttggaaggtcaaagccacaacggcattccagttcctgcagttgtactattctttgctgcaggaaaatctgccgctagagcgacggaacagcatcaatttcgagaggctcgaggctcagctcaaagcctgccactgtcggatcatcttctcgaaggcaaaaccgtcggttctagcgctgagtatcattgccctggaaatccaggcccagaagtgcgtagagcttactgagggcattgagtgtttgcagaaacacagcaaaatcaatggtcgagacctcacgttttggcaggagttagtgtctaagtgcctgactgaatacagctcaaacaagtgctctaagccaaacgtgcagaaattgaaatggatagtatcaggaaggacagcacgtcaattgaagcactcttactatagaataactcacctgcctactatccctgagatggtcccctag

SEQ ID NO: 329220 - DNA, 486 bp, Artificial Sequence
  derived and/or modified sequence
atgcggatggagaagatcgtgctggaaaaggtgtgttggaaagtgaaggcaaccacagcttttcagtttcttcagctctactattccctgctccaagagaatctgcctctggaacggcgaaattcaataaatttcgagcggctggaagcacaactgaaggcttgtcactgtagaatcatattcagtaaggctaaaccttccgtcctcgctctgtcgatcatcgcgctggagatacaggcccaaaaatgtgtcgagctgacagaagggattgagtgtcttcagaagcacagtaaaattaacgggcgcgatctcacattctggcaagagctggtgagcaagtgtttaacggagtacagcagcaataagtgcagcaagccaaacgtgcaaaaactgaagtggatagtctcaggcagaactgctcggcagcttaaacactcctattacaggataacccacctgccaaccattccagagatggtcccttag

SEQ ID NO: 329221 - DNA, 486 bp, Artificial Sequence
  derived and/or modified sequence
atgagaatggagaaaatagttcttgaaaaggtttgctggaaggtcaaagctactactgccttccagttccttcaactctattactcactgctccaggagaacctgcctcttgagcgaagaaacagcatcaacttcgagagattggaagcacaactgaaagcgtgtcactgtcggatcatttttagtaaagcaaaaccctccgtactggcactgtcaattatagctcttgaaatccaggcgcagaaatgtgtggaactgaccgaggggattgagtgtctgcagaaacactcgaagatcaacggaagagatttaaccttttggcaggaactggtgagcaagtgtctcacagagtattcctctaacaagtgctctaagcctaacgtccagaagctgaagtggatagtcagcgggaggaccgcacgccagctgaagcacagctattaccgcatcactcacttaccgaccatacctgagatggtgccgtag

SEQ ID NO: 329222 - DNA, 504 bp, Artificial Sequence
  derived and/or modified sequence
atgtctgccaaggacctgatgaggatggagaagatcgtgctggagaaggtgtgctggaaggtgaaggccaccacagccttccagttcctgcagctgtactacagcctgctgcaggagaacctgcccctggagaggaggaacagcatcaactttgagcggctggaggcccagctgaaggcctgccactgccgcatcatcttcagcaaggccaagcccagcgtgctggccctgagcatcatcgccctggagatccaggcccagaagtgtgtggagctgacagagggcattgaatgtctgcagaagcacagcaagatcaatggccgggacctgaccttctggcaggagctggtgtccaagtgcctgacagagtacagcagcaacaagtgcagcaagcccaacgtgcagaagctgaagtggatcgtgtctggccgcacagcccggcagctgaagcacagctactaccgcatcacccacctgcccaccatccctgagatggtgccctag

SEQ ID NO: 329223 - DNA, 486 bp, Artificial Sequence
  derived and/or modified sequence
atgaggatggagaagatcgtgctggagaaggtgtgctggaaggtgaaggccaccacagccttccagttcctgcagctgtactacagcctgctgcaggagaacctgcccctggagaggaggaacagcatcaactttgagcggctggaggcccagctgaaggcctgccactgccgcatcatcttcagcaaggccaagcccagcgtgctggccctgagcatcatcgccctggagatccaggcccagaagtgtgtggagctgacagagggcattgaatgtctgcagaagcacagcaagatcaatggccgggacctgaccttctggcaggagctggtgtccaagtgcctgacagagtacagcagcaacaagtgcagcaagcccaacgtgcagaagctgaagtggatcgtgtctggccgcacagcccggcagctgaagcacagctactaccgcatcacccacctgcccaccatccctgagatggtgccctag

SEQ ID NO: 329224 - DNA, 504 bp, Artificial Sequence
  derived and/or modified sequence
atgagcgccaaggacctgatgcggatggagaagatcgtgctggagaaggtttgttggaaggttaaggcaacaacagcttttcagtttctgcagctatactacagcttgctccaggaaaacttacctctggagcggcggaatagtattaattttgaaagactggaagcccagcttaaagcatgtcactgccgcatcatttttagcaaggctaagccgagtgtcctcgctctctcaataattgctctcgagatccaagcccagaagtgtgtggaactcacggaaggaatcgagtgcctgcagaaacacagcaaaattaacggtcgtgatttgaccttttggcaggagctagtatctaagtgcctcaccgagtatagctccaataagtgttccaaacctaatgtgcagaaacttaaatggattgtctcaggacgaactgcaagacaactgaagcactcttattaccgcattacgcacttgccaacgatccccgaaatggtgccttag

SEQ ID NO: 329225 - DNA, 486 bp, Artificial Sequence
  derived and/or modified sequence
atgcggatggagaagatcgtgctggagaaggtgtgctggaaggtgaaagctactaccgccttccaatttctgcagttgtactacagtttattacaggagaatcttcctctggagcgccggaactccatcaactttgaacggctggaagcccagctgaaggcctgtcattgcagaatcatcttctccaaagcaaagccctccgtgctggctttgagcatcatagctctggagatccaggcacagaagtgtgtcgagctgactgaagggattgagtgtctgcagaagcattcaaagatcaacggaagggacctcactttctggcaagagctggtctccaaatgcctcacagagtatagcagcaataaatgctccaagccaaatgtgcagaagctaaaatggattgtgagcgggcgcaccgctcgtcagctgaagcattcgtactaccgcatcacacacttacctacaattcctgagatggtcccttag

SEQ ID NO: 329226 - DNA, 486 bp, Artificial Sequence
  derived and/or modified sequence
atgcggatggagaagatcgtgctggagaaggtgtgctggaaggtgaaggccaccacggctttccaatttctgcagctgtactatagccttcttcaagaaaatctacctttggagagaaggaactcgatcaatttcgagaggctggaggcccaactgaaagcatgccattgcaggatcattttctcaaaagctaagcctagcgtcctggctctgagcatcattgccttggagattcaagcccaaaaatgtgtggagctgacagaaggtatagagtgcctccagaagcactcaaaaatcaacggacgggatcttactttttggcaggaattagtgagcaaatgcctgaccgagtatagcagcaataaatgcagtaagccaaatgtccagaagctgaagtggattgtgtctggccgcacggcgaggcagctgaagcacagctattaccgaattactcacctgccaactatacccgagatggtgccttag

SEQ ID NO: 329227 - DNA, 504 bp, Artificial Sequence
  derived and/or modified sequence
atgtctgccaaagatctgatgagaatggaaaaaattgtgctcgaaaaagtgtgttggaaagtcaaagccaccacagcttttcagttccttcaactgtattattctctgcttcaggagaacctgccactggaacggaggaacagtattaattttgagagactcgaggctcagctgaaggcatgccattgccggatcattttctcaaaagcaaaaccctcagttctggctctttccatcatcgctttggaaattcaggcccaaaaatgtgttgagctaaccgaaggaatcgagtgtctccagaagcattccaagatcaacggacgagatctcaccttctggcaggagctggtgagcaaatgtcttacagaatactcaagtaacaagtgctctaaacctaatgttcaaaaacttaagtggattgtgagcggtagaaccgccagacagctcaaacacagctattacaggatcacgcaccttcccacgatccccgagatggttccatag

SEQ ID NO: 329228 - DNA, 486 bp, Artificial Sequence
  derived and/or modified sequence
atgaggatggagaagatagtgctggagaaagtgtgctggaaagtcaaagccaccacggccttccagtttctccagctgtattacagtctcctccaggagaacctgcctctcgaacggagaaattcgattaactttgagagacttgaagcgcagctgaaggcttgccactgccgaatcattttcagcaaagccaaacctagtgtgctcgctttaagcattattgccctggagattcaggctcagaagtgtgttgaactgaccgagggtatcgagtgcctacagaaacattctaagattaacggcagagatctcacgttttggcaggagctagtgagtaagtgtttgaccgaatactctagtaataagtgttcaaagcctaacgtccagaagttgaagtggattgtttcaggcaggactgcaagacagctcaaacactcatactacagaattactcacttgccaacaatccccgaaatggtgccatag

SEQ ID NO: 329229 - DNA, 486 bp, Artificial Sequence
  derived and/or modified sequence
atgagaatggaaaaaatagtgctcgagaaggtgtgttggaaagtcaaggctaccaccgcttttcagttccttcagctgtactatagcctgctccaggaaaacctgccactcgagcgacgcaactccattaacttcgagcggttagaggctcaattgaaggcgtgtcactgtcggatcatcttctcaaaggcgaaaccctctgtgctagcgctgtcaataattgccttagagatacaggcacagaaatgtgtggaactgactgaaggcatcgaatgccttcagaaacatagcaagatcaatgggagagatctgacattctggcaggaactggtgtccaagtgcctcacagagtattcatccaacaagtgctccaagccaaacgtgcagaaactgaaatggatagtatccggtaggactgctcggcagcttaagcactcctattatcggattactcatctgcctaccatcccggaaatggtcccttag

SEQ ID NO: 329230 - DNA, 930 bp, Artificial Sequence
  derived and/or modified sequence
atggagagcagaagcggcatccaggccggcgtgagatgcagagacctgggcagcctgcagcccccccccctggccctgaagcagttcagcagcctgagcctgcccagcagctgggactacagaagactgccccccagatgcggcttcctgttcgaggtgagcgagaccaccaacccccccgccggcaccaacagcagacacaccctgaccgtgaagctggacggcctggccaagatcagaaccgccagagaggcccccagcgagtgcgtgtgcccccccggcccccccggcagaagaggcaagcccggcagaagaggcgaccccggcccccccggccccctgggcctggacggcaagcccggcctgcccggccccaagggcgagaagggcgcccccggcgacttcggccccagaggcgaccagggccaggacggcgccgccggcccccccggcccccccggcccccccggcgccagaggcccccccggcgacaccggcaaggacggccccagaggcgcccagggccccgccggccccaagggcgagcccggccaggacggcgagatgggccccaagggcccccccggccccaagggcgagcccggcgtgcccggcaagaagggcgacgacggcacccccagccagcccggcccccccggccccaagggcgagcccggcagcatgggccccagaggcgagaacggcgtggacggcgcccccggccccaagggcgagcccggccacagaggcaccgacggcgccgccggccccagaggcgacgtgagagaccccggcctgggcagcgtgagcagctgcagccagagactggccagcagcagcaagaagaacggcagcgagcccccccccggctgcgccggctgccccagaccccagggcagagccggcagacacagcggcgacagactgtag

SEQ ID NO: 329231 - DNA, 930 bp, Artificial Sequence
  derived and/or modified sequence
atggagtctcgctctggcatccaggctggagtgcggtgtcgcgatctcggctcactgcaacctccgcctctcgcgttaaagcagttctccagcctcagtctcccaagcagctgggattataggcgcctgccaccacgctgtggcttcctttttgaagtcagcgagaccacgaacccaccggcaggaaccaactccagacacactttgaccgtgaagttggacggactagcgaagatccggactgctcgggaagctccatccgaatgtgtctgccccccagggccccctggacggcgcggcaagcctgggagaagaggcgaccctggtcctccaggacccctgggtttggatggcaagcccggacttccaggcccgaaaggggaaaagggtgcaccaggagactttggcccccggggagaccaaggacaagatggagctgctgggcctccggggccccctggacctcctggggcccggggccctcctggcgacactgggaaagatggccccaggggagcacaaggcccagcgggccccaaaggagagcccggacaagacggcgagatgggcccaaagggacccccagggcccaagggtgagcctggagtacctggaaagaagggcgacgatgggacaccaagccagcctggaccaccagggcccaagggcgagccagggagcatggggcctcggggagagaacggtgtggacggtgccccaggaccgaagggggagcctggccaccgaggcacggatggagctgcagggccccggggtgacgtccgggatcctggcctcggctctgtctcctcatgctcccagaggctggcttcttcctccaaaaaaaatggatctgagcccccgcctggctgtgcagggtgccccaggcctcaagggcgagcagggagacacagtggtgatcgactatga

SEQ ID NO: 329232 - DNA, 930 bp, Artificial Sequence
  derived and/or modified sequence
atggaatcccgttccggtattcaggccggagtgcggtgtcgtgatcttggaagcctgcagcccccacctctcgccctgaagcagttcagttcactgtctttgcccagttcctgggactacaggcggcttccccctcgctgcggatttctctttgaggtttcggaaaccaccaatcctcctgccgggacaaattctagacacaccctgactgtcaaactggacggcctggccaaaattcgcaccgctagggaagctccctctgagtgcgtttgccctcctggccctcccggccgccgaggcaaacctgggaggaggggcgatcccggacccccgggcccgctagggttagacggcaaaccaggactgcctggaccgaaaggcgagaaaggcgcgcctggggatttcggaccaagaggagatcagggacaggatggagccgccggacctccagggccgcctggcccccctggtgctagaggccctccaggagacaccgggaaagacgggccaaggggcgcacaaggccccgctgggcccaagggcgaacctggccaggacggggagatgggccccaaaggcccaccgggcccaaagggagagcctggagtgcccggcaagaaaggggacgatggcaccccatcacagcccggaccccccgggcccaagggggagcctgggtcaatgggccccagaggcgaaaacggggttgacggcgcccccgggcctaaaggggagcctggccaccgcggaacggatggcgcagctggaccgcggggtgatgtccgagacccgggcctgggcagcgtgtcatcgtgttcgcagcgacttgcaagttcttccaagaagaatggcagcgaaccacccccaggctgcgccggttgtcctaggcctcaagggagagccggtcgtcatagcggggatcgcttatag

SEQ ID NO: 329233 - DNA, 930 bp, Artificial Sequence
  derived and/or modified sequence
atggagagccgcagcggcatccaggccggcgtgcgctgccgggacctgggcagcctgcagcccccacccctggccctgaagcagttcagcagcctgagcctgcccagctcctgggactacagaaggctgcccccaagatgtggcttcctgtttgaggtgtctgagaccaccaaccccccagctggcaccaacagccgccacaccctgactgtgaagctggatggcctggccaagatcagaacagcccgggaggcccccagtgaatgtgtgtgccccccaggccccccaggccggcggggcaagccaggccggcggggggaccccggccccccaggccccctgggcctggatggcaagccaggcctgcccggccccaagggggagaagggggcccctggggactttggccccaggggggaccagggccaggatggagctgctggccccccaggccccccaggccccccaggggcccggggccccccaggggacaccgggaaggatggccccaggggggcccagggccctgctggccccaagggggagcccggccaggatggagagatgggccccaagggccccccaggccccaagggggagcccggggtgcctgggaagaagggagatgatggcacccccagccagcccggccccccaggccccaagggggagcccggctccatgggccccagaggagaaaatggagtggatggagcccctggccccaagggggagcccggccaccggggcacagatggagctgctggccccagaggagatgtgcgggaccccggcctgggctctgtgagcagctgcagccagaggctggccagcagcagcaagaagaatggaagtgagcccccacctggctgtgccggctgcccccggccccagggccgggccggccgccacagcggggaccggctgtag

SEQ ID NO: 329234 - DNA, 930 bp, Artificial Sequence
  derived and/or modified sequence
atggagagccggagcggcatccaggccggcgtgcggtgccgggacctcggttcactgcagcctcctccactggctttaaagcaattctcaagtctgagtttgccgtcgtcttgggactaccgccggctgccaccaaggtgtggatttcttttcgaggtttccgaaaccacaaaccctccagccggtacaaactccaggcacacactgaccgtaaaattggatgggctcgcaaagatcaggacagcaagggaggcccctagcgagtgtgtctgcccccccggaccccccgggcgtcggggaaaaccaggacgccgaggtgatcccggaccacctggcccccttgggttggatggcaaacccgggctccctgggccaaagggggaaaagggagcacctggagacttcgggccacgtggggaccaaggacaggatggtgccgccgggcccccgggtccacctggaccgccaggcgccaggggaccacctggggacaccggcaaggatggtcctcggggcgcacaggggccagctggtccaaaaggggagcctggtcaggatggagagatgggaccaaaagggcctcctgggcccaaaggagaaccaggggtcccaggtaaaaagggggatgatggcactccctcccaaccaggaccaccaggcccaaagggcgagcccggatctatgggaccccggggggaaaatggagtggatggcgcccccgggccgaagggtgagccaggccaccgtggtacagacggcgccgcaggcccgcggggcgatgtccgagaccccggcctgggatctgtctcttcctgttcccagcgacttgccagctcaagcaaaaaaaatggatccgagccgccacctggttgcgcaggttgtccacgcccccagggacgagccggacggcactcaggggataggctctag

SEQ ID NO: 329235 - DNA, 930 bp, Artificial Sequence
  derived and/or modified sequence
atggagtcacgttccggaattcaggctggtgtgagatgtcgggaccttgggagcctgcaaccacctccccttgcgcttaagcagtttagtagtttgtccctcccatcatcttgggactatcgaagactcccacctcggtgcggctttctattcgaagtatcagagacaacaaatcctccagctgggaccaattcccggcacacgctcaccgtgaagctcgatggactggccaagattaggacagctcgggaggcaccttccgagtgtgtgtgtcctcccggacctcccggaagacggggtaagccgggtagacgcggtgaccccggaccccctggccctctgggtctggacggaaagcctggactgccagggccaaaaggagaaaagggcgctcccggagactttggaccgaggggggatcaaggccaggatggagccgctggcccacctggaccgccaggaccacccggtgctcgagggccaccaggagacaccgggaaagacggacccagaggcgcacaaggacccgcagggcctaagggcgagcctggccaggatggagagatggggcctaagggaccccctggaccaaaaggagaacctggagtacccggaaaaaagggggatgatggtacaccttcacagcctggcccaccgggtcccaagggcgagccaggcagcatgggcccacgcggagaaaacggcgtggacggcgcaccaggccctaagggagagcctgggcatcgagggacagacggggctgcaggaccaagaggcgacgtacgagatcccggactgggatcggtttctagctgttcacagcgccttgccagcagttcaaagaagaacggatccgagcccccacctggatgtgctggctgtccaaggccacaaggtagggcaggcagacacagtggagacagactgtag

SEQ ID NO: 329236 - DNA, 366 bp, Artificial Sequence
  derived and/or modified sequence
atgatgcggagcatcttcctgccccaccggaagctgatctgcagccgaagaggccatttggaccccagaggctgggaggaagacgaaaagatcttggtccccgatgccatccctacactgccaccatatgtgtttatccggacagaccaggcatgtgtgaaagtctatcccggcttcgtcttgattcgcaacggcaagacccacagacatcggggggactgccatgaggaagaggtatgcgctcaccgtacactggaaactggagggatggcctgccatgtgggcccccacggggaaggtccttccctgtggggtttttgggggtcctggaaacaggtgctattcttcctccccgtggaccactag

SEQ ID NO: 329237 - protein, 90 aa, Artificial Sequence
  derived and/or modified sequence
MDSFKVVLEGPAPWGFRLQGGKDFNVPLSISRLTPGGKAAQAGVAVGDWVLSIDGENAGSLTHIEAQNKIRACGERLSLGLSRAQPVQSK

SEQ ID NO: 329238 - DNA, 1647 bp, Artificial Sequence
  derived and/or modified sequence
agaacactggcggccgatcccaacgaggctccctggagcccgacgcagagcagcgccctggccgggccaagcaggagccggcatcatggattccttcaaagtagtgctggaggggccagcaccttggggcttccggctgcaagggggcaaggacttcaatgtgcccctctccatttcccggctcactcctgggggcaaagcggcgcaggccggagtggccgtgggtgactgggtgctgagcatcgatggcgagaatgcgggtagcctcacacacatcgaagctcagaacaagatccgggcctgcggggagcgcctcagcctgggcctcagcagggcccagccggttcagagcaaaccgcagaaggcctccgcccccgccgcggaccctccgcggtacacctttgcacccagcgtctccctcaacaagacggcccggccctttggggcgcccccgcccgctgacagcgccccgcagcagaatggacagccgctccgaccgctggtcccagatgccagcaagcagcggctgatggagaacacagaggactggcggccgcggccggggacaggccagtcgcgttccttccgcatccttgcccacctcacaggcaccgagttcatgcaagacccggatgaggagcacctgaagaaatcaaggccctaccgcccccagccctaccagccgcccgccctgggctgtggaccctgcgtttgccgagcgctatgccccggacaaaacgagcacagtgctgacccggcacagccagccggccacgcccacgccgctgcagagccgcacctccattgtgcaggcagctgccggaggggtgccaggagggggcagcaacaacggcaagactcccgtgtgtcaccagtgccacaaggtcatccggggccgctacctggtggcgctgggccacgcgtaccacccggaggagtttgtgtgtagccagtgtgggaaggtcctggaagagggtggcttctttgaggagaagggcgccatcttctgcccaccatgctatgacgtgcgctatgcacccagctgtgccaagtgcaagaagaagattacaggcgagatcatgcacgccctgaagatgacctggcacgtgcactgctttacctgtgctgcctgcaagacgcccatccggaacagggccttctacatggaggagggcgtgccctattgcgagcgagactatgagaagatgtttggcacgaaatgccatggctgtgacttcaagatcgacgctggggaccgcttcctggaggccctgggcttcagctggcatgacacctgcttcgtctgtgcgatatgtcagatcaacctggaaggaaagaccttctactccaagaaggacaggcctctctgcaagagccatgccttctctcatgtgtgagccccttctgcccacagctgccgcggtggcccctagcctgaggggcctggagtcgtggccctgcatttctgggtagggctggcaatggttgccttaaccctggctcctggcccgagcctggggctccctgggccctgccccacccaccttatcctcccaccccactccctccaccaccacagcacaccggtgctggccacaccagccccctttcacctccagtgccacaataaacctgtacccagctgtg

SEQ ID NO: 329239 - DNA, 126 bp, Artificial Sequence
  derived and/or modified sequence
gatcttggttggcatttttcaaactgtgatgaagacactttttatagccctgttcagaatacagaaggagacctactcttctttgatcacaatctaaagacagacagaggacatgtggaaaggtaa

SEQ ID NO: 329240 - protein, 31 aa, Artificial Sequence
  derived and/or modified sequence
RRCICTTRTCRFPYRRLGTCIFQNRVYTFCC

SEQ ID NO: 329241 - protein, 31 aa, Artificial Sequence
  derived and/or modified sequence
RRCICTTRTCRFPYRRLGTCLFQNRVYTFCC

SEQ ID NO: 329242 - protein, 118 aa, Artificial Sequence
  derived and/or modified sequence
VTPAMRTFALLTAMLLLVALAQAEPLQARADEAAAQEQSDSARGLRCICGRGICRLLRRFGSCAFRGTLHRVCCRTCRIKKNKLRIYFESKKFLLLLYLVLHFLFSSKINTLLQDFSL

SEQ ID NO: 329243 - protein, 141 aa, Artificial Sequence
  derived and/or modified sequence
VTPAMRTFALLTAMLLLVALAQAEPLQARADEAAAQEQPGADDQEMAHAFTWHESAALPLSSDSARGLRCICGRRICRLLRRFGSCAFRGTLHRICCRACRIKKHKLRIYFESKKFLLLLYLVLHFLFSSKINTLLQDFSL

SEQ ID NO: 329244 - protein, 141 aa, Artificial Sequence
  derived and/or modified sequence
VTPAMRTFALLTAMLLLVALAQAEPLQARADEAAAQEQPGADDQEMAHAFTWHESAALPLSSDSARGLRCICGRGICRLLRRFGSCAFRGTLHRICCRACRIKKHKLRIYFESKKFLLLLYLVLHFLFSSKINTLLQDFSL

SEQ ID NO: 329245 - protein, 30 aa, Artificial Sequence
  derived and/or modified sequence
DCYCRIPACIAGERRYGTCIYQGRLWAFCC

SEQ ID NO: 329246 - protein, 140 aa, Artificial Sequence
  derived and/or modified sequence
VTPAMRTFALLTAMLLLVALAQAEPLQARADEAAAQEQPGADDQEMAHAFTWHESAALPLSDSARGLRCICGRGICRLLRRFGSCAFRGTLHRICCRACRIKKHKLRIYFESKKFLLLLYLVLHFLFSSKINTLLQDFSL

SEQ ID NO: 329247 - protein, 140 aa, Artificial Sequence
  derived and/or modified sequence
VTPAMRTFALLAAMLLLVALAEAEPLQARADETAAQEQPGADDQEMAHAFTWDESATLPLSDSARGLRCICRRGVCRFLRHLGSCAFRGTLHRICCRACRIKKNKLRIYFESKKFVFLLYLALHFLFSSKINTLLQDFCL

SEQ ID NO: 329248 - protein, 141 aa, Artificial Sequence
  derived and/or modified sequence
VTPAMRTFALLTAMLLLVALAQAEPLQARADEAAAQEQPGADDQEMAHAFTWDESAALPLSDSARGLRCIGGRGICGLLQRRVGSCAFRGTLHRICCRACRIKKNKLRIYSESKKFLLLLYLVLHFLFSSKINTSLQDFSL

SEQ ID NO: 329249 - protein, 94 aa, Artificial Sequence
  derived and/or modified sequence
MRTLAILAAILLVALQAQAEPLQARADEVAAAPEQIAADIPEVVVSLAWDESLAPKHPGSRKNMDCYCRIPACIAGERRYGTCIYQGRLWAFCC

SEQ ID NO: 329250 - DNA, 498 bp, Artificial Sequence
  derived and/or modified sequence
ggctgctccttgctatagaagacctgggacagaggactgctgtctgccctctctggtcaccctgcctagctagaggatctgtgaccccagccatgaggaccctcgccatccttgctgccattctcctggtggccctgcaggcccaggctgagccactccaggcaagagctgatgaggttgctgcagccccggagcagattgcagcggacatcccagaagtggttgtttcccttgcatgggacgaaagcttggctccaaagcatccaggctcaaggaaaaacatggactgctattgcagaataccagcgtgcattgcaggagaacgtcgctatggaacctgcatctaccagggaagactctgggcattctgctgctgagcttgcagaaaaagaaaaatgagctcaaaatttgctttgagagctacagggaattgctattactcctgtaccttctgctcaatttcctttcctcatctcaaataaatgccttgttacaaga

SEQ ID NO: 329251 - protein, 504 aa, Artificial Sequence
  derived and/or modified sequence
MPSPDSMTFEDIIVDFTQEEWALLDTSQRKLFQDVMLENISHLVSIGKQLCKSVVLSQLEQVEKLSTQRISLLQGREVGIKHQEIPFIQHIYQKGTSTISTMRSHTQEDPFLCNDLGEDFTQHIALTQNVITYMRTKHFVSKKFGKIFSDWLSFNQHKEIHTKCKSYGSHLFDYAFIQNSALRPHSVTHTREITLECRVCGKTFSKNSNLRRHEMIHTGEKPHGCHLCGKAFTHCSDLRKHERTHTGEKPYGCHLCGKAFSKSSNLRRHEMIHTREKAQICHLCGKAFTHCSDLRKHERTHLGDKPYGCLLCGKAFSKCSYLRQHERTHNGEKPYECHLCGKAFSHCSHLRQHERSHNGEKPHGCHLCGKAFTESSVLKRHERIHTGEKPYECHVCGKAFTESSDLRRHERTHTGEKPYECHLCGKAFNHSSVLRRHERTHTGEKPYECNICGKAFNRSYNFRLHRRVHTGEKPYVCPLCGKAFSKFFNLRQHERTHTKKAMNM

SEQ ID NO: 329252 - protein, 434 aa, Artificial Sequence
  derived and/or modified sequence
MPSPDSMTFEDIIVDFTQEEWALLDTSQRKLFQDVMLENISHLVSIGEDFTQHIALTQNVITYMRTKHFVSKKFGKIFSDWLSFNQHKEIHTKCKSYGSHLFDYAFIQNSALRPHSVTHTREITLECRVCGKTFSKNSNLRRHEMIHTGEKPHGCHLCGKAFTHCSDLRKHERTHTGEKPYGCHLCGKAFSKSSNLRRHEMIHTREKAQICHLCGKAFTHCSDLRKHERTHLGDKPYGCLLCGKAFSKCSYLRQHERTHNGEKPYECHLCGKAFSHCSHLRQHERSHNGEKPHGCHLCGKAFTESSVLKRHERIHTGEKPYECHVCGKAFTESSDLRRHERTHTGEKPYECHLCGKAFNHSSVLRRHERTHTGEKPYECNICGKAFNRSYNFRLHRRVHTGEKPYVCPLCGKAFSKFFNLRQHERTHTKKAMNM

SEQ ID NO: 329253 - DNA, 1515 bp, Artificial Sequence
  derived and/or modified sequence
atgcccagccccgacagcatgaccttcgaggacatcatcgtggacttcacccaggaggagtgggccctgctggacaccagccagagaaagctgttccaggacgtgatgctggagaacatcagccacctggtgagcatcggcaagcagctgtgcaagagcgtggtgctgagccagctggagcaggtggagaagctgagcacccagagaatcagcctgctgcagggcagagaggtgggcatcaagcaccaggagatccccttcatccagcacatctaccagaagggcaccagcaccatcagcaccatgagaagccacacccaggaggaccccttcctgtgcaacgacctgggcgaggacttcacccagcacatcgccctgacccagaacgtgatcacctacatgagaaccaagcacttcgtgagcaagaagttcggcaagatcttcagcgactggctgagcttcaaccagcacaaggagatccacaccaagtgcaagagctacggcagccacctgttcgactacgccttcatccagaacagcgccctgagaccccacagcgtgacccacaccagagagatcaccctggagtgcagagtgtgcggcaagaccttcagcaagaacagcaacctgagaagacacgagatgatccacaccggcgagaagccccacggctgccacctgtgcggcaaggccttcacccactgcagcgacctgagaaagcacgagagaacccacaccggcgagaagccctacggctgccacctgtgcggcaaggccttcagcaagagcagcaacctgagaagacacgagatgatccacaccagagagaaggcccagatctgccacctgtgcggcaaggccttcacccactgcagcgacctgagaaagcacgagagaacccacctgggcgacaagccctacggctgcctgctgtgcggcaaggccttcagcaagtgcagctacctgagacagcacgagagaacccacaacggcgagaagccctacgagtgccacctgtgcggcaaggccttcagccactgcagccacctgagacagcacgagagaagccacaacggcgagaagccccacggctgccacctgtgcggcaaggccttcaccgagagcagcgtgctgaagagacacgagagaatccacaccggcgagaagccctacgagtgccacgtgtgcggcaaggccttcaccgagagcagcgacctgagaagacacgagagaacccacaccggcgagaagccctacgagtgccacctgtgcggcaaggccttcaaccacagcagcgtgctgagaagacacgagagaacccacaccggcgagaagccctacgagtgcaacatctgcggcaaggccttcaacagaagctacaacttcagactgcacagaagagtgcacaccggcgagaagccctacgtgtgccccctgtgcggcaaggccttcagcaagttcttcaacctgagacagcacgagagaacccacaccaagaaggccatgaacatgtag

SEQ ID NO: 329254 - DNA, 1515 bp, Artificial Sequence
  derived and/or modified sequence
atgccctcgcccgatagtatgacattcgaggacattatcgttgattttactcaggaagagtgggccctcctggacaccagccagaggaaactttttcaggatgtgatgctcgagaatatatcgcatctcgtctcgattggaaagcagctgtgcaaaagtgttgtcttgtcgcagctggagcaggtggaaaagttgagcacacagaggatctcacttttgcagggccgcgaggtggggataaagcatcaggagataccgttcattcagcatatttatcagaaggggacatccactatctctacaatgcggtcacacactcaggaagatccatttctttgcaatgatctaggcgaagacttcacacagcatatcgcgctaacccagaatgtgatcacttacatgcggacaaagcactttgtgtcgaaaaagttcggtaagatcttttcagattggctctcttttaaccagcacaaggaaatccacaccaaatgcaaatcgtatggatcccacttatttgactacgcttttatacagaattccgcattgaggcctcattccgtgacccatacccgagaaataacccttgaatgccgcgtctgcggaaagaccttcagcaagaattcgaatctgcgtcggcacgaaatgattcataccggggaaaagccccatggctgtcatctttgtgggaaggcatttacgcactgcagtgacctgaggaagcatgaaaggacgcataccggcgaaaagccatatggctgtcatctctgcggaaaggcgttctctaagtccagcaaccttcgccgccacgagatgatacacacccgagaaaaggctcagatttgtcatttgtgcgggaaagccttcacacattgttctgatctgcggaaacatgagcgcactcatctcggagataagccgtacggatgtctgttgtgcggtaaagcatttagtaagtgttcttatctgcggcagcatgaaagaacccataacggcgagaagccctacgaatgtcatctctgtggaaaagcctttagccactgttcacatctgaggcagcacgaacggagccataacggagaaaaaccacatgggtgtcatctatgtgggaaggccttcaccgaatcttctgtcttgaaacggcacgagagaatacatacaggcgagaagccttatgagtgtcacgtgtgcggcaaggccttcacagaatcttccgatctgcgccgtcatgaacgtacccacaccggagagaagccttatgagtgtcacctttgcggaaaggctttcaaccattcctctgtcctgcgtaggcacgaacgcactcacactggcgagaagccatatgagtgcaacatttgtggcaaagctttcaatcggagctacaattttagacttcacagacgggtacacaccggggagaaaccgtatgtgtgtccactgtgcggtaaggctttctcaaagttcttcaatttgaggcagcacgaacgaacgcataccaaaaaagccatgaacatgtag

SEQ ID NO: 329255 - DNA, 1515 bp, Artificial Sequence
  derived and/or modified sequence
atgcccagcccggattcaatgaccttcgaagatattattgtagatttcacgcaggaggaatgggccctgttggacactagccagcgaaagctcttccaggacgtcatgctggagaatatttctcatctcgttagcatcggcaaacaactctgcaagtcagtagtgctatcacaacttgagcaggtggagaaactctctacccagcggataagtttattacagggacgtgaggtgggtatcaaacatcaggaaatcccttttatacaacatatttaccagaaggggacaagcactattagtaccatgaggagccacacccaggaggatccattcctgtgcaacgacttaggcgaagacttcacacagcatatagccctgacgcagaacgttattacatacatgaggacaaaacacttcgtgtcaaaaaagttcggaaagatctttagtgactggctctctttcaaccagcataaggagattcacacaaagtgcaagtcttacgggtcgcaccttttcgactacgcctttattcaaaactcggctcttcggccccacagcgtaactcatacacgtgagattacactcgagtgcagggtgtgcgggaaaaccttcagtaaaaacagcaatctgaggagacatgagatgattcacacgggtgagaaaccacacggttgccacctgtgtggaaaggccttcacccattgctccgatctgcggaagcacgagagaacgcacactggagaaaaaccttatggttgccatctgtgtggtaaagccttcagtaagtcgagtaatttgagaagacatgagatgatccatacacgggagaaggcacagatttgccacctgtgtggaaaagcatttacccactgctcagatctccgcaagcacgagcgaacgcacctcggagacaaaccctacgggtgcctgctgtgtgggaaggccttttctaagtgtagctacctccggcaacatgagaggacacacaacggagagaaaccctatgaatgtcatctttgcgggaaagcattttcccattgctcccacctccgacagcacgagcggtcccacaacggcgagaagccgcatggatgccatctgtgtggcaaggcgttcaccgagagttctgtccttaaacggcatgagcgtatacacacgggcgaaaaaccttatgaatgccatgtgtgtggaaaggccttcaccgaatcgtctgacctcaggcggcacgaaaggacacatactggggaaaaaccgtatgagtgtcatttgtgcggaaaggctttcaaccactccagtgtcctgcgtagacatgagcgaacacacacgggggagaagccctatgaatgtaatatttgcggaaaagctttcaatcgctcctacaactttcgtttgcacagaagggttcatacaggggaaaagccatacgtgtgccctctgtgtgggaaggccttttcaaaattcttcaacttgaggcaacatgagcggacccataccaaaaaagccatgaacatgtag

SEQ ID NO: 329256 - DNA, 1515 bp, Artificial Sequence
  derived and/or modified sequence
atgcccagcccagacagcatgacctttgaggacatcatcgtggacttcacccaggaggagtgggccctgctggacaccagccagaggaagctgttccaggatgtgatgctggagaacatcagccacctggtgtccatcggcaagcagctgtgcaagtctgtggtgctgagccagctggagcaggtggagaagctgagcacccagaggatcagcctgctgcagggccgggaggtgggcatcaagcaccaggagatccccttcatccagcacatctaccagaagggcaccagcaccatcagcaccatgaggagccacacccaggaggaccccttcctgtgcaatgacctgggggaggacttcacccagcacatcgccctgacccagaatgtcatcacctacatgaggaccaagcactttgtgtccaagaagtttgggaagatcttcagtgactggctgtccttcaaccagcacaaggagatccacaccaagtgcaagagctatggcagccacctgtttgattatgccttcatccagaacagcgccctgcggccccacagcgtgacccacacccgggagatcaccctggagtgccgggtgtgtgggaagaccttcagcaagaacagcaacctgcggagacatgagatgatccacactggagagaagccccacggctgccacctgtgtgggaaggccttcacccactgcagcgacctgaggaagcatgagaggacccacactggagagaagccctacggctgccacctgtgtgggaaggccttcagcaagagcagcaacctgcggagacatgagatgatccacacccgggagaaggcccagatctgccacctgtgtgggaaggccttcacccactgcagcgacctgaggaagcatgagaggacccacctgggggacaagccctacggctgcctgctgtgtgggaaggccttcagcaagtgcagctacctgcggcagcacgagaggacccacaacggggagaagccctatgagtgccacctgtgtgggaaggccttcagccactgcagccacctgcggcagcacgagaggagccacaacggggagaagccccacggctgccacctgtgtgggaaggccttcacagagagctctgtgctgaagagacatgagcgcatccacactggagagaagccctatgagtgccacgtgtgtgggaaggccttcacagagagcagtgacctgcggagacatgagaggacccacactggagagaagccctatgagtgccacctgtgtgggaaggccttcaaccacagctctgtgctgcggagacatgagaggacccacactggagagaagccctatgagtgcaacatctgtgggaaggccttcaacagaagctacaacttccggctgcaccggcgggtgcacactggagagaagccctacgtgtgccccctgtgtgggaaggccttcagcaagttcttcaacctgcggcagcacgagaggacccacaccaagaaggccatgaacatgtag

SEQ ID NO: 329257 - DNA, 1515 bp, Artificial Sequence
  derived and/or modified sequence
atgcccagccccgacagcatgaccttcgaggacatcatcgtggacttcacccaggaagaatgggccctactagataccagccagagaaaacttttccaagacgtgatgctggaaaacatctcccatttagtatcaatcgggaaacagttgtgcaagtcggtcgtcctcagtcagcttgaacaggttgaaaagctgtccacacagcgcatcagtctcctgcagggcagggaggtaggaattaaacaccaggagattccttttatccaacacatctatcaaaaagggacttccacaatatctacaatgaggtctcacacgcaggaggatccattcctgtgtaatgacttgggagaggactttacacagcacatcgcactgacacagaacgtgatcacttacatgagaaccaaacattttgtgtctaaaaagttcggaaaaatctttagcgactggctaagctttaaccagcataaggaaattcacacgaagtgtaagtcatacggctctcacctgtttgattacgcgttcattcagaatagcgccctgcgaccccattctgttactcataccagagaaatcaccctcgaatgcagggtttgcggcaaaaccttctctaaaaatagcaacctgaggagacacgaaatgatccacaccggagagaaaccacacggatgccatctatgcggcaaagccttcactcattgcagtgacttgagaaagcatgaacgcacccacaccggagaaaagccttacggctgccatctgtgcgggaaggcattttcaaagtcttcaaacctaagacgccatgaaatgattcacacccgagagaaggcacagatctgtcatctttgcggtaaagcctttacccattgctccgacttgcggaagcatgagcggacacacctgggggataaaccctacggttgtctgctgtgcgggaaagccttctcaaaatgtagctacttgagacagcatgagaggacgcacaacggggaaaaaccctatgaatgccacctctgtggtaaggccttttctcattgttctcatttgcggcagcacgagagaagccataacggggaaaagccacacggctgtcacctgtgcggcaaagccttcaccgaatcctccgtcctgaagaggcatgaaagaatacacactggagaaaagccttatgagtgtcacgtgtgtggaaaggcttttacggaatcaagtgatttacgcaggcatgagcgcacacatactggggagaaaccttacgagtgccacctgtgtggaaaggctttcaaccactcatctgtcctcaggcgccacgaaaggacacacaccggggaaaaaccttacgagtgcaacatctgtggcaaagcttttaacaggagctataactttcgcttacacagacgggtgcacaccggagaaaaaccttacgtgtgtccgctgtgtgggaaagcattcagcaagttcttcaacttaaggcagcacgagcgcactcacaccaaaaaggccatgaacatgtag

SEQ ID NO: 329258 - DNA, 1515 bp, Artificial Sequence
  derived and/or modified sequence
atgcccagccccgacagcatgaccttcgaggacatcatcgtggactttacccaggaagaatgggcattgcttgacaccagccagcgcaagctgtttcaagatgtcatgttagaaaatataagtcatcttgtgagcatcgggaagcagctttgcaaaagcgtggtcctatcccagttagaacaggtggagaagttgtccacccagcgtattagcctgctgcaggggagagaggtcgggattaagcatcaggagattccatttatccagcacatttaccagaaaggaacgtccacaatatccacaatgagaagccatacacaggaagatccctttttgtgcaacgaccttggagaagacttcacacagcatattgccctgacccaaaacgtcataacatatatgcggactaaacattttgtctcaaaaaaattcgggaaaatctttagtgattggctcagctttaaccaacacaaggagattcacaccaagtgcaagtcatacggctcacacctcttcgactacgccttcatccaaaactccgctctgagaccccattcggttacccacacaagagaaataaccctagaatgtagagtgtgtgggaagacattcagcaaaaatagcaacttgcgacgacacgagatgatacacaccggtgagaagccacacggctgtcatctctgtgggaaagcattcacccactgctccgacctgcgtaaacatgaaagaactcatacaggggaaaaaccctacgggtgtcatctctgtggaaaagctttctccaagtcgagcaatctccggagacatgaaatgatacatactagagaaaaagcccagatttgccacctgtgtgggaaggcgtttacacattgttcggatctgagaaaacatgagcgcactcacttgggcgacaaaccttacggatgtctactctgcggtaaggccttctccaaatgttcctacctgcgtcagcacgagcggacccataacggagaaaaaccttacgagtgtcatctttgtgggaaagcattcagccattgctcacacctcagacagcatgagaggtcacacaatggcgaaaagccacatggttgtcacctgtgtgggaaggcatttaccgagtcctcagttttaaagcgccatgagcgaatccacaccggggagaaaccttatgagtgtcacgtttgcggaaaggccttcacagagtcatccgacttacgcagacatgagcggacccacacaggcgaaaagccctacgagtgtcatctgtgcgggaaggccttcaatcattccagtgttctgagaagacatgaacggacacacacaggcgagaagccctacgagtgcaatatctgcgggaaggcctttaaccgatcctacaatttccgactgcatcgccgggtccatacgggtgagaagccctatgtttgccctctttgtggcaaggccttctctaagttcttcaacttgaggcaacatgagcggacacataccaaaaaggccatgaatatgtag

SEQ ID NO: 329259 - DNA, 1515 bp, Artificial Sequence
  derived and/or modified sequence
atgccgagcccggacagtatgaccttcgaggatattatagtagacttcacccaggaggaatgggcgctactggacaccagccagcggaagctgttccaggacgtgatgctagaaaatatatcgcaccttgtgtctataggcaagcagttatgtaaatcggtcgtcctaagccaactcgagcaggttgagaagttaagtactcagagaatctctctcctgcagggtcgagaagtgggtatcaaacatcaggagattccctttattcagcatatttaccaaaagggcacgtcaaccattagcacaatgcgcagtcacactcaggaggaccctttcctctgcaacgatcttggagaagatttcacacaacacattgccttaacccagaatgtgattacctacatgaggacgaaacatttcgtctctaagaaattcggcaagatattcagcgactggttaagcttcaaccagcataaagagatccacaccaaatgcaaatcctatggttcccatctctttgactacgctttcatccagaactctgccctgagacctcactcggtgacccacaccagggaaattacccttgaatgccgagtttgcggaaagacgttcagcaagaattctaacctcaggcggcacgagatgatccacactggcgaaaaaccccatggctgccacctctgtggaaaggcttttacccactgctcggacctgagaaagcacgagcgtacgcacaccggtgagaaaccttatggctgtcacctgtgcggcaaagccttcagcaaaagctcaaatctgcgaagacatgaaatgatccacacgagagaaaaggcccaaatctgtcatctgtgtggcaaagccttcactcactgtagtgacctgagaaagcatgagaggacacacctcggggacaaaccctacggttgcctcctctgcggtaaagccttttccaagtgcagctatttgagacagcacgagcgtacccacaatggggaaaagccttatgagtgtcatctgtgcggtaaggcattttcccattgcagccatcttcgccagcacgagcggtctcataatggggagaagccgcatggctgtcacctgtgtggcaaggccttcaccgagagctccgtcctgaagagacatgaaagaattcatacaggcgaaaagccctatgagtgtcacgtttgcgggaaggcattcacggagtctagcgacctgcgcaggcatgaaagaacacatacgggtgagaagccttatgagtgtcatctatgtggcaaggccttcaaccatagtagcgtcctaaggcgccacgaaaggacgcacacaggggaaaagccctacgaatgcaacatctgcggaaaggcatttaaccgaagctataacttccgactgcaccgcagagtgcatactggcgagaaaccatacgtctgtccactgtgtggcaaggccttctccaagtttttcaatcttagacagcacgagcgcactcacacaaaaaaggcgatgaacatgtag

SEQ ID NO: 329260 - DNA, 1515 bp, Artificial Sequence
  derived and/or modified sequence
atgccgagccctgacagtatgacatttgaggatatcatagttgattttacccaggaggaatgggcgctcctggatacaagtcagcggaaactattccaggacgtgatgctcgagaatatttcccacttggtgtcaattggaaagcagctttgtaagagcgtcgtgctgtctcagctcgagcaagtggagaagctgtcaactcagcgaatttctctcctgcagggaagagaggtcggtataaagcaccaagagatcccgtttatccaacacatctatcagaagggcaccagcaccatttctactatgcggagccacacacaggaagaccctttcctgtgcaacgacctgggagaggacttcacacagcacatcgctttgacccagaacgtcatcacctacatgagaactaagcatttcgtttccaagaaattcgggaagattttctccgactggctttcctttaaccagcacaaagaaatccacacaaagtgcaagtcctacggcagccatctatttgattacgctttcattcagaactccgcccttaggccacactcggtcactcatacaagagagatcaccctggaatgcagggtgtgcggaaaaacatttagcaagaactccaatctgaggagacatgagatgattcacaccggtgagaaaccccatggctgccacctctgcgggaaggcgttcactcattgtagcgatctccggaaacatgagcgtactcataccggcgagaaaccgtacggctgccatctatgcggaaaagctttttccaaaagtagcaaccttcggagacatgagatgatacatactcgggaaaaagctcaaatttgccatctctgcgggaaggcctttacgcactgttctgacttgaggaagcatgaaagaacccatttaggcgacaagccgtacggctgtctgttatgcggaaaagcctttagtaagtgctcctatctgcgccagcacgaacgcacccacaacggggagaagccctatgagtgccacctctgtggaaaggctttttcccattgctcacatctcagacaacatgaacgatctcacaacggggagaagcctcatggttgccacctgtgcgggaaggcttttacagagtcttccgttttgaaaagacacgaacgcattcatactggtgagaagccatatgagtgccatgtgtgcggaaaagcgtttacagaatcctcagacttgaggagacacgagagaacccatacgggcgaaaagccgtacgagtgccacctgtgcggtaaggctttcaaccactctagcgtgctacgtcgtcatgaacggacccataccggagagaaaccctatgagtgcaacatttgtggaaaagcctttaaccgctcatataacttccgtctgcaccggagggtgcatacaggagaaaaaccctacgtttgccctttgtgcggcaaggcattttcaaagttttttaacctgcgacagcacgaacgcacacacaccaagaaggccatgaacatgtag

SEQ ID NO: 329261 - DNA, 2783 bp, Artificial Sequence
  derived and/or modified sequence
gacacgcgctttcaaccggcggagacactggcagggccagaaacgcgcgcagcgggggcgggaggtcggtaagctccccgcccctgcccgagaccccgccccggcccggccccgcctttttctctgcctcccctccctgcacgtacgggccccgcccctcgcgcgacgttttttgttgacccggaaacggattctccggagccgaggtccgctcggatttgtcttcttagtgcttggatggtgtgagtgaaaacccagaggaatacatttggtggctgagctagtacaatgccatcaccggattccatgaccttcgaggatatcattgtagacttcactcaagaagagtgggccctgctggacacatcccagagaaagctgtttcaagatgtgatgttggagaacatcagtcatctggtctctattggcaaacagctctgcaaatcagttgtgctttcccaattggagcaagtagagaaactttcaacacaaagaataagcttactgcaaggtagagaagttggcattaaacatcaagagataccattcattcaacatatctatcagaagggcacgtccaccatcagcacaatgagatctcatactcaagaggatccttttctatgcaatgacttaggagaagatttcactcaacatatagcattgactcaaaatgtgattacctacatgagaacgaaacactttgtaagcaaaaagtttgggaaaatcttcagtgactggttatcctttaatcaacacaaggaaattcacaccaaatgtaaatcatatggaagtcatctatttgattatgcctttatccaaaactctgcccttagaccacacagtgtgactcacactagagagataacattggaatgtcgtgtgtgtgggaaaacctttagcaaaaattctaatcttaggcgacatgagatgattcacactggagagaaaccacacggatgtcatctatgtgggaaagcctttactcattgctctgatcttcgaaaacatgagagaactcacactggagagaagccatatggatgtcatctatgtgggaaagccttcagtaaaagttctaaccttagacgacatgagatgattcacactagagaaaaagcacagatatgccatctatgtgggaaagccttcactcattgctctgaccttagaaaacatgagagaactcacttaggagataaaccatatggatgtctcctatgtgggaaggctttcagtaaatgttcttaccttagacaacatgaaagaactcacaatggagagaaaccatatgaatgtcatctatgtggaaaagccttctctcattgttctcaccttagacaacatgagcgaagtcacaatggagagaaaccacatggatgtcatctatgtgggaaagcattcactgaatcttctgtgcttaaacgacatgagagaattcacactggagagaaaccatatgagtgccatgtatgtgggaaagccttcactgaatcttctgacctcagacgacatgagagaactcacactggagaaaaaccatatgaatgccatctatgcggaaaagccttcaatcactcttctgtccttagacgacatgagagaactcacactggagagaaaccatatgaatgcaatatatgtggtaaagccttcaatagaagttacaactttagacttcatagaagagttcacactggagagaaaccatatgtatgtcctctatgtgggaaagcctttagtaaattttttaaccttagacaacatgagagaactcacactaaaaaagcaatgaatatgtaagaatcatcagctgtagcgttaacactaaatacaccaaggacaaacatactacaggaatattatgtctgtaatcagtgtggaaaagcctttatttatatttaccactttgctcaacctaaatgaattcaaggtagagagaatccagatgtatttaatgtttatggcacaaacttcagactctaggctgaccatatacaacgtgagagaatgaaactatagatcaaaggaatgtggaggagtcttcatccacagctctgttaaataaatgggagaaatcacatcacgaaaattctgtgcctgtcgtcagtgtgaaaatgcctttgctgataatttatcctctaaacaaatgagtaaaatccacaggcaagcaaccatatgtctgtaattgctgtgcactctcattcagctaagcaccaattttggtgtgtgcaagaaaattcattataaggtaactgataaaaacaggaaatatgtgaaaatattttttattaggtggatgaggcctcttgaacaattccagacattcatagtggagaagttattcaatgaaaactcatgagaaatccttttcttaatacagcagcacttctataatagatcagaattcacatggtgtagaactctcaatgacatgaatggagggtagtcctcagtaaattactcattccttagtcaataccagcatttttccagtgagaaaactatcttgacaggatagtggaaaaaccttcaggcagcttttatgtcaaaaaagtgagacagggatgaaaactctaaaaagccattgatgagatgtatagctgggggacaaaacataaagccatcaagcacgtgcttgagaaaaaaattataattttgaataaagactttctacttaaaatatgtgggttgaaatgtacaattctgaaataacctgggaatattgaatgcagaattatgtaagaagtaataagattaaattagtactgtcaaaaatacaa

SEQ ID NO: 329262 - DNA, 2868 bp, Artificial Sequence
  derived and/or modified sequence
aaacggattctccggagccgaggtccgctcgggtgagtgccctccgctttttgtggccaaacccagccacgcagttcccttcctgcggcgtcctccacacccggggtctgctggtctccgcggatgtcacaggctcggcaaccgccctcctgtcggcggggagtcccgcgacgcccggaaatgctccgaagcctgtcgcccagctgccagatctgcgtctgtgtccggttccgtcactgaggtcgcccctgtccggcccttccaccctagttctcttcaccgtccgcccatcctatcgcgcgcggcctcagatttgtcttcttagtgcttggatggtgtgagtgaaaacccagaggaatacatttggtggctgagctagtacaatgccatcaccggattccatgaccttcgaggatatcattgtagacttcactcaagaagagtgggccctgctggacacatcccagagaaagctgtttcaagatgtgatgttggagaacatcagtcatctggtctctattggcaaacagctctgcaaatcagttgtgctttcccaattggagcaagtagagaaactttcaacacaaagaataagcttactgcaaggtagagaagttggcattaaacatcaagagataccattcattcaacatatctatcagaagggcacgtccaccatcagcacaatgagatctcatactcaagaggatccttttctatgcaatgacttaggagaagatttcactcaacatatagcattgactcaaaatgtgattacctacatgagaacgaaacactttgtaagcaaaaagtttgggaaaatcttcagtgactggttatcctttaatcaacacaaggaaattcacaccaaatgtaaatcatatggaagtcatctatttgattatgcctttatccaaaactctgcccttagaccacacagtgtgactcacactagagagataacattggaatgtcgtgtgtgtgggaaaacctttagcaaaaattctaatcttaggcgacatgagatgattcacactggagagaaaccacacggatgtcatctatgtgggaaagcctttactcattgctctgatcttcgaaaacatgagagaactcacactggagagaagccatatggatgtcatctatgtgggaaagccttcagtaaaagttctaaccttagacgacatgagatgattcacactagagaaaaagcacagatatgccatctatgtgggaaagccttcactcattgctctgaccttagaaaacatgagagaactcacttaggagataaaccatatggatgtctcctatgtgggaaggctttcagtaaatgttcttaccttagacaacatgaaagaactcacaatggagagaaaccatatgaatgtcatctatgtggaaaagccttctctcattgttctcaccttagacaacatgagcgaagtcacaatggagagaaaccacatggatgtcatctatgtgggaaagcattcactgaatcttctgtgcttaaacgacatgagagaattcacactggagagaaaccatatgagtgccatgtatgtgggaaagccttcactgaatcttctgacctcagacgacatgagagaactcacactggagaaaaaccatatgaatgccatctatgcggaaaagccttcaatcactcttctgtccttagacgacatgagagaactcacactggagagaaaccatatgaatgcaatatatgtggtaaagccttcaatagaagttacaactttagacttcatagaagagttcacactggagagaaaccatatgtatgtcctctatgtgggaaagcctttagtaaattttttaaccttagacaacatgagagaactcacactaaaaaagcaatgaatatgtaagaatcatcagctgtagcgttaacactaaatacaccaaggacaaacatactacaggaatattatgtctgtaatcagtgtggaaaagcctttatttatatttaccactttgctcaacctaaatgaattcaaggtagagagaatccagatgtatttaatgtttatggcacaaacttcagactctaggctgaccatatacaacgtgagagaatgaaactatagatcaaaggaatgtggaggagtcttcatccacagctctgttaaataaatgggagaaatcacatcacgaaaattctgtgcctgtcgtcagtgtgaaaatgcctttgctgataatttatcctctaaacaaatgagtaaaatccacaggcaagcaaccatatgtctgtaattgctgtgcactctcattcagctaagcaccaattttggtgtgtgcaagaaaattcattataaggtaactgataaaaacaggaaatatgtgaaaatattttttattaggtggatgaggcctcttgaacaattccagacattcatagtggagaagttattcaatgaaaactcatgagaaatccttttcttaatacagcagcacttctataatagatcagaattcacatggtgtagaactctcaatgacatgaatggagggtagtcctcagtaaattactcattccttagtcaataccagcatttttccagtgagaaaactatcttgacaggatagtggaaaaaccttcaggcagcttttatgtcaaaaaagtgagacagggatgaaaactctaaaaagccattgatgagatgtatagctgggggacaaaacataaagccatcaagcacgtgcttgagaaaaaaattataattttgaataaagactttctacttaaaatatgtgggttgaaatgtacaattctgaaataacctgggaatattgaatgcagaattatgtaagaagtaataagattaaattagtactgtc

SEQ ID NO: 329263 - DNA, 1305 bp, Artificial Sequence
  derived and/or modified sequence
atgcccagccccgacagcatgaccttcgaggacatcatcgtggacttcacccaggaggagtgggccctgctggacaccagccagagaaagctgttccaggacgtgatgctggagaacatcagccacctggtgagcatcggcgaggacttcacccagcacatcgccctgacccagaacgtgatcacctacatgagaaccaagcacttcgtgagcaagaagttcggcaagatcttcagcgactggctgagcttcaaccagcacaaggagatccacaccaagtgcaagagctacggcagccacctgttcgactacgccttcatccagaacagcgccctgagaccccacagcgtgacccacaccagagagatcaccctggagtgcagagtgtgcggcaagaccttcagcaagaacagcaacctgagaagacacgagatgatccacaccggcgagaagccccacggctgccacctgtgcggcaaggccttcacccactgcagcgacctgagaaagcacgagagaacccacaccggcgagaagccctacggctgccacctgtgcggcaaggccttcagcaagagcagcaacctgagaagacacgagatgatccacaccagagagaaggcccagatctgccacctgtgcggcaaggccttcacccactgcagcgacctgagaaagcacgagagaacccacctgggcgacaagccctacggctgcctgctgtgcggcaaggccttcagcaagtgcagctacctgagacagcacgagagaacccacaacggcgagaagccctacgagtgccacctgtgcggcaaggccttcagccactgcagccacctgagacagcacgagagaagccacaacggcgagaagccccacggctgccacctgtgcggcaaggccttcaccgagagcagcgtgctgaagagacacgagagaatccacaccggcgagaagccctacgagtgccacgtgtgcggcaaggccttcaccgagagcagcgacctgagaagacacgagagaacccacaccggcgagaagccctacgagtgccacctgtgcggcaaggccttcaaccacagcagcgtgctgagaagacacgagagaacccacaccggcgagaagccctacgagtgcaacatctgcggcaaggccttcaacagaagctacaacttcagactgcacagaagagtgcacaccggcgagaagccctacgtgtgccccctgtgcggcaaggccttcagcaagttcttcaacctgagacagcacgagagaacccacaccaagaaggccatgaacatgtag

SEQ ID NO: 329264 - DNA, 1305 bp, Artificial Sequence
  derived and/or modified sequence
atgccttcaccggactccatgacattcgaagatattatcgtcgattttacccaggaggagtgggcactactggatacttctcaacggaagctgttccaggacgtgatgttagaaaatattagtcacctagtcagcattggcgaggacttcacacagcacattgctcttacccaaaacgttatcacatatatgagaaccaaacactttgtgtccaaaaagtttggtaagatcttctccgactggttgtcttttaaccagcacaaggaaatacacacaaagtgcaaaagctacgggtctcacttatttgactatgcgtttattcagaatagtgccctcagaccccacagcgtgacgcacacacgagagattacgcttgagtgccgggtgtgtggcaagacgttctccaagaactctaatctgcggcgccacgagatgattcacaccggggagaaaccgcacggctgtcatctgtgcgggaaggccttcacacactgttcagatctgcgtaagcacgaacgaacccacactggagaaaagccgtatggatgtcacctctgcgggaaggccttctcaaagagctccaatctgcggcggcacgagatgatacacacacgagaaaaggctcagatctgtcatctgtgcggaaaagcctttacacactgtagtgatctgaggaagcatgaacgcacacacctgggggacaaaccatacggatgcttgctgtgtggtaaagctttctctaaatgctcctaccttcggcagcacgaacggactcacaatggggagaagccctacgaatgtcacctgtgtggaaaggctttcagccattgtagccacctgcgacagcatgagaggagtcacaacggcgagaaaccccacggctgccacctctgtgggaaggctttcacagagagtagtgtcctcaagcgtcatgagcggatccatactggagaaaagccttacgagtgtcacgtttgcgggaaggcatttaccgagagtagcgacttaaggcgacacgaaaggacacataccggggagaagccgtacgaatgtcacctgtgcggtaaggccttcaatcacagttccgtgctcaggagacacgaacgaacacatactggagaaaagccctacgaatgcaacatatgtggtaaggcatttaaccgctcatacaacttccggctccaccgtagggtgcataccggtgaaaaaccctacgtttgtccgctgtgtggtaaggccttttctaagttctttaatttacggcagcatgaaagaacccataccaagaaggccatgaacatgtag

SEQ ID NO: 329265 - DNA, 1305 bp, Artificial Sequence
  derived and/or modified sequence
atgcccagcccagacagcatgacctttgaggacatcatcgtggacttcacccaggaggagtgggccctgctggacaccagccagaggaagctgttccaggatgtgatgctggagaacatcagccacctggtgtccatcggggaggacttcacccagcacatcgccctgacccagaatgtcatcacctacatgaggaccaagcactttgtgtccaagaagtttgggaagatcttcagtgactggctgtccttcaaccagcacaaggagatccacaccaagtgcaagagctatggcagccacctgtttgattatgccttcatccagaacagcgccctgcggccccacagcgtgacccacacccgggagatcaccctggagtgccgggtgtgtgggaagaccttcagcaagaacagcaacctgcggagacatgagatgatccacactggagagaagccccacggctgccacctgtgtgggaaggccttcacccactgcagcgacctgaggaagcatgagaggacccacactggagagaagccctacggctgccacctgtgtgggaaggccttcagcaagagcagcaacctgcggagacatgagatgatccacacccgggagaaggcccagatctgccacctgtgtgggaaggccttcacccactgcagcgacctgaggaagcatgagaggacccacctgggggacaagccctacggctgcctgctgtgtgggaaggccttcagcaagtgcagctacctgcggcagcacgagaggacccacaacggggagaagccctatgagtgccacctgtgtgggaaggccttcagccactgcagccacctgcggcagcacgagaggagccacaacggggagaagccccacggctgccacctgtgtgggaaggccttcacagagagctctgtgctgaagagacatgagcgcatccacactggagagaagccctatgagtgccacgtgtgtgggaaggccttcacagagagcagtgacctgcggagacatgagaggacccacactggagagaagccctatgagtgccacctgtgtgggaaggccttcaaccacagctctgtgctgcggagacatgagaggacccacactggagagaagccctatgagtgcaacatctgtgggaaggccttcaacagaagctacaacttccggctgcaccggcgggtgcacactggagagaagccctacgtgtgccccctgtgtgggaaggccttcagcaagttcttcaacctgcggcagcacgagaggacccacaccaagaaggccatgaacatgtag

SEQ ID NO: 329266 - DNA, 1305 bp, Artificial Sequence
  derived and/or modified sequence
atgcccagccccgacagcatgaccttcgaggacatcatcgtggacttcactcaggaggagtgggctctcctggatacctcacagaggaagttgttccaggacgtgatgcttgagaatatctctcaccttgtgtctatcggcgaagacttcacacagcacatcgcacttacccagaatgtgatcacctatatgagaactaagcacttcgtctccaagaagtttgggaagatcttctcagactggctgagctttaatcagcacaaggagattcacaccaagtgtaagagttacgggtcccacttgtttgactatgctttcatccagaattcggcactgcggccccacagtgtcacccatactagagagattacacttgagtgtcgcgtgtgcggtaaaacgtttagcaagaattccaatttgcgtcggcatgagatgatacatacaggcgaaaagccccacgggtgccacctttgtggaaaggccttcactcactgctcagacctccgaaaacacgaacgcactcatacaggggaaaaaccctatggctgccatctttgcggcaaagctttttccaaatccagcaacctgagaagacacgaaatgatccacactagggaaaaagcgcagatatgtcatttatgtggtaaggccttcacgcattgctcagatctgcggaaacatgaacggacacatcttggggataagccttacggttgtctgctgtgcggtaaagctttctctaagtgctcatatcttagacagcacgagagaacgcataatggcgaaaagccgtatgagtgccacctctgtggcaaggctttcagccattgttcacatctcaggcaacatgagcggtcacataacggcgaaaagccacacggctgtcatttgtgcgggaaggcctttacagaatctagtgtcctgaaacgccatgaacgaattcacacaggcgagaaaccctacgagtgccatgtgtgtggcaaggcatttacagagtctagcgatctgcgtcgccatgaacgcacacacacaggtgagaagccgtacgaatgccacctttgcggaaaagcattcaatcacagttctgtcctgcgccgccatgagcgaacacacactggagagaaaccgtacgagtgtaacatctgtgggaaggctttcaatcggtcgtacaatttccggctacataggagggtccacactggggaaaaaccctacgtgtgcccgctatgtggtaaagcgtttagcaaatttttcaatcttaggcagcatgagaggacacatacgaaaaaagccatgaacatgtag

SEQ ID NO: 329267 - DNA, 1305 bp, Artificial Sequence
  derived and/or modified sequence
atgcccagtccagactcaatgacctttgaagacatcatcgtagacttcacccaggaagaatgggcacttttggacacaagccagcggaagttattccaggacgtgatgctagaaaatatctctcaccttgtctccatcggcgaggacttcactcagcacatagctctgacgcagaacgtgattacatacatgcgtacaaagcacttcgttagcaaaaagttcggtaagatttttagtgattggctctcgttcaaccaacataaggagattcatactaaatgtaaatcttacggcagtcaccttttcgactatgctttcatccagaactctgctctccggcctcacagcgtgacccacacgcgggagatcacactcgaatgcagagtctgcggcaagaccttctcaaagaactcgaatcttaggcgacacgagatgatccacacaggtgaaaaaccccacggctgtcatctatgcggcaaggccttcacacattgtagtgacttgaggaaacacgaaaggacacacaccggggagaagccctatggatgccatctatgcggaaaagccttctcaaagtcctcaaacctgagaagacacgaaatgatccacacccgggaaaaagcacaaatctgccatctctgtggtaaggctttcacgcattgcagcgacctcaggaaacacgagcgtacacacttgggagataagccatacggctgtcttctttgtggcaaagccttctccaaatgcagttacttaaggcagcacgagcggacacataacggcgaaaaaccatacgagtgtcacctatgcggaaaggcgtttagtcactgctcacatctgcgccagcatgagagaagccataatggtgagaagcctcacggctgccacctgtgcggcaaggcgtttactgagtcttcagttttgaagcgacatgagaggattcacactggcgaaaagccttatgagtgtcatgtgtgcggaaaggccttcaccgaaagttctgacctcaggcggcacgaaaggactcacacaggcgaaaagccatacgaatgtcatctttgcggcaaggctttcaatcactcatcagtgctccgtaggcacgaaagaacacacacaggggagaagccgtacgaatgcaacatatgtggaaaggctttcaaccggtcttataacttccggctgcaccgcagggtgcacactggggagaaaccttacgtatgcccactttgcggcaaagcattttcaaaattcttcaacctgcgccagcatgaacggactcacactaaaaaggctatgaacatgtag

SEQ ID NO: 329268 - DNA, 1593 bp, Artificial Sequence
  derived and/or modified sequence
gacacgcgctttcaaccggcggagacactggcagggccagaaacgcgcgcagcgggggcgggaggtcggtaagctccccgcccctgcccgagaccccgccccggcccggccccgcctttttctctgcctcccctccctgcacgtacgggccccgcccctcgcgcgacgttttttgttgacccggaaacggattctccggagccgaggtccgctcggatttgtcttcttagtgcttggatggtgtgagtgaaaacccagaggaatacatttggtggctgagctagtacaatgccatcaccggattccatgaccttcgaggatatcattgtagacttcactcaagaagagtgggccctgctggacacatcccagagaaagctgtttcaagatgtgatgttggagaacatcagtcatctggtctctattggagaagatttcactcaacatatagcattgactcaaaatgtgattacctacatgagaacgaaacactttgtaagcaaaaagtttgggaaaatcttcagtgactggttatcctttaatcaacacaaggaaattcacaccaaatgtaaatcatatggaagtcatctatttgattatgcctttatccaaaactctgcccttagaccacacagtgtgactcacactagagagataacattggaatgtcgtgtgtgtgggaaaacctttagcaaaaattctaatcttaggcgacatgagatgattcacactggagagaaaccacacggatgtcatctatgtgggaaagcctttactcattgctctgatcttcgaaaacatgagagaactcacactggagagaagccatatggatgtcatctatgtgggaaagccttcagtaaaagttctaaccttagacgacatgagatgattcacactagagaaaaagcacagatatgccatctatgtgggaaagccttcactcattgctctgaccttagaaaacatgagagaactcacttaggagataaaccatatggatgtctcctatgtgggaaggctttcagtaaatgttcttaccttagacaacatgaaagaactcacaatggagagaaaccatatgaatgtcatctatgtggaaaagccttctctcattgttctcaccttagacaacatgagcgaagtcacaatggagagaaaccacatggatgtcatctatgtgggaaagcattcactgaatcttctgtgcttaaacgacatgagagaattcacactggagagaaaccatatgagtgccatgtatgtgggaaagccttcactgaatcttctgacctcagacgacatgagagaactcacactggagaaaaaccatatgaatgccatctatgcggaaaagccttcaatcactcttctgtccttagacgacatgagagaactcacactggagagaaaccatatgaatgcaatatatgtggtaaagccttcaatagaagttacaactttagacttcatagaagagttcacactggagagaaaccatatgtatgtcctctatgtgggaaagcctttagtaaattttttaaccttagacaacatgagagaactcacactaaaaaagcaatgaatatgtaa

SEQ ID NO: 329269 - DNA, 1833 bp, Artificial Sequence
  derived and/or modified sequence
atggccgcccccatcctgaaggacgtggtggcctacgtggaggtgtggagcagcaacggcaccgagaactacagcaagaccttcaccacccagctggtggacatgggcgccaaggtgagcaagaccttcaacaagcaggtgacccacgtgatcttcaaggacggctaccagagcacctgggacaaggcccagaagagaggcgtgaagctggtgagcgtgctgtgggtggagaagtgcagaaccgccggcgcccacatcgacgagagcctgttccccgccgccaacatgaacgagcacctgagcagcctgatcaagaagaagagaaagtgcatgcagcccaaggacttcaacttcaagacccccgagaacgacaagagattccagaagaagttcgagaagatggccaaggagctgcagagacagaagaccaacctggacgacgacgtgcccatcctgctgttcgagagcaacggcagcctgatctacacccccaccatcgagatcaacagcagacaccacagcgccatggagaagagactgcaggagatgaaggagaagagagagaacctgagccccaccagcagccagatgatccagcagagccacgacaaccccagcaacagcctgtgcgaggcccccctgaacatcagcagagacaccctgtgcagcgacgagtacttcgccggcggcctgcacagcagcttcgacgacctgtgcggcaacagcggctgcggcaaccaggagagaaagctggagggcagcatcaacgacatcaagagcgacgtgtgcatcagcagcctggtgctgaaggccaacaacatccacagcagccccagcttcacccacctggacaagagcagcccccagaagttcctgagcaacctgagcaaggaggagatcaacctgcagagaaacatcgccggcaaggtggtgacccccgaccagaagcaggccgccggcatgagccaggagaccttcgaggagaagtacagactgagccccaccctgagcagcaccaagggccacctgctgatccacagcagacccagaagcagcagcgtgaagagaaagagagtgagccacggcagccacagcccccccaaggagaagtgcaagagaaagagaagcaccagaagaagcatcatgcccagactgcagctgtgcagaagcgaggacagactgcagcacgtggccggccccgccctggaggccctgagctgcggcgagagcagctacgacgactacttcagccccgacaacctgaaggagagatacagcgagaacctgccccccgagagccagctgcccagcagccccgcccagctgagctgcagaagcctgagcaagaaggagagaaccagcatcttcgagatgagcgacttcagctgcgtgggcaagaagaccagaaccgtggacatcaccaacttcaccgccaagaccatcagcagccccagaaagaccggcaacggcgagggcagagccaccagcagctgcgtgaccagcgcccccgaggaggccctgagatgctgcagacaggccggcaaggaggacgcctgccccgagggcaacggcttcagctacaccatcgaggaccccgccctgcccaagggccacgacgacgacctgacccccctggagggcagcctggaggagatgaaggaggccgtgggcctgaagagcacccagaacaagggcaccaccagcaagatcagcaacagcagcgagggcgaggcccagagcgagcacgagccctgcttcatcgtggactgcaacatggagaccagcaccgaggagaaggagaacctgcccggcggctacagcggcagcatgtag

SEQ ID NO: 329270 - DNA, 1833 bp, Artificial Sequence
  derived and/or modified sequence
atggctgccccgatcctgaaggacgtggtagcatacgtggaggtgtggtcatctaatggtacagagaattacagcaagacttttactacccagctcgtcgatatgggagccaaggttagcaagacgttcaacaagcaagtgacccacgtaatttttaaggacgggtatcagtccacctgggataaagctcaaaagcggggagtcaagctagtgagtgttctgtgggtagaaaaatgccgtaccgccggagcgcatatcgacgagtccctgttcccggccgccaacatgaacgagcatttgtcctcattgattaaaaagaagagaaaatgtatgcagcctaaagactttaattttaaaactcctgaaaatgataagcgttttcagaaaaagttcgagaagatggcaaaagaactacagcggcagaagaccaatctagacgatgatgtgcctattctgttgttcgagtccaacggatcactgatatacacacccacaattgagattaatagccgacatcattccgctatggaaaagcggctccaggaaatgaaagaaaagagagaaaacctctcacctacatcttcacagatgattcagcagagccatgacaacccatccaatagcttgtgcgaagctcctctgaacatctcccgtgataccctttgtagtgacgagtactttgcaggaggactacatagctcctttgacgatctgtgcggaaacagcggctgcggcaatcaagagaggaagctggagggtagtattaatgacattaagtcagatgtatgcatctctagcctcgtgctgaaagccaacaacattcattctagtccttccttcacccaccttgacaagtcctctccacagaagttcttgtccaacttgtctaaggaggagatcaacctgcaacgaaacattgcaggtaaggtggtcacacctgaccaaaagcaggctgcaggcatgagccaggagacttttgaagagaaatacaggcttagccccaccctgagttcgaccaaggggcacctgttaatccacagcagaccacgttcttccagcgttaagcgcaagagagtctctcacggatcacactctccacctaaggaaaagtgcaagcggaagcggagtacacgtagaagcattatgccaaggctccaactgtgtaggtctgaggaccggctgcaacatgtggcagggccagcactggaggcgctcagctgcggggaaagctcgtacgatgattatttctcaccagataatctcaaagaaagatattctgagaatttacctcccgagagtcaactgccgtccagccctgctcagctcagttgccgttcgttaagcaagaaggagaggacgagcattttcgagatgtcagacttttcctgtgtcggcaagaagacaaggacagtagatatcaccaactttactgctaaaactatttcctctcctcggaagaccggaaatggggagggaagggcgacatcaagctgcgttacttccgctcctgaagaagcactccggtgctgccggcaggccgggaaagaagacgcctgccctgaagggaatgggttttcctacaccattgaggatcccgcactgccgaaggggcacgacgatgatctgactcctctcgagggatctttagaagaaatgaaagaggcagttggattgaaaagtacccagaataagggaaccacctctaaaatcagcaactcctctgaaggcgaggctcagtccgaacacgaaccgtgctttattgtggactgtaacatggaaacgtcaaccgaggaaaaggagaatctcccgggcggctactcaggctctatgtag

SEQ ID NO: 329271 - DNA, 1833 bp, Artificial Sequence
  derived and/or modified sequence
atggccgcccccatcctgaaggatgtggtggcctacgtggaggtgtggagcagcaatggaacagagaactacagcaagaccttcaccacccagctggtggacatgggcgccaaggtgtccaagaccttcaacaagcaggtgacccacgtgatcttcaaggatggctaccagagcacctgggacaaggcccagaagaggggcgtgaagctggtgtctgtgctgtgggtggagaagtgcaggacagctggggcccacattgatgagagcctcttccctgctgccaacatgaatgagcacctgagcagcctcatcaagaagaagaggaagtgcatgcagcccaaggacttcaacttcaagaccccagaaaatgacaagcgcttccagaagaagtttgagaagatggccaaggagctgcagaggcagaagaccaacctggatgatgatgtgcccatcctgctgtttgagagcaatggcagcctcatctacacccccaccatcgagatcaacagccgccaccacagcgccatggagaagaggctgcaggagatgaaggagaagcgggagaacctgagccccaccagcagccagatgatccagcagagccatgacaaccccagcaacagcctgtgtgaggcccccctgaacatcagccgggacaccctgtgcagtgatgagtactttgctgggggcctgcacagcagctttgatgacctgtgtggcaacagcggctgcggcaaccaggagaggaagctggagggcagcatcaatgacatcaagagtgatgtgtgcatcagcagcctggtgctgaaggccaacaacatccacagcagccccagcttcacccacctggacaagagcagcccccagaagttcctgagcaacctgagcaaggaggagatcaacctgcagaggaacattgctgggaaggtggtgaccccagaccagaagcaggccgccggcatgagccaggagacctttgaggagaagtaccgcctgagccccaccctgagcagcaccaagggccacctgctgatccacagccggcccaggagcagctctgtgaagaggaagagggtgagccacggcagccacagcccccccaaggagaagtgcaagaggaagaggagcacccggcgcagcatcatgccccggctgcagctgtgccgctcagaagatcggctgcagcacgtggccggccctgccctggaggccctgagctgtggggagagcagctatgatgactacttctccccagacaacctgaaggagcgctacagcgagaacctgcccccagagagccagctgcccagcagccctgcccagctgagctgccgcagcctgagcaagaaggagaggaccagcatctttgagatgtctgacttcagctgtgtgggcaagaagaccaggacagtggacatcaccaacttcaccgccaagaccatcagcagccccaggaagacaggaaatggagagggccgggccaccagcagctgtgtgaccagcgcccctgaggaggccctgcgctgctgccggcaggccggcaaggaggatgcctgcccagagggcaatggcttctcctacaccatcgaggaccctgccctgcccaagggccatgatgatgacctgacccccctggagggcagcctggaggagatgaaggaggccgtgggcctgaagagcacccagaacaagggcaccaccagcaagatcagcaacagcagcgagggggaggcccagagcgagcacgagccctgcttcatcgtggactgcaacatggagaccagcacagaggagaaggagaacctgcccggcggctacagcggctccatgtag

SEQ ID NO: 329272 - DNA, 2917 bp, Artificial Sequence
  derived and/or modified sequence
gcccagtgcccgcgcgcgccgccaggctcgcaagcaccgcgtaggccagctggccggatcccgccgtctgtcatggcggcccccatcctgaaagatgtagtggcctatgttgaagtgtggtcatccaatggaacagaaaattattcaaagacatttacaacacagcttgtggatatgggggcaaaggtttcaaaaacttttaacaaacaagtaactcacgttatcttcaaagatggctaccagagcacttgggacaaagctcagaagagaggcgtaaagctcgtttcggtgctctgggtggaaaaatgcaggacagctggagcacacattgatgaatcattgttccctgcagctaatatgaatgaacacttatcaagcctaattaaaaaaaaacgtaaatgtatgcagcccaaagattttaattttaaaacaccagaaaatgataagagatttcagaagaaatttgagaaaatggctaaagagctacaaaggcaaaaaacaaatctagatgatgatgtacctattctcttatttgaatctaatggttcattaatatatactcccacaattgaaattaatagtaggcaccacagcgcaatggagaagagattacaagagatgaaggagaaaagggaaaatctttcccccacctcttcccaaatgattcagcagtctcatgataatccaagtaactctctgtgtgaagcacctttgaacatttcacgtgatactttgtgttcagatgaatactttgctggtggcttacactcatcttttgatgatctttgtggaaactcaggatgtggaaatcaggaaaggaagttggaaggatccattaatgacattaaaagtgatgtgtgtatttcttcacttgtattgaaagcaaataatattcattcatcaccatctttcactcacctcgataaatcaagtcctcagaaatttctgagtaatctttcaaaggaagaaataaacttgcaaagaaatattgcaggtaaagtagtcacccctgaccaaaagcaggctgcaggtatgtctcaggagacgtttgaagagaagtatcgtttgtctcctaccttatcttcaacaaaaggccaccttttgatacattcaagacccaggagttcctcagtaaagagaaaaagagtatcacatggctcccattcacctccgaaggaaaaatgcaagagaaagaggagcaccaggagatctatcatgccgaggctgcagctgtgcaggtcggaagacaggctgcagcacgtggcgggacctgccctggaggctcttagctgtggggagtcttcatatgatgactatttttcacctgataatcttaaggaaaggtattcagagaatcttcctcctgaatctcagctgccatcaagccctgctcagttgagctgcagaagtctttctaagaaggagagaacaagcatatttgaaatgtctgatttttcctgcgttggcaaaaaaaccagaacagttgacattaccaatttcacagcaaaaaccatctccagtcctcggaaaactggaaatggtgaaggccgtgcaacttcgagttgcgtgacttctgcccctgaagaagccctaaggtgttgtagacaggctgggaaagaagacgcatgcccagagggaaatggcttttcttacaccattgaggaccctgctcttccaaaaggacatgatgatgatttaactcctttggaaggaagccttgaagaaatgaaagaagcggttggtctgaaaagcacacagaacaaaggtaccacttccaaaatatcaaactcctctgaaggcgaagcccagagtgaacatgagccatgttttatagttgactgtaacatggagacgtctacagaagagaaggaaaacttacccggaggatacagtggaagtatgtgaatctccttttccaagtcaccttcgctaaataaacatgtaacagtgcatccatattttaaatttatcacaactttttcataacttatttccccatttactcctctttttacttaaagaatgtgcatttgatcattccaatgataaactctttaggaatagatgacttgctgtcttgtggaacttctagacttattggttaagtctgttaggaatctatttctccaagacttttccttcttataggtcaaaaggataagtagtccatagtatgaataactgaggggagtgaagtctttttccttattccattggagtcttggcgctgcagcgtgtgtaaagatgtatacgatagagagttttttaaaacctaggttcttaatagtgaggctatttaaagaaagaaattaaggtagattaagccatcgattgtatcatagagaaagtgtgaaaaactacttttagaaatctgttgtcaatattgatttttgaagaaactttggtcagtgttaactatgaagaaacatttaaacatttttgatcatttgtaacaagccttgtttaacttgtacttattttgcttgaagcatcacttgaaaaggtttactcctattcataatttaattgtaattataataaaccatatcattttattaaaagtcaaaacaataaaaaattttgcacttcacagttataagcacaaataggttccagcaaccaaaattgaagaaatcttgaactttgaccgtctttacctaaagattaggttaaaatttgagtgagaacgcattctctctgcatgatttctctgctctacaaatgttttaactgcctctttgaaggtggagaagtcatggtagcgtttgaaatcatcacagacatgttacataccttttccttgagtatacgctccccaaaattgtttcacaaaaagaatgaaaataattttatgtttttggcctgctatttatatcttggctttctgaacatatattaaatttgacaagaaactgta

SEQ ID NO: 329273 - DNA, 1833 bp, Artificial Sequence
  derived and/or modified sequence
atggccgcccccatcctgaaggacgtggtggcctacgtggaggtgtggagttcaaatggaacagagaactacagcaaaacattcaccactcagctggtggacatgggcgcaaaagtgtccaagaccttcaataagcaagtgactcacgtgatcttcaaggacggataccagtctacctgggataaggcccaaaaaagaggagtgaagcttgtgagcgttctgtgggtggaaaagtgtcggacagccggcgctcacatcgacgagtcattgttccccgcagcaaatatgaacgagcatctgagcagtttaattaaaaagaagagaaaatgcatgcagccgaaggattttaattttaaaacgcctgaaaatgacaagcgattccaaaaaaaattcgagaaaatggctaaggaacttcagcggcaaaaaactaacttagacgacgacgtcccgattctccttttcgagtccaacggatcactcatatatactccaactatcgaaatcaactcaagacaccacagcgctatggaaaagcgactgcaggagatgaaggagaagagggaaaacctttctcctacatcatcgcaaatgatccagcagagccacgataatccttcaaacagcctctgcgaggccccgctgaacatttcccgggacaccttatgttcagatgaatattttgccggcggtctgcatagtagctttgatgacctttgcgggaacagcggctgcggcaatcaagagagaaagcttgagggcagtatcaacgatattaagtctgatgtgtgtatctctagtcttgttcttaaggctaacaacatccactcttcaccttcattcacccacctggacaagagctcgccacagaagttccttagcaacctctccaaagaagagatcaacttacaacgcaacattgccggcaaggtggtaacccctgaccagaagcaagcagctgggatgtcacaggagacgttcgaggagaaatatcgcctttcacccactctctcatccacaaaaggccatttgctgatacacagtcgacctaggtcttcatcagtgaagagaaagagagtgtcgcatggctcccactccccgcctaaagaaaagtgcaagcggaaaagatccacaagacggtccataatgccgaggctccagttatgtagatccgaagatcgcctccaacacgttgcaggtccagccctggaagctctgagctgtggcgagtcttcttatgacgactacttttcaccagacaacctgaaagaacgctactctgaaaatctgccacctgaatctcagcttccaagcagcccagcccagctaagctgtagaagtcttagtaagaaggagaggacctctatctttgaaatgtcagacttttcgtgcgtaggaaagaaaaccagaacagtcgatataaccaatttcactgcaaaaaccattagctctcctcgcaagacgggcaatggcgaaggccgcgccactagctcatgtgtgacctctgctccagaagaggcccttaggtgctgccgtcaggcagggaaagaggacgcctgtccagagggaaatggcttttcttataccatcgaagaccctgccctgcctaagggacatgacgatgacctgactccattggaaggaagtcttgaagaaatgaaagaggcagtaggattgaagagcacgcagaacaaggggacaacgtcaaagattagcaattccagtgagggagaagcacagagcgagcatgagccctgcttcattgtagattgcaatatggaaacctcaacagaggaaaaggagaatcttcccgggggttattcaggatctatgtag

SEQ ID NO: 329274 - DNA, 1833 bp, Artificial Sequence
  derived and/or modified sequence
atggctgccccaattttgaaggatgtcgtggcctatgttgaggtttggagttcaaacggaactgagaactactctaaaaccttcactacacaactcgtcgatatgggcgctaaagtgtcgaaaacttttaataagcaggttacacacgttatctttaaagatggttatcaatcgacgtgggacaaggcacaaaagagaggcgtaaaactggtgtccgtgctgtgggtggagaaatgtcgaaccgccggagcgcacatcgatgaaagtctgttccctgccgcaaatatgaacgaacatctttcctcccttatcaaaaagaaaagaaaatgcatgcagcccaaagatttcaattttaaaacgcccgagaacgacaaaaggttccaaaaaaaatttgagaaaatggctaaagagctgcagaggcagaagaccaacctcgacgatgatgtgccaatcctcctttttgagtcaaatggctccctcatttacacgcccaccatcgagatcaactcaaggcaccattccgccatggagaagcggttgcaggagatgaaagaaaaaagggaaaatctgagcccaacgtcttcccaaatgatccagcaatcccacgataacccgtcaaattccctgtgtgaggctccactgaacatcagccgcgacacgctttgtagtgacgaatactttgcaggaggactgcactccagttttgatgatctatgcggaaactccggatgtggaaaccaggaaagaaaacttgaaggatccatcaacgatatcaagtctgacgtgtgtatttcatccctcgtattgaaggcaaacaacatccatagctccccttccttcacccacctggacaaaagctccccacaaaagttcctgtcaaacctcagtaaggaagaaataaacctgcagagaaatatcgcaggtaaagtcgtgacccccgaccagaagcaggccgctggaatgtcccaggagaccttcgaagaaaaatacagactctctccaacattgagttctaccaagggccacttgttgatccattcaagaccgagaagttcaagtgtgaagcggaaacgcgtctcgcacgggtctcatagtccaccgaaagaaaaatgcaaacgcaagagatctaccaggcgcagtatcatgccccgattacaactgtgtcgatctgaggaccgcctacagcatgttgccggacctgccctggaagcattgtcctgtggggaatcttcttatgatgattacttcagcccagacaatctaaaagagcggtatagcgaaaacctgcctcctgaatctcagcttccgagcagccctgcccagctgtcctgtcgttccttgagcaaaaaggaacggacgtctatctttgaaatgtccgatttttcctgcgtgggaaagaaaacgagaactgtggatattactaattttaccgctaagaccatttctagcccacggaaaactgggaacggggaggggcgagccacttcgagctgcgtgacttccgctccagaagaggcactccggtgctgcagacaggctggcaaggaagatgcttgccccgaaggcaatggcttctcatacaccattgaggaccctgctctgcccaaagggcacgacgacgatctcaccccacttgagggaagcttagaggagatgaaggaggctgtgggtctgaagagcacccagaataaggggaccacatcaaaaatctctaactctagcgagggcgaagcccagtctgaacatgagccttgctttatagtcgattgtaacatggagaccagtaccgaagaaaaagagaacctgcccggaggatactctggctcaatgtag

SEQ ID NO: 329275 - protein, 975 aa, Artificial Sequence
  derived and/or modified sequence
MKGLSGSRTQPPLCSGHTCGLAPPEDCEHLHHGPDARPPYLLSPADSCPGGRHRCSPRSSVHSECVMMPVVLGDHVSSSTFPRMHYSSHYDTRDDCAVAHAGAKINRIPANLLDQFEKQLPLHRDGFHTLQYQRTSAAAEQRSESPGRIRHLVHSVQKLFTKSHSLEGSSKSNANGTKADGRADDHHHAHHAKHSKRSKSKERKPEGKPRPGMSSWWSSDDNLDSDSTYRTPSVLNRHHLGPVAHCYPDALQSPFGDLSLKTSKSNNDVKCSACEGLALTPDAKYLKRSSWSTLTVSQAKEAYRKSSLNLDKPLLHQDAKPALRPCHYLQVPQDEWGGYPTGGKDEEIPCRRMRSGSYIKAMGDEESGESDSSPKTSPKSAILPEPLLKSIGQRPLGEHQTQTYLQAASDVPVGHSLDPAANYNSPKFRSRNQSYMRAVSTLSQASCVSQVSEAEINGQFESVCESVFSEVESQAMDALDLPGCFRTRSHSYLRAIQAGYSQDDECIPMMTPSDITSTIRSTAAVSYTNYKKTPPPVPPRTTSKPLISVTAQSSTESTQDAYQDSRAQRMSPWPQDSRGLYNSTDSLDSNKAMNLALETAAAQRHLPESQSSSVRTSDKAILVSKAEELLKSRCSSIGIQDSEFPEHQPYPRSDVETATDSDTESRGLREYHSVGVQVEDEKRHGRFKRSNSVTAAVQADLELEGFPGHITTEDKGLQFGSSFQRHSEPSTPTQYSAVRTVRTQGLFSYREDYRTQVDTSTLPPPDPWLEPAIDTVETGRMSPCRRDGSWFLKLLHAETKRMEGWCKEMEREAEENDLSEEILGKIRSAVGSAQLLMSQKFQQFYWLCQQNMDPSAMPRPTSQDLAGYWDMLQLSIEDVSMKFDELQRLRLNDWKMMESPERKEERKVPPPIPKKPPKGKFPITREKSLDLPDRQRQEARRRLMAAKRAASFRQNSASERADSIEIYIPEAQTRL

SEQ ID NO: 329276 - DNA, 2928 bp, Artificial Sequence
  derived and/or modified sequence
atgaaaggacttagcgggagccggacacagccacctctctgttccggtcatacctgtggtcttgcaccccctgaagactgcgaacatctccatcatgggccggacgcgagacctccatacttgttgagccctgctgacagctgcccaggcggccgccaccgttgctccccccgttcctccgtgcattcagagtgtgtcatgatgcccgtggtcttaggagatcatgtgtctagtagcacatttccaagaatgcattactcgtcccactacgatacacgggatgattgcgctgtggcccacgcgggagcaaagataaatcgtattccagcaaatcttctggaccaattcgaaaagcaattgccgctacatcgagacggttttcatacactccagtatcagcggaccagcgccgctgccgaacaaagaagtgagtctccgggcaggatccgacacctagtccattctgtccagaagctgttcactaaaagccattccctggaaggctcgtccaagagcaacgcaaacggaaccaaggccgacgggagggccgacgatcatcaccatgcccaccacgcgaaacactctaaaaggtcaaaatcaaaggaacgaaagcctgaaggcaaacctcgccccggaatgagtagttggtggtctagtgacgacaatttggattcagatagcacttacagaaccccctccgtgctgaatcggcaccatctcgggccagttgcccattgctaccccgatgccctgcagagtccttttggggacttaagtctgaagacaagtaaatccaataacgacgtcaaatgcagcgcctgcgaagggctcgctctcaccccagacgccaaatatctgaaaaggagttcctggtctacactcacagtcagccaggctaaagaagcctatcgcaaatctagtctgaatctggataagcccctgctacatcaggatgccaagcccgcacttcgtccctgtcactatctacaggtgccccaggacgagtggggcggctatccaacgggggggaaagatgaagaaattccgtgtcggaggatgaggagtggatcctacatcaaggctatgggcgacgaggagagcggcgagagtgattcgtcaccaaaaacaagtccgaaaagtgccatcctgcccgaacccctgctcaagtcaatcggtcaaaggccgctcggagagcatcagacacagacgtacctacaagcagccagcgacgtacctgtggggcatagcttggatccggcagcaaattacaatagccccaagtttcgatctcggaatcaaagctacatgcgagcagtctcaactctgagtcaggctagctgcgtgtcgcaggtcagcgaagccgaaatcaacggccaatttgagagtgtatgcgagagtgtcttctctgaagtggagtcccaggctatggacgccttggatctgcccggctgctttagaaccaggagtcatagctacctgcgcgccattcaggcaggctattctcaggatgatgaatgtattcccatgatgactccctctgacattacgagtaccatccggagtactgccgcggtaagctatactaattacaaaaaaaccccgccccctgtcccgccccgcacgacttctaaacccctgatcagtgtgacagcacaatcgtctaccgaaagcactcaagatgcgtaccaggactcacgtgcacaacgcatgtcaccctggcctcaagactcccgaggactctacaatagcactgatagcctcgactccaacaaggctatgaatctggctctggaaactgccgccgcacagaggcatctacccgagtctcagagctccagcgtccgcaccagtgacaaagccattttagtgtcaaaggccgaggagctactaaagtctcggtgctctagcattggaattcaagattctgaatttcccgagcatcaaccgtacccacggagtgatgtggaaacggctacagattctgacactgaatccaggggtttgagagagtatcactccgtaggtgtacaagtggaggatgagaagaggcacggccgattcaagaggagtaactctgttacggctgcagtgcaagccgacctggagctagaaggattccccggacatattaccacggaagataaaggcttacagtttggctccagctttcagaggcattctgagccaagcacgcctactcagtactctgctgttaggaccgtgagaacccagggactgttttcatacagagaggattaccgaacccaggtagacacatctacactgccgccccctgacccttggctcgaacctgctatcgatactgtggagactggccggatgagcccatgcaggcgcgacggaagctggttcctgaaacttctacacgctgagaccaaacggatggagggctggtgtaaagaaatggagagggaggccgaagaaaatgatttgtccgaagagatcctgggaaagatccgatctgctgtgggctcagcccagctgctgatgtcacagaagttccaacagttttactggctgtgtcaacagaatatggatccctctgcaatgcctagaccaacttcacaggatcttgctggatactgggatatgctgcagctcagcattgaggatgtgtcaatgaaattcgatgagctccaacgtctgcggttgaacgactggaagatgatggagtccccagaaaggaaagaggaacgcaaggtgccaccccctatccccaaaaaaccccccaagggaaaattcccaatcactagggagaagagcctggacttgcctgaccggcagcgtcaggaggcccggcgtcggctaatggctgctaaacgggctgcctcatttcgtcagaattccgcgtcggagcgggctgacagtatcgagatttatattcccgaggcacagacccggctgtag

SEQ ID NO: 329277 - DNA, 2928 bp, Artificial Sequence
  derived and/or modified sequence
atgaagggcctgagcggcagcaggacccagccccccctgtgcagcggccacacctgtggcctggcccccccagaggactgtgagcacctgcaccacggcccagatgcccggcccccctacctgctgagccctgctgacagctgccctgggggccgccaccgctgcagccccaggagctctgtgcacagtgaatgtgtgatgatgcctgtggtgctgggggaccacgtgagcagcagcaccttccccaggatgcactacagcagccactatgacaccagagatgactgtgctgtggcccatgctggggccaagatcaaccgcatcccagccaacctgctggaccagtttgagaagcagctgcccctgcacagagatggcttccacaccctgcagtaccagaggaccagcgctgctgctgagcagaggtctgagagccctggccgcatccgccacctggtgcacagcgtgcagaagctgttcaccaagagccacagcctggagggcagcagcaagagcaatgccaacggcaccaaggcagatggccgggcagatgaccaccaccacgcccaccacgccaagcacagcaagaggagcaagagcaaggagaggaagccagagggcaagcccaggcctggcatgagctcctggtggagcagtgatgacaacctggacagcgacagcacctaccgcaccccatctgtgctgaacagacaccacctgggccctgtggcccactgctacccagatgccctgcagagcccctttggagacctgagcctgaagaccagcaagagcaacaatgatgtgaagtgcagcgcctgtgagggcctggccctgaccccagatgccaagtacctgaagaggagctcctggagcaccctgactgtgtcccaggccaaggaggcctacaggaagagcagcctgaacctggacaagcccctgctgcaccaggatgccaagccagccctgcggccctgccactacctgcaggtgccccaggatgagtggggcggctaccccactggaggcaaggatgaggagatcccctgcaggaggatgaggagcggcagctacatcaaggccatgggagatgaggagagcggggagagtgacagcagccccaagaccagccccaagagcgccatcctgcctgagcccctgctgaagagcatcggccagaggcccctgggggagcaccagacccagacctacctgcaggccgccagtgatgtgcctgtgggccacagcctggaccctgctgccaactacaacagccccaagttccgcagcaggaaccagagctacatgagagctgtgtccaccctgagccaggccagctgtgtgtcccaggtgtctgaggccgagatcaatggccagtttgagagcgtgtgtgagagcgtcttcagcgaggtggagagccaggccatggatgccctggacctgcccggctgcttccgcaccaggagccacagctacctgcgggccatccaggccggctacagccaggatgatgagtgcatccccatgatgacccccagcgacatcaccagcaccatccgcagcacagctgctgtgtcctacaccaactacaagaagaccccacctcctgtgccccccaggaccaccagcaagcccctcatctctgtgacagcccagagcagcacagagagcacccaggatgcctaccaggacagccgggcccagaggatgagcccctggccccaggacagccggggcctgtacaacagcacagacagcctggacagcaacaaggccatgaacctggccctggagacagctgctgcccagaggcacctgcctgagagccagagcagctctgtgaggaccagtgacaaggccatcctggtgtccaaggccgaggagctgctgaagagccgctgcagcagcatcggcatccaggacagcgagttccctgagcaccagccctaccccaggagtgatgtggagacagccacagacagcgacacagagagccggggcctgcgggagtaccacagcgtgggcgtgcaggtggaggatgagaagagacatggccgcttcaagaggagcaacagcgtgacagctgctgtgcaggccgacctggagctggagggcttccctggccacatcaccacagaagataaaggcctgcagtttggcagcagcttccagaggcacagcgagcccagcacccccacccagtacagcgctgtgaggacagtgaggacccagggcctcttctcctaccgggaggactaccgcacccaggtggacaccagcaccctgcccccaccagacccctggctggagcccgccatcgacacagtggagaccggccgcatgagcccctgcagaagagatggctcctggttcctgaagctgctgcatgctgagaccaagaggatggagggctggtgcaaggagatggagcgggaggccgaggagaatgacctgtctgaggagatcctgggcaagatccgctctgctgtgggcagcgcccagctgctgatgagccagaagttccagcagttctactggctgtgccagcagaacatggaccccagcgccatgccccggcccaccagccaggacctggccggctactgggacatgctgcagctgagcattgaagatgtgtccatgaagtttgatgagctgcagaggctgcggctgaatgactggaagatgatggagagccctgagaggaaggaggagaggaaggtgcccccacccatccccaagaagccacccaagggcaagttccccatcacccgggagaagagcctggacctgcctgaccggcagaggcaggaggcccggcggcggctgatggccgccaagagagctgccagcttccggcagaacagcgccagcgagagagctgacagcattgagatctacatccctgaggcccagacccggctgtag

SEQ ID NO: 329278 - DNA, 2928 bp, Artificial Sequence
  derived and/or modified sequence
atgaagggcctgagcggcagccggacccagccccccctgtgcagcggccacacctgtggactggccccaccagaggactgtgagcacctgcaccatggaccggacgctagacccccctatctcctgagccccgcagacagttgtcccggcggccgccatcgttgttccccaagaagtagcgtacactctgagtgtgttatgatgcccgtcgtgcttggggatcacgtttcttcatctacttttcctagaatgcattatagctcccactacgacaccagagatgactgcgctgtagctcacgccggagccaagatcaacaggatccccgctaacctactggatcagttcgagaaacagctgcctctccatcgcgacggtttccacaccttgcagtatcagcgtacctccgccgccgctgaacaaaggtccgagtctcctgggcgcattagacacttggtgcattcagtccagaagctgtttactaagtctcacagcctcgagggcagctccaaaagtaatgcgaacggcaccaaggccgatggacgcgctgacgaccaccaccacgcccatcatgctaagcattccaagcgcagcaagtccaaggagagaaaacctgagggcaaaccgagacccgggatgtcgagctggtggagctccgacgacaacctggatagcgattcgacttatagaacccccagcgtgctgaacaggcaccacttgggccccgtagcacactgctacccggatgccctgcagtcccccttcggggacctgtcactgaagacttctaagtctaataatgatgtgaaatgctcagcatgtgaaggactggccttgaccccagacgccaagtacttgaaacgcagttcatggagcaccctcaccgtgtcgcaggcaaaagaggcctacagaaagtccagtttgaacttagataagccactgctccaccaggacgcaaagccagctctgaggccttgccactacctgcaggtcccgcaggacgagtggggtggataccccacaggcgggaaagatgaggaaatcccgtgcaggaggatgcgatctggctcttatatcaaggcaatgggtgatgaggaatcaggtgagtccgattcttcacccaaaacatcacccaaatccgcgattctcccagagccactccttaagtccattgggcagcggcctttaggagagcatcagacccagacataccttcaggccgccagcgacgtgccagtagggcatagtcttgatcctgcggccaactacaattcacccaaattccgatcaagaaatcagtcatatatgagagccgtgtctacccttagccaggccagttgtgtctcccaagtgtctgaagccgagatcaacggtcaattcgagagcgtctgtgagagcgtgtttagcgaagtcgagagccaggcaatggacgccctggaccttcccgggtgctttcgtactcgatcacacagctaccttagggctatccaggccggctattcccaggatgacgagtgtataccaatgatgacacccagcgatataacaagcacaataaggagtacagccgccgtctcctataccaactataagaagacccctccccctgtgccacccagaactacttctaagccgttaatcagcgtaacagctcagtcatctactgagtcaacacaggatgcgtatcaggattctcgggcccagcgcatgagcccttggcctcaggattccagggggctatataattctaccgactccctggacagtaacaaagctatgaacctggcactggaaacagcagccgcacagagacatttaccagaaagtcagtctagctccgtaaggacctcggataaagcgattctggtgagcaaagccgaggagcttctgaagtctcgctgcagcagcataggcattcaggacagcgagttcccagagcaccaaccataccctcgcagcgatgtggagacggccactgattcagacaccgaaagtaggggcctacgcgaataccattccgtcggggtccaggttgaagatgagaaaagacacggccgatttaagcgcagcaactctgtgacggctgcagtgcaggccgatcttgagttggagggatttcccgggcatatcaccacagaggacaagggattacagttcggaagtagcttccagcgccactctgagccgagtacacccactcagtacagtgcagtgcggaccgttagaacccagggcctttttagttatcgggaggattacagaacccaagtcgacacatccactctgccaccaccagacccttggcttgaaccagcaatcgacactgttgaaactggccgtatgagtccttgccggagggacgggagttggtttcttaaactgcttcatgctgaaaccaaaaggatggaaggttggtgcaaggagatggaacgagaagcggaagaaaacgacttatccgaagaaattctgggcaagattcgctcggccgtgggatccgcgcagctgctgatgagtcagaaatttcaacagttctactggctttgtcagcagaatatggaccccagcgccatgccacgaccaacctcccaggatctggcgggctactgggatatgctgcaattatctattgaggatgtgagcatgaagttcgacgagctacagcggctgcgcttgaatgactggaaaatgatggaatctccagaacggaaggaggagagaaaggtgcctccaccaatacccaagaagccccccaagggaaagttccctatcactcgagagaagtcgttggatctccccgaccggcagagacaggaggctaggcggcgcctgatggcagctaagcgagcagcgtcgttccgccagaacagcgcgagtgagagagccgactccatcgagatttacatccccgaggcccaaactcgcctgtag

SEQ ID NO: 329279 - DNA, 2928 bp, Artificial Sequence
  derived and/or modified sequence
atgaaggggctttcaggcagtagaacacagccacctctttgcagcggacacacctgcggactggcaccacctgaagattgcgaacaccttcaccatggtccagacgcgagacctccctatctgctcagccctgccgacagctgcccgggtggtaggcacagatgcagccctagaagtagtgtgcacagtgaatgcgtaatgatgcctgttgtgctgggggaccatgtgtcttcaagcactttcccgagaatgcattactcgtcccactatgatactagagacgattgtgctgtggcacatgccggtgccaaaattaatcgaattcccgctaaccttttggatcaatttgaaaaacagctccccctccatagagacgggtttcacacattacagtaccagagaacttctgccgctgcagaacagaggagcgagagcccgggacgtattaggcacctcgtgcactctgtgcagaagctctttacgaagtctcattccctcgaaggctcttctaagtcaaatgcaaacggtaccaaagccgacggacgggctgacgatcaccatcacgcacaccacgctaagcatagcaaaaggtccaagtccaaggaacgtaagcccgaggggaagcccagacccggtatgtcctcttggtggagttcggatgataatctcgactccgacagtacatatcggaccccatccgtcctgaaccgccatcacctgggcccagtggctcactgctaccctgatgccctgcagtccccctttggcgacctcagcctcaaaacttccaaatccaacaacgatgtgaagtgctcagcctgcgaaggattagcactgacgccagatgctaagtacctgaagaggagctcatggagtacactcacggtgagccaagctaaagaggcctaccgcaaatcatcgttaaatttggataaacccctcttacaccaggacgccaagcctgccctgcgaccctgccattacctgcaagtcccgcaggacgagtgggggggatacccaacaggcggaaaagacgaggaaatcccttgtcgcagaatgcgctccggatcctacattaaagcaatgggcgatgaggagagcggtgagagcgactcaagccctaaaacctctcctaaaagtgccattctgccggaacctctcttgaaaagtataggccagcgccctctcggagagcaccaaacacagacctacctgcaagctgcttccgatgtccccgtggggcattctctcgaccccgctgcaaattacaactcccctaaatttaggtctcgcaaccaaagctacatgagggcggtgtccactctatcccaagcatcttgcgtgtcccaggttagtgaggccgaaataaatgggcagttcgaaagtgtgtgtgaatctgtgttcagcgaggtggagagccaggccatggatgctctggatctccctggctgtttcaggaccagaagccacagttacttacgtgctatccaggccggatactcccaagatgatgaatgcatccctatgatgaccccctctgacatcacctccaccatccggtccacagccgctgtgtcatacacaaattataagaagaccccacccccagtcccccctcgcactacgagcaagcctctgatttccgtgacggctcagtcttccaccgaatccacgcaggatgcgtaccaagacagtcgagcgcagcggatgtcaccatggccgcaggactccagaggcctgtataattccactgattcactggacagtaataaagctatgaacctggctctggaaacggcagcagcccaaaggcacctccccgagagccaatcctcttcagtcaggacttccgataaggcaattcttgtgtccaaagctgaggagctgctgaagtcgcgttgctcttccattggaattcaggactccgagttcccagaacaccaaccctatcccagaagtgatgtagagacagccaccgacagcgataccgagagccggggactcagggagtatcactccgttggggtccaagtcgaggacgagaagagacacggcagatttaagcgttcaaactcggtgacggccgcagtgcaggctgatttagaactcgaggggtttcctggacatattacaactgaggataaaggtctccagttcgggtcctccttccagcgccatagtgagccctcgacacccacacagtactctgcagtgaggacagtgcggactcagggcctgttctcatacagggaggattacaggacccaagttgatacttctacccttccgcctcccgatccatggttggagcccgcaattgacaccgtcgaaaccggacgaatgtccccctgtcgacgggatggaagctggttcttgaagctgcttcacgccgaaacgaaaaggatggaaggatggtgcaaagaaatggagagagaagccgaggaaaacgacctcagtgaagagatcctcggcaagattcggtcggcagtggggtctgcccagctgcttatgtcgcagaagttccagcaattttattggttatgccagcagaacatggacccaagtgctatgccaagaccgacatcgcaggatctcgccggatattgggacatgctgcaactaagcatcgaagacgtgtccatgaagtttgacgagctgcaaaggttgagattgaacgattggaagatgatggaatctcccgagcggaaagaagaaaggaaagtgccgccacccattccaaagaaaccgccaaaggggaaattcccgatcacacgcgaaaaatccctagaccttccagaccgacagcgacaggaggcacgcaggcggctcatggctgccaagagggctgctagcttccgtcagaacagtgctagtgaacgggcagattccatcgagatctatattccagaagctcagacaaggctgtag

SEQ ID NO: 329280 - DNA, 2928 bp, Artificial Sequence
  derived and/or modified sequence
atgaagggcctgagcggcagcagaacccagccccccctgtgcagcggccacacctgcggcctggccccccccgaggactgcgagcacctgcaccacggccccgacgccagacccccctacctgctgagccccgccgacagctgccccggcggcagacacagatgcagccccagaagcagcgtgcacagcgagtgcgtgatgatgcccgtggtgctgggcgaccacgtgagcagcagcaccttccccagaatgcactacagcagccactacgacaccagagacgactgcgccgtggcccacgccggcgccaagatcaacagaatccccgccaacctgctggaccagttcgagaagcagctgcccctgcacagagacggcttccacaccctgcagtaccagagaaccagcgccgccgccgagcagagaagcgagagccccggcagaatcagacacctggtgcacagcgtgcagaagctgttcaccaagagccacagcctggagggcagcagcaagagcaacgccaacggcaccaaggccgacggcagagccgacgaccaccaccacgcccaccacgccaagcacagcaagagaagcaagagcaaggagagaaagcccgagggcaagcccagacccggcatgagcagctggtggagcagcgacgacaacctggacagcgacagcacctacagaacccccagcgtgctgaacagacaccacctgggccccgtggcccactgctaccccgacgccctgcagagccccttcggcgacctgagcctgaagaccagcaagagcaacaacgacgtgaagtgcagcgcctgcgagggcctggccctgacccccgacgccaagtacctgaagagaagcagctggagcaccctgaccgtgagccaggccaaggaggcctacagaaagagcagcctgaacctggacaagcccctgctgcaccaggacgccaagcccgccctgagaccctgccactacctgcaggtgccccaggacgagtggggcggctaccccaccggcggcaaggacgaggagatcccctgcagaagaatgagaagcggcagctacatcaaggccatgggcgacgaggagagcggcgagagcgacagcagccccaagaccagccccaagagcgccatcctgcccgagcccctgctgaagagcatcggccagagacccctgggcgagcaccagacccagacctacctgcaggccgccagcgacgtgcccgtgggccacagcctggaccccgccgccaactacaacagccccaagttcagaagcagaaaccagagctacatgagagccgtgagcaccctgagccaggccagctgcgtgagccaggtgagcgaggccgagatcaacggccagttcgagagcgtgtgcgagagcgtgttcagcgaggtggagagccaggccatggacgccctggacctgcccggctgcttcagaaccagaagccacagctacctgagagccatccaggccggctacagccaggacgacgagtgcatccccatgatgacccccagcgacatcaccagcaccatcagaagcaccgccgccgtgagctacaccaactacaagaagacccccccccccgtgccccccagaaccaccagcaagcccctgatcagcgtgaccgcccagagcagcaccgagagcacccaggacgcctaccaggacagcagagcccagagaatgagcccctggccccaggacagcagaggcctgtacaacagcaccgacagcctggacagcaacaaggccatgaacctggccctggagaccgccgccgcccagagacacctgcccgagagccagagcagcagcgtgagaaccagcgacaaggccatcctggtgagcaaggccgaggagctgctgaagagcagatgcagcagcatcggcatccaggacagcgagttccccgagcaccagccctaccccagaagcgacgtggagaccgccaccgacagcgacaccgagagcagaggcctgagagagtaccacagcgtgggcgtgcaggtggaggacgagaagagacacggcagattcaagagaagcaacagcgtgaccgccgccgtgcaggccgacctggagctggagggcttccccggccacatcaccaccgaggacaagggcctgcagttcggcagcagcttccagagacacagcgagcccagcacccccacccagtacagcgccgtgagaaccgtgagaacccagggcctgttcagctacagagaggactacagaacccaggtggacaccagcaccctgcccccccccgacccctggctggagcccgccatcgacaccgtggagaccggcagaatgagcccctgcagaagagacggcagctggttcctgaagctgctgcacgccgagaccaagagaatggagggctggtgcaaggagatggagagagaggccgaggagaacgacctgagcgaggagatcctgggcaagatcagaagcgccgtgggcagcgcccagctgctgatgagccagaagttccagcagttctactggctgtgccagcagaacatggaccccagcgccatgcccagacccaccagccaggacctggccggctactgggacatgctgcagctgagcatcgaggacgtgagcatgaagttcgacgagctgcagagactgagactgaacgactggaagatgatggagagccccgagagaaaggaggagagaaaggtgcccccccccatccccaagaagccccccaagggcaagttccccatcaccagagagaagagcctggacctgcccgacagacagagacaggaggccagaagaagactgatggccgccaagagagccgccagcttcagacagaacagcgccagcgagagagccgacagcatcgagatctacatccccgaggcccagaccagactgtag

SEQ ID NO: 329281 - protein, 648 aa, Artificial Sequence
  derived and/or modified sequence
MLWPRLAAAEWAALAWELLGASVLLIAVRWLVRRLGPRPGGLGRSGTPVPPPSAAAAPASGEMTMDALLARLKLLNPDDLREEIVKAGLKCGPITSTTRFIFEKKLAQALLEQGGRLSSFYHHEAGVTALSQDPQRILKPAEGNPTDQAGFSEDRDFGYSVGLNPPEEEAVTSKTCSVPPSDTDTYRAGATASKEPPLYYGVCPVYEDVPARNERIYVYENKKEALQAVKMIKGSRFKAFSTREDAEKFARGICDYFPSPSKTSLPLSPVKTAPLFSNDRLKDGLCLSESETVNKERANSYKNPRTQDLTAKLRKAVEKGEEDTFSDLIWSNPRYLIGSGDNPTIVQEGCRYNVMHVAAKENQASICQLTLDVLENPDFMRLMYPDDDEAMLQKRIRYVVDLYLNTPDKMGYDTPLHFACKFGNADVVNVLSSHHLIVKNSRNKYDKTPEDVICERSKNKSVELKERIREYLKGHYYVPLLRAEETSSPVIGELWSPDQTAEASHVSRYGGSPRDPVLTLRAFAGPLSPAKAEDFRKLWKTPPREKAGFLHHVKKSDPERGFERVGRELAHELGYPWVEYWEFLGCFVDLSSQEGLQRLEEYLTQQEIGKKAQQETGEREASCRDKATTSVEMRFHRIDQAGLELLTS

SEQ ID NO: 329282 - DNA, 1947 bp, Artificial Sequence
  derived and/or modified sequence
atgctgtggcccagactggccgccgccgagtgggccgccctggcctgggagctgctgggcgccagcgtgctgctgatcgccgtgagatggctggtgagaagactgggccccagacccggcggcctgggcagaagcggcacccccgtgcccccccccagcgccgccgccgcccccgccagcggcgagatgaccatggacgccctgctggccagactgaagctgctgaaccccgacgacctgagagaggagatcgtgaaggccggcctgaagtgcggccccatcaccagcaccaccagattcatcttcgagaagaagctggcccaggccctgctggagcagggcggcagactgagcagcttctaccaccacgaggccggcgtgaccgccctgagccaggacccccagagaatcctgaagcccgccgagggcaaccccaccgaccaggccggcttcagcgaggacagagacttcggctacagcgtgggcctgaacccccccgaggaggaggccgtgaccagcaagacctgcagcgtgccccccagcgacaccgacacctacagagccggcgccaccgccagcaaggagccccccctgtactacggcgtgtgccccgtgtacgaggacgtgcccgccagaaacgagagaatctacgtgtacgagaacaagaaggaggccctgcaggccgtgaagatgatcaagggcagcagattcaaggccttcagcaccagagaggacgccgagaagttcgccagaggcatctgcgactacttccccagccccagcaagaccagcctgcccctgagccccgtgaagaccgcccccctgttcagcaacgacagactgaaggacggcctgtgcctgagcgagagcgagaccgtgaacaaggagagagccaacagctacaagaaccccagaacccaggacctgaccgccaagctgagaaaggccgtggagaagggcgaggaggacaccttcagcgacctgatctggagcaaccccagatacctgatcggcagcggcgacaaccccaccatcgtgcaggagggctgcagatacaacgtgatgcacgtggccgccaaggagaaccaggccagcatctgccagctgaccctggacgtgctggagaaccccgacttcatgagactgatgtaccccgacgacgacgaggccatgctgcagaagagaatcagatacgtggtggacctgtacctgaacacccccgacaagatgggctacgacacccccctgcacttcgcctgcaagttcggcaacgccgacgtggtgaacgtgctgagcagccaccacctgatcgtgaagaacagcagaaacaagtacgacaagacccccgaggacgtgatctgcgagagaagcaagaacaagagcgtggagctgaaggagagaatcagagagtacctgaagggccactactacgtgcccctgctgagagccgaggagaccagcagccccgtgatcggcgagctgtggagccccgaccagaccgccgaggccagccacgtgagcagatacggcggcagccccagagaccccgtgctgaccctgagagccttcgccggccccctgagccccgccaaggccgaggacttcagaaagctgtggaagaccccccccagagagaaggccggcttcctgcaccacgtgaagaagagcgaccccgagagaggcttcgagagagtgggcagagagctggcccacgagctgggctacccctgggtggagtactgggagttcctgggctgcttcgtggacctgagcagccaggagggcctgcagagactggaggagtacctgacccagcaggagatcggcaagaaggcccagcaggagaccggcgagagagaggccagctgcagagacaaggccaccaccagcgtggagatgagattccacagaatcgaccaggccggcctggagctgctgaccagctag

SEQ ID NO: 329283 - DNA, 1947 bp, Artificial Sequence
  derived and/or modified sequence
atgctttggccacgtctcgctgcagccgagtgggctgccctcgcttgggaactcctcggggcatcagtactgctgattgccgtgcgctggctggtgagacgcctggggcccaggcctggtggtcttgggcgatctggtacgccagtacctcctccatctgcggctgccgccccagccagcggcgagatgaccatggacgccctccttgcacggctcaagctccttaaccctgatgatctccgtgaggaaatagtaaaggctggcctgaaatgcggaccaattacaagcaccacgagattcatctttgagaagaagctggctcaagcgctgcttgaacagggaggcagactcagcagtttttaccaccatgaggctggggtgaccgcgctttcacaggatccccagagaatcctcaagcctgccgagggaaacccgaccgatcaggccggattctctgaggaccgggatttcggctactcagtcgggcttaacccccctgaggaggaagcagttaccagcaaaacatgcagcgtgcctccaagcgatactgatacttacagggcaggcgccactgcgagcaaggaacctccactctattatggagtgtgcccagtatacgaggatgtgcccgctagaaacgaacggatatatgtgtatgagaacaaaaaggaagcactgcaggcggtgaaaatgattaaaggatcgcggttcaaagcctttagcactcgggaagacgcagaaaagttcgcacgtggcatttgcgattattttccctctccctcgaaaactagcctccccctgagcccagtcaagaccgctcccctgttcagcaacgatcgcctcaaggacggcctctgtttatctgaaagcgagacagttaacaaggaaagagcaaacagctataaaaaccctaggacacaggatctaaccgccaagcttcggaaagccgtggagaagggagaggaggacactttttcagatctaatttggagcaaccctagatatttaattggctccggcgataatcccacaatcgtgcaagagggatgccgttataatgttatgcatgtggccgctaaagaaaatcaggcctcaatctgtcagttgaccttagacgtacttgaaaatccggactttatgcgtcttatgtatcccgacgacgatgaggccatgctgcagaagcggattcggtatgtcgtggatctctacttgaacacacccgataagatgggttacgataccccgcttcacttcgcctgtaagttcggtaatgccgatgttgtgaacgtactgtcctcccatcatctgattgtcaaaaattcccgcaataaatatgataagaccccagaagatgttatatgcgaacgctctaaaaacaagagcgtggagctgaaagaacgtattagggagtatctaaaaggccactattatgttcctctgcttcgagcggaggagacttcaagcccggtcataggtgaattgtggagtccagaccagaccgccgaagcatcacatgtctctagatacggggggtctcccagagatccagtcctgaccttaagagcctttgccggaccactatctcctgcaaaagccgaggactttagaaaactctggaagacaccccccagagagaaagccggtttcctccatcacgtgaagaaatccgatcccgagcgcggattcgaaagagtggggcgcgaactggcccacgagctgggatacccatgggttgagtattgggaattcctgggctgttttgtggatttgtcttcccaggaggggctgcaaagattggaagagtatttgacccagcaggagatcggcaagaaggcacagcaggagacgggtgagcgtgaggcctcttgtagagataaggcaactacttccgtagagatgcggttccatcgaattgaccaggcagggttggagctcctcactagctag

SEQ ID NO: 329284 - DNA, 2014 bp, Artificial Sequence
  derived and/or modified sequence
gcggggtcctgggacgggcgcggcgcggggcgcgggcttctcggcggctgcggcccgggcggcggcgatgctgtggccgcggctggcggcggccgagtgggcggcgctggcctgggagctgctgggcgcctcggtgctgctgatcgctgtgcggtggctggtgcggcggctgggcccgcggccgggaggtctgggccgcagcgggaccccagttcctccgccaagcgcggccgccgcccccgcctcaggtgaaatgacaatggatgctctgttggctcgattgaaacttctgaatccagatgaccttagagaagaaatcgtcaaagccggattgaaatgtggacccattacatcaactacaaggttcatttttgagaaaaaattggctcaggctttactggagcaaggaggaaggctgtcttctttctaccaccatgaggcaggtgtcacagctctcagccaggacccacaaaggattttgaagccagctgaagggaacccaactgatcaggctggtttttctgaagacagagattttggttacagtgtgggcctgaatcctccagaggaggaagctgtgacatccaagacctgctcggtgccccctagtgacaccgacacctacagagctggagcgactgcgtctaaggagccgcccctgtactatggggtgtgtccagtgtatgaggacgtcccagcgagaaatgaaaggatctatgtttatgaaaataaaaaggaagcattgcaagctgtcaagatgatcaaagggtcccgatttaaagctttttctaccagagaagacgctgagaaatttgctagaggaatttgtgattatttcccttctccaagcaaaacgtccttaccactgtctcctgtgaaaacagctccactctttagcaatgacaggttgaaagatggtttgtgcttgtcggaatcagaaacagtcaacaaagagcgagcgaacagttacaaaaatccccgcacgcaggacctcaccgccaagcttcggaaagctgtggagaagggagaggaggacaccttttctgaccttatctggagcaacccccggtatctgataggctcaggagacaaccccactatcgtgcaggaagggtgcaggtacaacgtgatgcatgttgctgccaaagagaaccaggcttccatctgccagctgactctggacgtcctggagaaccctgacttcatgaggctgatgtaccctgatgacgacgaggccatgctgcagaagcgtatccgttacgtggtggacctgtacctcaacacccccgacaagatgggctatgacacaccgttgcattttgcttgtaagtttggaaatgcagatgtagtcaacgtgctttcgtcacaccatttgattgtaaaaaactcaaggaataaatatgataaaacacctgaagatgtaatttgtgaaagaagcaaaaataaatctgtggaactgaaggagcggatcagagagtatttaaagggccactactacgtgcccctcctgagagcggaagagacttcttctccagtcatcggggagctgtggtccccagaccagacggctgaggcctctcacgtcagccgctatggaggcagccccagagacccggtactgaccctgagagccttcgcagggcccctgagtccagccaaggcagaagattttcgcaagctctggaaaactccacctcgagagaaagcaggcttccttcaccacgtcaagaagtcggacccggaaagaggctttgagagagtgggaagggagctagctcatgagctggggtatccctgggttgaatactgggaatttctgggctgttttgttgatctgtcttcccaggaaggcctgcaaagactagaagaatatctcacacagcaggaaataggcaaaaaggctcaacaagaaacaggagaacgggaagcctcctgccgagataaagccaccacgtctgtggagatgcggtttcaccgtattgaccaggctggtctcgaactcctgacctcgtga

SEQ ID NO: 329285 - DNA, 1947 bp, Artificial Sequence
  derived and/or modified sequence
atgctgtggccccggctggccgctgctgagtgggccgccctggcctgggagctgctgggcgcctctgtgctgctgattgctgtgcgctggctggtgcggcggctgggccccaggcctgggggcctgggccgcagcggcacccctgtgcccccaccttctgctgctgctgccccagccagcggggagatgaccatggatgccctgctggcccggctgaagctgctgaacccagatgacctgcgggaggagatcgtgaaggccggcctgaagtgtggccccatcaccagcaccacccgcttcatctttgagaagaagctggcccaggccctgctggagcagggcggccgcctgagcagcttctaccaccatgaagctggggtgacagccctgagccaggacccccagaggatcctgaagccagctgagggcaaccccacagaccaggccggcttctctgaagatcgggactttggctacagcgtgggcctgaaccccccagaggaggaggccgtgaccagcaagacctgcagcgtgcccccaagtgacacagacacctaccgggccggggccacagccagcaaggagccccccctgtactacggcgtgtgccctgtgtatgaagatgtgcctgccagaaatgaaagaatttatgtgtatgagaacaagaaggaggccctgcaggccgtgaagatgatcaagggcagccgcttcaaggccttcagcacccgggaggatgctgagaagtttgcccggggcatctgtgactacttccccagccccagcaagaccagcctgcccctgagccctgtgaagacagcccccctcttcagcaatgaccggctgaaggatggcctgtgcctgtctgagagcgagaccgtgaacaaggagcgggccaacagctacaagaaccccaggacccaggacctgacagccaagctgaggaaggctgtggagaagggggaggaggacaccttcagtgacctgatctggagcaacccccgctacctgattggcagcggggacaaccccaccatcgtgcaggagggctgccgctacaacgtgatgcacgtggccgccaaggagaaccaggccagcatctgccagctgaccctggatgtgctggagaacccagacttcatgaggctgatgtacccagatgatgatgaggccatgctgcagaagaggatccgctacgtggtggacctgtacctgaacaccccagacaagatgggctatgacacccccctgcactttgcctgcaagtttggaaatgctgatgtggtgaatgtgctgagcagccaccacctgattgtgaagaacagcaggaacaagtatgacaagaccccagaagatgtgatctgtgagaggagcaagaacaagtctgtggagctgaaggagcgcatccgggagtacctgaagggccactactacgtgcccctgctgcgggcagaggagaccagcagccctgtgattggagagctgtggagcccagaccagacagctgaggccagccacgtgagccgctatggaggcagcccccgggaccctgtgctgaccctgcgggcctttgctggccccctgagccctgccaaggccgaggacttcaggaagctgtggaagaccccaccccgggagaaggccggcttcctgcaccacgtgaagaagagtgaccctgagcggggctttgagcgggtgggccgggagctggcccacgagctgggctacccctgggtggagtactgggagttcctgggctgctttgtggacctgagcagccaggagggcctgcagaggctggaggagtacctgacccagcaggagatcggcaagaaggcccagcaggagaccggggagcgggaggccagctgccgggacaaggccaccacctctgtggagatgaggttccacagaattgaccaggccggcctggagctgctgaccagctag

SEQ ID NO: 329286 - DNA, 1947 bp, Artificial Sequence
  derived and/or modified sequence
atgctgtggccccggctggccgccgccgagtgggccgccctggcctgggagcttctcggggccagcgtgctgttgatagctgttcggtggctcgtcagaagacttggcccccgtcccggagggctgggaagatcaggcacccctgttccacccccgagcgcagctgctgctccagctagtggagagatgacaatggacgccctgctggctcgcctgaagctccttaaccccgatgacctcagggaagagattgtgaaagctggccttaaatgtggtcccataacctccactacaaggtttatctttgaaaagaagctcgcccaggccttgcttgaacagggcgggcggctcagctctttctaccatcacgaggccggtgttacggctttatcacaggaccctcaaagaatcttgaaacctgcggaaggtaatcccaccgatcaggccggtttttccgaagatcgcgacttcggttactctgtgggactcaatcctccagaggaggaagccgtgacatccaagacttgtagcgtgccacctagcgacaccgatacctaccgtgccggggcaacagcaagcaaggaacctcccctgtattacggagtatgccccgtttacgaagacgtgcccgcgcgcaacgaaaggatttatgtgtacgagaataagaaggaggcgctccaggctgttaagatgatcaagggaagccggttcaaggcattcagcactagagaagatgcagagaaatttgcaagaggaatctgcgactactttccctcaccctccaagacttctctccccctgtcacctgtgaagacagcacctctgttctcaaatgataggctgaaagatggcttgtgcctgtccgagagtgagacagttaacaaggagcgggccaactcctacaagaacccaagaactcaggatcttaccgcgaaactcaggaaagccgtggagaagggggaagaagacacattctccgatctgatttggtctaacccgagatacttaattggatcaggagacaaccccacaattgtccaggaggggtgtcgatacaatgtcatgcacgtcgccgccaaggaaaatcaagcttcgatttgccagctcacacttgatgtcttagaaaatccagatttcatgcggctcatgtacccagatgacgatgaggctatgctccaaaaacgcataagatacgtagtcgacctttatctcaacacccccgacaaaatggggtacgacaccccccttcacttcgcatgcaagttcggtaacgctgacgtggtgaatgtgttgtccagccaccacctgatagtaaagaatagcaggaacaagtacgacaaaacaccagaggacgtcatatgcgagcgctcgaagaataaatcggtggagcttaaagaacgcattcgggagtacctaaaaggtcattattatgtgcccctcctccgtgcagaggagacatccagccctgtcatcggcgagctttggtctcccgatcaaaccgccgaagcctctcatgtgtcgagatacggagggtctcccagggatcctgtcttgaccctacgcgcctttgcaggcccgttgagcccagcaaaagcggaggacttcagaaagctgtggaaaacaccccccagagaaaaggctggattcttacaccacgtcaaaaagagtgacccagaaagggggtttgagcgcgtcgggagggagcttgctcacgaattaggatatccctgggtagaatattgggaatttcttggatgcttcgtggacctgtctagccaagagggactccaacggttagaagaatatctgactcagcaggaaatcggcaagaaggcacagcaggaaacgggagaacgcgaagcatcatgccgggataaagctacgaccagtgtggaaatgagatttcacagaatagaccaggccggcttagaattactgactagctag

SEQ ID NO: 329287 - DNA, 1947 bp, Artificial Sequence
  derived and/or modified sequence
atgctctggcctaggctggccgcagcagagtgggcagccttagcttgggagctcctgggcgcttcagtgttgctaatcgctgtgcgctggcttgtgaggagactcggacctaggcccggtgggcttggtcgctctggaactcccgtcccgccaccttctgcagccgctgcacccgcatccggagaaatgaccatggatgcgcttctggctaggcttaagctgctgaatccagacgatcttcgcgaagagatcgttaaggccggactcaaatgcggtcccatcacctctacaacccgatttattttcgaaaagaagctcgcgcaagccctgctggaacaagggggacgcctgtcatctttctatcaccatgaagcgggtgtcactgctctttcgcaggatcctcagcgaatcttaaagcccgcagaggggaatccaaccgatcaggcgggattctccgaagaccgggattttggttactcggtgggcctgaatccgcctgaggaggaagctgtgacgtccaaaacctgttccgtgccgccttccgacactgatacgtaccgggctggggcaactgcctcaaaagagccccctctgtactacggtgtgtgcccagtgtacgaggacgtaccagcccgaaacgagaggatttacgtctacgaaaacaaaaaagaggcactccaggccgtgaagatgatcaagggaagtaggttcaaagctttcagcacccgggaggacgccgaaaaatttgcaagggggatctgcgattacttcccatccccaagtaaaacctccctgccccttagtcccgttaagaccgctccactcttctctaatgacagactgaaggacggcctgtgccttagcgaatccgagactgttaacaaagaaagggcaaacagctacaagaatcctcggactcaagatctcacagccaaacttcggaaagccgtggagaagggtgaagaagacaccttttcagaccttatttggtccaaccccaggtacctgatcggaagcggcgacaaccccacaatcgttcaggagggttgccggtacaatgtaatgcatgtggctgcaaaagaaaaccaggctagcatttgccaactgacccttgacgttctcgagaatccagattttatgaggctcatgtatcctgatgatgatgaagccatgctccagaaaaggatcagatacgtggtggatctgtacctaaacacgccggataagatgggctacgatacccctcttcactttgcatgcaagttcggtaacgcagatgtggttaatgtgctatccagccatcatctcatagtcaaaaattctagaaacaaatatgataagacaccagaagacgtcatttgcgaacgtagtaaaaataagtcagttgagcttaaggagcgcattagggaatacctcaaaggtcactattacgtcccccttctcagggctgaagaaacatccagcccagtgattggagagctgtggtcccctgaccagaccgctgaagccagccacgtatcaagatatggcggatcacctcgagacccagtgcttacattacgggcttttgctgggccactgagtccggctaaagccgaagattttagaaagctctggaagactccaccaagggagaaggccggttttctgcaccatgtgaaaaagagcgatcctgagaggggcttcgagcgggttggacgagaactcgcacatgaactgggatacccgtgggtcgaatattgggagttcctagggtgcttcgtggatctgtcctctcaggagggcctgcagcgcctggaagaatatcttacccagcaggaaattggtaaaaaggctcagcaggagaccggcgagagagaggccagttgccgggacaaagctaccacatcagtggagatgcgcttccaccgcattgaccaagctggcttggaactgctgacatcttag

SEQ ID NO: 329288 - DNA, 3330 bp, Artificial Sequence
  derived and/or modified sequence
atgcaccctaccgaaattctggacgaagataaacgtttggggagtgctgtggactactatttcatacaggacgacggttccagatttaaggtagccctaccttataaaccatatttctatattgcaactcggaaaggttgcgagcgggaggtctctagctttctcagtaaaaagtttcagggaaagatcgccaaggtagaaaccgtcccaaaggaagatctggacttaccaaaccatctggttggcttaaaacgcaattacatcaggctgtctttccacacagttgaagacctcgtaaaggtaaggaaagaaatcagtcccgctgtcaaaaaaaaccgcgaacaagatcatgcaagcgacgcctatacagctctgctgtcttctgtcctccagcgcggcggggtcattaccgacgaggaggagacctccaagaaaatcgcggaccagctggacaacattgtggacatgagagagtatgacgtaccctatcacatccggttatctatcgatcttaaaatccatgtggcccactggtacaatgtgagatacaggggaaacgcatttcctgtggagatcacgcgaagagatgacctggtggaaagacctgaccccgtcgtacttgcctttgacattgagactacaaagcttccgttaaagtttcccgatgcagagacagaccagatcatgatgatctcctatatgatcgacggccaaggataccttatcactaaccgggagatagtctctgaggacatagaagactttgagttcacgcccaaaccggagtacgagggccccttttgtgtctttaatgaaccggatgaggcccacttgatccagcgctggttcgaacatgtccaggagacgaagcctaccattatggtgacgtacaatggcgacttctttgactggccatttgtggaggcccgggcggccgtgcatgggctttcaatgcaacaagagattggctttcaaaaggattcgcagggcgaatataaggcaccccagtgtatccatatggactgcctgcggtgggtaaagcgcgattcatatctgccagtgggtagccacaacctcaaggcggccgcaaaggccaagctgggttatgaccccgtggaactcgaccctgaggacatgtgtcgtatggccacggaacagccacagactctggccacttatagtgtaagcgacgcggtggcgacgtactatctgtatatgaagtatgtgcaccctttcatctttgcattgtgtacaataattccgatggaaccggatgaggtcctgaggaaaggctctggaactctgtgtgaggccctgcttatggtccaggctttccacgccaatatcatttttccgaacaagcaagagcaagaattcaataaattaaccgacgatggacacgtgctggactccgaaacatacgtgggcggccacgttgaggctttggagtccggtgtgtttcgatctgacattccctgtaggtttaggatgaaccccgcagccttcgatttccttttgcaaagagttgaaaagacactgagacatgcattagaggaagaggaaaaagtgcccgtcgagcaagttaccaacttcgaagaggtatgcgacgaaattaagtcaaagttagcaagcctcaaggacgttccttcgcgcatcgaatgtccactcatttaccatctcgatgtaggcgctatgtaccccaatatcattttgaccaataggctgcagccaagtgctatggtggacgaggcgacttgcgcagcctgcgatttcaacaagccaggggccaactgccagcggaagatggcatggcagtggcgaggagagttcatgcccgcctccaggagtgaatatcaccggatccagcaccagctggaaagcgaaaagtttccccccttgttcccagagggtcccgctagggctttccacgagttaagcagagaagaacaagccaaatacgaaaagagaagactcgctgattactgccgcaaagcatacaagaagatccatattaccaaggttgaagaacgccttaccacaatttgccagagagaaaatagtttctatgtggacaccgtgcgtgcctttagagaccgtagatacgagtttaaggggttgcacaaggtgtggaagaaaaagttatccgcagcggtggaggtgggcgacgcggcagaagttaagcgatgcaaaaatatggaggtcttatacgacagcctgcaattagctcacaagtgtatactcaattccttttacggatatgtgatgcgaaaaggggccagatggtactctatggagatggcagggattgtgtgctttacaggagccaatatcatcactcaggcacgagaattgatagaacaaatcgggcgcccgctcgaactggacacagacggaatctggtgcgtcttgccaaactcatttcctgaaaacttcgtctttaaaaccaccaacgtgaagaagcccaaggtcaccattagttatccaggcgctatgcttaatatcatggtcaaagagggtttcacaaacgaccagtatcaggaactggcagagccttcatctctcacctacgtcactagatctgagaatagcatcttcttcgaagtcgatggcccttatctggcgatgatcctgccagcatcaaaggaagagggaaagaaactgaaaaagcgttatgcagtcttcaatgaggatggcagccttgcagaattaaaagggttcgaagtaaagcgtcggggagaactgcagctgattaagatctttcaaagctcagtgttcgaggccttcctgaaaggctctaccttggaggaagtatacggctccgtggcaaaggtggctgactactggttggacgttttgtatagcaaagctgcaaacatgcccgactcagaattgttcgaactgatctctgagaatagaagtatgtcgaggaaactggaggattatggggaacagaagagtactagcatatctaccgccaagcgcttggcagaatttctgggcgaccagatggtaaaggatgctggcttatcctgcaggtacatcatctcgcgaaagccagaggggagtcctgtgactgaacgggctattcctctggctatctttcaggccgagccaacagtacgaaagcacttccttaggaagtggctgaagagctctagcctgcaggacttcgacatccgagcgattctcgactgggactactacattgagaggctggggtcagctatccagaagataataacaattcccgcggccctccagcaagtgaagaatcccgtcccccgggtaaaacaccccgattggctgcataagactgccggcgaggaatag

SEQ ID NO: 329289 - DNA, 3330 bp, Artificial Sequence
  derived and/or modified sequence
atgcaccccacagagatcctggatgaggacaagaggctgggcagcgctgtggactactacttcatccaggatgatggcagccgcttcaaggtggccctgccctacaagccctacttctacatcgccaccaggaagggctgtgagcgggaggtgtcctccttcctgagcaagaagttccagggcaagatcgccaaggtggagaccgtgcccaaggaggacctggacctgcccaaccacctggtgggcctgaagaggaactacatccggctgtccttccacacagtggaggacctggtgaaggtgaggaaggagatcagccctgctgtgaagaagaaccgggagcaggaccacgccagtgatgcctacacagccctgctgagctctgtgctgcagagaggaggagtcatcacagatgaggaggagaccagcaagaagattgctgaccagctggacaacatcgtggacatgagagaatatgatgtgccctaccacatccggctgagcattgacctgaagatccacgtggcccactggtacaacgtgcgctacagaggaaatgccttccctgtggagatcaccaggagagatgacctggtggagaggccagaccctgtggtgctggcctttgatattgagaccaccaagctgcccctgaagttcccagatgctgagacagaccagatcatgatgatctcctacatgattgatggccagggctacctgatcaccaaccgggagatcgtgtctgaggacattgaagattttgagttcacccccaagccagaatatgagggccccttctgtgtgttcaatgaaccagatgaggcccacctgatccagcgctggtttgaacatgtgcaggagaccaagcccaccatcatggtgacctacaacggggacttctttgactggccctttgtggaggcccgggctgctgtgcacggcctgtccatgcagcaggagatcggcttccagaaggacagccagggcgagtacaaggccccccagtgcatccacatggactgcctgcgctgggtgaagagggacagctacctgcctgtgggcagccacaacctgaaggccgccgccaaggccaagctgggctatgaccctgtggagctggaccctgaggacatgtgcaggatggccacagagcagccccagaccctggccacctacagcgtgtctgatgctgtggccacctactacctgtacatgaagtatgtgcaccccttcatctttgccctgtgcaccatcatccccatggagccagatgaggtgctgaggaagggcagcggcaccctgtgtgaggccctgctgatggtgcaggccttccacgccaacatcatcttccccaacaagcaggagcaggagttcaacaagctgacagatgatggccacgtgctggacagcgagacctacgtgggcggccacgtggaggccctggagagcggggtcttcagaagtgacatcccctgccgcttcaggatgaacccagctgcctttgacttcctgctgcagagggtggagaagaccctgcggcatgccctggaggaggaggagaaggtgcctgtggagcaggtgaccaactttgaggaggtgtgtgatgagatcaagagcaagctggccagcctgaaggatgtgcccagcagaattgaatgtcccctcatctaccacctggatgtgggcgccatgtaccccaacatcatcctgaccaaccggctgcagcccagcgccatggtggatgaggccacctgtgccgcctgtgacttcaacaagccaggggccaactgccagaggaagatggcctggcagtggagaggagagttcatgcctgccagccgctctgagtaccaccgcatccagcaccagctggagagcgagaagtttcctcctctcttccctgagggccctgcccgggccttccacgagctgagccgggaggagcaggccaagtatgagaagaggcggctggccgactactgcaggaaggcctacaagaagatccacatcaccaaggtggaggagcggctgaccaccatctgccagagagaaaattccttctacgtggacacagtgcgggccttccgggacagaagatatgagttcaagggcctgcacaaggtgtggaagaagaagctgtctgctgctgtggaggtgggagatgctgctgaggtgaagcgctgcaagaacatggaggtgctgtatgacagcctgcagctggcccacaagtgcatcctgaacagcttctacggctacgtgatgaggaaaggagcccgctggtacagcatggagatggccggcatcgtgtgcttcaccggggccaacatcatcacccaggcccgggagctgattgagcagatcggccggcccctggagctggacacagatggcatctggtgtgtgctgcccaacagcttcccagaaaattttgtgttcaagaccaccaacgtgaagaagcccaaggtgaccatctcctacccaggggccatgctgaacatcatggtgaaggagggcttcaccaatgaccagtaccaggagctggccgagcccagcagcctgacctacgtgaccaggagtgaaaattccatcttctttgaggtggatggcccctacctggccatgatcctgcctgccagcaaggaggagggcaagaagctgaagaagagatatgctgtgttcaatgaagatggcagcctggccgagctgaagggctttgaggtgaagagaagaggagagctgcagctgatcaagatcttccagagctctgtgtttgaggccttcctgaagggcagcaccctggaggaggtgtatggctctgtggccaaggtggccgactactggctggatgtgctgtacagcaaggccgccaacatgccagacagcgagctgtttgagctgatcagcgagaacagatccatgagcaggaagctggaggactatggagagcagaagagcaccagcatcagcacagccaagaggctggccgagttcctgggggaccagatggtgaaggatgctggcctgagctgccgctacatcatcagcaggaagccagagggcagccctgtgacagagcgggccatccccctggccatcttccaggccgagcccaccgtgaggaagcacttcctgaggaagtggctgaagagcagcagcctgcaggactttgacatccgggccatcctggactgggactactacatcgagcggctgggcagcgccatccagaagatcatcaccatcccagctgccctgcagcaggtgaagaaccctgtgccccgggtgaagcacccagactggctgcacaagacagctggggaggagtag

SEQ ID NO: 329290 - DNA, 3330 bp, Artificial Sequence
  derived and/or modified sequence
atgcaccccaccgagatcctggacgaggacaagcggctgggcagcgcggtggattactatttcatccaggacgacggaagccgtttcaaagtggccctgccctacaaaccctacttctacatcgccacgcggaagggatgtgaacgcgaggttagcagttttctgtctaagaagttccagggcaagatagcaaaggtcgaaacagtgcccaaggaagacctggacctaccaaatcatctcgtcggcttaaaacggaactatattcgcctgtcttttcacaccgtggaggatctcgttaaggttcgcaaagaaatctccccagcggttaaaaagaatcgcgaacaggaccatgccagcgacgcctacaccgcacttttatcttccgtcctgcagcgggggggcgtcatcacggatgaggaagagacatcaaagaaaatcgcggaccagttggataacattgtagacatgcgcgagtatgacgtcccctatcatattcgcttaagcatcgacttaaaaattcacgttgcccactggtacaatgtcagatatcggggtaatgcctttcctgtcgaaatcacacggcgcgatgaccttgtagaacgcccagaccccgtcgtcctggcattcgacattgagactaccaaattgcctcttaagtttcctgatgcggaaactgatcagatcatgatgatttcatacatgatagatgggcagggatatctgatcaccaacagggaaattgtatcagaggacatcgaagactttgagtttaccccaaaacccgaatacgaaggcccattttgcgtgtttaacgagccggacgaggcccaccttatccagcggtggttcgaacacgtccaggaaacaaagcctaccattatggtgacttataacggtgactttttcgactggccttttgtcgaggctcgggctgccgtccatgggctgtccatgcagcaggagatcggcttccagaaggacagccaaggagaatataaggctccacagtgcatccacatggattgtctaagatgggttaagcgagactcttacttgcccgtgggatcccataatctgaaagctgccgcgaaggccaaactggggtacgatccagtagaattggaccccgaagatatgtgtagaatggccactgagcagccccagaccctagcgacgtacagtgtgtccgacgccgttgccacatattacttgtacatgaagtacgtgcacccttttattttcgcactgtgcactatcattcccatggaacccgacgaggtccttcgaaaggggagcggcaccctatgtgaggccctcctcatggtgcaggcattccacgcgaatatcatatttccgaataaacaggaacaggagttcaataaattgactgatgacggccacgtcttagattccgagacctacgtgggaggccacgtagaagcactagagagtggcgtgtttcggtcagatatcccctgccggttccgaatgaaccctgcagcattcgacttcttactgcagcgggtggaaaagacattgcgacatgccttagaagaggaagagaaggtccccgtggagcaggtgacaaattttgaggaggtatgtgacgaaattaagagcaagttggcctctctgaaagacgtccccagccgcatagaatgtcccttgatataccaccttgacgtaggcgccatgtatcctaacatcatcctcacaaatagactccagccttccgcgatggtagacgaagctacatgtgctgcttgcgactttaacaaaccgggcgccaactgtcagcgtaagatggcgtggcagtggcgtggagaatttatgccggcctctcgcagtgagtaccacaggattcagcaccaactcgagtccgaaaaatttccgccactcttcccagagggccctgcccgggcctttcacgaattgtccagagaagagcaggcgaagtacgaaaaaagaagactcgctgattactgccgcaaggcctacaagaagattcatatcacaaaggtcgaagaacgtttgacaacaatttgccagcgcgaaaactccttctacgtcgatacagtgcgtgctttcagggacaggagatatgaatttaaagggctacataaggtgtggaaaaagaaactgtcagctgcggttgaagtgggggatgccgccgaggttaaacggtgcaagaacatggaggttctgtacgattccttacagttggcccataagtgcatcttgaactccttctacggctacgttatgaggaaaggcgctagatggtacagcatggagatggcaggcatagtgtgtttcactggggcgaacatcattacacaggctcgcgaactaatcgagcagatcggacgtccactcgagctggatacagatggcatctggtgtgtgcttcccaactcattcccagagaattttgtctttaagactacaaacgtgaaaaaacctaaggttaccatctcttatccaggagcgatgctgaacatcatggtgaaagaggggtttactaacgaccaatatcaggaacttgctgagccaagttcactgacttatgtgactagatctgaaaattcaattttttttgaagtcgacgggccttacttagctatgatattgcccgcttccaaagaagaaggcaaaaagctgaaaaagcgttacgccgtgttcaacgaagacggtagtctggccgagctgaagggcttcgaagtgaaacgacggggagagctgcaactgatcaagatatttcagagctccgtctttgaagcattcctcaagggttcaacccttgaggaggtgtacggctccgtggcaaaagtcgccgactattggttggatgttttatactcgaaagcagccaacatgccggattcagaactgttcgaattgatttctgaaaatagatcaatgtcccgaaaattggaagactacggggagcagaagagcacatctatctctactgccaagcgcttggcagagttccttggcgaccagatggtgaaggatgctggcctgagttgccggtacatcatcagccgcaagcctgaaggatctcccgttactgagcgtgcaatacccttggccatctttcaggcggagccaaccgtccgcaaacattttttgagaaaatggctgaaaagctcatccctgcaggatttcgatattcgggcaatcctcgattgggactattatatcgagcgcctgggcagtgctatccagaaaattattacaataccagccgcactacagcaggtgaaaaacccagtgccccgtgtgaagcaccccgattggctgcacaagaccgctggcgaggaatag

SEQ ID NO: 329291 - DNA, 3569 bp, Artificial Sequence
  derived and/or modified sequence
cgccaaatttctcccctgaagcagaggtggtagccaacggctccatgtctctgaggagcggcgggcggcggcgcgcggacccaggcgcggatggcgaggccagcagggatgatggcgccacttcctcagtttcggcactcaagcgcctggaacggagtcagtggacggataagatggatttgcggtttggttttgagcggctgaaggagcctggtgagaagacaggctggctcattaacatgcatcctaccgagattttagatgaagataagcgcttaggcagtgcagtggattactactttattcaagatgacggaagcagatttaaggtggctttgccctataaaccgtatttctacattgcgaccagaaagggttgtgagcgagaagtttcatcttttctctccaagaagtttcagggcaaaattgcaaaagtggagactgtccccaaagaggatctggacttgccaaatcacttggtgggtttgaagcgaaattacatcaggctgtccttccacactgtggaggatcttgtcaaagtgaggaaggagatctcccctgccgtgaagaagaacagggagcaggatcacgccagcgacgcgtacacagctctgctttccagtgttctgcagaggggcggtgtcattactgatgaagaggaaacctctaagaagatagctgaccagttggacaacattgtggacatgcgcgagtacgatgttccctaccacatccgcctctccattgacctgaagatccacgtggctcattggtacaatgtcagataccgaggaaatgcttttccggtagaaatcacccgccgagatgaccttgttgaacgacctgaccctgtggttttggcatttgacattgagacgaccaaactgcccctcaagtttcctgatgctgagacagaccagattatgatgatttcctacatgatcgatggccagggctacctcatcaccaacagggagattgtttcagaagatattgaagattttgagttcacccccaagccagaatatgaaggccccttttgtgtcttcaatgaacccgatgaggctcatctgatccaaaggtggtttgaacacgtccaggagaccaaacccaccatcatggtcacctacaacggggacttttttgactggccatttgtggaggcccgggcagcagtccacggtctgagcatgcagcaggagataggcttccagaaggacagccagggggagtacaaggcgccccagtgcatccacatggactgcctcaggtgggtgaagagggacagttaccttcctgtgggcagtcataatctcaaggcggccgccaaggccaagctaggctatgatcccgtggagctagacccggaggacatgtgccggatggccacggagcagccccagactctggccacgtattctgtgtcagatgctgtcgccacttactacctgtacatgaagtacgtccacccattcatctttgctctgtgcaccattattcccatggagcccgacgaggtgctgcggaagggctctggcactctgtgtgaggccttgctgatggtgcaggccttccacgccaacatcatcttccccaacaagcaagagcaggagttcaataagctgacggacgacggacacgtgctggactctgagacctacgtcgggggccacgtggaggccctcgagtctggggttttccgcagcgatatcccttgccggtttaggatgaatcctgccgcctttgacttcctgctgcagcgggttgagaagaccttgcgccacgcccttgaggaagaggagaaagtgcctgtggagcaagtcaccaactttgaagaggtgtgtgatgagattaagagcaagcttgcctccctgaaggacgttcccagccgcatcgagtgtccactcatctaccacctggacgtgggggccatgtaccccaacatcatcctgaccaaccgcctgcagccctctgccatggtggacgaagccacctgtgctgcctgtgacttcaataagcctggagcaaactgccagcggaagatggcctggcagtggaggggcgagttcatgccagccagtcgcagcgaataccatcggatccagcaccagctggagtcagagaagttcccccccttgttcccagaggggccagctcgggcctttcatgaactgtcccgcgaggaacaggcgaaatacgagaagagaaggctggcggattactgccggaaagcctacaagaagatccacatcaccaaggtggaagagcgtctcaccaccatctgccagcgggaaaactccttctacgtggacaccgtgcgtgccttccgggacaggcgttacgagttcaaagggctccacaaggtgtggaaaaagaagctctcggcggccgtggaggtgggcgacgcggctgaggtgaagcgctgcaagaacatggaggtgctgtatgactcgctgcagctggcccacaagtgcatcctgaactccttctatggctatgtcatgcgcaagggggctcgctggtactccatggagatggctggcatcgtctgcttcacaggggccaacatcatcacccaggcacgggagctgatcgagcagattgggaggcccttagagctggacacagatggtatatggtgcgtcctgcccaacagcttcccagaaaattttgtcttcaagacgaccaatgtgaagaagcccaaagtgaccatctcctacccaggcgccatgttgaacatcatggtcaaggaaggcttcaccaatgaccagtaccaggagctggctgagccgtcctcactcacctacgtcacccgctcagagaacagcatcttttttgaggttgatgggccctaccttgccatgattcttccagcctccaaggaagaaggcaagaaattgaagaagaggtatgctgtgttcaatgaagacggttctctggctgagctcaagggctttgaggtcaaacgccgcggggaactgcagctgattaagatcttccaatcctcggtgtttgaggccttcctcaagggcagcacgctggaagaggtgtatggctctgtagccaaggtggctgactactggctggacgtgctgtacagcaaggcagccaacatgcctgactctgagctattcgagctcatctctgagaaccgttccatgtctcggaagctggaagattacggggagcagaagtctacgtccatcagcacagcaaagcgcctggccgagttcctgggagaccagatggtcaaggatgcagggctgagttgccgctacatcatctcccgcaagcccgagggctcccctgtcacggagagggccatcccacttgccattttccaagcagagcccacggtgaggaagcactttctccggaaatggctcaagagctcttcccttcaagactttgatattcgagcaattctggattgggactactacattgagcggctgggaagcgccatccagaagatcatcaccatccctgcggccctgcagcaggtaaagaacccagtgccacgtgtcaaacaccccgactggctgcacaaaactgctggagaagaatga

SEQ ID NO: 329292 - DNA, 3330 bp, Artificial Sequence
  derived and/or modified sequence
atgcacccgacagagatactggacgaagacaaacggctgggctccgccgtcgactactattttattcaggacgatggtagtagattcaaagtggccctgccctacaagccttacttctatatcgccactaggaaagggtgcgaacgtgaggtctcctccttcctgagcaagaagtttcagggcaagatcgctaaggtagaaacagtcccaaaagaggatcttgatctacctaatcacctagtgggcctgaaacgaaattacatcaggctcagcttccacacagtcgaggatctcgttaaggttagaaaggagattagtcccgctgtgaaaaagaatagggaacaggaccacgcttctgacgcgtataccgcgctactctccagcgtcctgcagaggggtggtgtcattaccgacgaagaagagacgagtaagaagatcgcggatcagcttgataatatagtggacatgagagagtacgatgttccctaccacatacggttgagcatcgacctcaaaatacatgtggcccactggtacaacgtgcgctacagaggaaatgcttttcctgtggagatcaccaggcgagacgacctcgtggagagacccgatcctgtcgttctggccttcgatatcgaaactaccaagctacctctcaagttcccagacgccgagacagaccagatcatgatgatcagttatatgatcgatggccagggttacttgatcaccaatcgggagatagttagcgaggatattgaggattttgagttcacaccaaaacccgaatacgaggggcctttttgtgtcttcaacgagcctgacgaggctcacttgattcagcgttggtttgagcatgtgcaggaaactaagcctactattatggttacttacaacggtgacttcttcgactggcccttcgtcgaggccagggcggctgtgcacgggttgtccatgcagcaggagatcggttttcaaaaagacagtcaaggtgagtataaagctccccagtgtattcatatggactgtttgaggtgggtgaagcgtgactcctacctccccgttggctctcataaccttaaagccgctgctaaagccaaattaggttatgaccccgtggaactggacccggaggacatgtgtaggatggcaacagagcaaccacagacattagcaacctactcggttagcgacgcggtggctacctattacctgtacatgaaatatgtccacccattcatctttgccctgtgcacgattattccaatggagcccgacgaggtcctaagaaaggggagcggcaccctctgtgaggcgctgttaatggttcaggcatttcatgccaacatcatctttcctaataagcaggagcaagagtttaacaagctgacagacgatggccacgttcttgactctgaaacatacgtgggtggtcatgtggaagccctggagtccggggtgttccgtagcgacattccttgcagattccggatgaaccccgcagcatttgatttcctgttacagcgtgtggagaagacgctacggcacgctctggaggaggaggagaaggtgcccgtggaacaagtaaccaacttcgaagaagtctgcgatgaaatcaagtctaaactggcctccttgaaggatgtgcctagtagaatcgagtgtccgctaatttaccacttagacgtgggagccatgtatccaaatataatcctgaccaataggttgcaaccgagtgctatggtggacgaggccacatgcgctgcatgcgactttaacaagcccggagccaactgccaaagaaagatggcgtggcaatggcgtggggagttcatgcccgcttcgaggagcgagtaccatagaatccagcaccagctggagtccgaaaagttcccacctttattccccgaaggaccggcaagagctttccatgagctgagtcgtgaagaacaggcgaagtatgagaaacggagattggcagactactgcaggaaggcttataagaagattcatatcacgaaggttgaggaaaggttgacaacaatctgtcagagagagaactcattctacgtcgacacagtgcgcgcatttagagacagacggtatgaattcaaaggattgcacaaggtttggaaaaaaaagttgagcgccgctgtagaagtgggtgatgccgcagaagtgaaacgctgcaaaaacatggaggttctatatgacagcctgcaactcgcccacaaatgcattcttaactccttctacggatatgtgatgcggaagggggcacggtggtactctatggagatggccggtatcgtctgttttaccggcgcaaacatcatcacgcaggctagggagctgattgagcagattggacgccctttggaactcgacacggatggtatttggtgcgtccttcccaattcctttccagagaactttgtattcaaaaccaccaatgtcaaaaagccgaaggtgaccatctcatacccaggcgcaatgctaaacataatggttaaagaagggtttacgaatgatcagtaccaggaactggccgaaccatcctcacttacttacgtgacgcgctccgagaattcaatctttttcgaagtggatggaccgtacctggcgatgatactaccggcatcaaaagaagaggggaaaaagctgaaaaaacggtatgccgttttcaacgaagacggttcattggccgagctgaaaggctttgaggtgaaaaggcgcggagaactccagctcatcaaaatcttccagtcttccgtgtttgaggcattcctcaaaggcagcacactggaggaagtgtatggcagtgtggccaaggtggccgattattggctggacgtgctgtattccaaagcggctaacatgccagactcagagctattcgaactgatctcagagaaccgaagtatgtctagaaagctggaggactatggcgaacagaaatctacaagcatcagcacagcgaagcgcctggcagagtttctcggggaccagatggtcaaggacgctggcctcagctgtaggtacattatatcccgcaagcccgaaggaagccctgtgaccgaacgggcaatcccattagccatcttccaggcggaacccactgtgcgtaagcacttccttcgaaaatggctgaagtcctcgtctctccaggacttcgacataagggctattctggactgggactactacattgaaaggctgggtagtgcgatccagaaaatcatcactatccctgctgcacttcaacaggttaaaaacccagtgcctcgtgtcaagcacccagattggttacacaaaaccgccggagaggaatag

SEQ ID NO: 329293 - DNA, 3330 bp, Artificial Sequence
  derived and/or modified sequence
atgcaccccaccgagatcctggacgaggacaagagactgggcagcgccgtggactactacttcatccaggacgacggcagcagattcaaggtggccctgccctacaagccctacttctacatcgccaccagaaagggctgcgagagagaggtgagcagcttcctgagcaagaagttccagggcaagatcgccaaggtggagaccgtgcccaaggaggacctggacctgcccaaccacctggtgggcctgaagagaaactacatcagactgagcttccacaccgtggaggacctggtgaaggtgagaaaggagatcagccccgccgtgaagaagaacagagagcaggaccacgccagcgacgcctacaccgccctgctgagcagcgtgctgcagagaggcggcgtgatcaccgacgaggaggagaccagcaagaagatcgccgaccagctggacaacatcgtggacatgagagagtacgacgtgccctaccacatcagactgagcatcgacctgaagatccacgtggcccactggtacaacgtgagatacagaggcaacgccttccccgtggagatcaccagaagagacgacctggtggagagacccgaccccgtggtgctggccttcgacatcgagaccaccaagctgcccctgaagttccccgacgccgagaccgaccagatcatgatgatcagctacatgatcgacggccagggctacctgatcaccaacagagagatcgtgagcgaggacatcgaggacttcgagttcacccccaagcccgagtacgagggccccttctgcgtgttcaacgagcccgacgaggcccacctgatccagagatggttcgagcacgtgcaggagaccaagcccaccatcatggtgacctacaacggcgacttcttcgactggcccttcgtggaggccagagccgccgtgcacggcctgagcatgcagcaggagatcggcttccagaaggacagccagggcgagtacaaggccccccagtgcatccacatggactgcctgagatgggtgaagagagacagctacctgcccgtgggcagccacaacctgaaggccgccgccaaggccaagctgggctacgaccccgtggagctggaccccgaggacatgtgcagaatggccaccgagcagccccagaccctggccacctacagcgtgagcgacgccgtggccacctactacctgtacatgaagtacgtgcaccccttcatcttcgccctgtgcaccatcatccccatggagcccgacgaggtgctgagaaagggcagcggcaccctgtgcgaggccctgctgatggtgcaggccttccacgccaacatcatcttccccaacaagcaggagcaggagttcaacaagctgaccgacgacggccacgtgctggacagcgagacctacgtgggcggccacgtggaggccctggagagcggcgtgttcagaagcgacatcccctgcagattcagaatgaaccccgccgccttcgacttcctgctgcagagagtggagaagaccctgagacacgccctggaggaggaggagaaggtgcccgtggagcaggtgaccaacttcgaggaggtgtgcgacgagatcaagagcaagctggccagcctgaaggacgtgcccagcagaatcgagtgccccctgatctaccacctggacgtgggcgccatgtaccccaacatcatcctgaccaacagactgcagcccagcgccatggtggacgaggccacctgcgccgcctgcgacttcaacaagcccggcgccaactgccagagaaagatggcctggcagtggagaggcgagttcatgcccgccagcagaagcgagtaccacagaatccagcaccagctggagagcgagaagttcccccccctgttccccgagggccccgccagagccttccacgagctgagcagagaggagcaggccaagtacgagaagagaagactggccgactactgcagaaaggcctacaagaagatccacatcaccaaggtggaggagagactgaccaccatctgccagagagagaacagcttctacgtggacaccgtgagagccttcagagacagaagatacgagttcaagggcctgcacaaggtgtggaagaagaagctgagcgccgccgtggaggtgggcgacgccgccgaggtgaagagatgcaagaacatggaggtgctgtacgacagcctgcagctggcccacaagtgcatcctgaacagcttctacggctacgtgatgagaaagggcgccagatggtacagcatggagatggccggcatcgtgtgcttcaccggcgccaacatcatcacccaggccagagagctgatcgagcagatcggcagacccctggagctggacaccgacggcatctggtgcgtgctgcccaacagcttccccgagaacttcgtgttcaagaccaccaacgtgaagaagcccaaggtgaccatcagctaccccggcgccatgctgaacatcatggtgaaggagggcttcaccaacgaccagtaccaggagctggccgagcccagcagcctgacctacgtgaccagaagcgagaacagcatcttcttcgaggtggacggcccctacctggccatgatcctgcccgccagcaaggaggagggcaagaagctgaagaagagatacgccgtgttcaacgaggacggcagcctggccgagctgaagggcttcgaggtgaagagaagaggcgagctgcagctgatcaagatcttccagagcagcgtgttcgaggccttcctgaagggcagcaccctggaggaggtgtacggcagcgtggccaaggtggccgactactggctggacgtgctgtacagcaaggccgccaacatgcccgacagcgagctgttcgagctgatcagcgagaacagaagcatgagcagaaagctggaggactacggcgagcagaagagcaccagcatcagcaccgccaagagactggccgagttcctgggcgaccagatggtgaaggacgccggcctgagctgcagatacatcatcagcagaaagcccgagggcagccccgtgaccgagagagccatccccctggccatcttccaggccgagcccaccgtgagaaagcacttcctgagaaagtggctgaagagcagcagcctgcaggacttcgacatcagagccatcctggactgggactactacatcgagagactgggcagcgccatccagaagatcatcaccatccccgccgccctgcagcaggtgaagaaccccgtgcccagagtgaagcaccccgactggctgcacaagaccgccggcgaggagtag

SEQ ID NO: 329294 - protein, 256 aa, Artificial Sequence
  derived and/or modified sequence
MFPVLPGSHLLLNNPALEFIKYVCKVLSLDTNITNQVNKLNRDLLRLVDVGEFSEEAQFRDPCRSYVLPEVICRSCNFCRDLDLCKDSSFSEDGAVLPQWLCSNCQAPYDSSAIEMTLVEVLQKKLMAFTLQDLKEADTPKCEEKERRKRELHSSATGRSCRGASEQRLGDAPSCRVVVHGVQACRMEGVCLKCRGVKETSMPVYCSCAGDFALTIHTQVFMEQIGIFRNIAQHYGMSYLLETLEWLLQKNPQLGH

SEQ ID NO: 329295 - DNA, 627 bp, Artificial Sequence
  derived and/or modified sequence
atggaggccaagaccagagagctgatcgccagaagaaccacccccctgctggagtacatcaagaacagaaagctggagaagcagagaatcagagaggagaagagagaggagagaagaagaagagagctggagaagaagagactgagagaggaggagaagagaagaagaagagaggaggagagatgcaagaagaaggagaccgacaagcagaagaagatcgccgagaaggaggtgagaatcaagctgctgaagaagcccgagaagggcgaggagcccaccaccgagaagcccaaggagagaggcgaggagatcgacaccggcggcggcaagcaggagagctgcgcccccggcgccgtggtgaaggccagacccatggagggcagcctggaggagccccaggagaccagccacagcggcagcgacaaggagcacagagacgtggagagaagccaggagcaggagagcgaggcccccagaaaggagagactggccaacaaggacagacccgccctgcagctgtacgaccccggcgccagattcagagccagagagtgcggcggcaacagaagaatctgcaaggccgagggcagcggcaccggccccgagaagagagaggaggccgagtag

SEQ ID NO: 329296 - DNA, 627 bp, Artificial Sequence
  derived and/or modified sequence
atggaggccaagactagagagcttattgctaggcgcacaaccccattgctggaatatattaagaaccggaagttggaaaagcagagaatacgcgaggagaagagggaggagcggcgacgacgcgaacttgaaaagaaacgtttaagggaggaagagaagcgacgcagaagggaggaggagcgctgtaaaaagaaagagacagacaaacagaaaaagattgcggagaaggaggtgcgaatcaagttgctgaagaaaccggaaaaaggcgaagagcctactaccgaaaagcccaaggagcgcggtgaggaaattgacaccggaggcggcaagcaggagagctgcgctccaggagcagttgtgaaggctcggcccatggagggcagtcttgaggaaccccaggaaacttcccacagtggatccgacaaggaacatcgggatgtagagagatcccaggaacaagagagcgaggcccctagaaaagagcggctggcaaataaagacaggcctgctctccagctttacgatccaggcgcacgttttcgtgccagagagtgtggaggaaacaggaggatttgtaaggcagaagggtcgggcactggaccagaaaagcgtgaggaggccgaatag

SEQ ID NO: 329297 - DNA, 627 bp, Artificial Sequence
  derived and/or modified sequence
atggaggccaagacccgggagctgattgcccggaggaccacccccctgctggagtacatcaagaacaggaagctggagaagcagaggatccgggaggagaagcgggaggagaggagaagaagagagctggagaagaagaggctgcgggaggaggagaagagaagaagaagagaggaggagcgctgcaagaagaaggagacagacaagcagaagaagattgctgagaaggaggtgcgcatcaagctgctgaagaagccagagaagggggaggagcccaccacagagaagcccaaggagcggggggaggagattgacaccggcggcggcaagcaggagagctgtgcccctggagctgtggtgaaggcccggcccatggagggcagcctggaggagccccaggagaccagccacagcggcagtgacaaggagcacagagatgtggagaggagccaggagcaggagagcgaggcccccaggaaggagcggctggccaacaaggacaggcctgccctgcagctgtatgaccccggggcccgcttccgggcccgggagtgtggcggcaacagacgcatctgcaaggccgagggcagcggcactggacctgagaagcgggaggaggccgagtag

SEQ ID NO: 329298 - DNA, 627 bp, Artificial Sequence
  derived and/or modified sequence
atggaggccaagacccgggagctgatcgcccggcggaccacccccctgctggaatatattaaaaaccgaaaactggaaaagcaacgcataagagaggagaaaagagaggaaagacgcaggagggaactggaaaagaagagactgcgcgaggaagaaaagcgcagacgcagggaggaagaaaggtgtaaaaagaaggaaacggataagcagaaaaagattgccgagaaggaagtaagaatcaaactgttaaaaaaacctgaaaaaggcgaggagccaaccacggagaaaccaaaagagcggggcgaggagatagatactggagggggcaaacaggagtcttgcgcgcccggcgctgtggtgaaggcacggccaatggagggaagtcttgaagagcctcaggaaacatcgcatagcggttccgataaggaacaccgggacgttgaacgatcccaggagcaggagtctgaggcaccacgcaaggaaagacttgctaataaagatcggcccgcactgcagctgtatgaccctggcgccagattccgggctagggaatgtggtgggaatcgcagaatttgcaaggccgaaggaagcggcaccgggccggagaaacgcgaggaggcagaatag

SEQ ID NO: 329299 - DNA, 627 bp, Artificial Sequence
  derived and/or modified sequence
atggaggcgaagactcgagaactgattgcgaggagaaccactccactcctggaatacattaagaaccggaaactcgaaaaacagcgtattcgagaagagaagcgagaagaaaggaggcggagggaactcgagaagaagcggctccgggaagaggagaagagacgaaggagggaagaggagagatgcaaaaaaaaagagacagataaacagaagaaaattgccgaaaaggaggttcgcattaagctcttaaagaaaccggaaaagggagaggagccgaccaccgaaaaaccaaaagaacgtggtgaggagatcgacaccggtggcggtaagcaggagagctgcgcaccaggggcagtggtgaaagcgcgtcccatggaggggtcactcgaagaaccccaggagacatcacactcaggcagcgacaaggagcaccgcgacgtagagagatctcaggaacaggaatccgaggctccaaggaaggaacgccttgccaacaaggaccgaccagcactacaactgtacgatccaggcgctaggtttcgagcacgggagtgcggcggaaatagaagaatatgcaaggctgaagggtcaggaaccggcccagaaaagagagaagaggccgagtag

SEQ ID NO: 329300 - protein, 475 aa, Artificial Sequence
  derived and/or modified sequence
MEEPINKRLFEKYLKDESGFKDPSSDWEMSQSSIKSSICLLRGKIYDALDNRTLATYSYKEALKLDVYCFEAFDLLTSHHMLTAQEEKELLESLPLSKLCNEEQELLRFLFENKLKKYNKPSETVIPESVDGLQENLDVVVSLAERHYYNCDFKMCYKLTSVVMEKDPFHASCLPVHIGTLVELNKANELFYLSHKLVDLYPSNPVSWFAVGCYYLMVGHKNEHARRYLSKATTLEKTYGPAWIAYGHSFAVESEHDQAMAAYFTAAQLMKGWKTAEKWFLDALEKIKAIGNEVTVDKWEPLLNNLGHVCRKLKKYAEALDYHRQALVLIPQNASTYSAIGYIHSLMGNFENAVDYFHTALGLRRDDTFSVTMLGHCIEMYIGDSEAYIGADIKDKLKCYDFDVHTMKTLKNIISPPWDFREFEVEKQTAEETGLTPLETSRKTPDSRPSLEETFEIEMNESDMMLETSMSDHST

SEQ ID NO: 329301 - DNA, 2140 bp, Artificial Sequence
  derived and/or modified sequence
gagcctgggcagtgcacggggcctgggtggggggtgcgggtgtgggtggggacctgcggccttcgagtccgcggccttcgagtcctggggcggcggcggcggctgcaggcacgggcacgggcacggggcggggtgcttagggtgcaggaggcgcgcgcctagcggcggagtgtggcgtgaggccgggcccgcgccgccatgaacctagagcggctgcggaagcgcgtccggcagtacctcgaccagcaacagtatcaaagtgctctattttgggcagataaagtagcttcactctctcgtgaagaaccccaggacatctattggttggctcagtgtctttacctgacagcacaatatcacagagccgcccatgcacttcggtcacgaaaactggacaaattgtatgaagcatgtcgttaccttgcagctaggtgccattatgctgcaaaagagcaccagcaggcccttgatgttcttgacatggaagagcccatcaataaaagattatttgaaaaatacttgaaggacgaaagtggcttcaaagatccttccagcgactgggaaatgtcacagtcttcaataaagagttctatctgtcttctacgcgggaaaatctatgatgctctagataaccgaaccctggctacctacagctacaaagaagctttgaagcttgatgtctactgttttgaagcgttcgatcttttaacatcacatcacatgctgacagcacaagaagaaaaagaacttcttgaatcactaccccttagcaagctgtgtaatgaagaacaggaattgctgcgttttctatttgagaacaaattgaaaaaatataataagcctagtgaaacggtcatccctgaatctgtagatggcttgcaagagaatctggatgtggtagtgtctttagctgagagacattattataactgtgattttaaaatgtgctacaagcttacttctgtagtaatggagaaagatcctttccatgcaagttgtttacctgtacatatagggacgcttgtagagctgaataaagccaatgaacttttctatctttctcataaactggtggatttatatcctagtaatcctgtgtcttggtttgcagtgggatgttactatctcatggtcggtcataaaaatgaacatgccagaagatatctcagcaaagccacaacacttgagaaaacctatggacctgcatggatagcctatggacattcatttgcggtggagagtgagcacgaccaagcgatggctgcttacttcacagcagcacagctgatgaaaggatggaaaacagccgaaaaatggtttcttgatgctttggaaaaaattaaagcaattgggaacgaggtaacagttgacaaatgggaacctttgttgaacaacttggggcatgtctgcagaaaacttaaaaagtatgctgaggccttggattaccaccgtcaggcactggtgttgattcctcagaacgcatccacctactctgctattggatatatccacagtctgatgggcaactttgaaaatgctgtggactacttccacacagcccttggtcttaggcgagatgatacattttctgttacaatgcttggtcattgcatcgaaatgtacattggtgattctgaagcttatattggagcagacattaaagacaaattaaaatgttatgactttgatgtgcatacaatgaagacactaaaaaacattatttcacctccgtgggatttcagggaatttgaagtagaaaaacagactgcagaagaaacggggcttacgccattggaaacctcaaggaaaactccagattccagaccttccttggaagaaacctttgaaattgaaatgaatgaaagtgacatgatgttagagacatctatgtcagaccacagcacgtgactccagtcagtggtcctggtcccactgtcccagtgtaggttagtattccttcacatcctctccatggcttaagaatgtcccacttcctaacgtgactccaaactgcatctctacatttaggaacagagacccgccttaagagactggatcgcacacctttgcaacagatgtgttctgattctctgaacctacaaaatagttatacatagtggaataaagaaggtaaaccatc

SEQ ID NO: 329302 - protein, 200 aa, Artificial Sequence
  derived and/or modified sequence
MASSLTCTGVIWALLSFLCAATSCVGFFMPYWLWGSQLGKPVSFGTFRRCSYPVHDESRQMMVMVEECGRYASFQGIPSAEWRICTIVTGLGCGLLLLVALTALMGCCVSDLISRTVGRVAGGIQFLGGLLIGAGCALYPLGWDSEEVRQTCGYTSGQFDLGKCEIGWAYYCTGAGATAAMLLCTWLACFSGKKQKHYPY

SEQ ID NO: 329303 - DNA, 192 bp, Artificial Sequence
  derived and/or modified sequence
caacaacaggagaccaacctcctagccaacctgacaactaacgatgcacgagataactctaaggatttccagaattcaaaggtcggtgccgcagccacatcccgggatgagggttgcaattgcccaatcataggcgaaattgtcatctcgtgctactggctgttcgagatccctcctctcattagtgaatag

SEQ ID NO: 329304 - DNA, 603 bp, Artificial Sequence
  derived and/or modified sequence
atggcttccagtctcacatgcaccggagtcatctgggccctattaagcttcctgtgcgctgccacctcctgcgtgggctttttcatgccatactggctctggggctctcagctaggaaagccggtaagttttgggacgttccggaggtgcagctatccggtgcacgatgaaagccggcagatgatggtcatggtggaggaatgtggaaggtacgcaagtttccaaggaattccaagcgccgaatggaggatctgtaccatcgtgactggattgggttgtggccttctgttgctggtggcacttactgcactgatgggttgctgtgtctctgaccttatctcccgtaccgtggggcgcgtcgccggtggaatccagtttctagggggtctgttaataggagctgggtgtgccttgtaccctctcggctgggattcagaagaagtgcgccagacttgcggctatacatcagggcagttcgatttgggcaaatgtgaaatagggtgggcctattactgtactggagccggggctacagcggctatgcttctgtgtacctggctggcttgtttctcaggcaaaaagcaaaagcattacccctactag

SEQ ID NO: 329305 - DNA, 603 bp, Artificial Sequence
  derived and/or modified sequence
atggccagcagcctgacctgcaccggggtcatctgggccctgctgtccttcctgtgtgccgccaccagctgtgtgggcttcttcatgccctactggctgtggggcagccagctgggcaagcctgtgtcctttggcaccttccgccgctgcagctaccctgtgcatgatgagagccggcagatgatggtgatggtggaggagtgtggccgctatgccagcttccagggcatccccagcgctgagtggaggatctgcaccatcgtgacaggcctgggctgcggcctgctgctgctggtggccctgacagccctgatgggctgctgcgtgtctgacctgatcagcaggacagtgggccgggtggccggcggcatccagttcctgggcggcctgctgattggagctggctgtgccctgtaccccctgggctgggacagcgaggaggtgcggcagacctgtggctacaccagcggccagtttgacctgggcaaatgtgagatcggctgggcctactactgcacaggagctggggccacagctgccatgctgctgtgcacctggctggcctgcttcagcggcaagaagcagaagcactacccctactag

SEQ ID NO: 329306 - DNA, 2110 bp, Artificial Sequence
  derived and/or modified sequence
gtgcgatccccggcgcccgcgcgcgcccacagcgctccgccagagctgccgccgcggactcgccgggagtgggggtctccgctggtgccagcccgcttctggagaccctccgcctcctgccaacccctgctcttccaggtcgggccccggggttctgcggctgttagggacagaggcaaagaagggcaggacggtccggtttcccgtggatgttcccgcccgagaaagacagcaagttgtgtgtgcgcccgggacgcgggagggaaggtggccgccgcccgccagccatggaccatcatctttagtgcagaggatggaaagttgatgcccagtaagactgaagatccattctgcattacggaactgtggattatctgtgggtccctggtgatttcacaccttcattcactcctgcagtccctgaacacttacttggggtcctcattgccctatctggtgaaagatggcatccagcctgacttgtactggagtaatctgggctttgctgtcttttctttgtgctgccacctcctgcgtggggttctttatgccttactggctctggggatcacagctgggcaagcctgtgtccttcggtaccttccggaggtgctcatatcctgtgcatgatgagagtcggcagatgatggtgatggtggaggaatgtgggcgctatgcctccttccagggcatccccagcgcagaatggaggatctgcaccatagtgaccggcctgggttgtggcctcctcctcctggtggcgctcactgccctcatgggttgctgtgtttccgacctcatctccaggacagtgggaagagtggctggaggaattcagtttcttgggggcttgttgattggtgctggctgtgccctctaccccttgggctgggacagtgaggaagtccggcagacttgtggctacacttctggccagtttgacctggggaagtgtgaaatcggctgggcctactactgcacgggagcaggtgccactgccgccatgctgctgtgcacgtggctggcttgcttttcgggcaagaaacagaagcactacccatactgagatggagctaccaagagcagacagaggagaagatgggccaaaggggcttggagaggtcaaaacatccacctaccttcaaaaggtgggatagtagttctaatccaatacaatgctaataaaatgaaacccgataaaatcaggaacatgatataggaaggaaggattgtaggagatttgtgggggaaaaaaaaggagagtatagaatgatggagaaaaatggaccaaaggctaaaaatattgcagggcatcgggtgtttctattccacagagtattgttaatgtacaacacacacacacacacacacacacacacacacacacacacacacacaacaaatctacatatacaaacaagggtttgggttttagttttttttttttaaggtgaggactcagaaaatcaaagggctagtagaaacagtgttatgttgggaagcagggtacccccaaagatgttccctgtaggtcacggcactcccaaaagcacacaagcacatacagacatatgcatccccacacacgcctatgcacaaacgtggattatcgcacagactgggaggtttagtggtgcatttctcctctgttttctttttaatatacatttaaaatacagtattatcactttataaaacatacattaagcctaataaatggaccaataagccaaactatcagtattttgtatatcctgcataaactctaatttagttcctcaacatattttcagtgtttatgcagacctttagagttaagcctttgtatttccatgttattccacaatatgcaatatttctctgagtagcttctgctatgatattcttatgaagaaaaggggcaactttctgtccactataggagagaattcagccgaagatatgagagtaatgagagacattttccagtcattggatcgtgttttcttttgtccattattgtactgtgctgtaccacatttatttctatattcattttgtaaaaaatttaaaagtgctattttgtttgtatttgaaaatctctgtgaataaattctctctttgatcaata

SEQ ID NO: 329307 - DNA, 603 bp, Artificial Sequence
  derived and/or modified sequence
atggccagcagcctgacctgcaccggcgtgatctgggccctgctgtcattcctttgcgccgccacgagttgcgtaggatttttcatgccttattggctgtggggaagtcagcttggaaaacccgttagtttcggcaccttccgccgatgctcctaccctgtccatgacgagagcagacagatgatggtcatggtggaagagtgcggccggtacgcgtcttttcaggggataccatcagctgaatggaggatttgtaccatcgtaacaggcctcggatgtggactgttgcttctggttgcgctcaccgccctgatggggtgctgtgtctccgacctgatatctcgcaccgtggggagggtggcaggagggattcagttcctcggggggctgcttatcggggctggatgcgctttatacccactggggtgggatagcgaggaagttaggcagacttgtgggtacacaagcggtcagtttgatctgggaaagtgtgaaattggatgggcctattattgtaccggagcaggagccacagcggctatgctgctttgtacttggctagcatgtttctcagggaaaaagcagaagcactatccatattag

SEQ ID NO: 329308 - DNA, 603 bp, Artificial Sequence
  derived and/or modified sequence
atggccagtagcctcacctgcacaggtgtcatatgggccctcctctcattcctgtgtgcagccacaagttgtgtcggattctttatgccatactggctctggggttcgcagttaggcaagcctgtgagctttgggacctttcgcagatgtagctatcccgtacacgatgaatctcggcagatgatggtgatggtggaagagtgcggcaggtacgcgtctttccagggcatccccagtgctgaatggcgaatctgtaccatcgttactgggctgggatgtggcctcctgttgctggtagcgctgaccgccctcatgggatgctgcgtgtctgatctgatctcccgcacggtcggcagagtggccggtgggatccagtttctgggtgggctcttgattggggctgggtgtgctctgtatcctttaggatgggattctgaggaggtgcgccaaacttgcgggtacacctcaggccagttcgatttgggtaaatgcgagattgggtgggcctactattgtacaggcgcaggggctaccgcggcaatgcttttgtgtacatggctggcatgtttcagcggcaagaagcagaagcactacccttactag

SEQ ID NO: 329309 - DNA, 603 bp, Artificial Sequence
  derived and/or modified sequence
atggccagcagcctgacctgcaccggcgtgatctgggccctgctgagcttcctgtgcgccgccaccagctgcgtgggcttcttcatgccctactggctgtggggcagccagctgggcaagcccgtgagcttcggcaccttcagaagatgcagctaccccgtgcacgacgagagcagacagatgatggtgatggtggaggagtgcggcagatacgccagcttccagggcatccccagcgccgagtggagaatctgcaccatcgtgaccggcctgggctgcggcctgctgctgctggtggccctgaccgccctgatgggctgctgcgtgagcgacctgatcagcagaaccgtgggcagagtggccggcggcatccagttcctgggcggcctgctgatcggcgccggctgcgccctgtaccccctgggctgggacagcgaggaggtgagacagacctgcggctacaccagcggccagttcgacctgggcaagtgcgagatcggctgggcctactactgcaccggcgccggcgccaccgccgccatgctgctgtgcacctggctggcctgcttcagcggcaagaagcagaagcactacccctactag

SEQ ID NO: 329310 - protein, 414 aa, Artificial Sequence
  derived and/or modified sequence
MSRKISKESKKVNISSSLESEDISLETTVPTDDISSSEEREGKVRITRQLIERKELLHNIQLLKIELSQKTMMIDNLKVDYLTKIEELEEKLNDALHQKQLLTLRLDNQLAFQQKDASKYQELMKQEMETILLRQKQLEETNLQLREKAGDVRRNLRDFELTEEQYIKLKAFPEDQLSIPEYVSVRFYELVNPLRKEICELQVKKNILAEELSTNKNQLKQLTETYEEDRKNYSEVQIRCQRLALELADTKQLIQQGDYRQENYDKVKSERDALEQEVIELRRKHEILEASHMIQTKERSELSKEVVTLEQTVTLLQKDKEYLNRQNMELSVRCAHEEDRLERLQAQLEESKKAREEMYEKYVASRDHYKTEYENKLHDELEQIRLKTNQEIDQLRNASREMYERENRKKRKKK

SEQ ID NO: 329311 - DNA, 651 bp, Artificial Sequence
  derived and/or modified sequence
ttccggacagcgaaagttgagaatgaggatgaggccgaacgggtcttattcagctatgggtatggggctaatgttcctacaacagccaaacgccggctaaagcagagtgttcacctggccagacgggtcctccagctggagaaacagaattctctgatcctgaaagacctcgagcataggaaggaccaagtgacacagcttagccaggagctggatagagccaacagtttactgaaccagacacagcagccttataggtaccttatcgaatctgtgaggcagagggatagcaaaatcgattcactgacagagtctattgcacaattggagaaagatgtgtctaacctgaataaggagaaaagcgcactgttgcaaactaagaaccagatggctctagatctggagcagttgctaaaccatcgtgaggagttggccgccatgaagcagatactcgtgaagatgcattccaaacacagcgaaaatagtcttctgctcaccaagacggagcctaagcatgtgactgaaaatcaaaagagcaaaactttgaacgttccaaaggagcacgaggacaacatctttacccccaaaccgaccctgttcaccaagaaggaagcgcccgaatggtcaaagaaacagaaaatgaaaacatag

SEQ ID NO: 329312 - DNA, 651 bp, Artificial Sequence
  derived and/or modified sequence
ttcagaacagccaaggtggagaatgaagatgaggccgagcgggtgctcttctcctatggctatggagccaacgtgcccaccacagccaagaggcggctgaagcagagcgtgcacctggccaggagagtgctgcagctggagaagcagaacagcctcatcctgaaggacctggagcacaggaaggaccaggtgacccagctgagccaggagctggaccgggccaacagcctgctgaaccagacccagcagccctaccgctacctgattgaatctgtgcggcagagggacagcaagattgacagcctgacagagagcatcgcccagctggagaaggatgtgagcaacctgaacaaggagaagagcgccctgctgcagaccaagaaccagatggccctggacctggagcagctgctgaaccaccgggaggagctggccgccatgaagcagatcctggtgaagatgcacagcaagcacagcgagaacagcctgctgctgaccaagacagagcccaagcacgtgacagagaaccagaagagcaagaccctgaatgtgcccaaggagcacgaggacaacatcttcacccccaagcccaccctcttcaccaagaaggaggcccctgagtggagcaagaagcagaagatgaagacctag

SEQ ID NO: 329313 - DNA, 651 bp, Artificial Sequence
  derived and/or modified sequence
ttccggaccgccaaggtggagaacgaggacgaggccgagcgggtgctattctcttatgggtatggagcaaatgtgcctacaactgccaagaggcgcctcaagcagtcagtacacctcgccaggcgcgtgctccagctcgagaagcaaaacagcctcatcctgaaagatctcgagcatagaaaggaccaagtgacgcagctgagtcaggagttagaccgggcgaactctctgttaaatcagactcagcagccatatcgctatctgattgaatccgttagacagcgcgatagcaaaatagactctctcactgagagtatcgctcagctcgaaaaggacgtttcgaatctcaataaggagaagagtgcgttactgcagaccaagaatcagatggcactggacctggagcagttgctaaaccatcgggaggagctggctgcaatgaaacagatacttgtcaagatgcacagtaagcatagcgaaaacagtctgctgctaacgaaaactgagcctaaacacgtgaccgagaaccaaaaaagcaagactctgaacgtgcccaaggagcacgaagataatattttcactccaaagcctacccttttcaccaagaaagaggctccagagtggagcaaaaaacagaagatgaagacctag

SEQ ID NO: 329314 - DNA, 651 bp, Artificial Sequence
  derived and/or modified sequence
tttagaacagctaaggttgaaaatgaggacgaggcagaacgcgtccttttttcttacggctacggtgctaacgtgcccaccacagcgaaaagacgacttaaacagtccgtccacctcgccaggagagttctccagcttgaaaagcagaatagtctgattctaaaagacctggagcataggaaggaccaggtgacccagctgagtcaggagttagatcgcgctaactctctactcaaccagacccagcaaccctaccgatacctgattgagtctgttcgacaacgggacagtaaaatagacagcttgaccgaatcaattgcccagctcgagaaagatgtgagcaacctgaacaaggaaaagagtgcgttactgcagactaagaaccagatggctctggacttagaacagctactgaaccatcgggaggagctggcagcgatgaaacagattctagttaagatgcactcaaaacacagtgagaactccttgctgcttaccaagactgaacctaagcatgtaaccgaaaaccagaagtctaaaacactgaacgtgcctaaggaacacgaggacaacatcttcactccaaaacctacactgtttactaaaaaggaagcacctgaatggtccaaaaaacagaaaatgaagacttag

SEQ ID NO: 329315 - DNA, 1186 bp, Artificial Sequence
  derived and/or modified sequence
tttcgcacagcaaaagttgaaaatgaagatgaggctgaaagggttcttttttcctacggctatggtgctaatgttcccacaacagccaaaagacgactaaagcaaagtgttcacttggcaagaagagtgcttcaattagaaaaacaaaactcgctgattttaaaagatctggaacatcgaaaggaccaagtaacacagctttcacaagagcttgacagagccaattcgctattaaaccagactcaacagccttacaggtatctcattgaatcagtgcgtcagagagattctaagattgattcactgacggaatctattgcacaacttgagaaagatgtcagcaacttaaataaagaaaagtcagctttactacagacgaagaatcaaatggcattagatttagaacaacttctaaatcatcgtgaggaattggcagcaatgaaacagattctcgttaagatgcatagtaaacattctgagaacagcttacttctcactaaaacagaaccaaaacatgtgacagaaaatcagaaatcaaagactttgaatgtgcctaaagagcatgaagacaatatatttacacctaaaccaacactctttactaaaaaagaagcacctgagtggtctaagaaacaaaagatgaagacctagtgttttggatgggaagcacctgtagaccattatatactcctgaagttctttttctgatggaaaacaaaattcagcttaatcgtgtactcagcattttttaaataacaatgtttatttgaactaatattaaattaacaaattcagtgtaatcaaaatgtgtaaagaacaatcaatatactttatttttttttctattttataaaataaatatatatgctatgctttaaattttggagctttcataaatgttcaatgcattttaagtgtgtggcttataaatattttggtatttttctatactacgtaaattctgagtttaaatgtcatacacaaatactaagacactttgcatttttaaaaattaagaatcatttgtgaagtccactacgaggtacttcaaaagcccagtaatggtggtcagataccatgtagatggatacagattgttgactcttttgaagttgtttttttcttatattttatattaccattaaccaataaaatctggcagaaagtctgctattccattggtaaa

SEQ ID NO: 329316 - DNA, 651 bp, Artificial Sequence
  derived and/or modified sequence
ttcagaaccgccaaggtggagaacgaggacgaggccgagagagtgctgttcagctacggctacggcgccaacgtgcccaccaccgccaagagaagactgaagcagagcgtgcacctggccagaagagtgctgcagctggagaagcagaacagcctgatcctgaaggacctggagcacagaaaggaccaggtgacccagctgagccaggagctggacagagccaacagcctgctgaaccagacccagcagccctacagatacctgatcgagagcgtgagacagagagacagcaagatcgacagcctgaccgagagcatcgcccagctggagaaggacgtgagcaacctgaacaaggagaagagcgccctgctgcagaccaagaaccagatggccctggacctggagcagctgctgaaccacagagaggagctggccgccatgaagcagatcctggtgaagatgcacagcaagcacagcgagaacagcctgctgctgaccaagaccgagcccaagcacgtgaccgagaaccagaagagcaagaccctgaacgtgcccaaggagcacgaggacaacatcttcacccccaagcccaccctgttcaccaagaaggaggcccccgagtggagcaagaagcagaagatgaagacctag

SEQ ID NO: 329317 - DNA, 1245 bp, Artificial Sequence
  derived and/or modified sequence
atgagtagaaaaatctccaaagagagtaagaaggtgaacattagctcttccctggagtctgaggacatcagcctggaaaccaccgtgccaacagacgacatctcctcatcggaagaacgtgaaggtaaagtcagaataacacggcagctgattgagcgaaaggaattgttgcacaatattcagctcctaaagattgaactgagtcagaagacgatgatgattgacaatctgaaagtggattacctcacaaagattgaagagctggaggaaaagctgaatgacgcactgcatcagaaacagttactgaccctccgcctggacaaccaactggcctttcagcagaaggatgctagtaagtaccaagagctaatgaaacaggaaatggaaacaatcctcttgcgccagaaacagctggaagagacaaacctgcagctgagggaaaaagccggcgatgttcggcgtaatctccgagatttcgaactaacagaagagcagtacatcaaactaaaggcctttccagaagaccagctatcgattccagagtatgtttctgtcagattctacgaactggttaaccctttgcgtaaggaaatctgtgagcttcaggtaaagaaaaatattctcgccgaggagttgagtactaataaaaaccaactgaaacaactgaccgagacttacgaggaagatcgcaagaattactcagaagtgcaaattcggtgccagagactggctctagagctggcagataccaagcagctcatacagcagggtgattaccgacaagagaattatgacaaggttaaaagcgagcgcgacgcgctcgaacaagaagtgattgaattgagacgaaaacacgagatattggaggctagccacatgattcagaccaaagagaggtctgaactgtccaaagaagtggtcaccctcgagcagacggtaacactgctgcagaaagataaagaatacttgaataggcagaacatggaactctctgtgcgatgtgctcacgaggaagaccggctggagagactgcaggcccagctggaggagtccaaaaaagcccgcgaagaaatgtacgagaagtatgtcgcgtcaagggaccactacaagactgaatatgagaacaagctgcatgatgaactggagcagatccgactgaaaacaaaccaagaaattgatcagctaagaaatgcgtctcgggaaatgtatgagcgggaaaatcggaagaagaggaagaaaaaatag

SEQ ID NO: 329318 - DNA, 1245 bp, Artificial Sequence
  derived and/or modified sequence
atgagcaggaagatcagcaaggagagcaagaaggtgaacatcagcagcagcctggagagcgaggacatcagcctggagaccaccgtgcccacagatgacatcagcagcagcgaggagcgggagggcaaggtgcgcatcacccggcagctgattgaaaggaaggagctgctgcacaacatccagctgctgaagattgagctgagccagaagaccatgatgattgacaacctgaaggtggactacctgaccaagattgaggagctggaggagaagctgaatgatgccctgcaccagaagcagctgctgaccctgcggctggacaaccagctggccttccagcagaaggatgccagcaagtaccaggagctgatgaagcaggagatggagaccatcctgctgcggcagaagcagctggaggagaccaacctgcagctgcgggagaaggctggagatgtgagaagaaacctgcgggactttgagctgacagaggagcagtacatcaagctgaaggccttccctgaggaccagctgagcatcccagaatatgtgtctgtgcgcttctatgagctggtgaaccccctgaggaaggagatctgtgagctgcaggtgaagaagaacatcctggccgaggagctgagcaccaacaagaaccagctgaagcagctgacagagacctatgaggaggacaggaagaactacagcgaggtgcagatccgctgccagaggctggccctggagctggccgacaccaagcagctgatccagcagggcgactaccggcaggagaactatgacaaggtgaagtcagaaagagatgccctggagcaggaggtgattgagctgcggaggaagcatgagatcctggaggccagccacatgatccagaccaaggagaggtctgagctgagcaaggaggtggtgaccctggagcagacagtgaccctgctgcagaaggacaaggagtacctgaaccggcagaacatggagctgtctgtgcgctgtgcccacgaggaggaccggctggagcggctgcaggcccagctggaggagagcaagaaggcccgggaggagatgtatgagaagtatgtggccagccgggaccactacaagacagaatatgagaacaagctgcatgatgagctggagcagatccggctgaagaccaaccaggagattgaccagctgagaaatgccagccgggagatgtatgagcgggagaacaggaagaagaggaagaagaagtag

SEQ ID NO: 329319 - DNA, 1245 bp, Artificial Sequence
  derived and/or modified sequence
atgagccggaagatcagcaaggagagcaagaaggtgaacatcagctcatctctggagagtgaggacatttccttggagacaaccgtgccaacagatgacatctccagctccgaggaacgcgagggaaaggttcgtattacaagacagttgatagagcgcaaggagctcttgcacaacatccagctcctgaaaatcgaactttcccagaaaaccatgatgatcgacaatctgaaggtcgactatcttacgaaaatcgaagagctagaggagaaacttaacgacgccctgcatcaaaagcagctgctcacattgaggctggataatcagttagcctttcaacagaaggatgccagcaagtaccaggagcttatgaagcaggagatggagacaattctgctcagacagaagcagctggaggagactaaccttcagttacgggaaaaagcgggagacgtgcgcagaaacctccgagactttgagctgacagaagagcaatatatcaagctgaaggctttccctgaagatcaacttagcatccctgagtacgtttcagtacgattttacgagcttgtgaatccactgcgcaaggaaatctgtgaactgcaggttaagaagaacattttggcagaggagttgtcgacgaataagaatcaactgaaacagctgaccgagacgtacgaggaggacaggaaaaactattccgaagtgcaaatacgctgtcagcgacttgcattggagctagcagatacgaaacaattgatccagcaaggggactatcgtcaggaaaattatgacaaggtaaagtctgagagggatgctttagaacaggaggtgatcgagctgcgcaggaagcacgagatactggaggcgtcacatatgatccagacaaaagaaaggtccgaactgagtaaagaggtggttacgctggagcagactgtcaccttgctacaaaaggataaagagtacctaaatcggcagaacatggaactcagcgtccggtgcgcgcacgaggaagatagactcgagagattgcaagcccagctggaggagagcaagaaggctcgcgaggagatgtacgagaagtatgtggcttccagagatcattataaaactgagtatgagaataaactccacgatgagttggagcagatccggctgaaaacaaatcaggagatcgatcagttgcgcaacgcttcccgagaaatgtacgaaagggaaaatcgtaagaagcggaaaaagaaatag

SEQ ID NO: 329320 - DNA, 1245 bp, Artificial Sequence
  derived and/or modified sequence
atgtcaagaaagataagcaaagaaagtaaaaaggtgaatatctcctcctctctagagtccgaagatatctcacttgaaaccacagtacccaccgacgacatcagctcctctgaggaaagagaaggcaaggttcgcattacccgtcagttaatcgagagaaaagagctgcttcacaatattcagctgctgaagattgaacttagtcaaaaaaccatgatgatcgataacctgaaagtcgattatcttaccaaaatcgaggagttggaagagaagctaaacgacgcccttcatcagaagcaactgttgactcttaggctggataatcagttagcctttcagcagaaggacgcctctaaatatcaggagttgatgaaacaggagatggagaccattctcctgagacaaaaacagttagaggagacaaacctacagctccgcgagaaagctggagatgtgaggcggaaccttcgggattttgagttaactgaggagcagtatatcaagctcaaagcctttccagaggaccagctgtccattcctgaatacgtatccgtgcgtttctatgaactggtgaatcccctgcgaaaggagatctgcgaactgcaagtaaagaagaatatcctagctgaggaactgtctacaaataagaatcagttaaaacagctgactgaaacttatgaggaggataggaagaactatagcgaggtgcagatcaggtgtcagagactcgccttagaactggcagacaccaagcagcttatacagcagggagattacaggcaggaaaactatgacaaagttaaaagtgaacgggatgcacttgagcaggaagtgattgaactgcgcagaaaacacgagatcctggaggcatctcacatgatacaaactaaagagcgctccgagttatctaaagaggtagtaacgctggaacaaaccgtgactctgctgcagaaggataaggagtacctgaatagacagaatatggaactgtctgtgcgttgtgcacatgaagaggacagactggagcggctgcaggcgcagcttgaagaaagtaagaaagccagggaggagatgtatgagaagtatgttgctagccgggaccactacaagactgaatatgaaaacaagctccatgacgaactggagcaaatacgactaaaaacaaaccaggagattgaccaacttagaaatgcctcacgtgagatgtacgagagggagaacaggaagaaacgcaagaagaaatag

SEQ ID NO: 329321 - DNA, 1547 bp, Artificial Sequence
  derived and/or modified sequence
ctcacaacgtgtgttgctttccgctcctcggaacatccgggagagttgacttccggcggcttgtgggagtgctggttctgtcctccttgcgggtgcggagatggttgtcttggttacgggtcctaacggtcccctgccttgaaatcccttgttgagggcctgcaaccttgtgcttccgaccggagacgcctttggtccctcggtgtctgcactggctgctggtcaaggcttcagtgtggagtaattgacactttcgagaatattaaaatcaaattagagaagaaaactgatccataataataaaaatgtctcgaaaaatttcaaaggagtcaaaaaaagtgaacatctctagttctctggaatctgaagatattagtttagaaacaacagttcctacggatgatatttcctcatcagaagagcgagagggcaaagtcagaatcaccaggcagctaattgaacgaaaagaactacttcataatattcagttactaaaaattgagctatcccagaaaactatgatgatcgacaatttgaaagtggattatcttacaaagattgaagaattggaggagaaacttaatgatgcacttcaccagaagcagctactaacattgagattagacaaccaattggcttttcaacagaaagatgccagcaaatatcaagaattaatgaaacaagaaatggaaaccattttgttgagacagaaacaactagaagagacaaatcttcagctaagagaaaaagctggagatgttcgtcgaaacctgcgtgactttgagttgacagaagagcaatatattaaattaaaagcttttcctgaagatcagctttctattcctgaatatgtatctgttcgcttctatgagctagtgaatccattaagaaaggaaatctgtgaactacaagtgaaaaagaatatcctagcagaagaattaagtacaaacaaaaaccaactgaagcagctgacagagacatatgaggaagatcgaaaaaactactctgaagttcaaattagatgtcaacgtttggccttagaattagcagacacaaaacagttaattcagcaaggtgactaccgtcaagagaactatgataaagtcaagagtgaacgtgatgcacttgaacaggaagtaattgagcttaggagaaaacatgaaatacttgaagcctctcacatgattcaaacaaaagaacgaagtgaattatcaaaagaggtagtcaccttagagcaaactgttactttactgcaaaaggataaagaatatcttaatcgccaaaacatggagcttagtgttcgctgtgctcatgaagaggatcgccttgaaagacttcaagctcaactggaagaaagcaaaaaggctagagaagagatgtatgaaaaatatgtagcatccagagaccattataaaacagaatatgaaaataaactacatgatgaactagaacaaatcagattgaaaaccaaccaagaaattgatcaacttcgaaatgcctctagggaaatgtatgaacgagaaaacagaaaaaaaagaaaaaagaaa

SEQ ID NO: 329322 - DNA, 1245 bp, Artificial Sequence
  derived and/or modified sequence
atgagcagaaagatcagcaaggagagcaagaaggtgaacatcagcagcagcctggagagcgaggacatcagcctggagaccaccgtgcccaccgacgacatcagcagcagcgaggagagagagggcaaggtgagaatcaccagacagctgatcgagagaaaggagctgctgcacaacatccagctgctgaagatcgagctgagccagaagaccatgatgatcgacaacctgaaggtggactacctgaccaagatcgaggagctggaggagaagctgaacgacgccctgcaccagaagcagctgctgaccctgagactggacaaccagctggccttccagcagaaggacgccagcaagtaccaggagctgatgaagcaggagatggagaccatcctgctgagacagaagcagctggaggagaccaacctgcagctgagagagaaggccggcgacgtgagaagaaacctgagagacttcgagctgaccgaggagcagtacatcaagctgaaggccttccccgaggaccagctgagcatccccgagtacgtgagcgtgagattctacgagctggtgaaccccctgagaaaggagatctgcgagctgcaggtgaagaagaacatcctggccgaggagctgagcaccaacaagaaccagctgaagcagctgaccgagacctacgaggaggacagaaagaactacagcgaggtgcagatcagatgccagagactggccctggagctggccgacaccaagcagctgatccagcagggcgactacagacaggagaactacgacaaggtgaagagcgagagagacgccctggagcaggaggtgatcgagctgagaagaaagcacgagatcctggaggccagccacatgatccagaccaaggagagaagcgagctgagcaaggaggtggtgaccctggagcagaccgtgaccctgctgcagaaggacaaggagtacctgaacagacagaacatggagctgagcgtgagatgcgcccacgaggaggacagactggagagactgcaggcccagctggaggagagcaagaaggccagagaggagatgtacgagaagtacgtggccagcagagaccactacaagaccgagtacgagaacaagctgcacgacgagctggagcagatcagactgaagaccaaccaggagatcgaccagctgagaaacgccagcagagagatgtacgagagagagaacagaaagaagagaaagaagaagtag

SEQ ID NO: 329323 - protein, 137 aa, Artificial Sequence
  derived and/or modified sequence
MFEELGQRLQHYAKIAADFRNKDEKYNHIDESEMKKVEKSVNEVMEWMNNVMNAQAKKSLDQDPVVRAQEIKTKIKELNNTCEPVVTQPKPKIESPKLERTPNGPNIDKKEEDLEDKNNFGAEPPHQNDSCGIVNSY

SEQ ID NO: 329324 - DNA, 414 bp, Artificial Sequence
  derived and/or modified sequence
atgttcgaagagttgggacagagactgcagcattacgctaaaatcgcagctgacttcagaaataaggacgagaagtacaatcatatagacgaatctgagatgaaaaaggtcgaaaaatctgtgaatgaggtcatggagtggatgaataatgtaatgaatgcccaagctaaaaagtctctagaccaggatccagtagtcagggcacaggagattaaaacgaagattaaagaactgaataatacttgtgagcctgtggtgacccagcctaagccaaaaattgagagcccaaaattggaacgaacaccaaacgggccaaatatagataaaaaagaagaagatctcgaagataaaaataatttcggcgcggagcccccacaccagaacgacagctgcggaattgtgaactcttactag

SEQ ID NO: 329325 - DNA, 414 bp, Artificial Sequence
  derived and/or modified sequence
atgtttgaggagctgggccagaggctgcagcactacgccaagattgctgctgacttcaggaacaaggatgagaagtacaaccacattgatgagagcgagatgaagaaggtggagaagtctgtgaatgaggtgatggagtggatgaacaacgtgatgaatgcccaggccaagaagagcctggaccaggaccctgtggtgcgggcccaggagatcaagaccaagatcaaggagctgaacaacacctgtgagcctgtggtgacccagcccaagcccaagattgagagccccaagctggagaggaccccaaatggccccaacatcgacaagaaggaggaggacctggaggacaagaacaactttggagctgagcccccccaccagaatgacagctgtggcatcgtgaacagctactag

SEQ ID NO: 329326 - DNA, 414 bp, Artificial Sequence
  derived and/or modified sequence
atgttcgaggagctgggccagcggctgcagcactacgccaagatcgccgctgatttccgaaataaggacgagaagtataatcatattgacgagagcgagatgaagaaagtggaaaagtccgtcaacgaggtaatggagtggatgaacaatgtcatgaacgcgcaggccaaaaaatctctcgaccaagaccccgttgtgcgcgctcaggagattaagactaaaattaaggagctcaataatacctgcgagcctgtcgtgacacagcctaagcctaagatagaaagccctaaactggagcgcactcccaatggacctaatatcgataaaaaagaggaggacctcgaagataagaataattttggagctgaacctcctcatcagaatgactcctgtgggatcgtaaattcatattag

SEQ ID NO: 329327 - DNA, 414 bp, Artificial Sequence
  derived and/or modified sequence
atgtttgaagagttaggccagcgactgcaacactacgccaagatcgccgctgactttcgcaacaaagacgaaaaatacaaccacatagatgaaagtgagatgaagaaggtcgaaaagagcgttaatgaagtgatggaatggatgaataacgtgatgaacgcccaggccaagaaatctctcgatcaagaccccgtggtgcgagcacaggaaatcaagaccaaaataaaagaactgaacaacacctgcgaaccagtagttacccagccaaaacccaaaatcgagagtccaaaacttgaacggacgcccaacggtccaaatatcgacaaaaaggaagaggaccttgaggacaagaacaacttcggggctgagccaccacaccagaacgactcgtgtggcattgtgaactcatattag

SEQ ID NO: 329328 - DNA, 414 bp, Artificial Sequence
  derived and/or modified sequence
atgttcgaggagctgggccagagactgcagcactacgccaagatcgccgccgacttcagaaacaaggacgagaagtacaaccacatcgacgagagcgagatgaagaaggtggagaagagcgtgaacgaggtgatggagtggatgaacaacgtgatgaacgcccaggccaagaagagcctggaccaggaccccgtggtgagagcccaggagatcaagaccaagatcaaggagctgaacaacacctgcgagcccgtggtgacccagcccaagcccaagatcgagagccccaagctggagagaacccccaacggccccaacatcgacaagaaggaggaggacctggaggacaagaacaacttcggcgccgagcccccccaccagaacgacagctgcggcatcgtgaacagctactag

SEQ ID NO: 329329 - protein, 277 aa, Artificial Sequence
  derived and/or modified sequence
MLSQKEVAVADAKKSLELNPNNSTAMLRKGICEYHEKNYAAALETFTEGQKLDSADANFSVWIKRCQEAQNGSESEVWTHQSKIKYDWYQTESQVVITLMIKNVQKNDVNVEFSEKELSALVKLPSGEDYNLKLELLHPIIPEQSTFKVLSTKIEIKLKKPEAVRWEKLEGQGDVPTPKQFVADVKNLYPSSSPYTRNWDKLVGEIKEEEKNEKLEGDAALNRLFQQIYSDGSDEVKRAMNKSFMESGGTVLSTNWSDVGKRKVEINPPDDMEWKKY

SEQ ID NO: 329330 - DNA, 834 bp, Artificial Sequence
  derived and/or modified sequence
atgctgagccagaaggaggtggccgtggccgacgccaagaagagcctggagctgaaccccaacaacagcaccgccatgctgagaaagggcatctgcgagtaccacgagaagaactacgccgccgccctggagaccttcaccgagggccagaagctggacagcgccgacgccaacttcagcgtgtggatcaagagatgccaggaggcccagaacggcagcgagagcgaggtgtggacccaccagagcaagatcaagtacgactggtaccagaccgagagccaggtggtgatcaccctgatgatcaagaacgtgcagaagaacgacgtgaacgtggagttcagcgagaaggagctgagcgccctggtgaagctgcccagcggcgaggactacaacctgaagctggagctgctgcaccccatcatccccgagcagagcaccttcaaggtgctgagcaccaagatcgagatcaagctgaagaagcccgaggccgtgagatgggagaagctggagggccagggcgacgtgcccacccccaagcagttcgtggccgacgtgaagaacctgtaccccagcagcagcccctacaccagaaactgggacaagctggtgggcgagatcaaggaggaggagaagaacgagaagctggagggcgacgccgccctgaacagactgttccagcagatctacagcgacggcagcgacgaggtgaagagagccatgaacaagagcttcatggagagcggcggcaccgtgctgagcaccaactggagcgacgtgggcaagagaaaggtggagatcaacccccccgacgacatggagtggaagaagtactag

SEQ ID NO: 329331 - DNA, 834 bp, Artificial Sequence
  derived and/or modified sequence
atgctctctcaaaaggaagtggccgttgccgacgccaaaaaaagtctggaactgaatccaaacaactccacggccatgctaaggaaggggatttgcgaataccacgagaaaaactatgcggcagcattagaaacttttaccgaaggtcagaaactcgacagcgccgacgccaatttcagtgtgtggattaaaagatgtcaagaggcccagaacggttccgagagtgaggtgtggacccaccagtccaagattaagtacgactggtaccagactgagagccaagtggtgataaccctgatgataaaaaacgtgcagaagaacgacgtgaacgtggaattctccgaaaaagagctgagcgcgctggtcaagttgccttccggtgaggactacaacttgaagctggaactgctgcaccctatcatacccgagcagtccacttttaaggtgctgtcaaccaagatcgagattaagttgaaaaagcctgaggcagtgcgatgggaaaaattggagggtcagggggacgtgcccacccccaagcagttcgtagcagacgtgaagaacctttaccctagcagttcaccttatactagaaattgggataaacttgtaggagaaatcaaggaagaagagaagaatgagaagcttgaaggcgatgcagccttgaatcgcctgtttcagcagatctacagcgatggaagcgatgaggtgaagagagccatgaataagtctttcatggaatctggagggactgtgttatcaaccaactggtctgacgtcggtaaaagaaaggtggagatcaaccctccagacgatatggagtggaagaaatattag

SEQ ID NO: 329332 - DNA, 834 bp, Artificial Sequence
  derived and/or modified sequence
atgctgagccagaaggaggtggccgtggctgatgccaagaagagcctggagctgaaccccaacaacagcacagccatgctgaggaagggcatctgtgagtaccacgagaagaactatgctgctgccctggagaccttcacagagggccagaagctggacagcgcagatgccaacttctctgtgtggatcaagcgctgccaggaggcccagaatggaagtgaaagtgaggtgtggacccaccagagcaagatcaagtatgactggtaccagacagagagccaggtggtgatcaccctgatgatcaagaatgtgcagaagaatgatgtgaatgtggagttcagcgagaaggagctgagcgccctggtgaagctgcccagcggggaggactacaacctgaagctggagctgctgcaccccatcatccctgagcagagcaccttcaaggtgctgagcaccaagattgagatcaagctgaagaagccagaggccgtgcgctgggagaagctggagggccagggagatgtgcccacccccaagcagtttgtggctgatgtgaagaacctgtaccccagcagcagcccctacaccaggaactgggacaagctggtgggggagatcaaggaggaggagaagaatgagaagctggagggagatgctgccctgaacagactcttccagcagatctacagtgatggcagtgatgaggtgaagagggccatgaacaagagcttcatggagagcggcggcaccgtgctgagcaccaactggagcgatgtgggcaagaggaaggtggagatcaaccccccagatgacatggagtggaagaagtactag

SEQ ID NO: 329333 - DNA, 834 bp, Artificial Sequence
  derived and/or modified sequence
atgctgagccagaaggaggtggccgtggccgacgccaagaagagccttgaactgaaccccaacaattccaccgcaatgctgaggaaaggaatctgtgaataccacgagaagaattatgcagcagccttggagacattcacggaggggcagaagctggactctgctgacgccaatttcagcgtgtggataaagcgctgtcaagaagcccaaaacggtagcgaatcagaggtgtggacccaccagtcgaagatcaagtatgactggtatcaaactgagtcccaggtggtgatcactctgatgatcaagaatgttcagaagaacgatgtcaacgtagaattctcggagaaagagctgagcgccctggtgaagttgccttcgggagaggattataatctgaagctcgagctgctccatccaattatccctgagcagagtacgtttaaggtcctctccaccaagattgagattaaactcaagaagcccgaagctgtgcgctgggagaaactagaaggtcaaggagatgtccctactccaaaacagttcgtcgctgatgtgaagaatctgtatcccagctcaagtccatatacccgaaactgggacaagctagtgggtgaaattaaagaagaagaaaagaacgagaaactggagggcgacgctgccctgaatcgcttatttcagcagatatacagcgatgggagtgacgaggtgaagagggctatgaacaaaagcttcatggaaagcggcggaacggtgctatccaccaattggtccgacgtggggaaaagaaaggtggaaattaacccgccagatgacatggaatggaagaaatactag

SEQ ID NO: 329334 - DNA, 834 bp, Artificial Sequence
  derived and/or modified sequence
atgttatcccaaaaggaggtagctgttgctgatgccaaaaaatccctcgagcttaatccgaacaattcaaccgcaatgctgaggaaaggcatctgcgagtaccatgaaaaaaactatgccgcagcgctagagacatttacagagggacaaaagctggattccgctgacgcaaacttctcggtatggatcaaacggtgccaggaggcccaaaacggatccgaatccgaggtctggacccaccagagtaaaatcaagtacgactggtatcagactgagtcacaagtggttatcacgctcatgataaagaacgttcagaagaacgatgtcaacgtagaattttctgagaaggagctctctgccttagtcaaattaccatctggagaggactacaacttgaagctggaacttctgcatccgataattccagagcagtccacttttaaagtgctttcaactaagattgaaattaaacttaagaaacctgaggctgtacgttgggagaagctagagggtcagggcgacgtcccgactcctaagcagttcgtggctgacgtgaagaacctgtatccatcctctagtccttacacgcgcaactgggataagctggtcggtgagatcaaggaggaggagaagaatgagaagctggaaggggatgccgctttaaaccggctgttccagcaaatctacagtgatggatctgacgaggtgaaacgggcaatgaacaaaagcttcatggaatctggcggtacagttctgagcaccaactggtcagacgttgggaagagaaaggtggagatcaatccacccgatgatatggaatggaagaagtactag

SEQ ID NO: 329335 - DNA, 1663 bp, Artificial Sequence
  derived and/or modified sequence
gtttcccccttgggcggtggtggaggtggtaaccgtgatagtagcagctccggcggcagcaacagcgactacgagggatggcggcggctgcagcaggaactgcaacatcccagaggtttttccagagcttctcggatgccctaatcgacgaggacccccaggcggcgttagaggagctgactaaggctttggaacagaaaccagatgatgcacagtattattgtcaaagagcttattgtcacattcttcttgggaattactgtgggaaaaactgaataccttgagtaaaattacatagaaaatgttaatgagacaaggaggtgaattttgtgacacagctgtattcattgaagagctttaagaaggaagctaaatgttaagccaaaaggaagttgctgttgctgatgcaaagaagtctctagaactcaatccaaataattccactgctatgctgagaaaaggaatatgtgaataccatgaaaaaaactatgctgctgccctagaaacttttacagaaggacaaaaattagatagtgcagatgctaatttcagtgtctggattaaaaggtgtcaagaagctcagaatggctcagaatctgaggtgtggactcatcagtcaaaaatcaagtatgactggtatcaaacagaatctcaagtagtcattacacttatgatcaagaatgttcagaagaatgatgtaaatgtggaattttcagaaaaagagttgtctgctttggttaaacttccttctggagaggattacaatttgaaactggaacttcttcatcctataataccagaacagagcacgtttaaagtactttcaacaaagattgaaattaaactgaaaaagccagaggctgtgagatgggaaaagctagaggggcaaggagatgtgcctacgccaaaacaattcgtagcagatgtaaagaacctatatccatcatcatctccttatacaagaaattgggataaattggttggtgagatcaaagaagaagaaaagaatgaaaagttggagggagatgcagctttaaacagattatttcagcagatctattcagatggttctgatgaagtgaaacgtgccatgaacaaatcctttatggagtcgggtggtacagttttgagtaccaactggtctgatgtaggtaaaaggaaagttgaaatcaatcctcctgatgatatggaatggaaaaagtactaaataaattaatttgctctcatcgtattgtgtatattcacctaatgcccattgtgtattgatattgcattcttgaattttgaacactgaatatctttttgaaagattatacttctttacctctttgtgctttagaaattattttccttcaagtgttcaagtctaatgaagaatgaagataacattttatcacttctgtccttaaaggtttcagacatggtgaaactgaataaagcatgtcatttgctcctagatagattcattctatctagttgtggggatggagaaatctttaatggtatattttcggttattgccttatttttgatacagtattctgtcagtaatttattagacctggcagctttgggtgagcttagatttttcaccttcagtgttacattgtgtttgcttttaaaaactgcttttgaatggagttgtaaatacaatttttctatg

SEQ ID NO: 329336 - DNA, 1410 bp, Artificial Sequence
  derived and/or modified sequence
gccctgcacgtcggggcagcgggacagatcccagggtgcccagggagtctccaagtgcctcactcctcccgccgcaaacatgacagagaactccgacaaagttcccattgccctggtgggacctgatgacgtggaattctgcagccccccggcgtacgctacgctgacggtgaagccctccagccccgcgcggctgctcaaggtgggagccgtggtcctcatttcgggagctgtgctgctgctctttggggccatcggggccttctacttctggaaggggagcgacagtcacatttacaatgtccattacaccatgagtatcaatgggaaattacaagatgggtcaatggaaatagacgctgggaacaacttggagacctttaaaatgggaagtggagctgaagaagcaattgcagttaatgatttccagaatggcatcacaggaattcgttttgctggaggagagaagtgctacattaaagcgcaagtgaaggctcgtattcctgaggtgggcgccgtgaccaaacagagcatctcctccaaactggaaggcaagatcatgccagtcaaatatgaagaaaattctcttatctgggtggctgtagatcagcctgtgaaggacaacagcttcttgagttctaaggtgttagaactctgcggtgaccttcctattttctggcttaaaccaacctatccaaaagaaatccagagggaaagaagagaagtggtaagaaaaattgttccaactaccacaaaaagaccacacagtggaccacggagcaacccaggcgctggaagactgaataatgaaaccagacccagtgttcaagaggactcacaagccttcaatcctgataatccttatcatcagcaggaaggggaaagcatgacattcgaccctagactggatcacgaaggaatctgttgtatagaatgtaggcggagctacacccactgccagaagatctgtgaacccctggggggctattacccatggccttataattatcaaggctgccgttcggcctgcagagtcatcatgccatgtagctggtgggtggcccgtatcttgggcatggtgtgaaatcacttcatatatcatgtgctgtaaaataagaactagctgaagagacaaccaaagaagcattaaggcaggttgatgctgataggaccacaaaatatttttacactcaacctgagcggttattcttgacactcttaacagaattttttcaattgttttccagaactttagtatatgcaaatgtactgaaagggtagttcaagtctaaaatgccataacccctttattatttgttattttttatttgcattgctttgccataagtcttcccttgcttgtatcttccaaagctattttgaaataaacatgaaaatttacagtttgcc

SEQ ID NO: 329337 - DNA, 1444 bp, Artificial Sequence
  derived and/or modified sequence
ccgtgcaccgtgtgtgcgcgcggcgttgaaatgccctgcacgtcggggcagcgggacagatcccagggtgcccagggagtctccaagtgcctcactcctcccgccgcaaacatgacagagaactccgacaaagttcccattgccctggtgggacctgatgacgtggaattctgcagccccccggcgtacgctacgctgacggtgaagccctccagccccgcgcggctgctcaaggtgggagccgtggtcctcatttcgggagctgtgctgctgctctttggggccatcggggccttctacttctggaaggggagcgacagtcacatttacaatgtccattacaccatgagtatcaatgggaaattacaagatgggtcaatggaaatagacgctgggaacaacttggagacctttaaaatgggaagtggagctgaagaagcaattgcagttaatgatttccagaatggcatcacaggaattcgttttgctggaggagagaagtgctacattaaagcgcaagtgaaggctcgtattcctgaggtgggcgccgtgaccaaacagagcatctcctccaaactggaaggcaagatcatgccagtcaaatatgaagaaaattctcttatctgggtggctgtagatcagcctgtgaaggacaacagcttcttgagttctaaggtgttagaactctgcggtgaccttcctattttctggcttaaaccaacctatccaaaagaaatccagagggaaagaagagaagtggtaagaaaaattgttccaactaccacaaaaagaccacacagtggaccacggagcaacccaggcgctggaagactgaataatgaaaccagacccagtgttcaagaggactcacaagccttcaatcctgataatccttatcatcaggaaggggaaagcatgacattcgaccctagactggatcacgaaggaatctgttgtatagaatgtaggcggagctacacccactgccagaagatctgtgaacccctggggggctattacccatggccttataattatcaaggctgccgttcggcctgcagagtcatcatgccatgtagctggtgggtggcccgtatcttgggcatggtgtgaaatcacttcatatatcatgtgctgtaaaataagaactagctgaagagacaaccaaagaagcattaaggcaggttgatgctgataggaccacaaaatatttttacactcaacctgagcggttattcttgacactcttaacagaattttttcaattgttttccagaactttagtatatgcaaatgtactgaaagggtagttcaagtctaaaatgccataacccctttattatttgttattttttatttgcattgctttgccataagtcttcccttgcttgtatcttccaaagctattttgaaataaacatgaaaatttacagtttgccaaaaa

SEQ ID NO: 329338 - protein, 402 aa, Artificial Sequence
  derived and/or modified sequence
ISVHLMRKHVKNINTFENRMLMLDGMPAVRVKTELLESEQGSPNVHNYPDMEAVPLLLNNVKGEPPEDSLSVDHFQTQTEPVDLSINKARTSPTAVSSSPVSMTASASSPSSTSTSSSSSSRLASSPTVITSVSSASSSSTVLTPGPLVASASGVGGQQFLHIIHPVPPSSPMNLQSNKLSHVHRIPVVVQSVPVVYTAVRSPGNVNNTIVVPLLEDGRGHGKAQMDPRGLSPRQSKSDSDDDDLPNVTLDSVNETGSTALSIARAVQEVHPSPVSRVRGNRMNNQKFPCSISPFSIESTRRQRRSESPDSRKRRIHRCDFEGCNKVYTKSSHLKAHRRTHTGEKPYKCTWEGCTWKFARSDELTRHYRKHTGVKPFKCADCDRSFSRSDHLALHRRRHMLV

SEQ ID NO: 329339 - protein, 402 aa, Artificial Sequence
  derived and/or modified sequence
MNIHMKRKTIKNINTFENRMLMLDGMPAVRVKTELLESEQGSPNVHNYPDMEAVPLLLNNVKGEPPEDSLSVDHFQTQTEPVDLSINKARTSPTAVSSSPVSMTASASSPSSTSTSSSSSSRLASSPTVITSVSSASSSSTVLTPGPLVASASGVGGQQFLHIIHPVPPSSPMNLQSNKLSHVHRIPVVVQSVPVVYTAVRSPGNVNNTIVVPLLEDGRGHGKAQMDPRGLSPRQSKSDSDDDDLPNVTLDSVNETGSTALSIARAVQEVHPSPVSRVRGNRMNNQKFPCSISPFSIESTRRQRRSESPDSRKRRIHRCDFEGCNKVYTKSSHLKAHRRTHTGEKPYKCTWEGCTWKFARSDELTRHYRKHTGVKPFKCADCDRSFSRSDHLALHRRRHMLV

SEQ ID NO: 329340 - DNA, 10923 bp, Artificial Sequence
  derived and/or modified sequence
attcatttcctgagaactgcagagagccgctgagaggctctgcgtgtgcgtgtgcgcgggtgacgccgtgtgtgtgcgagtgtgtgtgtgtgtgtgcgcgcgcgcgtgtgagagagagaaagggagagagagagggggactctgtgtgagggaaagaaaacaatttctcctgctctgcagcttctgttcaggatcaatgtgactctaagaacaaatggatgaatgaatatccatatgaagagaaaaacaataaagaatatcaacacctttgagaacagaatgttaatgcttgatgggatgccggcagtcagagtcaaaacagagcttttggaatctgaacaagggtctccaaacgtccacaactatcccgatatggaagccgttcccctgttgctaaataatgtgaaaggggagcccccggaggactcgttatctgtagatcacttccaaacacaaactgagccagtggacttgtcaataaacaaagccaggacgtcccctactgccgtttcatcctccccagtttccatgacagcatctgcctcctcaccttcttcaacttcaacctcttcatcgtcttctagtcgtctagcctcatccccaactgttatcacatcagtatcttcagcgtcatcttcgtcaacagtattaactccagggccccttgtggcctctgcatctggtgttggaggccagcagtttttgcacattatccatcccgtaccgccttcaagtcccatgaatttacagtctaacaaactgagtcatgttcaccgcatccccgtggtggtacagtcggtgcctgttgtctacacagctgtaaggtcacctggaaatgtgaacaacactattgtcgtgccgcttttggaggatgggagaggccatggcaaagcacaaatggacccccgaggcctatctcccagacaaagtaaaagtgacagtgatgatgatgacctgccaaatgtgaccttagatagcgttaatgaaactggatctacggccctttccatagccagagcagtacaagaggtacatccgtccccagtatcaagggtccggggcaatcgaatgaataatcaaaagtttccttgttcaatttcaccatttagtattgagagcacaagacgccagagacggtctgaatccccagactccagaaaacggcgtatccacagatgtgattttgagggatgcaacaaagtgtacacaaaaagttctcacctgaaggctcaccggaggacacatacaggagagaaaccttacaagtgtacctgggaaggctgcacctggaagttcgctcgttcagatgaactgacgaggcattaccgcaaacatacgggagtgaagccattcaagtgcgcggactgtgatcgcagcttttcccggtcagatcatttggccctgcaccgccggaggcatatgttggtgtgaggaatgctacctgtccagctgagcgtaagagctggatctcttagcggcacccaattcagcagggctgaatccccttcacagtgttaacacaaaagggcatcaccatcccacgatgtctgaaaccagagcaggaaaaagaaggcacacttcttttggtctgaaggtaacccccatcatgactagacgagaaccgtctttacccgggcctgggagctcagtgacataaatgctgaagagacaggcattgttttccgtgctgtgtcctctgccatttaaagatgtttgtagcttgtacattttctgagctgtcagacattttgttattgataccttaaaggtcacctaccacaaattgatggctagagcaagaccttttaaatttggatgaatctcccatcatcccatcccttaacccctttttacagaaattttagttacaatctgagtaagctagaacacacatccaatctgttaccagcaagcagcatgaaagtagaaacgaagaagcagatggagaggtcccattacctgcaaagaaagggcactcaggcagccctttgcaatcgcgatggcagccactagatatcactctcaacttgtcattctgccatgccctgaagaaaaccaacattgaatctttcatttgtttgtcgttgattgtttttgttttgtttcgattctgttttgttcatctgttcgagcagaggggcagttgaagtctcgtcctggtctctgccctggcatggactggcacagaggtgttctgtagttgaataggaagagcctgtctaaaaaactactgccccacttcaaattgcagtgttctgtcacctaggcatcatctcttcctgcccctagtatttgattacaaggaaccaggggaaaaaaactttcttagacacactggcaccaaggtaagaggtggggctgcccaggcaaagtcagtgaacatgaaaactcagacaaagcagagatggaaataatgcgcctcttgaggagaaaagcaataatgaataaaaggactttcctacaataacttcactgaggactcacgttaccaattttcatacttactaaagggattgtaaaaaacaccccagcattttaggtgtcttggttccatttacagcactgaggtaatctttctgctgtttgttgtcctgcttggttgagtaccacaattaaagattatgctccccttttcttgtttgaaaacagttatttggtgactagaaaggcaagggaggcatagccgggaattaactcttcggttaatgggtcagttctccttggaactgaatcagtggaaagagaatgcttcccatagaaagcccgacatggtgctagtttcctctcttggagagccaaggataagtgactctccaataggttcttctataccgatttcattttctaaactgtatcaggacccaggtgtcctgcattggcatctgcagggatattgaacccactcatcctgtgcagaggatgagaggaaggtgttagttccatcagccccataaaattatgaacctttttgcaactaggaacatatacagtaaacaagcaatacatcaccaacgagcattctttcagaaaaattaccatatttttgtccccaccacaagctgggtttttttccagctttctgtggctgaggggctggtgagattttttgttgttattgttgttgttgctagaattttttatagcttagatataaaaggtctccaacaaagacctttgcaatatattttaattacaaacacttgattttgggaattgcacatattaacctcacaatattactagctcatttttaaatgtctggacattctgaaataatttccggttacagaattaccctttttaggatcatcttctaattcagataatcttattctgatgaagcgagaactatgaacgttgaaacaaggacaatttgtgttggatggtattcaaaaggaattttttaaaacattaagcaacagtgtaatgattttcaggtcaaattatggcttcacaaatatgtgctctatattgtctgccaggtctcaaaaattcatcaagcaatttccctccaacaagggctgcagttctagtgataaatagcatctttagctgcacagtctactactcatcaaccagtgggttttttttagcacctggaaagtttttttgtactatatgcaactcctacttcacattgcctgtgaccattcagaatagaaaaaggtctgttgatgcatgccagtgctggttactagtcagtgacagagaacacagagagggacaaacacagccatgaaccccctggcactagtaccagcacctagttggcaagtagtgggtgcatctctcaagtgaagtgtagatttgtatttagtcctgcttgctctcataaaaagagccagttcttttctctgctgaaagatgtcttgagagtattacaggtagacttggtttttagaattcataaaactgacaggcaggggaatcttcctgagtgacagcttggtttaaatttagcacagaactagatgagttgcacttttctaataacataggatggatttggggaagggaacattttccctcatcctctgaaagtggaaaccagactgagatggtaagttaactgataaaacctgtcagcattccatcattttccccttttgacgtatcagtacttctaagaagggatctaagcacaattaagtgaattgagtccctggtctagcctcaggaactgaaacttctttggggcttgtcttgagacgtggcaaattctccttggtgagttttctaaaagtatttccccatggaaaggagaaagtggtttgggacagaaagaaatggaatgtcttcagtcatggaagagcctccatttcatctcatgtccatttctagcctctttcaaaaagcacagtgcatcatgagcaacagaaaagcagtagaatcctaaaggacataacagttgttccgtaactagaagcattctttgattttaaatttgaagctgttcagtttgcagctggggatatgtgcatggttgggaacttatacacatagagccattaactacttaagcagctgcagtagacctgattttctgtttgcagtatagagattgatttcaagggagttacattatttgaaaagttatgactttcagcctttgaggttttaagaatcccttttcatggtctgatcttaagttgtttgaaaaaagattcacgcttctgcatccacctctgccctcattctgtcaattgtgtgtggactctgagaagcctgcttgataacttgtcttaagttctattaaggcagttagactgagatttctaatgacttcaccataaagattatacttctgcctggcgtcgtttctataaaacactataggacatttgttttcaaaagcagttgagtaacagcaacataaaccacattttttaaaaaaatgagcacttttcattcacttgaaagcttaagtgggaaaaaggaagatgattgtcaggggaaaaacttacaaaatgctacagtgtttacaaatgccagttccaggtgattagaaaggccgttttcattatggttcagatttggaatagcttatgcaaagattgtgttcatttttatacaattctttttaactttaaattgccatctgtgttttaaacataattctgcactttggaatcagttcattagaatgataacatttatatggataaagatgcagtattccttattctgtacttgatttattatacttaccaaagctgcaactgaataaatctggtgaggtgaggccttcaaaatgtattaatacgcctttgttatgttgttatgactgcttagaaatgtagccatgatgttgttctaaagatgtcttaacatttatagtgaggattgacagaaattaagcagtgttaagaataccagcatccatgttacagtctgcgtataagggactgaatgtgaggtaactcttatgaatcataataggcccagaaagccttaatattcatagttcataatccagtctcagattttgctcttcaatgttgcctgtaaacttagcaggtaaatgtattctagtataaaacatcattgaccaaatctcttcctttagtttttctgaggtagtgcatcccattaaaaaagtctcttcaattagatttggctttagtttagaaaggggtttggtaagtcatgtcttccatatgacatttctactcatccccacactgccttccacttaacctgtacagacagccccaacacatgcacatgtgtgtacacaactgtatatgcagcagccagtgggctaacaaatatcagcaaagaacttttttaaaaagaatttgtaataatccgtgctgtctagaaatgtgagttacttaccttattaggaaaccggcttataatactatatatgactctgcctgcattttatagttaagaaatgtacataaaaattgctatattttcacagtttcattataatgtctgtttagtaacccatgtccactgatactttaaatatgctaattactgagcaattgcaatagaaatccagattttcataagaaaatgaaatagaaggatactgcatctttaaaaaatagagtgaagatattttactgtattcgtaacatatgtgatagtggaaaaagtattttcaaactcacaaattttacagaggttgtaaatagtttgatgaagtatgttgggaaagagagcttctagttttcatcacaataaaaagaaaaaacttgttcagatatgccttgtatatcttacacacaatgagtgaaattgccatgggaactctgtccaactttgtcagagcatgctcttcgtgttctgttcaaaatagagtggccacttgtcatggtttagccaggatggtttaaaatataatgaagtcattttaagttgcagacaactgattccaaactagtaatgtcttttcctgaaaagggcaaaacagctgcacaggattttgcttgtactaaagaggagcatcttacaattgttctcttttctcagttatctccctcctcaacagagtgtgaacaaccatacaggtgtttattcttgttttattccagggagactgcttttaggtataactacatgttgacaagattaagtgctgtggatatggccacgtgttaaaggaatctatactcgcaataggaataagctaatgcccattttcagaaataaattaaatgctgaaagtgcctgtcagtaaaccttatgaccaatgagatattcctatacttttacacagcaataattcttaataagactgggttttttcctgcacatgtgaacacacacacacatacacacagagagagtaaatacatacacatagtaaatcaaatctgttcacatgcccacaaaaaacgcttttatagctttcaaatatacctaatcttgtttacattaacatttcttaatttgatctttctaacttgcagaacgttaagaacacaaatctgaacattaagtttatcttcagtgaacactattgcatatggtaattataatttccagataaaaagttgactgtcatttgccccaaacttatgaaacagtatgtatgattcaaaaagttttgctcagttaaaaacaccaatttatttggcgcaaaagactgaaggatatttgtttgcttgttcattttatccactcatatcaaacgcacaaattcatctttacatttcttcattcccctttcccctaatatttcctattatcatcttaagaatcattttggaatgaatattgacagaatcatttctccccaaaaagtctgttgaagtaccactgacacttagtaagcctagcctttaaccatctttgcagttagtcctaaaaattaccagatgcacattcagaagctcacaggttttttcctgtaattactgtactgctaaaagtggagtcatggatagaaatatacaatgagactatatgaatagacatgaaccctggaaattctccaaccctgccatctcagagcacaaattcacccaaacaagctactgaggctatcagtaaaattatactcatggagagtcacacatcgggtaagggcaattttaaaagtaggactgtgattaaacattcaggctttagacttccatgatggactcagaccacaggcctcaaaaaaacatccactgttttctcctcccaatgttagaaagaagaaaagggagacggaaatgtaccaggataagggggtaaaataaccaattaagtgtcaaaggaaagctgctgggttccttaatctcactgaagtcaagtcttctgactgggcttcttaccatgtgttgtctgaaaaaactaaagtaccttgaaaggttacacattcagcaaaccatgaagataatagctattctttattaaacactgtgtgccaagcaatagactaggcaatttttagatacgttacctgcaacctgtacaacatttctacactttatggatgggaaacggagacatgggaagtgtggctgagttgttcatggatgtagaaatagtaaacggcagagtaggaaagtgaaaccgcctatctctgacctggaggtctgcctgtatctttcccactccaccacactgcacgtgggtgtcccgaaaccaccttcccagattcctgactctcagtaattttattatggacaacatgcatgagtagtcatcatatttttcaagtgaaatatcgggacatgatataacacatgacttaacaatggtactgaatatttgaaatcaggcctttcccggaaaatcatgcatgaaggatcattataaacaaacaatagcaaccagttgtctccccgaacttgtcacttttctcataaatgtctggcctggagctccaaaatcatccaaatacttagtagcattttagcctgagtacactttctcagttcctcaactctttgtatacctttccaccaatatagacattctagaatctgcttcagatgcatttgaaattttcacccccatggaactagtgattaatatcagagcccactcttgcagttggtaatggggtggcaatcaaacgttcagatgatgataaaggagagataatggataattctttttcagagttctcacttaacagctctgttgtggaatgttttaaatagtcttataaataatttgtttatagtattgttgttagtttaattgaattttatgtaagaagctgtccaacatcagagaaatgaaattcctcccactttctgtgtagaacaaggtctctgacagtattgattcatggaagtactaatggacttagaaaacattaagagaatgtcatttctcatagtgtttctgtttctgaaaatgaatctcctgaattattatctttctccctgttacttggctggggaaagagatagaagctgtataaacaaattctcttccatgctcaaagcaagtgttccatgtgcacaacctgctgcagactggggcccttctcagttaattgggtttcacaagcaataatttctccacaacaaaaaccacaacttgaagtgagttgaaaagagatcaatagtggaaacagtcgcctcagtactttttctttctggatttcatctctagaaatttgaagtgtttgagacagagtccaccctttgtgcaaggcgagaaccaatgaatggactccttgtgtgaattattgcatcttcttccaaagcaggttcatcaagactttcacagagattcatttttgttgagaagtaagggttaataggaggatagaatttggatccaaatctagtgataaaagtgtccaagcaatcaaaaagtaagatattttagggacataccaacatcttccctttctgctaatttcatgctccaaagatatggcaaaaaaaaaaatcataaaaagtgcttttgccctacttgtgttctagttttcccatggcagaattttgtaattacatccagaatatagtgtatattttgttcctcaaactttattacattggatggatattgttgaactggggcactggtgcctatattcaaggctctttcctatcaacgtgtctgtccacgatttgttgtgtttaaagcttcattttgaaaaatcactgtccccctgtggggtagtgactgtattgttttgttcatgtctatgtgggacacattgcatcacatggcaaaccaactctctgtggatgtgagataagtacttataaaaccagcttgaaaacatcgtcttatgtattatgtcatcctgcatcataatgcaattatgtgtatcataacatgctcatttaaaaaaagagaaaccagcaaattcatgtttgtccatagaagaatgtactcagaactttgtgttgtgaaacgatgagaacagaccacctttaagatacccacctgccacttaaaatgacttagttataattagtagtagtctagacgttgttcttggtgtgtgggggtcaattctaacgtcatgttcttttgaataaatctctcagtcatatttgaaaaaaaaatacatgggaataaagaaaaatatcatctttggccaaatcaagcaggcatcttttttcttttccttgacgtttagctcattatacgtggtgattggatcacgagatctgtccgtgtgaaaatacagaaacatcctttagtttacaaaacagttattctaggcttgaagcctctgaacagcaaattgaatagatgggctgcatctgatttgctttatggatgtaattttacaaaacactcttgggtctctgaccccagggagttaagagtgcccagaggaggtcctacacattaaaggataaagccccccagtgatgctggcaagcaaatgtgttgagttcttaaatcttcatttggttttctgttcaggattttaattgcaaatgaatttatttctccagtttatctaaagacctaatttcccaatagtttcctctgcatttatatactctgtagtgtttaggcaaccctgttataagtttattaatattatgtaagtgttgttcttgtatttatgtatagtgtatgtattgtaaatatactcagagcttttttccttttactgtaaaatggtgatttttttgccctatgataatgtaaagggagaccctcctaatgagattctctcagaggatgattattccagtctattctcagagatttaaatgaacaagtgttattgtttttaatggtgtctcagacatattctgttggtgcattgcttttctgtattcaactttcctatgaattgagctgtgaactgaaatagagtttaaacctttaactgtatgcatttgtataattatctgaatgaaggcatgaaggttaaataaagcattttgtatggaacaaaactccctaactgactcagacactttggaaatcatagttattaaccattctaattaaacctttgttatgaaaagttttaaaaaaaaaaaaaaa

SEQ ID NO: 329341 - DNA, 1209 bp, Artificial Sequence
  derived and/or modified sequence
atttcggttcaccttatgcggaagcacgtgaagaatattaatactttcgaaaacagaatgctgatgctggacgggatgcccgcagttagggtgaagacggagcttctggagagtgagcagggttcaccgaacgtgcataactacccagacatggaggctgtccccctgctacttaataacgtcaaaggagagccacctgaagattctctttcggttgatcattttcagacccaaaccgagcccgtggacctgagcatcaataaggctcggacctcccccacggccgttagctcctcacccgtcagtatgacagcgtctgcctctagcccaagcagtacttccacttcttcatctagctcatcgcgacttgcgagctctcctactgtcatcaccagtgtctcctccgcctcctcgtcatctactgtactgacccccgggccgctggtggcttcagcgagtggggtgggcggccagcagttccttcatataatacatcccgtgccgcctagcagcccaatgaatcttcaaagtaataaattgagccatgtccatagaatccctgtagtcgttcagtccgtaccagtggtctataccgctgtgagatccccgggcaatgtgaacaatacaattgtcgtcccactcctggaagacggacgcggccacggtaaggcccagatggacccgcgcggcttgagtccccgccagtccaagtcagactccgatgatgacgatttacctaacgtaactctggattcagtgaatgagacgggttcgaccgccctcagtatagctcgtgcggtgcaggaggtccatccatcccccgtgtccagggtccggggcaatagaatgaataatcagaagttcccctgtagcatttccccattctctattgagagcaccaggcggcagcgtcgctccgaatctccagacagccggaagcgacgtatacacagatgcgatttcgagggctgtaacaaggtttacaccaagtcctcacacctgaaggcacaccggcggacccacacgggcgagaagccctacaagtgcacgtgggaagggtgtacgtggaagtttgcccgcagcgacgagttgacaaggcactatcggaaacacacaggggtgaagccctttaagtgtgccgactgtgatcggtcattctcacgctcagaccatctggcattacacaggagacgccacatgcttgtgtag

SEQ ID NO: 329342 - DNA, 1209 bp, Artificial Sequence
  derived and/or modified sequence
atgaacatacatatgaagaggaagacgattaagaacattaatacattcgaaaaccgaatgttaatgttggatggaatgcctgcggttcgcgtgaagacagagctgctagaaagcgagcaggggagccctaacgtgcataactatccagatatggaagccgtccccttactgttgaataatgtaaagggggagcctccagaagattctctgtcagttgatcactttcagacccagactgaaccagtagacctttccataaataaagcgaggacctcccccactgccgtgtcctccagcccggtctctatgaccgcatctgccagcagcccttcgtccaccagtacctcaagctcatcctccagccgactagcctcatcgcctacagtaataacaagcgtgagctctgctagttcgtcctccactgtgctgactcctggccctttggtggcatcggcctccggagtcggcgggcagcaattcctgcacataatccacccagtaccaccttcttctccaatgaatctccaaagtaacaaactctcccacgtgcatcgcatccccgtggttgtccagagtgtgcctgtagtctacacggccgtgagaagtccaggaaacgtcaataacacaattgtggtacctttgctcgaggacggtcgcggccacggtaaagcccagatggacccacggggtctcagtccaaggcagtccaagtccgactcagatgacgacgacctgcctaacgtgaccttagatagcgtgaacgaaacgggctccacagctttgtcaatcgcccgggcggtccaagaagtgcatccgagccccgtctcacgggtgcggggcaatcgcatgaataatcaaaaatttccttgttctatcagcccattttccatcgagtccacccggcggcagagaagatccgagtcccctgatagccgcaagaggagaatacataggtgcgactttgaggggtgtaataaagtgtatacaaaatcctcacacctgaaggcccaccgcaggacgcacaccggagaaaagccatacaagtgcacttgggaaggctgtacatggaaattcgcacggagcgacgagctcacaagacactacaggaagcacacaggagtaaaaccgtttaagtgtgccgactgtgaccgatccttcagcaggtctgaccatcttgctcttcaccggaggcgccatatgctggtctag

SEQ ID NO: 329343 - DNA, 1209 bp, Artificial Sequence
  derived and/or modified sequence
atgaacatccacatgaagaggaaaactatcaaaaacatcaacacgttcgagaatcggatgcttatgctggatggcatgcctgcagttcgagtgaagactgaacttctggagagtgaacagggatctcccaatgtgcacaattatcccgacatggaggctgtaccactgctgctgaataatgtgaagggggagcccccagaagacagtttaagcgtagaccatttccagactcaaaccgaacctgtggacctaagcatcaacaaggctcgaacgtctcctacggcagtgtcctctagccctgtttccatgaccgcatctgcaagctcgcccagttctacttcaactagttcctcctcttcctcccgtcttgccagttcgccgactgtaatcacttctgtgtcctcagctagcagctcgtccacagtactgactccggggcccttggtcgcttcagccagtggcgtggggggccagcagtttttgcatattatccaccctgtccctccttcctcaccgatgaacctgcagtccaacaagctgtcccacgtgcatagaatcccagttgtggtgcagagcgttcctgtagtctacaccgctgtccggtcccccgggaatgtcaacaatacaatcgtggtacccctgcttgaggatggtagaggacacgggaaggcacagatggaccccagaggcctgagccccaggcaatctaagtccgattccgatgatgacgacctacccaatgtcactctggattcagtaaatgagacaggaagcacagccctatccattgctagagctgtacaggaagtgcaccctagccccgtgagcagggtccgaggaaaccgcatgaacaatcagaaattcccgtgcagtatatctcccttctccatcgagagcacaaggagacagcgccgatctgaaagtcccgactcccgcaagcgcaggattcacagatgcgattttgaaggctgtaataaggtctatactaaatcctcacatctaaaggcccacaggagaacacatacgggagaaaaaccctacaagtgcacctgggaaggctgtacatggaaatttgcaagatctgacgaattgacacgtcactatcgcaaacacactggcgtgaaaccattcaagtgcgctgattgcgacaggagcttctcgagatccgaccatttggccttgcaccgcagaaggcatatgctggtctag

SEQ ID NO: 329344 - DNA, 1483 bp, Artificial Sequence
  derived and/or modified sequence
atttcagttcatttgatgagaaaacatgtcaaaaatatcaacacctttgagaacagaatgttaatgcttgatgggatgccggcagtcagagtcaaaacagagcttttggaatctgaacaagggtctccaaacgtccacaactatcccgatatggaagccgttcccctgttgctaaataatgtgaaaggggagcccccggaggactcgttatctgtagatcacttccaaacacaaactgagccagtggacttgtcaataaacaaagccaggacgtcccctactgccgtttcatcctccccagtttccatgacagcatctgcctcctcaccttcttcaacttcaacctcttcatcgtcttctagtcgtctagcctcatccccaactgttatcacatcagtatcttcagcgtcatcttcgtcaacagtattaactccagggccccttgtggcctctgcatctggtgttggaggccagcagtttttgcacattatccatcccgtaccgccttcaagtcccatgaatttacagtctaacaaactgagtcatgttcaccgcatccccgtggtggtacagtcggtgcctgttgtctacacagctgtaaggtcacctggaaatgtgaacaacactattgtcgtgccgcttttggaggatgggagaggccatggcaaagcacaaatggacccccgaggcctatctcccagacaaagtaaaagtgacagtgatgatgatgacctgccaaatgtgaccttagatagcgttaatgaaactggatctacggccctttccatagccagagcagtacaagaggtacatccgtccccagtatcaagggtccggggcaatcgaatgaataatcaaaagtttccttgttcaatttcaccatttagtattgagagcacaagacgccagagacggtctgaatccccagactccagaaaacggcgtatccacagatgtgattttgagggatgcaacaaagtgtacacaaaaagttctcacctgaaggctcaccggaggacacatacaggagagaaaccttacaagtgtacctgggaaggctgcacctggaagttcgctcgttcagatgaactgacgaggcattaccgcaaacatacgggagtgaagccattcaagtgcgcggactgtgatcgcagcttttcccggtcagatcatttggccctgcaccgccggaggcatatgttggtgtgaggaatgctacctgtccagctgagcgtaagagctggatctcttagcggcacccaattcagcagggctgaatccccttcacagtgttaacacaaaagggcatcaccatcccacgatgtctgaaaccagagcaggaaaaagaaggcacacttcttttggtctgaaggtaacccccatcatgactagacgagaaccgtctttacccgggcctgggagctcagtgacataaatgctgaagagacaggcattgttttccgtgctgtgtcctctgccattt

SEQ ID NO: 329345 - DNA, 1617 bp, Artificial Sequence
  derived and/or modified sequence
ggggctttgtttctggggaggaggacccggagctcttttgtttgggggtttcttgttttcggccccccccctcacagcaccccaccccaccccaccccaagcgcctctccggtttcctgagctgcgggctgcgagggaggagaagcggcgtcctgcaaccccctcggctgggccccggggtaattcgatgcgggcctggcgaggctccccacactagaccggggctcgcaactcggcagcctccacccaccggcccaccctacatttagcgcatcatgtgatccgggatcaatgtgactctaagaacaaatggatgaatgaatatccatatgaagagaaaaacaataaagaatatcaacacctttgagaacagaatgttaatgcttgatgggatgccggcagtcagagtcaaaacagagcttttggaatctgaacaagggtctccaaacgtccacaactatcccgatatggaagccgttcccctgttgctaaataatgtgaaaggggagcccccggaggactcgttatctgtagatcacttccaaacacaaactgagccagtggacttgtcaataaacaaagccaggacgtcccctactgccgtttcatcctccccagtttccatgacagcatctgcctcctcaccttcttcaacttcaacctcttcatcgtcttctagtcgtctagcctcatccccaactgttatcacatcagtatcttcagcgtcatcttcgtcaacagtattaactccagggccccttgtggcctctgcatctggtgttggaggccagcagtttttgcacattatccatcccgtaccgccttcaagtcccatgaatttacagtctaacaaactgagtcatgttcaccgcatccccgtggtggtacagtcggtgcctgttgtctacacagctgtaaggtcacctggaaatgtgaacaacactattgtcgtgccgcttttggaggatgggagaggccatggcaaagcacaaatggacccccgaggcctatctcccagacaaagtaaaagtgacagtgatgatgatgacctgccaaatgtgaccttagatagcgttaatgaaactggatctacggccctttccatagccagagcagtacaagaggtacatccgtccccagtatcaagggtccggggcaatcgaatgaataatcaaaagtttccttgttcaatttcaccatttagtattgagagcacaagacgccagagacggtctgaatccccagactccagaaaacggcgtatccacagatgtgattttgagggatgcaacaaagtgtacacaaaaagttctcacctgaaggctcaccggaggacacatacaggagagaaaccttacaagtgtacctgggaaggctgcacctggaagttcgctcgttcagatgaactgacgaggcattaccgcaaacatacgggagtgaagccattcaagtgcgcggactgtgatcgcagcttttcccggtcagatcatttggccctgcaccgccggaggcatatgttggtgtgaggaatgctacctgtccagctgagcgtaagagctggatctcttagcggcacccaattcagcagggctgaatccccttcacagtgttaacaca

SEQ ID NO: 329346 - DNA, 10637 bp, Artificial Sequence
  derived and/or modified sequence
aatgtgactctaagaacaaatggatgaatgaatatccatatgaagagaaaaacaataaagaatatcaacacctttgagaacagaatgttaatgcttgatgggatgccggcagtcagagtcaaaacagagcttttggaatctgaacaagggtctccaaacgtccacaactatcccgatatggaagccgttcccctgttgctaaataatgtgaaaggggagcccccggaggactcgttatctgtagatcacttccaaacacaaactgagccagtggacttgtcaataaacaaagccaggacgtcccctactgccgtttcatcctccccagtttccatgacagcatctgcctcctcaccttcttcaacttcaacctcttcatcgtcttctagtcgtctagcctcatccccaactgttatcacatcagtatcttcagcgtcatcttcgtcaacagtattaactccagggccccttgtggcctctgcatctggtgttggaggccagcagtttttgcacattatccatcccgtaccgccttcaagtcccatgaatttacagtctaacaaactgagtcatgttcaccgcatccccgtggtggtacagtcggtgcctgttgtctacacagctgtaaggtcacctggaaatgtgaacaacactattgtcgtgccgcttttggaggatgggagaggccatggcaaagcacaaatggacccccgaggcctatctcccagacaaagtaaaagtgacagtgatgatgatgacctgccaaatgtgaccttagatagcgttaatgaaactggatctacggccctttccatagccagagcagtacaagaggtacatccgtccccagtatcaagggtccggggcaatcgaatgaataatcaaaagtttccttgttcaatttcaccatttagtattgagagcacaagacgccagagacggtctgaatccccagactccagaaaacggcgtatccacagatgtgattttgagggatgcaacaaagtgtacacaaaaagttctcacctgaaggctcaccggaggacacatacaggagagaaaccttacaagtgtacctgggaaggctgcacctggaagttcgctcgttcagatgaactgacgaggcattaccgcaaacatacgggagtgaagccattcaagtgcgcggactgtgatcgcagcttttcccggtcagatcatttggccctgcaccgccggaggcatatgttggtgtgaggaatgctacctgtccagctgagcgtaagagctggatctcttagcggcacccaattcagcagggctgaatccccttcacagtgttaacacaaaagggcatcaccatcccacgatgtctgaaaccagagcaggaaaaagaaggcacacttcttttggtctgaaggtaacccccatcatgactagacgagaaccgtctttacccgggcctgggagctcagtgacataaatgctgaagagacaggcattgttttccgtgctgtgtcctctgccatttaaagatgtttgtagcttgtacattttctgagctgtcagacattttgttattgataccttaaaggtcacctaccacaaattgatggctagagcaagaccttttaaatttggatgaatctcccatcatcccatcccttaacccctttttacagaaattttagttacaatctgagtaagctagaacacacatccaatctgttaccagcaagcagcatgaaagtagaaacgaagaagcagatggagaggtcccattacctgcaaagaaagggcactcaggcagccctttgcaatcgcgatggcagccactagatatcactctcaacttgtcattctgccatgccctgaagaaaaccaacattgaatctttcatttgtttgtcgttgattgtttttgttttgtttcgattctgttttgttcatctgttcgagcagaggggcagttgaagtctcgtcctggtctctgccctggcatggactggcacagaggtgttctgtagttgaataggaagagcctgtctaaaaaactactgccccacttcaaattgcagtgttctgtcacctaggcatcatctcttcctgcccctagtatttgattacaaggaaccaggggaaaaaaactttcttagacacactggcaccaaggtaagaggtggggctgcccaggcaaagtcagtgaacatgaaaactcagacaaagcagagatggaaataatgcgcctcttgaggagaaaagcaataatgaataaaaggactttcctacaataacttcactgaggactcacgttaccaattttcatacttactaaagggattgtaaaaaacaccccagcattttaggtgtcttggttccatttacagcactgaggtaatctttctgctgtttgttgtcctgcttggttgagtaccacaattaaagattatgctccccttttcttgtttgaaaacagttatttggtgactagaaaggcaagggaggcatagccgggaattaactcttcggttaatgggtcagttctccttggaactgaatcagtggaaagagaatgcttcccatagaaagcccgacatggtgctagtttcctctcttggagagccaaggataagtgactctccaataggttcttctataccgatttcattttctaaactgtatcaggacccaggtgtcctgcattggcatctgcagggatattgaacccactcatcctgtgcagaggatgagaggaaggtgttagttccatcagccccataaaattatgaacctttttgcaactaggaacatatacagtaaacaagcaatacatcaccaacgagcattctttcagaaaaattaccatatttttgtccccaccacaagctgggtttttttccagctttctgtggctgaggggctggtgagattttttgttgttattgttgttgttgctagaattttttatagcttagatataaaaggtctccaacaaagacctttgcaatatattttaattacaaacacttgattttgggaattgcacatattaacctcacaatattactagctcatttttaaatgtctggacattctgaaataatttccggttacagaattaccctttttaggatcatcttctaattcagataatcttattctgatgaagcgagaactatgaacgttgaaacaaggacaatttgtgttggatggtattcaaaaggaattttttaaaacattaagcaacagtgtaatgattttcaggtcaaattatggcttcacaaatatgtgctctatattgtctgccaggtctcaaaaattcatcaagcaatttccctccaacaagggctgcagttctagtgataaatagcatctttagctgcacagtctactactcatcaaccagtgggttttttttagcacctggaaagtttttttgtactatatgcaactcctacttcacattgcctgtgaccattcagaatagaaaaaggtctgttgatgcatgccagtgctggttactagtcagtgacagagaacacagagagggacaaacacagccatgaaccccctggcactagtaccagcacctagttggcaagtagtgggtgcatctctcaagtgaagtgtagatttgtatttagtcctgcttgctctcataaaaagagccagttcttttctctgctgaaagatgtcttgagagtattacaggtagacttggtttttagaattcataaaactgacaggcaggggaatcttcctgagtgacagcttggtttaaatttagcacagaactagatgagttgcacttttctaataacataggatggatttggggaagggaacattttccctcatcctctgaaagtggaaaccagactgagatggtaagttaactgataaaacctgtcagcattccatcattttccccttttgacgtatcagtacttctaagaagggatctaagcacaattaagtgaattgagtccctggtctagcctcaggaactgaaacttctttggggcttgtcttgagacgtggcaaattctccttggtgagttttctaaaagtatttccccatggaaaggagaaagtggtttgggacagaaagaaatggaatgtcttcagtcatggaagagcctccatttcatctcatgtccatttctagcctctttcaaaaagcacagtgcatcatgagcaacagaaaagcagtagaatcctaaaggacataacagttgttccgtaactagaagcattctttgattttaaatttgaagctgttcagtttgcagctggggatatgtgcatggttgggaacttatacacatagagccattaactacttaagcagctgcagtagacctgattttctgtttgcagtatagagattgatttcaagggagttacattatttgaaaagttatgactttcagcctttgaggttttaagaatcccttttcatggtctgatcttaagttgtttgaaaaaagattcacgcttctgcatccacctctgccctcattctgtcaattgtgtgtggactctgagaagcctgcttgataacttgtcttaagttctattaaggcagttagactgagatttctaatgacttcaccataaagattatacttctgcctggcgtcgtttctataaaacactataggacatttgttttcaaaagcagttgagtaacagcaacataaaccacattttttaaaaaaatgagcacttttcattcacttgaaagcttaagtgggaaaaaggaagatgattgtcaggggaaaaacttacaaaatgctacagtgtttacaaatgccagttccaggtgattagaaaggccgttttcattatggttcagatttggaatagcttatgcaaagattgtgttcatttttatacaattctttttaactttaaattgccatctgtgttttaaacataattctgcactttggaatcagttcattagaatgataacatttatatggataaagatgcagtattccttattctgtacttgatttattatacttaccaaagctgcaactgaataaatctggtgaggtgaggccttcaaaatgtattaatacgcctttgttatgttgttatgactgcttagaaatgtagccatgatgttgttctaaagatgtcttaacatttatagtgaggattgacagaaattaagcagtgttaagaataccagcatccatgttacagtctgcgtataagggactgaatgtgaggtaactcttatgaatcataataggcccagaaagccttaatattcatagttcataatccagtctcagattttgctcttcaatgttgcctgtaaacttagcaggtaaatgtattctagtataaaacatcattgaccaaatctcttcctttagtttttctgaggtagtgcatcccattaaaaaagtctcttcaattagatttggctttagtttagaaaggggtttggtaagtcatgtcttccatatgacatttctactcatccccacactgccttccacttaacctgtacagacagccccaacacatgcacatgtgtgtacacaactgtatatgcagcagccagtgggctaacaaatatcagcaaagaacttttttaaaaagaatttgtaataatccgtgctgtctagaaatgtgagttacttaccttattaggaaaccggcttataatactatatatgactctgcctgcattttatagttaagaaatgtacataaaaattgctatattttcacagtttcattataatgtctgtttagtaacccatgtccactgatactttaaatatgctaattactgagcaattgcaatagaaatccagattttcataagaaaatgaaatagaaggatactgcatctttaaaaaatagagtgaagatattttactgtattcgtaacatatgtgatagtggaaaaagtattttcaaactcacaaattttacagaggttgtaaatagtttgatgaagtatgttgggaaagagagcttctagttttcatcacaataaaaagaaaaaacttgttcagatatgccttgtatatcttacacacaatgagtgaaattgccatgggaactctgtccaactttgtcagagcatgctcttcgtgttctgttcaaaatagagtggccacttgtcatggtttagccaggatggtttaaaatataatgaagtcattttaagttgcagacaactgattccaaactagtaatgtcttttcctgaaaagggcaaaacagctgcacaggattttgcttgtactaaagaggagcatcttacaattgttctcttttctcagttatctccctcctcaacagagtgtgaacaaccatacaggtgtttattcttgttttattccagggagactgcttttaggtataactacatgttgacaagattaagtgctgtggatatggccacgtgttaaaggaatctatactcgcaataggaataagctaatgcccattttcagaaataaattaaatgctgaaagtgcctgtcagtaaaccttatgaccaatgagatattcctatacttttacacagcaataattcttaataagactgggttttttcctgcacatgtgaacacacacacacatacacacagagagagtaaatacatacacatagtaaatcaaatctgttcacatgcccacaaaaaacgcttttatagctttcaaatatacctaatcttgtttacattaacatttcttaatttgatctttctaacttgcagaacgttaagaacacaaatctgaacattaagtttatcttcagtgaacactattgcatatggtaattataatttccagataaaaagttgactgtcatttgccccaaacttatgaaacagtatgtatgattcaaaaagttttgctcagttaaaaacaccaatttatttggcgcaaaagactgaaggatatttgtttgcttgttcattttatccactcatatcaaacgcacaaattcatctttacatttcttcattcccctttcccctaatatttcctattatcatcttaagaatcattttggaatgaatattgacagaatcatttctccccaaaaagtctgttgaagtaccactgacacttagtaagcctagcctttaaccatctttgcagttagtcctaaaaattaccagatgcacattcagaagctcacaggttttttcctgtaattactgtactgctaaaagtggagtcatggatagaaatatacaatgagactatatgaatagacatgaaccctggaaattctccaaccctgccatctcagagcacaaattcacccaaacaagctactgaggctatcagtaaaattatactcatggagagtcacacatcgggtaagggcaattttaaaagtaggactgtgattaaacattcaggctttagacttccatgatggactcagaccacaggcctcaaaaaaacatccactgttttctcctcccaatgttagaaagaagaaaagggagacggaaatgtaccaggataagggggtaaaataaccaattaagtgtcaaaggaaagctgctgggttccttaatctcactgaagtcaagtcttctgactgggcttcttaccatgtgttgtctgaaaaaactaaagtaccttgaaaggttacacattcagcaaaccatgaagataatagctattctttattaaacactgtgtgccaagcaatagactaggcaatttttagatacgttacctgcaacctgtacaacatttctacactttatggatgggaaacggagacatgggaagtgtggctgagttgttcatggatgtagaaatagtaaacggcagagtaggaaagtgaaaccgcctatctctgacctggaggtctgcctgtatctttcccactccaccacactgcacgtgggtgtcccgaaaccaccttcccagattcctgactctcagtaattttattatggacaacatgcatgagtagtcatcatatttttcaagtgaaatatcgggacatgatataacacatgacttaacaatggtactgaatatttgaaatcaggcctttcccggaaaatcatgcatgaaggatcattataaacaaacaatagcaaccagttgtctccccgaacttgtcacttttctcataaatgtctggcctggagctccaaaatcatccaaatacttagtagcattttagcctgagtacactttctcagttcctcaactctttgtatacctttccaccaatatagacattctagaatctgcttcagatgcatttgaaattttcacccccatggaactagtgattaatatcagagcccactcttgcagttggtaatggggtggcaatcaaacgttcagatgatgataaaggagagataatggataattctttttcagagttctcacttaacagctctgttgtggaatgttttaaatagtcttataaataatttgtttatagtattgttgttagtttaattgaattttatgtaagaagctgtccaacatcagagaaatgaaattcctcccactttctgtgtagaacaaggtctctgacagtattgattcatggaagtactaatggacttagaaaacattaagagaatgtcatttctcatagtgtttctgtttctgaaaatgaatctcctgaattattatctttctccctgttacttggctggggaaagagatagaagctgtataaacaaattctcttccatgctcaaagcaagtgttccatgtgcacaacctgctgcagactggggcccttctcagttaattgggtttcacaagcaataatttctccacaacaaaaaccacaacttgaagtgagttgaaaagagatcaatagtggaaacagtcgcctcagtactttttctttctggatttcatctctagaaatttgaagtgtttgagacagagtccaccctttgtgcaaggcgagaaccaatgaatggactccttgtgtgaattattgcatcttcttccaaagcaggttcatcaagactttcacagagattcatttttgttgagaagtaagggttaataggaggatagaatttggatccaaatctagtgataaaagtgtccaagcaatcaaaaagtaagatattttagggacataccaacatcttccctttctgctaatttcatgctccaaagatatggcaaaaaaaaaaatcataaaaagtgcttttgccctacttgtgttctagttttcccatggcagaattttgtaattacatccagaatatagtgtatattttgttcctcaaactttattacattggatggatattgttgaactggggcactggtgcctatattcaaggctctttcctatcaacgtgtctgtccacgatttgttgtgtttaaagcttcattttgaaaaatcactgtccccctgtggggtagtgactgtattgttttgttcatgtctatgtgggacacattgcatcacatggcaaaccaactctctgtggatgtgagataagtacttataaaaccagcttgaaaacatcgtcttatgtattatgtcatcctgcatcataatgcaattatgtgtatcataacatgctcatttaaaaaaagagaaaccagcaaattcatgtttgtccatagaagaatgtactcagaactttgtgttgtgaaacgatgagaacagaccacctttaagatacccacctgccacttaaaatgacttagttataattagtagtagtctagacgttgttcttggtgtgtgggggtcaattctaacgtcatgttcttttgaataaatctctcagtcatatttgaaaaaaaaatacatgggaataaagaaaaatatcatctttggccaaatcaagcaggcatcttttttcttttccttgacgtttagctcattatacgtggtgattggatcacgagatctgtccgtgtgaaaatacagaaacatcctttagtttacaaaacagttattctaggcttgaagcctctgaacagcaaattgaatagatgggctgcatctgatttgctttatggatgtaattttacaaaacactcttgggtctctgaccccagggagttaagagtgcccagaggaggtcctacacattaaaggataaagccccccagtgatgctggcaagcaaatgtgttgagttcttaaatcttcatttggttttctgttcaggattttaattgcaaatgaatttatttctccagtttatctaaagacctaatttcccaatagtttcctctgcatttatatactctgtagtgtttaggcaaccctgttataagtttattaatattatgtaagtgttgttcttgtatttatgtatagtgtatgtattgtaaatatactcagagcttttttccttttactgtaaaatggtgatttttttgccctatgataatgtaaagggagaccctcctaatgagattctctcagaggatgattattccagtctattctcagagatttaaatgaacaagtgttattgtttttaatggtgtctcagacatattctgttggtgcattgcttttctgtattcaactttcctatgaattgagctgtgaactgaaatagagtttaaacctttaactgtatgcatttgtataattatctgaatgaaggcatgaaggttaaataaagcattttgtatggaacaaaa

SEQ ID NO: 329347 - DNA, 1209 bp, Artificial Sequence
  derived and/or modified sequence
atctctgtgcacctgatgaggaagcacgtgaagaacatcaacacctttgaaaataggatgctgatgctggatggcatgcctgctgtgcgggtgaagacagagctgctggagagcgagcagggcagccccaacgtgcacaactacccagacatggaggccgtgcccctgctgctgaacaacgtgaagggggagcccccagaggacagcctgtctgtggaccacttccagacccagacagagcctgtggacctgagcatcaacaaggcccggaccagccccacagctgtgagcagcagccctgtgtccatgacagccagcgccagcagccccagcagcaccagcaccagcagcagcagcagcagccggctggccagcagccccaccgtcatcacctctgtgtcctctgccagcagcagcagcacagtgctgaccccaggccccctggtggccagcgccagcggcgtgggcggccagcagttcctgcacatcatccaccctgtgccccccagcagccccatgaacctgcagagcaacaagctgagccacgtgcaccgcatccctgtggtggtgcagagcgtgcctgtggtgtacacagctgtgcgcagccctggaaatgtgaacaacaccatcgtggtgcccctgctggaggatggccggggccacggcaaggcccagatggacccccggggcctgagcccccggcagagcaagagtgacagtgatgatgatgacctgcccaacgtgaccctggacagcgtgaatgagaccggcagcacagccctgagcatcgcccgggctgtgcaggaggtgcaccccagccctgtgtcccgggtgcggggcaacaggatgaacaaccagaagttcccctgcagcatcagccccttcagcattgagagcacccggcggcagaggagaagtgagagcccagacagcaggaagaggcgcatccaccgctgtgactttgagggctgcaacaaggtgtacaccaagagcagccacctgaaggcccacaggaggacccacactggagagaagccctacaagtgcacctgggagggctgcacctggaagtttgcccggagtgatgagctgaccaggcactacaggaagcacactggagtgaagcccttcaagtgtgccgactgtgaccgctccttcagcagaagtgaccacctggccctgcacagaagaagacacatgctggtgtag

SEQ ID NO: 329348 - DNA, 1209 bp, Artificial Sequence
  derived and/or modified sequence
atgaacatccacatgaagaggaagaccatcaagaacatcaacacctttgaaaataggatgctgatgctggatggcatgcctgctgtgcgggtgaagacagagctgctggagagcgagcagggcagccccaacgtgcacaactacccagacatggaggccgtgcccctgctgctgaacaacgtgaagggggagcccccagaggacagcctgtctgtggaccacttccagacccagacagagcctgtggacctgagcatcaacaaggcccggaccagccccacagctgtgagcagcagccctgtgtccatgacagccagcgccagcagccccagcagcaccagcaccagcagcagcagcagcagccggctggccagcagccccaccgtcatcacctctgtgtcctctgccagcagcagcagcacagtgctgaccccaggccccctggtggccagcgccagcggcgtgggcggccagcagttcctgcacatcatccaccctgtgccccccagcagccccatgaacctgcagagcaacaagctgagccacgtgcaccgcatccctgtggtggtgcagagcgtgcctgtggtgtacacagctgtgcgcagccctggaaatgtgaacaacaccatcgtggtgcccctgctggaggatggccggggccacggcaaggcccagatggacccccggggcctgagcccccggcagagcaagagtgacagtgatgatgatgacctgcccaacgtgaccctggacagcgtgaatgagaccggcagcacagccctgagcatcgcccgggctgtgcaggaggtgcaccccagccctgtgtcccgggtgcggggcaacaggatgaacaaccagaagttcccctgcagcatcagccccttcagcattgagagcacccggcggcagaggagaagtgagagcccagacagcaggaagaggcgcatccaccgctgtgactttgagggctgcaacaaggtgtacaccaagagcagccacctgaaggcccacaggaggacccacactggagagaagccctacaagtgcacctgggagggctgcacctggaagtttgcccggagtgatgagctgaccaggcactacaggaagcacactggagtgaagcccttcaagtgtgccgactgtgaccgctccttcagcagaagtgaccacctggccctgcacagaagaagacacatgctggtgtag

SEQ ID NO: 329349 - DNA, 1209 bp, Artificial Sequence
  derived and/or modified sequence
atcagcgtgcacctgatgcggaagcacgtgaagaacatcaacacctttgagaacaggatgcttatgctcgacggaatgccagctgttcgcgtgaagacggaactgttggaatcagagcaaggctctcctaatgtccacaattaccctgacatggaagcagtgcctctgctcttaaacaatgttaaaggcgaaccacctgaggattctctgagcgttgaccactttcagacccagactgagccagtcgacctgtcaatcaataaggcaagaacttcacctactgccgtaagttcttcacccgtcagcatgacagcttccgccagctcaccatcgagcacgtcaacatcttctagcagctctagtcgcctggcctcctcacctaccgttataacctcggtgtctagcgcctcatcctccagtactgtcttaacacccggccccctcgttgcgtccgcttccggcgtgggtggacagcaattcttgcacatcatccaccctgtccctccttctagtccaatgaacctacagtcaaataaactgagccacgtgcataggatacctgtcgtggtacagtctgttcctgtggtgtatacagcagtgaggagtccgggaaatgtgaataatacaattgtcgtgcccctcctggaggacggcaggggacatgggaaagctcagatggatccaagagggctgtcaccgcgacagtcaaaatcggatagcgatgacgatgatctccccaacgttactctcgactccgttaatgagactggaagcaccgcattgtcaatcgccagagccgtgcaagaggtccatccctccccggtgagtcgggtaagagggaataggatgaacaaccagaagtttccctgctcaatttcacctttcagcattgagtccactaggcggcagagacgatctgagtcccccgactctagaaagaggcgtatccaccgatgcgactttgagggctgcaacaaagtgtacactaaaagcagtcatctaaaggcccatcggagaacccacacgggcgaaaagccttacaaatgcacatgggaaggatgcacctggaagttcgcccggagcgacgaactgactcggcattaccggaagcacactggcgttaagcccttcaagtgtgccgattgcgaccggtctttctccagatccgaccatctcgcactgcatagaagaagacacatgctggtgtag

SEQ ID NO: 329350 - DNA, 1209 bp, Artificial Sequence
  derived and/or modified sequence
atgaacatccacatgaagcggaagaccatcaagaacatcaacacctttgaaaaccgaatgctgatgttagacggcatgccagccgtacgtgtgaagacagagctccttgaatcggaacaaggttctccgaacgtgcacaattacccagatatggaggccgtccctctcttgttaaacaatgtcaaaggggagcccccagaggactctctaagtgtcgaccatttccagacacagaccgaacccgtggacttgagcattaataaagcccgaactagccctaccgccgtttcctcttcccctgtgtcaatgacagcttccgccagcagtcccagctctactagtacaagttcctcctcatcaagccggcttgcttctagtcctaccgtgatcacaagcgtaagctccgcgagttcatcctcaacagttctgacacccggccccctggttgcatccgcctctggtgtcggcggacagcagttcctccacatcatccatcctgtacccccatcaagccctatgaacttgcagtctaacaaactttcacatgtgcaccggatccccgtggttgttcagagtgttcctgttgtttacaccgcggtacggtcccctgggaatgtgaacaatacaattgtggtgcctcttctggaggacggacggggacacggaaaagcacagatggaccccaggggccttagtcctcgccaatctaagagcgattccgatgacgatgacctccccaacgttactttggacagtgtgaatgagactggatcgactgcgctctcgatcgcaagggctgtccaggaagtccatcccagccctgtaagcagggtcagaggtaaccgcatgaataaccagaaatttccctgttctatttccccattcagcatcgagtcgacaaggagacagcgcagatccgaatcccccgatagccgcaagcggcgcatccatcgctgcgacttcgaaggttgcaacaaagtgtataccaaatctagccacctcaaagcacaccgtcgaacccataccggagagaagccttataagtgtacttgggaaggctgtacttggaaattcgcccgcagcgatgagctgactcgacattatcgtaaacacaccggagtgaagccatttaagtgtgccgactgcgaccggagcttttctaggtccgaccacctggctctccaccggcgaaggcacatgctcgtttag

SEQ ID NO: 329351 - DNA, 1209 bp, Artificial Sequence
  derived and/or modified sequence
atgaacatccacatgaagcggaagaccatcaagaacatcaacacctttgagaacaggatgctgatgctggatggaatgcctgcggtgcgagtgaagaccgaactgctggaatccgaacaaggttccccgaacgtccataattaccccgatatggaagccgttccactgcttctgaacaacgttaaaggagagcccccggaagatagcctaagcgtggaccatttccagacacaaacggagcccgtcgatctgtcaatcaataaggcccggaccagcccaactgccgttagttcctcacctgttagtatgaccgcctctgccagctccccaagttccaccagtaccagttccagttcatcctccagattggcaagttccccgaccgttattaccagcgtctccagcgcaagctctagcagtaccgtgctaactcctggtcctctcgtggcctcagcttctggcgtgggaggtcagcagttccttcatataattcacccagttccccccagctcccccatgaatctgcagagcaataagctgtcacacgtgcaccgtattcccgttgtggtccaaagcgtccctgtggtatatacagcagtgaggagtcccggtaacgtcaataacacgatcgttgtgccactgctggaagacgggagaggccatgggaaagcccagatggaccccagggggttatcaccacgacagtccaagtcagatagtgacgatgacgacttgcctaacgtgaccttggatagcgtgaatgaaacaggctcgacggctttgagcatagctcgagccgttcaagaagtccaccccagtccagtctcgcgtgtccgtggaaaccggatgaataatcagaagttcccttgctccatatccccgttctcaattgaaagtacacgcaggcagcggaggtctgaatctccagattcccggaaaagacgcatccatcggtgtgactttgaaggttgcaataaggtctacacgaaatcgtcccacttaaaagcccaccgtcggactcataccggggagaagccctataaatgtacttgggaaggctgcacgtggaagtttgcccggtccgacgagctaaccaggcactaccgtaagcataccggagtgaaacccttcaagtgcgctgactgtgatcggtctttctccaggagtgaccatctggcactccatcggagaaggcacatgctcgtgtag

SEQ ID NO: 329352 - DNA, 1209 bp, Artificial Sequence
  derived and/or modified sequence
atttccgtgcatcttatgcgaaagcatgtgaaaaatattaacactttcgaaaaccgcatgttaatgctcgatggtatgcccgcagttcgagtcaaaacagagctgcttgaaagcgagcagggatcccccaatgtgcataactaccctgatatggaagccgttccactcctcttaaataatgtcaagggggagccccctgaggactcattgtccgtagaccatttccaaactcagaccgaacccgtggacttgagtatcaataaggcccgtactagcccaacagctgtatctagctccccagtcagcatgacagccagtgcctcttccccatccagcacaagcacctcttctagctcatcgagcaggttggccagctcgccaaccgttatcacatctgttagttctgcatcctcctcctccaccgttctgacgcctggacctctggtggctagcgcctccggtgtcgggggacagcaattcttgcacattattcacccagtgccaccctccagccctatgaacctgcagtctaacaagctctctcacgtccatcgaattccggtcgtagtgcaatctgtgcccgttgtgtacacggctgtgagatcacctggcaacgtgaacaatacaattgtcgtgccacttctggaggatggtcgcggacatggtaaggctcagatggacccgagaggtctgagccccaggcagtcaaagagcgattccgacgacgacgatttgccgaacgtcaccttagactctgtgaacgagacgggaagtaccgccctgtctatagccagggctgttcaggaggttcacccatcccccgtctctcgggtgcggggaaaccgaatgaataatcaaaagtttccttgtagtataagccccttctcgatcgagtctacacgtcggcagcgtaggtccgagtccccagacagcaggaagcggagaattcacagatgcgattttgagggatgtaataaagtctacacaaaatctagtcatctgaaggcacatcgtcgcactcacacgggtgagaaaccctacaaatgtacatgggaaggttgcacttggaagtttgctagatcagatgaactaactcgtcattaccgcaagcacaccggggtcaagccatttaaatgtgcagattgcgatcggagctttagcagatctgatcatcttgccctccatcgcagaagacatatgctggtttag

SEQ ID NO: 329353 - DNA, 1209 bp, Artificial Sequence
  derived and/or modified sequence
atgaatatacacatgaagcggaaaacaattaaaaacatcaacacgttcgagaaccgtatgctgatgttagatggtatgcccgctgtgcgggtaaaaacggaattgctggaaagcgaacagggttctcccaacgttcataactaccccgacatggaagccgtgcctttgcttctcaacaatgtgaagggcgagcctccagaggacagcctgtctgttgatcatttccaaacacagacagaacccgtcgatctgagcatcaataaggcacgcacttcacccacagctgtctcctcttccccagtgtctatgacagcgtctgcttctagtcctagtagcacctcaacttcttccagctcctcgtcaagactggcatcaagcccaactgttatcacatctgtgtccagtgcatctagttcatccactgtcttgactccgggaccacttgtcgctagtgcctcgggggtgggaggtcagcaatttctgcacattatccaccccgtacccccaagcagcccaatgaatcttcagtcgaataagctgagtcacgtacaccggattcctgtagtggttcagtcagttcccgtcgtgtacaccgcggtacgttcaccaggtaacgttaataacacaattgtagtgccactgctggaggatggcaggggccacggaaaggcacaaatggaccccagaggactgagtcccagacagagtaagtccgattccgacgatgatgatctgcccaacgtgacccttgactccgtgaatgaaaccggaagtactgctctgtctatcgccagagcagtccaggaggtacacccatcaccagtgtcccgagtgcgcggaaatcgtatgaacaaccagaaatttccgtgctcgatatctcccttctcaatagagagtacgaggagacaacggcgaagcgaatctccagactcgcggaagagaaggattcatcgctgtgacttcgaagggtgcaacaaggtgtacaccaagtcgtcccacttgaaggctcacaggaggacacacacaggagagaaaccctacaagtgcacatgggaaggctgcacatggaagttcgcacgtagcgacgaactgaccaggcattacagaaagcacaccggggtcaagccattcaaatgcgctgactgcgacaggtctttttcgcggagtgatcatcttgctttgcacagacggcgacacatgctggtttag

SEQ ID NO: 329354 - DNA, 1209 bp, Artificial Sequence
  derived and/or modified sequence
atgaacatccatatgaagaggaagacaatcaaaaatattaataccttcgaaaacagaatgctgatgctggatgggatgcctgccgtacgcgttaaaaccgagcttctggagagcgagcaggggagtccgaatgtccataattatcctgatatggaggctgtgccattgctactgaacaacgtcaaaggagagccgcctgaagactccctgtcagtggaccactttcaaacacagacagagccagtggacctgagcattaacaaggctaggaccagtccaactgcagtgtcctcctctccggtgagtatgaccgcatctgcttcttctccatcctcaactagcaccagctcctccagttcctccaggctcgctagttctccaaccgtcatcacatccgtatcttccgccagtagctccagcaccgtcttaactcccggaccgctggtcgcttcagcctctggcgtgggaggccagcagttcctgcatataattcatcctgtgccaccatcgtccccaatgaacctgcaatctaacaaacttagccacgtgcatcggatacccgtggtcgtgcagtctgtgccggtcgtgtatactgccgtacgatccccagggaacgtgaacaacaccatagttgttcctctcctcgaggatggcagaggccatggtaaagcacaaatggatcccagaggattgtctcctcggcaaagcaagtctgattccgatgatgacgatctacccaatgttactctggacagtgtcaatgagacgggtagtaccgccttgagtatcgcaagggccgtccaagaggtgcacccctcaccggtcagccgcgtgcggggaaatcggatgaacaaccagaagttcccctgttctatctctcccttttctatcgagtcaacgcgccgacagaggcgaagtgaatcacctgactcacgcaagagacgcattcatcgctgtgacttcgaaggctgcaataaggtgtatacaaagagcagtcacctgaaggcacatcgcagaacccacacgggcgaaaaaccctacaaatgtacctgggagggctgtacatggaagttcgcccgaagcgatgagctgaccagacactatcggaaacacactggcgtcaagccttttaagtgtgcagattgcgacagatccttctctcggagcgaccatctcgcattgcatagaagaagacacatgttggtatag

SEQ ID NO: 329355 - DNA, 1209 bp, Artificial Sequence
  derived and/or modified sequence
atcagcgtgcacctgatgagaaagcacgtgaagaacatcaacaccttcgagaacagaatgctgatgctggacggcatgcccgccgtgagagtgaagaccgagctgctggagagcgagcagggcagccccaacgtgcacaactaccccgacatggaggccgtgcccctgctgctgaacaacgtgaagggcgagccccccgaggacagcctgagcgtggaccacttccagacccagaccgagcccgtggacctgagcatcaacaaggccagaaccagccccaccgccgtgagcagcagccccgtgagcatgaccgccagcgccagcagccccagcagcaccagcaccagcagcagcagcagcagcagactggccagcagccccaccgtgatcaccagcgtgagcagcgccagcagcagcagcaccgtgctgacccccggccccctggtggccagcgccagcggcgtgggcggccagcagttcctgcacatcatccaccccgtgccccccagcagccccatgaacctgcagagcaacaagctgagccacgtgcacagaatccccgtggtggtgcagagcgtgcccgtggtgtacaccgccgtgagaagccccggcaacgtgaacaacaccatcgtggtgcccctgctggaggacggcagaggccacggcaaggcccagatggaccccagaggcctgagccccagacagagcaagagcgacagcgacgacgacgacctgcccaacgtgaccctggacagcgtgaacgagaccggcagcaccgccctgagcatcgccagagccgtgcaggaggtgcaccccagccccgtgagcagagtgagaggcaacagaatgaacaaccagaagttcccctgcagcatcagccccttcagcatcgagagcaccagaagacagagaagaagcgagagccccgacagcagaaagagaagaatccacagatgcgacttcgagggctgcaacaaggtgtacaccaagagcagccacctgaaggcccacagaagaacccacaccggcgagaagccctacaagtgcacctgggagggctgcacctggaagttcgccagaagcgacgagctgaccagacactacagaaagcacaccggcgtgaagcccttcaagtgcgccgactgcgacagaagcttcagcagaagcgaccacctggccctgcacagaagaagacacatgctggtgtag

SEQ ID NO: 329356 - DNA, 1209 bp, Artificial Sequence
  derived and/or modified sequence
atgaacatccacatgaagagaaagaccatcaagaacatcaacaccttcgagaacagaatgctgatgctggacggcatgcccgccgtgagagtgaagaccgagctgctggagagcgagcagggcagccccaacgtgcacaactaccccgacatggaggccgtgcccctgctgctgaacaacgtgaagggcgagccccccgaggacagcctgagcgtggaccacttccagacccagaccgagcccgtggacctgagcatcaacaaggccagaaccagccccaccgccgtgagcagcagccccgtgagcatgaccgccagcgccagcagccccagcagcaccagcaccagcagcagcagcagcagcagactggccagcagccccaccgtgatcaccagcgtgagcagcgccagcagcagcagcaccgtgctgacccccggccccctggtggccagcgccagcggcgtgggcggccagcagttcctgcacatcatccaccccgtgccccccagcagccccatgaacctgcagagcaacaagctgagccacgtgcacagaatccccgtggtggtgcagagcgtgcccgtggtgtacaccgccgtgagaagccccggcaacgtgaacaacaccatcgtggtgcccctgctggaggacggcagaggccacggcaaggcccagatggaccccagaggcctgagccccagacagagcaagagcgacagcgacgacgacgacctgcccaacgtgaccctggacagcgtgaacgagaccggcagcaccgccctgagcatcgccagagccgtgcaggaggtgcaccccagccccgtgagcagagtgagaggcaacagaatgaacaaccagaagttcccctgcagcatcagccccttcagcatcgagagcaccagaagacagagaagaagcgagagccccgacagcagaaagagaagaatccacagatgcgacttcgagggctgcaacaaggtgtacaccaagagcagccacctgaaggcccacagaagaacccacaccggcgagaagccctacaagtgcacctgggagggctgcacctggaagttcgccagaagcgacgagctgaccagacactacagaaagcacaccggcgtgaagcccttcaagtgcgccgactgcgacagaagcttcagcagaagcgaccacctggccctgcacagaagaagacacatgctggtgtag

SEQ ID NO: 329357 - protein, 164 aa, Artificial Sequence
  derived and/or modified sequence
MAEAVLIDLFGLKLNSQKNCHQTLLKTLNAVQYHHAAKAKFLCIMCCSNISYERDGEQDNCEIETSNGLSALLEEFEIVSCPSMAATLYTIKQKIDEKNLSSIKVIVPRHRKTLMKAFIDQLFTDVYNFEFEDLQVTFRGGLFKQSIEINVITAQELRGIQNEI

SEQ ID NO: 329358 - DNA, 495 bp, Artificial Sequence
  derived and/or modified sequence
atggccgaggccgtgctgatcgacctgttcggcctgaagctgaacagccagaagaactgccaccagaccctgctgaagaccctgaacgccgtgcagtaccaccacgccgccaaggccaagttcctgtgcatcatgtgctgcagcaacatcagctacgagagagacggcgagcaggacaactgcgagatcgagaccagcaacggcctgagcgccctgctggaggagttcgagatcgtgagctgccccagcatggccgccaccctgtacaccatcaagcagaagatcgacgagaagaacctgagcagcatcaaggtgatcgtgcccagacacagaaagaccctgatgaaggccttcatcgaccagctgttcaccgacgtgtacaacttcgagttcgaggacctgcaggtgaccttcagaggcggcctgttcaagcagagcatcgagatcaacgtgatcaccgcccaggagctgagaggcatccagaacgagatctag

SEQ ID NO: 329359 - DNA, 495 bp, Artificial Sequence
  derived and/or modified sequence
atggcagaggccgtcctcatcgacctgtttggcttgaaactgaacagtcagaaaaactgtcaccagacactgcttaaaactctgaatgccgtacagtatcaccacgcagccaaagccaagttcctgtgcatcatgtgttgcagcaatatcagttacgagagagatggcgagcaggacaactgtgagattgaaacctccaacggactttccgccttacttgaagagtttgagatagttagttgtccctctatggccgccacactgtacacaatcaagcagaagattgatgagaagaacctctcatcaatcaaggtgatcgtgcccagacaccgcaagacgctgatgaaagcatttatcgatcagctgtttaccgacgtttataactttgagtttgaagaccttcaagtgacttttcgaggcggactttttaagcagagcatagagataaacgtgatcactgctcaggagttaaggggcatccaaaacgagatctag

SEQ ID NO: 329360 - DNA, 495 bp, Artificial Sequence
  derived and/or modified sequence
atggccgaggccgtgctgattgacctgtttggcctgaagctgaacagccagaagaactgccaccagaccctgctgaagaccctgaatgctgtgcagtaccaccacgccgccaaggccaagttcctgtgcatcatgtgctgcagcaacatctcctatgaaagagatggagagcaggacaactgtgaaattgagaccagcaatggcctgagcgccctgctggaggagtttgagatcgtgtcctgccccagcatggccgccaccctgtacaccatcaagcagaagattgatgagaagaacctgagcagcatcaaggtgattgtgcccaggcacaggaagaccctgatgaaggccttcatcgaccagctgttcacagatgtgtacaactttgaatttgaggacctgcaggtgaccttccggggcggcctcttcaagcagagcattgagatcaacgtcatcacagcccaggagctgcggggcatccagaatgagatctag

SEQ ID NO: 329361 - DNA, 705 bp, Artificial Sequence
  derived and/or modified sequence
atcccgggattccccagctctcgcgctgggcccgccgcgttcgcaccaagcacgccaggcggccctggcctacctccctcccgcctcccggcagctggcacgagggaacctggccgtcaggtttcccctgggatcctgggacggtatcaggcggggaatctgtgcggccgcggcgaggtgatttatttggcataaaagtattctttcaaggatggcagaagctgttttgattgatctttttggtttgaaattgaactctcaaaaaaactgccatcagacattactgaagactttgaatgctgtccaataccaccatgctgccaaggccaagtttctctgtataatgtgttgcagtaacatcagctatgaaagggatggagaacaagataattgtgaaatagaaacaagcaatggattatcagctctcttggaagaatttgagattgttagctgtcccagcatggctgccactttgtataccattaaacagaaaattgatgaaaaaaatctgagcagcattaaggtaattgtacccaggcacaggaagacattaatgaaagcttttattgatcaactcttcactgatgtttacaattttgaatttgaagatttgcaagtgacttttaggggagggctttttaaacagtccattgaaataaacgtaatcacagctcaagaactaagaggaattcagaatgaaataga

SEQ ID NO: 329362 - DNA, 495 bp, Artificial Sequence
  derived and/or modified sequence
atggccgaggccgtgctgatcgacctgttcggcctgaagctgaacagtcagaaaaactgccaccagaccttgctcaaaaccttgaacgcggtccagtatcaccatgcagcaaaagccaaatttctgtgtattatgtgttgctctaatatatcttatgagcgggatggcgagcaggacaattgcgaaatcgaaactagcaacggccttagcgctctgctggaggagttcgaaatcgtatcttgtccgtccatggctgcaactctttatacaatcaaacagaaaattgatgaaaagaaccttagtagcatcaaagtgattgtacctaggcacagaaagactctgatgaaggccttcattgaccaattatttaccgacgtgtataatttcgagtttgaggatttacaggtgacctttcggggaggtcttttcaagcaaagcattgaaatcaatgtgattactgctcaggagcttaggggcattcagaatgaaatttag

SEQ ID NO: 329363 - DNA, 495 bp, Artificial Sequence
  derived and/or modified sequence
atggcagaagcagttctcatcgatttgttcggtcttaagctcaattcacaaaagaattgtcaccagaccttattaaagacactgaacgcagtgcaatatcaccatgccgctaaagccaagttcctttgcattatgtgttgcagtaacatcagttacgagagagacggggaacaggacaactgtgagatcgagacaagcaatgggttgtctgcactgttagaagaattcgagatcgtcagttgcccaagtatggccgcaacactctatactatcaagcaaaaaattgacgagaagaacttgtctagcatcaaggtgattgtccctcgtcatcgaaaaacgctcatgaaagctttcatcgaccagcttttcactgacgtttataattttgagtttgaagacttgcaggtgaccttccggggaggattgtttaagcagagtattgaaattaatgtaattacagcacaagagttgcgcggaatccagaacgaaatctag

SEQ ID NO: 329364 - protein, 760 aa, Artificial Sequence
  derived and/or modified sequence
MAVPAALIPPTQLVPPQPPISTSASSSGTTTSTSSATSSPAPSIGPPASSGPTLFRPEPIASAAAAAATVTSTGGGGGGGGGGSGGGGGSSGNGGGGGGGGGGSNCNPNLAAASNGSGGGGGGISAGGGVASSTPINASTGSSSSSSSSSSSSSSSSSSSSSSSSCGPLPGKPVYSTPSPVENTPQNNECKMVDLRGAKVASFTVEGCELICLPQAFDLFLKHLVGGLHTVYTKLKRLEITPVVCNVEQVRILRGLGAIQPGVNRCKLISRKDFETLYNDCTNASSRPGRPPKRTQSVTSPENSHIMPHSVPGLMSPGIIPPTGLTAAAAAAAAATNAAIAEAMKVKKIKLEAMSNYHASNNQHGADSENGDMNSSVGSSDGSWDKETLPSSPSQGPQASITHPRMPGARSLPLSHPLNHLQQSHLLPNGLELPFMMMPHPLIPVSLPPASVTMAMSQMNHLSTIANMAAAAQVQSPPSRVETSVIKERVPDSPSPAPSLEEGRRPGSHPSSHRSSSVSSSPARTESSSDRIPVHQNGLSMNQMLMGLSPNVLPGPKEGDLAGHDMGHESKRMHIEKDETPLSTPTARDSLDKLSLTGHGQPLPPGFPSPFLFPDGLSSIETLLTNIQGLLKVAIDNARAQEKQVQLEKTELKMDFLRERELRETLEKQLAMEQKNRAIVQKRLKKEKKAKRKLQEALEFETKRREQAEQTLKQAASTDSLRVLNDSLTPEIEADRSGGRTDAERTIQDGRLYLKTTVMY

SEQ ID NO: 329365 - protein, 760 aa, Artificial Sequence
  derived and/or modified sequence
MAVPAALIPPTQLVPPQPPISTSASSSGTTTSTSSATSSPAPSIGPPASSGPTLFRPEPIASAAAAAATVTSTGGGGGGGGGGSGGGGGSSGNGGGGGGGGGGSNCNPNLAAASNGSGGGGGGISAGGGVASSTPINASTGSSSSSSSSSSSSSSSSSSSSSSSSCGPLPGKPVYSTPSPVENTPQNNECKMVDLRGAKVASFTVEGCELICLPQAFDLFLKHLVGGLHTVYTKLKRLEITPVVCNVEQVRILRGLGAIQPGVNRCKLISRKDFETLYNDCTNASSRPGRPPKRTQSVTSPENSHIMPHSVPGLMSPGIIPPTGLTAAAAAAAAATNAAIAEAMKVKKIKLEAMSNYHASNNQHGADSENGDMNSSVGSSDGSWDKETLPSSPSQGPQASITHPRMPGARSLPLSHPLNHLQQSHLLPNGLELPFMMMPHPLIPVSLPPASVTMAMSQMNHLSTIANMAAAAQVQSPPSRVETSVIKERVPDSPSPAPSLEEGRRPGSHPSSHRSSSVSSSPARTESSSDRIPVHQNGLSMNQMLMGLSPNVLPGPKEGDLAGHDMGHESKRMHIEKDETPLSTPTARDSLDKLSLTGHGQPLPPGFPSPFLFPDGLSSIETLLTNIQGLLKVAIDNARAQEKQVQLEKTELKMDFLRERELRETLEKQLAMEQKNRAIVQKRLKKEKKAKRKLQEALEFETKRREQAEQTLKQAASTDSLRVLNDSLTPEIEADRSGGRTDAERTIQAARLYIKTVCMY

SEQ ID NO: 329366 - DNA, 2283 bp, Artificial Sequence
  derived and/or modified sequence
atggctgtgcctgctgctctgataccccctacccagcttgtccctcctcagcctcccatctccacatccgctagctcttcagggaccactacatcaacatcaagcgcgacttcgtcacccgctcctagtattggcccccccgcctcctccggaccgactctgtttaggccggagcctatcgcaagcgcagccgccgccgccgccacagtcacaagtactggaggaggcggcggagggggcggaggcggatctggcggagggggtggatctagcggtaacggagggggaggcggcggaggggggggtggttccaattgcaatcctaacctggccgctgcatccaatggaagcggtggcggcggcgggggcatcagcgccggaggaggtgttgcctcctccactcctattaacgctagtacgggaagctcatcctcttcctcatcatccagctcaagtagtagctcctccagtagcagctccagctcatcttcttcttgcggacctctgcccggaaagccagtgtattcaacaccctctccggtggagaatacgccccagaataacgagtgcaaaatggttgatctccgaggcgcaaaggtagcgagctttacggtcgagggatgtgagctcatctgcttaccacaagcattcgacctgtttctgaaacatttggtgggggggctgcacaccgtatacacaaagttgaagcgactggaaatcacgccagtggtttgcaacgtggaacaggtgagaattctgcgtgggctcggggccatccagccgggagtgaataggtgtaagttgatttcccgcaaggattttgaaactttatataacgattgtaccaatgcctcttccagacccggacggccccccaagaggactcaatccgtgacatctcctgagaactcccacatcatgcctcactctgtccccggcctgatgagcccaggtatcatcccgccaaccggcctcacggccgctgccgccgccgctgccgcagcaactaatgccgccatcgcggaggctatgaaggttaagaagatcaaacttgaagctatgtcaaattatcatgcctcgaataaccagcacggtgccgatagcgaaaatggagatatgaatagcagcgtggggagctctgacggtagttgggacaaggaaactctgccttcaagccccagtcaggggccacaagcctctattacccatcctcggatgcctggcgctcgttccttacccctttcccatcctctaaaccatctgcaacaatcacacttgctcccaaatggtctcgaactgcccttcatgatgatgccacaccccctgatccccgtgagcctccctcccgcctccgtgactatggcaatgtcccagatgaaccatctgagtacaattgctaacatggccgcagccgctcaggtacaaagccctccgtcacgggtggagacttctgtgataaaagaaagagtccctgacagcccaagtcctgctcctagcttggaagaaggccggagaccagggtcccatcccagcagccaccgctcatcaagcgtaagcagttcacctgcccggacagagtcaagctccgatagaatccctgtacaccaaaacggcctgtccatgaaccaaatgctgatgggactgtcacctaacgtgctcccaggcccgaaggagggggaccttgctggtcacgacatgggccatgagtccaaaagaatgcacatcgaaaaggacgagacacctttgagcactcctaccgcaagagatagtcttgacaaattgtctttaactggccatggtcaacccctgcccccgggatttccttcacccttcctctttccggatggactctcctccatcgaaaccctcctgacgaatattcagggactccttaaagtggccattgacaatgcaagagcccaagaaaagcaggtgcagttggaaaagacagaactaaagatggactttctcagagagcgcgagttgagggaaacgctagaaaagcagctagccatggagcagaagaacagagcaatcgtgcagaaacgtctcaagaaagaaaaaaaagccaagcgcaaactgcaggaagccctggagtttgaaacaaaacgaagggagcaggcagagcagactctgaaacaggcagcctccacggactcactgcgggtcctgaacgactctttaacaccggaaattgaggcagatcgctctgggggtcggaccgatgccgaacggactattcaggatggcaggctgtacctgaaaacaacagtcatgtattag

SEQ ID NO: 329367 - DNA, 2283 bp, Artificial Sequence
  derived and/or modified sequence
atggccgtgcctgctgcccttatcccgcccactcaactagtgcctcctcagccacccataagcactagcgcctcatcatccggtacaacaacttcaacatcatccgctacaagcagtccggcccccagcatcgggccccccgcctcctccggccctacattatttaggcctgagccaattgcctcagctgccgcagcagcagctacggtcacgtcaacaggaggggggggggggggggggggcgggggttctggcggcgggggggggagcagcggcaatggaggtgggggtggagggggcggaggcggctccaactgtaaccctaatctcgccgccgctagtaatggctcaggaggtggcggcggtggcattagcgccgggggaggggtagctagctcaacaccgattaatgcttctacggggtcctctagtagctcttcaagttcttcctccagctctagctcaagctctagcagctcctcgagtagctcttcttgcggccctctgccgggaaagccagtctacagcacaccctctcctgtggagaacacaccccagaataacgagtgtaagatggtggacctcagaggcgcgaaggtagcttcctttacagtggagggttgtgaattaatctgtcttccgcaagctttcgatctgttcctgaagcatctggtgggaggcctccacacggtgtatacaaagctgaagcggcttgaaataacacctgtggtatgcaatgtggaacaggttcgcatcctgcgtgggcttggcgctatacagcctggagtgaaccgatgtaagctgatttccagaaaggatttcgagacgttatataatgattgtactaatgcctcttcgcgtcctggccgaccaccaaaacgcacccagtcagttactagtccagaaaacagccatatcatgccccattcagtacccggcctgatgtcccctggaataattccaccgacagggctgaccgctgctgcggcagctgccgcggccgccaccaacgcagctatcgcagaagccatgaaagtgaaaaaaattaaactggaggctatgtctaactaccacgcatcaaataatcaacatggtgccgattccgaaaacggcgacatgaattcaagcgttggctcaagcgatggctcttgggacaaggagaccttgccttcttcacccagtcaaggaccgcaggcctccatcacgcacccccggatgccaggggcccgtagtttgccgctctctcacccactgaatcatctacagcagagccatctcctccccaacggcctcgagttgccatttatgatgatgccacatcccctgattcctgtatcgcttcctcctgcttcagtgacaatggcaatgtcccaaatgaatcacctgtctaccattgccaacatggctgccgcagcacaggtgcaatcaccaccctcccgagtggagacctctgtgattaaggagcgagttccggactcacccagccccgctccctcattagaagagggtaggagacccggcagtcatccgtcttcccaccgctcctcctccgtaagttcaagccctgctaggaccgagtcctctagcgacagaatcccagtgcatcaaaacggtctgtctatgaaccagatgctgatgggtctctcaccaaatgttcttccaggtccgaaagagggagatttggcaggccacgatatgggccacgagtctaagcgtatgcacattgagaaggacgaaaccccactatcaacacccaccgctagggacagtctggataagttgagccttactgggcacggccagccactgcccccgggattcccatctcccttcctgtttcccgatggcctttccagcattgagacactgctcacaaatatccagggtcttctgaaggtggctatcgataacgcacgggctcaggagaagcaggttcagcttgaaaaaaccgaactgaaaatggacttcctgagagagagggagttgagagagactctcgagaagcagctggcaatggagcagaagaacagggcaattgtgcagaaaaggttgaagaaggagaagaaggccaaacgaaagttgcaggaagcccttgagtttgaaacaaagcggcgcgaacaagccgagcagactctcaagcaggctgccagtaccgattctctcagagtcctgaatgactccctcacccctgaaatcgaggccgatcggagcggtggaagaacagatgcggagcgaactatccaagcagcgcggctgtacatcaagaccgtgtgcatgtattag

SEQ ID NO: 329368 - DNA, 2283 bp, Artificial Sequence
  derived and/or modified sequence
atggctgtgcctgctgccctgatcccccccacccagctggtgcccccccagccccccatcagcaccagcgccagcagcagcggcaccaccaccagcaccagcagcgccaccagcagccctgcccccagcatcggccccccagccagcagcggccccaccctcttccggcctgagcccatcgccagcgctgctgctgctgctgccaccgtgaccagcactggaggcggcggcggcggcggcggcggcggcagcggcggcggcggcggcagcagtggaaatggaggcggcggcggcggcggcggcggcggcagcaactgcaaccccaacctggccgccgccagcaatggaagtggcggcggcggcggcggcatctctgctgggggcggcgtggccagcagcacccccatcaatgccagcacaggcagcagcagcagcagcagcagcagcagcagcagcagcagcagcagcagcagcagcagcagcagcagcagcagctgtggccccctgcccgggaagcctgtgtacagcacccccagccctgtggagaacaccccccagaacaatgaatgcaagatggtggacctgcggggggccaaggtggccagcttcaccgtggagggctgtgagctgatctgcctgccccaggcctttgacctcttcctgaagcacctggtgggcggcctgcacacagtgtacaccaagctgaagaggctggagatcacccctgtggtgtgcaatgtggagcaggtgcgcatcctgcggggcctgggcgccatccagcccggggtgaaccgctgcaagctgatcagcaggaaggactttgagaccctgtacaatgactgcaccaatgccagcagccggcccggccggccccccaagaggacccagagcgtgaccagccctgagaacagccacatcatgccccacagcgtgcccggcctgatgagccctggcatcatccccccaacaggcctgacagctgctgctgctgctgctgctgctgccaccaatgctgccatcgccgaggccatgaaggtgaagaagatcaagctggaggccatgagcaactaccacgccagcaacaaccagcacggggctgacagtgaaaatggagacatgaacagctctgtgggcagcagtgatggctcctgggacaaggagaccctgcccagcagccccagccagggcccccaggccagcatcacccaccccaggatgcctggggcccggagcctgcccctgagccaccccctgaaccacctgcagcagagccacctgctgcccaacggcctggagctgcccttcatgatgatgccccaccccctcatccctgtgtccctgcccccagcctctgtgaccatggccatgagccagatgaaccacctgagcaccatcgccaacatggctgctgctgcccaggtgcagagcccccccagccgggtggagaccagcgtcatcaaggagcgggtgcctgacagccccagccctgcccccagcctggaggagggccggcggcccggcagccaccccagcagccacaggagcagctctgtgagcagcagccctgccaggacagagagcagcagtgaccgcatccctgtgcaccagaatggcctgtccatgaaccagatgctgatgggcctgagccccaacgtgctgcccggccccaaggagggggacctggccggccatgacatgggccacgagagcaagaggatgcacatcgagaaggatgagacccccctgagcacccccacagcccgggacagcctggacaagctgagcctgactggacatggccagcccctgcccccaggcttccccagccccttcctgttcccagatggcctgagcagcattgagaccctgctgaccaacatccagggcctgctgaaggtggccatcgacaatgcccgggcccaggagaagcaggtgcagctggagaagacagagctgaagatggacttcctgcgggagcgggagctgcgggagaccctggagaagcagctggccatggagcagaagaacagagccatcgtgcagaagaggctgaagaaggagaagaaggccaagaggaagctgcaggaggccctggagtttgagaccaagaggcgggagcaggccgagcagaccctgaagcaggccgccagcacagacagcctgcgggtgctgaatgacagcctgaccccagaaattgaggccgacagaagtggcggccgcacagatgctgagaggaccatccaggacggccgcctgtacctgaagaccaccgtgatgtactag

SEQ ID NO: 329369 - DNA, 2283 bp, Artificial Sequence
  derived and/or modified sequence
atggctgtgcctgctgccctgatcccccccacccagctggtgcccccccagccccccatcagcaccagcgccagcagcagcggcaccaccaccagcaccagcagcgccaccagcagccctgcccccagcatcggccccccagccagcagcggccccaccctcttccggcctgagcccatcgccagcgctgctgctgctgctgccaccgtgaccagcactggaggcggcggcggcggcggcggcggcggcagcggcggcggcggcggcagcagtggaaatggaggcggcggcggcggcggcggcggcggcagcaactgcaaccccaacctggccgccgccagcaatggaagtggcggcggcggcggcggcatctctgctgggggcggcgtggccagcagcacccccatcaatgccagcacaggcagcagcagcagcagcagcagcagcagcagcagcagcagcagcagcagcagcagcagcagcagcagcagcagctgtggccccctgcccgggaagcctgtgtacagcacccccagccctgtggagaacaccccccagaacaatgaatgcaagatggtggacctgcggggggccaaggtggccagcttcaccgtggagggctgtgagctgatctgcctgccccaggcctttgacctcttcctgaagcacctggtgggcggcctgcacacagtgtacaccaagctgaagaggctggagatcacccctgtggtgtgcaatgtggagcaggtgcgcatcctgcggggcctgggcgccatccagcccggggtgaaccgctgcaagctgatcagcaggaaggactttgagaccctgtacaatgactgcaccaatgccagcagccggcccggccggccccccaagaggacccagagcgtgaccagccctgagaacagccacatcatgccccacagcgtgcccggcctgatgagccctggcatcatccccccaacaggcctgacagctgctgctgctgctgctgctgctgccaccaatgctgccatcgccgaggccatgaaggtgaagaagatcaagctggaggccatgagcaactaccacgccagcaacaaccagcacggggctgacagtgaaaatggagacatgaacagctctgtgggcagcagtgatggctcctgggacaaggagaccctgcccagcagccccagccagggcccccaggccagcatcacccaccccaggatgcctggggcccggagcctgcccctgagccaccccctgaaccacctgcagcagagccacctgctgcccaacggcctggagctgcccttcatgatgatgccccaccccctcatccctgtgtccctgcccccagcctctgtgaccatggccatgagccagatgaaccacctgagcaccatcgccaacatggctgctgctgcccaggtgcagagcccccccagccgggtggagaccagcgtcatcaaggagcgggtgcctgacagccccagccctgcccccagcctggaggagggccggcggcccggcagccaccccagcagccacaggagcagctctgtgagcagcagccctgccaggacagagagcagcagtgaccgcatccctgtgcaccagaatggcctgtccatgaaccagatgctgatgggcctgagccccaacgtgctgcccggccccaaggagggggacctggccggccatgacatgggccacgagagcaagaggatgcacatcgagaaggatgagacccccctgagcacccccacagcccgggacagcctggacaagctgagcctgactggacatggccagcccctgcccccaggcttccccagccccttcctgttcccagatggcctgagcagcattgagaccctgctgaccaacatccagggcctgctgaaggtggccatcgacaatgcccgggcccaggagaagcaggtgcagctggagaagacagagctgaagatggacttcctgcgggagcgggagctgcgggagaccctggagaagcagctggccatggagcagaagaacagagccatcgtgcagaagaggctgaagaaggagaagaaggccaagaggaagctgcaggaggccctggagtttgagaccaagaggcgggagcaggccgagcagaccctgaagcaggccgccagcacagacagcctgcgggtgctgaatgacagcctgaccccagaaattgaggccgacagaagtggcggccgcacagatgctgagaggaccatccaggccgcccggctgtacatcaagacagtgtgcatgtactag

SEQ ID NO: 329370 - DNA, 2283 bp, Artificial Sequence
  derived and/or modified sequence
atggccgtgcccgccgccctgatcccccccacccagctggtgccccctcaacctccgatatccacttccgcctcatcaagtggcacaaccacaagcacctcttcggccacatctagcccagccccatccattggtcccccagcaagcagcggaccgactctttttcgccccgagccaattgcatcggcagccgcagcagctgctactgtcaccagcaccgggggaggaggaggagggggtgggggaggttctgggggcggaggggggtcctcagggaatgggggtggcgggggtggaggtgggggtggaagcaactgcaatcccaacttagctgccgcctcaaacggctctggaggtggagggggtgggatttcggctgggggaggggtggcttcaagtacccctattaatgcctccactgggtcttcaagtagcagcagtagtagctcttcatcaagctcatctagttctagctcctcaagttcctcatccagttgcggtcccctccctggaaaaccagtatactccaccccctcaccagtggaaaacacccctcaaaacaacgagtgtaagatggtggacttgcgcggtgccaaagtggctagtttcacagtggagggctgcgagctgatctgtctaccacaggcattcgacctctttcttaaacatctggtgggcgggttgcatacagtgtacactaaattaaaacggctggagattacacccgtagtctgcaatgtcgaacaggtgcgcatactccgggggcttggggcaattcaaccaggagtgaatcggtgtaagctaattagccggaaagattttgaaacattatataacgactgtactaatgccagctctcgcccaggacggcccccaaaaaggacccagtcggtgacttcgcctgagaattcgcacattatgccccactcggtgcccggcctgatgtcaccgggcatcattccccccaccgggctgacagccgccgccgcggccgccgccgctgccaccaatgctgcaatcgctgaagcaatgaaggttaaaaagattaagcttgaggctatgtccaattaccacgcttcaaataatcagcacggggcagattctgaaaacggcgacatgaacagcagtgtggggtcctctgatggatcttgggacaaagagaccctgcctagcagcccttcgcaaggccctcaggcctctatcacccaccctcggatgcctggggccagatctctcccgttatctcatcctcttaaccacctgcaacagagtcacttactccccaatggcctggagcttccctttatgatgatgccacatccgctgattccagtgtccctgcccccagcgtccgttaccatggccatgtctcagatgaatcatctctccaccatcgccaatatggctgctgccgcccaggttcaatccccaccctcaagggtggaaacgtctgtgataaaagagagagttcctgactctccttcccccgccccttcactcgaggaaggccgacgccctggaagccacccatcatcccataggagctccagcgtgtcctctagccctgcccgtacagagagctcttctgatagaattccagttcaccagaacggcttgagcatgaaccagatgttgatgggcctgtcacctaacgtgttgcctggtcccaaggagggggatctcgcggggcacgacatgggtcacgaatctaagaggatgcatatcgagaaagatgagacccccttgtcgacccccaccgctcgtgactcgcttgacaagctatcactgaccggtcacggtcaacctctcccgcccggcttcccctctccgttcctgttcccggacggtttgagtagcatagaaactttgctgaccaacatccagggcctgctcaaagtcgctatcgacaacgccagggcacaggagaaacaggtccagctggagaaaactgaattgaagatggactttctgagagagagggaactacgcgagaccctcgagaagcaactcgctatggaacagaagaatcgcgctattgtccagaagcggctgaagaaagaaaaaaaagccaagcggaaacttcaagaggcacttgagtttgagactaaacgtcgagaacaggcagagcaaaccctcaaacaggcagcatctacagattctcttcgggtgcttaacgactcactcacacccgagattgaggcagacagatccggcgggcgcaccgatgctgagcgtacaattcaggatggacgcctgtatctcaagaccactgtaatgtactag

SEQ ID NO: 329371 - DNA, 2283 bp, Artificial Sequence
  derived and/or modified sequence
atggccgtgcccgccgccctgatcccccccacccagctggtgccccctcagcccccaataagcacctccgcctcttcatcgggcactaccactagcacttccagcgctaccagcagccccgccccttcaatcgggcccccagcatcctccggtccaacgttgttcaggccagagccaattgctagtgctgccgccgctgccgccaccgtgacaagtactggcggtggcggaggcggaggtgggggcggcagtggaggcgggggcggcagctccgggaacggtgggggaggtggtggaggcggcggaggctcgaattgcaatccaaacttggcggcagccagcaatgggagcggcggcggaggaggtggcatcagtgccggtggcggcgtggcttccagcacccccattaatgcttcgacaggcagctcctcctctagttctagctcgagttcttcgtccagctcctcctcctcatcttcctcttccagttcttcttgcggtcccctccccgggaaacctgtgtattcaacccccagcccagttgagaatactccgcagaacaacgaatgcaaaatggtcgaccttaggggtgccaaggtggcttcattcaccgttgaaggctgtgaacttatctgtctgccccaggcctttgacttgtttctgaaacaccttgtgggagggctccacaccgtatatacaaagctgaagcgtctggagatcacccccgtggtgtgcaatgtcgaacaggtgcgcattttacgaggcctgggagctattcagccaggggtgaaccggtgtaaactgattagccgaaaggattttgagaccctctacaacgattgtaccaacgctagttcacgccccggtcgacccccaaaaaggacccagtccgtgacctcacctgagaatagccacataatgccccattctgtcccaggcctgatgtcacccggcattatcccgcctactggcctgacggctgccgccgctgctgccgccgcagctacgaatgccgccatcgcagaagctatgaaggttaagaaaatcaagctggaggccatgtctaattatcatgctagcaataatcagcacggcgcagattcagagaacggggatatgaactcgtctgtgggaagtagcgatgggtcctgggacaaggagaccctgccaagttccccatcccaagggccacaggcctccataacccaccctcggatgcccggggcaaggagcctgccactaagccatcccctcaatcatctgcagcagagccacttgttgccaaacggcctggagctcccttttatgatgatgccccatcctctcattcctgtatcactgccaccagcctctgtgacgatggctatgtcgcagatgaatcacctttctaccatcgccaacatggcagccgcagcccaggtccaatctccgcctagcagagtcgaaaccagtgtcataaaagaacgagtacccgattccccatcccccgctcccagcctagaggaggggcggaggccaggctctcaccccagtagtcaccggtcttcaagcgtgtcaagctcacctgcccggactgagtcttcttccgataggatccccgtgcaccagaatgggctatctatgaatcagatgctgatggggctaagccccaatgtcctgcccggacccaaggaaggggatctggccggccacgacatgggacacgagtccaagagaatgcacatcgagaaggacgaaacgcctctgtctaccccaacagcccgcgattcattggataaactaagtctgacaggccatggccaacctctgcccccgggattcccctcaccatttctatttcccgacggactgagctctattgagacactgctgactaatatccaagggttactgaaggtggccattgataacgcacgagctcaggaaaagcaggtccagttagagaagacagaattgaaaatggactttctgcgcgagcgagaactgagagagacactcgaaaaacagctcgccatggagcagaagaatcgcgcgatagtgcagaagcgcctgaagaaggaaaagaaggctaaacgaaaattacaggaagccctcgagtttgaaacgaagagacgggaacaggcagagcaaaccttgaaacaggccgcatctactgactcacttagggttctgaacgacagcctcacaccggagatcgaagctgatagatccggaggcaggacagatgctgaacggacaattcaagccgcccggctctatattaagacagtgtgcatgtattag

SEQ ID NO: 329372 - DNA, 2283 bp, Artificial Sequence
  derived and/or modified sequence
atggccgttcctgctgcacttatccccccaacccaactcgtcccaccacagccacccatctctactagcgccagcagctccggcacaaccacgtccacgtcaagcgccacttcgagcccagctccctctattggcccaccagcatcaagtgggccaactctgtttcggccagagccaatcgccagcgctgcagctgccgctgctaccgtgactagcacgggcggtggcggaggaggcggtggcggaggcagcggagggggagggggttcaagtgggaacggcggtggaggcggaggtggcggaggcggatccaattgtaaccccaatctggctgccgcttctaatggttccggtggtggcggtggcggaatctcagcgggtgggggtgtcgccagttcaacccccatcaacgcaagcaccgggtccagcagctctagctcgtctagtagttccagttcatccagttcttcttcttcctcctcctcgtcgtcatcatgtggtccactgccagggaagccagtgtactcaactcccagtccagtggaaaacacaccgcagaataacgagtgcaagatggtagacttgcggggagccaaggtggcttcctttactgtggaaggttgcgagttgatttgcctgccccaggcattcgacttgttcctcaagcacttagtgggcggtctgcacacggtgtatacaaagctcaagcgactggaaatcaccccagttgtatgcaacgtggagcaggtgcggatcttaagagggttaggcgctatacagcccggagtgaacagatgtaaattgataagtagaaaagattttgagacactgtataacgactgtactaatgctagttcccgacccggtcgcccacctaagcgcacacagtctgtaacatctcctgagaactcacatatcatgcctcactccgtcccgggactgatgtcacctggcattattccacccacaggcctcaccgctgccgctgcagccgctgctgccgctaccaacgcagcaattgcggaagcaatgaaagttaagaaaattaaactcgaggccatgtctaattaccacgcatccaataaccaacatggtgctgactcagaaaacggagatatgaactccagtgtgggtagttctgatgggtcatgggacaaagagacattaccttcatccccctcccagggacctcaggcctccatcacccatcctagaatgccaggcgcacgatcgctgccactgagccatcctctgaaccacctccagcaatcccatctcttacctaacgggctagaactgccctttatgatgatgccacatcccttaatccctgtctcccttccaccagcctcagtaacaatggccatgagccaaatgaatcacttgagtacgatcgcaaatatggcagcagcagcccaggttcaaagtccccctagtagagtggagaccagcgtcatcaaggagagagtgcccgattcaccttcccccgctccaagcttggaggaaggtcgtcggccaggcagccacccatcgtctcatcgcagttcttccgtttctagcagtcccgctcggaccgaatctagctccgatcgaatcccagtgcaccaaaacggtctcagtatgaaccagatgctgatgggactctcccccaacgttctgcccggaccaaaagaaggagacctggcgggacacgatatgggccacgaaagcaaacgcatgcacatcgaaaaggacgagacgcctttatccacgcccactgccagggatagtcttgataagctgagtttgaccggtcatggacaacctctgccgcctggattcccctcaccctttctgtttcccgacggtctttcttccatagaaacgttgctgaccaatatacagggcctccttaaagtggccatcgataacgctcgggcacaggagaaacaagtccagctggaaaaaactgagttgaaaatggacttccttagggagcgagaacttcgcgagaccctggagaagcagctcgcgatggagcagaagaatcgtgccattgtgcagaagagacttaagaaggaaaagaaggcaaagcggaagctgcaagaggctctggaattcgaaaccaaaaggcgcgagcaagcggagcagaccctgaagcaggcagcctccacagactcgctgcgagtgctcaacgactccctcacaccagagatcgaggcagacagaagcggtgggcgaactgacgcagagaggactatccaggacggaagactttacctcaaaacaactgtgatgtactag

SEQ ID NO: 329373 - DNA, 2283 bp, Artificial Sequence
  derived and/or modified sequence
atggcggtgcccgcagcgcttattcctcctacacagttggttccaccacagccacccattagtacctccgcctctagcagtgggacaaccacgtcaacctcaagcgccacctcctcaccagccccaagcattggtccacctgcctctagcgggccaactctgtttagacccgagccgattgcatctgccgctgccgcagccgctacagtaacgagcaccgggggagggggaggtggaggcggaggcggatccggcggtggtggaggatcctcgggaaacgggggtggaggcggagggggaggcggtggatcaaactgtaaccctaatcttgcagccgcatccaatggatcagggggtggtggcggaggaatctctgccggaggaggcgtcgcttcatcaacaccaatcaacgcgagtaccggatcctcatcaagctcgtcctcatcctctagcagctcttcatccagctcatcaagttccagctcttcaagctcttgtggacctctcccgggaaagcccgtgtattccacgccctcacccgttgagaacacaccacaaaacaatgagtgtaaaatggtggatttgcggggagccaaggttgcatccttcacggtggagggatgcgaactgatctgtttaccccaagcatttgacctatttcttaagcacctggtcgggggactgcacacagtctacacaaagttgaaaaggctggagattactcccgtcgtctgtaacgttgaacaggttcggatcctccgaggcttgggtgctatccagcctggcgtaaatcgatgcaagctcatttcacggaaagacttcgagactctgtacaatgattgtaccaatgcctcttctaggcctgggcgtccaccaaagcggacccagagcgtgacatcgccagaaaatagtcatatcatgccacacagtgtgcctgggcttatgtctcccggtatcattcccccaaccggcctgaccgcggcagccgcagctgctgctgcagctactaatgccgcaatcgctgaagccatgaaagtgaagaagatcaagctcgaggccatgagcaattaccacgcatcaaataatcagcacggagccgactctgagaatggggacatgaattcgagcgtcggctcttccgatggctcctgggacaaggagacccttcctagctccccatctcagggtccacaggcctccatcactcatcctcggatgccgggagccagatcattacccctgtctcatcccctgaaccatctccaacaatcgcacctgctgccaaatgggttagagctgccttttatgatgatgccccatcctctcatccctgtgagcctgccacccgctagcgtgactatggccatgagccagatgaaccacttgtccaccatagcgaacatggccgctgctgcgcaggtccagtccccgccaagccgggtagaaacttcagtgatcaaagagcgcgttccggactctccctcccctgccccaagcctggaggaggggagaaggccagggagccatccctccagccaccgctcttcaagtgtaagcagctctcccgcaaggaccgagagtagctccgataggatacctgtccatcaaaacggtcttagcatgaatcagatgcttatgggacttagcccaaacgtacttcctggcccaaaagaaggtgatctggctgggcacgatatgggccacgaatctaagaggatgcatatcgagaaagacgaaacacctctttccacccctaccgctcgcgacagcctcgataaactgtctctgactgggcacggacaacctttgccaccgggatttccttctcccttcttgtttcctgacggactttcatcaattgagactctcctcactaacatccaggggttgttaaaggtggccattgacaacgccagagcccaggaaaaacaggtccagctcgaaaagacggagctgaaaatggactttttgagggaaagagagcttagggagacccttgagaaacagctggccatggaacagaaaaatcgggctatagtccagaaacgcctgaagaaagagaagaaagcgaaacggaagttgcaagaggccttagaatttgagactaaacgacgggaacaggcagaacagactctgaagcaagccgcatctaccgactctctcagagtactaaatgattcacttacacccgaaatagaagctgatcggagcggtggccgaaccgacgccgagagaacaattcaggccgctaggctgtacatcaaaacagtgtgcatgtactag

SEQ ID NO: 329374 - DNA, 2992 bp, Artificial Sequence
  derived and/or modified sequence
atggcagtgccggcggctttgatccctccgacccagctggtcccccctcaacccccaatctccacgtctgcttcctcctctggcaccaccacctccacctcttcggcgacttcgtctccggctccttccatcggacccccggcgtcctctgggccaactctgttccgcccggagcccatcgcttcggcggcggcggcggcggccacagtcacctctaccggcggcggcggcggcggcggcggcggcggcagcggaggcggcggcggcagcagcggcaacggaggcggcggtggcggcggcggcggtggcagcaactgcaaccccaacctggcggccgcgagcaacggcagcggcggcggcggcggcggcatcagcgctggcggcggcgtcgcttccagcacccccatcaacgccagcaccggcagcagcagcagcagcagtagcagcagcagcagcagcagcagtagtagcagcagcagcagtagcagcagcagctgcggccccctccccgggaaacccgtgtactcaaccccgtccccagtggaaaacacccctcagaataatgagtgcaaaatggtggatctgaggggggccaaagtggcttccttcacggtggagggctgcgagctgatctgcctgccccaggctttcgacctgttcctgaagcacttggtggggggcttgcatacggtctacaccaagctgaagcggctggagatcacgccggtggtgtgcaatgtggaacaagttcgcatcctgaggggactgggcgccatccagccaggagtgaaccgctgcaaactcatctccaggaaggacttcgagaccctctacaatgactgcaccaacgcaagttctagacctggaaggcctcctaagaggactcaaagtgtcacctccccagagaactctcacatcatgccgcattctgtccctggtctcatgtctcctgggataattccaccaacaggtctgacagcagccgctgcagcagctgctgctgctaccaatgcagctattgctgaagcaatgaaggtgaaaaaaatcaaattagaagccatgagcaactatcatgccagtaataaccaacatggagcagactctgaaaacggggacatgaattcaagtgtcggcagcagtgatggttcctgggataaggaaacactgccctcttccccatcccagggacctcaggcctctataacccacccccgcatgcctggagcacgtagccttccacttagtcatcctctcaaccatcttcagcagagccaccttctgccaaatggactggaacttccttttatgatgatgccccaccctctaattcctgtcagcctacctccagcatctgtcaccatggcaatgagccagatgaaccacctcagcaccattgcaaatatggcagcagcagcacaagttcagagtcccccatccagagttgagacatcagttattaaggagcgtgttcctgatagcccctcacctgccccctctctggaggaggggagaaggcctggcagtcacccatcatcacatcgcagcagcagcgtgtccagctcccctgctcggactgagagctcttctgacagaatcccggtccatcagaatgggttgtccatgaaccagatgctgatgggcttatcaccaaatgtacttcctgggcccaaagagggagatttggccggtcatgacatgggacatgagtcaaaaaggatgcatattgaaaaagatgagaccccgctttctacaccaaccgcaagagacagccttgacaaactctctctaactgggcatggacaaccactgcctccaggttttccatctccttttctgtttcctgatggactgtcttccatcgagactcttctgactaacatacaggggctgttgaaagttgccatagataatgccagagctcaagagaaacaggtccaactggaaaaaactgagctgaagatggattttttaagggaaagagaactaagggaaacacttgagaagcagttggctatggaacaaaagaatagagccatagttcaaaagaggctaaagaaggagaagaaggcaaagagaaaattgcaggaagcacttgagtttgagacgaaacggcgtgaacaagcagaacagacgctaaaacaggcagcttcaacagatagtctcagggtcttaaatgactctctgaccccagagatagaggctgaccgcagtggcggcagaacagatgctgaaaggacaatacaagatggaagactgtatttgaaaactactgtcatgtactgaatctttcctgttgaagaaatccatgttatagaaaagaactttgcagtcagacattcgtcatgggaaagttcagaaaaaaataaagtccttttaagggaacttcctgaattttgtgtattaatgttctttaaaagtttaagtattctacaaaaaaaaaaaaagttttctccattgattttcacctgtggttcataccagagacctgagaatgtttgtaaatgtacaagtatcaaagttcttacagttaattactgcaacttgctgctggacaattgtatacagagttaaaggcaggtctgaataagacctagctttgtttttttctaatggaatgaaccattttcctcttctgaaaattctgtatctgagcacatcaagagactcttgtagcagtggttacccagacttacagaattatgtcctccagaaaccagcaagaacacttggaatgaacgaatgaacttgtagggggcatagaggattcttgaaaaaaaaaaatgcaagagtgattttctgttacattcaatttcaaactctctaattgtgggttttctcctgaagaattttttttcacatactttccaaaagaccaacaaatggatgttgacaacaacccaatgaaataacattttgcatatctgaaaagaagcattgaatataagccaaaagctttcactgaaggtttttttttcttaaaaataaaaaaaaa

SEQ ID NO: 329375 - DNA, 2706 bp, Artificial Sequence
  derived and/or modified sequence
atctttgatcaatgtacttgccagggagagcccaagtccttcaaacctcctccttttcaccttcatccttaactttgtgctagagcgagacccacacaacaacagccgaccctccccgccccacccccacccccaaaccagccctcgatcccagcccccggagaggactcgcatttcgacttgcgggacacttttgtgcgttcctctccagagcgcctctcgtgctcgcccctcttgcgctcgctctttattaccttcacctccttttctcccccttctctccctttctccttctcgttctctcccggagttgttgttgcccccctcgctccttctccccccttttttccccttcccctcccgggggtgtgtggcaacttttcctctcgcttctcctccgtctgtttccccttatatgtgaccatggcagtgccggcggctttgatccctccgacccagctggtcccccctcaacccccaatctccacgtctgcttcctcctctggcaccaccacctccacctcttcggcgacttcgtctccggctccttccatcggacccccggcgtcctctgggccaactctgttccgcccggagcccatcgcttcggcggcggcggcggcggccacagtcacctctaccggcggcggcggcggcggcggcggcggcggcagcggaggcggcggcggcagcagcggcaacggaggcggcggtggcggcggcggcggtggcagcaactgcaaccccaacctggcggccgcgagcaacggcagcggcggcggcggcggcggcatcagcgctggcggcggcgtcgcttccagcacccccatcaacgccagcaccggcagcagcagcagcagcagtagcagcagcagcagcagcagcagtagtagcagcagcagcagtagcagcagcagctgcggccccctccccgggaaacccgtgtactcaaccccgtccccagtggaaaacacccctcagaataatgagtgcaaaatggtggatctgaggggggccaaagtggcttccttcacggtggagggctgcgagctgatctgcctgccccaggctttcgacctgttcctgaagcacttggtggggggcttgcatacggtctacaccaagctgaagcggctggagatcacgccggtggtgtgcaatgtggaacaagttcgcatcctgaggggactgggcgccatccagccaggagtgaaccgctgcaaactcatctccaggaaggacttcgagaccctctacaatgactgcaccaacgcaagttctagacctggaaggcctcctaagaggactcaaagtgtcacctccccagagaactctcacatcatgccgcattctgtccctggtctcatgtctcctgggataattccaccaacaggtctgacagcagccgctgcagcagctgctgctgctaccaatgcagctattgctgaagcaatgaaggtgaaaaaaatcaaattagaagccatgagcaactatcatgccagtaataaccaacatggagcagactctgaaaacggggacatgaattcaagtgtcggcagcagtgatggttcctgggataaggaaacactgccctcttccccatcccagggacctcaggcctctataacccacccccgcatgcctggagcacgtagccttccacttagtcatcctctcaaccatcttcagcagagccaccttctgccaaatggactggaacttccttttatgatgatgccccaccctctaattcctgtcagcctacctccagcatctgtcaccatggcaatgagccagatgaaccacctcagcaccattgcaaatatggcagcagcagcacaagttcagagtcccccatccagagttgagacatcagttattaaggagcgtgttcctgatagcccctcacctgccccctctctggaggaggggagaaggcctggcagtcacccatcatcacatcgcagcagcagcgtgtccagctcccctgctcggactgagagctcttctgacagaatcccggtccatcagaatgggttgtccatgaaccagatgctgatgggcttatcaccaaatgtacttcctgggcccaaagagggagatttggccggtcatgacatgggacatgagtcaaaaaggatgcatattgaaaaagatgagaccccgctttctacaccaaccgcaagagacagccttgacaaactctctctaactgggcatggacaaccactgcctccaggttttccatctccttttctgtttcctgatggactgtcttccatcgagactcttctgactaacatacaggggctgttgaaagttgccatagataatgccagagctcaagagaaacaggtccaactggaaaaaactgagctgaagatggattttttaagggaaagagaactaagggaaacacttgagaagcagttggctatggaacaaaagaatagagccatagttcaaaagaggctaaagaaggagaagaaggcaaagagaaaattgcaggaagcacttgagtttgagacgaaacggcgtgaacaagcagaacagacgctaaaacaggcagcttcaacagatagtctcagggtcttaaatgactctctgaccccagagatagaggctgaccgcagtggcggcagaacagatgctgaaaggacaatacaagctgcaagattatacatcaaaacagtttgcatgtattaa

SEQ ID NO: 329376 - DNA, 2283 bp, Artificial Sequence
  derived and/or modified sequence
atggccgtgcccgccgccctgatcccccccacccagctggtgcccccccagccccccatcagcaccagcgccagcagcagcggcaccaccaccagcaccagcagcgccaccagcagccccgcccccagcatcggcccccccgccagcagcggccccaccctgttcagacccgagcccatcgccagcgccgccgccgccgccgccaccgtgaccagcaccggcggcggcggcggcggcggcggcggcggcagcggcggcggcggcggcagcagcggcaacggcggcggcggcggcggcggcggcggcggcagcaactgcaaccccaacctggccgccgccagcaacggcagcggcggcggcggcggcggcatcagcgccggcggcggcgtggccagcagcacccccatcaacgccagcaccggcagcagcagcagcagcagcagcagcagcagcagcagcagcagcagcagcagcagcagcagcagcagcagcagctgcggccccctgcccggcaagcccgtgtacagcacccccagccccgtggagaacaccccccagaacaacgagtgcaagatggtggacctgagaggcgccaaggtggccagcttcaccgtggagggctgcgagctgatctgcctgccccaggccttcgacctgttcctgaagcacctggtgggcggcctgcacaccgtgtacaccaagctgaagagactggagatcacccccgtggtgtgcaacgtggagcaggtgagaatcctgagaggcctgggcgccatccagcccggcgtgaacagatgcaagctgatcagcagaaaggacttcgagaccctgtacaacgactgcaccaacgccagcagcagacccggcagaccccccaagagaacccagagcgtgaccagccccgagaacagccacatcatgccccacagcgtgcccggcctgatgagccccggcatcatcccccccaccggcctgaccgccgccgccgccgccgccgccgccgccaccaacgccgccatcgccgaggccatgaaggtgaagaagatcaagctggaggccatgagcaactaccacgccagcaacaaccagcacggcgccgacagcgagaacggcgacatgaacagcagcgtgggcagcagcgacggcagctgggacaaggagaccctgcccagcagccccagccagggcccccaggccagcatcacccaccccagaatgcccggcgccagaagcctgcccctgagccaccccctgaaccacctgcagcagagccacctgctgcccaacggcctggagctgcccttcatgatgatgccccaccccctgatccccgtgagcctgccccccgccagcgtgaccatggccatgagccagatgaaccacctgagcaccatcgccaacatggccgccgccgcccaggtgcagagcccccccagcagagtggagaccagcgtgatcaaggagagagtgcccgacagccccagccccgcccccagcctggaggagggcagaagacccggcagccaccccagcagccacagaagcagcagcgtgagcagcagccccgccagaaccgagagcagcagcgacagaatccccgtgcaccagaacggcctgagcatgaaccagatgctgatgggcctgagccccaacgtgctgcccggccccaaggagggcgacctggccggccacgacatgggccacgagagcaagagaatgcacatcgagaaggacgagacccccctgagcacccccaccgccagagacagcctggacaagctgagcctgaccggccacggccagcccctgccccccggcttccccagccccttcctgttccccgacggcctgagcagcatcgagaccctgctgaccaacatccagggcctgctgaaggtggccatcgacaacgccagagcccaggagaagcaggtgcagctggagaagaccgagctgaagatggacttcctgagagagagagagctgagagagaccctggagaagcagctggccatggagcagaagaacagagccatcgtgcagaagagactgaagaaggagaagaaggccaagagaaagctgcaggaggccctggagttcgagaccaagagaagagagcaggccgagcagaccctgaagcaggccgccagcaccgacagcctgagagtgctgaacgacagcctgacccccgagatcgaggccgacagaagcggcggcagaaccgacgccgagagaaccatccaggacggcagactgtacctgaagaccaccgtgatgtactag

SEQ ID NO: 329377 - DNA, 2283 bp, Artificial Sequence
  derived and/or modified sequence
atggccgtgcccgccgccctgatcccccccacccagctggtgcccccccagccccccatcagcaccagcgccagcagcagcggcaccaccaccagcaccagcagcgccaccagcagccccgcccccagcatcggcccccccgccagcagcggccccaccctgttcagacccgagcccatcgccagcgccgccgccgccgccgccaccgtgaccagcaccggcggcggcggcggcggcggcggcggcggcagcggcggcggcggcggcagcagcggcaacggcggcggcggcggcggcggcggcggcggcagcaactgcaaccccaacctggccgccgccagcaacggcagcggcggcggcggcggcggcatcagcgccggcggcggcgtggccagcagcacccccatcaacgccagcaccggcagcagcagcagcagcagcagcagcagcagcagcagcagcagcagcagcagcagcagcagcagcagcagcagctgcggccccctgcccggcaagcccgtgtacagcacccccagccccgtggagaacaccccccagaacaacgagtgcaagatggtggacctgagaggcgccaaggtggccagcttcaccgtggagggctgcgagctgatctgcctgccccaggccttcgacctgttcctgaagcacctggtgggcggcctgcacaccgtgtacaccaagctgaagagactggagatcacccccgtggtgtgcaacgtggagcaggtgagaatcctgagaggcctgggcgccatccagcccggcgtgaacagatgcaagctgatcagcagaaaggacttcgagaccctgtacaacgactgcaccaacgccagcagcagacccggcagaccccccaagagaacccagagcgtgaccagccccgagaacagccacatcatgccccacagcgtgcccggcctgatgagccccggcatcatcccccccaccggcctgaccgccgccgccgccgccgccgccgccgccaccaacgccgccatcgccgaggccatgaaggtgaagaagatcaagctggaggccatgagcaactaccacgccagcaacaaccagcacggcgccgacagcgagaacggcgacatgaacagcagcgtgggcagcagcgacggcagctgggacaaggagaccctgcccagcagccccagccagggcccccaggccagcatcacccaccccagaatgcccggcgccagaagcctgcccctgagccaccccctgaaccacctgcagcagagccacctgctgcccaacggcctggagctgcccttcatgatgatgccccaccccctgatccccgtgagcctgccccccgccagcgtgaccatggccatgagccagatgaaccacctgagcaccatcgccaacatggccgccgccgcccaggtgcagagcccccccagcagagtggagaccagcgtgatcaaggagagagtgcccgacagccccagccccgcccccagcctggaggagggcagaagacccggcagccaccccagcagccacagaagcagcagcgtgagcagcagccccgccagaaccgagagcagcagcgacagaatccccgtgcaccagaacggcctgagcatgaaccagatgctgatgggcctgagccccaacgtgctgcccggccccaaggagggcgacctggccggccacgacatgggccacgagagcaagagaatgcacatcgagaaggacgagacccccctgagcacccccaccgccagagacagcctggacaagctgagcctgaccggccacggccagcccctgccccccggcttccccagccccttcctgttccccgacggcctgagcagcatcgagaccctgctgaccaacatccagggcctgctgaaggtggccatcgacaacgccagagcccaggagaagcaggtgcagctggagaagaccgagctgaagatggacttcctgagagagagagagctgagagagaccctggagaagcagctggccatggagcagaagaacagagccatcgtgcagaagagactgaagaaggagaagaaggccaagagaaagctgcaggaggccctggagttcgagaccaagagaagagagcaggccgagcagaccctgaagcaggccgccagcaccgacagcctgagagtgctgaacgacagcctgacccccgagatcgaggccgacagaagcggcggcagaaccgacgccgagagaaccatccaggccgccagactgtacatcaagaccgtgtgcatgtactag

SEQ ID NO: 329378 - protein, 86 aa, Artificial Sequence
  derived and/or modified sequence
VICPPWPPKVLGLQAKYHLHNHKFFVLRRSLALLPRLECSGAVLAHCNLCLPSSSNSPASASRVAGITGSCHHTRLIFCIFSREGV

SEQ ID NO: 329379 - protein, 91 aa, Artificial Sequence
  derived and/or modified sequence
FFLRWSLTLSSRLECSGATSAHCNVRLPGSRHSPTSASRVAGTTGARHLSRLIFIFSRDGVSPWSRSPDLAIRPPRPPKKLGLQAPATMPG

SEQ ID NO: 329380 - protein, 75 aa, Artificial Sequence
  derived and/or modified sequence
CFSHSFFFFFFFLRWSLALSPRLECSGAISAHCKLRLLGSRHSPASASRVAGTTGACHHARLFFCIFSRDGVSPC

SEQ ID NO: 329381 - protein, 77 aa, Artificial Sequence
  derived and/or modified sequence
INCYSFYSLFLFVCITDGVSLSPRPECSGAISAHCRLRPRGSRHSPASASRVAGTTGARHLAQLIFCIFSRDGVSLC

SEQ ID NO: 329382 - protein, 101 aa, Artificial Sequence [sequence omitted]

SEQ ID NO: 329383 - protein, 110 aa, Artificial Sequence
  derived and/or modified sequence
CTRYFYFYLFCFIFIYLFFFLRWSLALSPRLECSGAISAHCKLHLPGSCHYPASASRVAGTTGARHHAWLIFCMFSKDRVSRWSQSPDIAICLPWPPKVLGLQAPATTPG

SEQ ID NO: 329384 - protein, 284 aa, Artificial Sequence
  derived and/or modified sequence
MSDNKERKSQGFPKEDNQDTSSLADAVEKVAKQQQSQASEIEKNKKVLFNLKNELHELEKEIAAISAETKETERQIYQQDSAIENTKLHCDSLETQIKSLHSENVKLKFDIETAQEDFEEHMIKYNAYYAKIKAHKNSLGEVESKWSFMTELHEKRDFVKKLKTMKEELMQDLQNPGGNRITQVQEDITNLKDKIITVKESIIEKTCFLEEEKKTHEKLRKEIESLAPSPRLECSSAISAHCKLCLPGSRHSPASASGVAGTTGACHHTQLIFCIFSRDGVSPC

SEQ ID NO: 329385 - DNA, 603 bp, Artificial Sequence
  derived and/or modified sequence
gagcaaaaacaaggttagcctgcagcagagccgcagcagcaacagccaccaaagcgggggctgaaagggaagagaacttagatttgacctgtgcaaggacctcagcagcttggacacagcccactgcagagaactgttgattggtttcagaaaaatcttggtccatgtttttaaaccaaccaacaagtaatactaaagaacaaaccagcactttgggaggccgaggctggcggatcacaaggccaggagatcgagaccatcctggctaacacggtgaaaccctgtctctactaaaaatacaaaaaattagccgggcgtggtggtggaagcctgtagtcccagctactcaggaggctgagcaggagaatggcgtgaacctgggaggcagagcttgcagtgagccaagattgtgccactgcactccagcctgggcgacagagcgagactctgtctcaaaaaaaaaagaacaaaccaaaccaacttgctagaactactctttgagttctggatgaaaggagaagctggacatatgctacacaatgaaaagtcaaagcaggagggacacatctggggctctatgaggaggacagctttcatcctggg

SEQ ID NO: 329386 - DNA, 228 bp, Artificial Sequence
  derived and/or modified sequence
tgcttcagccacagcttcttcttcttcttcttcttcctgagatggagcctggccctgagccccagactggagtgcagcggcgccatcagcgcccactgcaagctgagactgctgggcagcagacacagccccgccagcgccagcagagtggccggcaccaccggcgcctgccaccacgccagactgttcttctgcatcttcagcagagacggcgtgagcccctgctag

SEQ ID NO: 329387 - DNA, 234 bp, Artificial Sequence
  derived and/or modified sequence
atcaactgctacagcttctacagcctgttcctgttcgtgtgcatcaccgacggcgtgagcctgagccccagacccgagtgcagcggcgccatcagcgcccactgcagactgagacccagaggcagcagacacagccccgccagcgccagcagagtggccggcaccaccggcgccagacacctggcccagctgatcttctgcatcttcagcagagacggcgtgagcctgtgctag

SEQ ID NO: 329388 - DNA, 228 bp, Artificial Sequence
  derived and/or modified sequence
tgcttctcccactcttttttctttttcttcttttttttgaggtggagcctcgctctgtcccccagattagaatgtagcggtgctattagcgctcactgcaaattgcggctcctgggctctagacatagtcccgcttctgcctcgcgcgtggctggtacaacaggcgcatgtcatcatgcccgcctttttttctgtattttcagcagggacggcgtgagcccctgttag

SEQ ID NO: 329389 - DNA, 228 bp, Artificial Sequence
  derived and/or modified sequence
tgctttagtcactccttcttcttcttcttcttcttcttgcggtggtccttggccctttcacccaggcttgaatgctccggggccatctccgcacactgcaagctcagactgttagggtcccgtcacagtcctgcaagcgcatcccgtgttgctggcacaacgggagcttgtcaccatgctcgcctgttcttctgcatctttagcagggatggggtgtctccctgttag

SEQ ID NO: 329390 - DNA, 234 bp, Artificial Sequence
  derived and/or modified sequence
atcaactgctattccttctattccctgtttctgttcgtctgcattaccgatggcgtatctctcagtcctagacccgagtgctctggtgccataagtgcccattgtaggctcaggccacgcggctcacgtcactcacctgccagtgcctctagagtagcaggaacaacaggtgcacggcacctcgcgcagcttattttttgcatattctcaagggatggagtgagtctgtgttag

SEQ ID NO: 329391 - DNA, 228 bp, Artificial Sequence
  derived and/or modified sequence
tgcttcagccatagcttcttcttcttctttttcttccttaggtggtcactcgccttatctcctcgccttgaatgctctggggccatttccgcgcactgcaaactgcgtctgctaggatctagacacagtcctgccagcgctagtagggtagccgggaccacaggggcctgtcatcacgctcgtcttttcttttgcattttttcgagggacggcgtgagtccttgctag

SEQ ID NO: 329392 - DNA, 228 bp, Artificial Sequence
  derived and/or modified sequence
tgtttcagtcacagtttcttttttttttttttttttctgcggtggagtctggccctgagccccagactcgagtgcagtggcgctattagcgcccactgtaaattgagactgctggggagcagacactccccagcctccgctagcagggttgcggggaccacaggtgcgtgccaccacgcaaggcttttcttttgtatttttagtcgagatggcgtttccccctgttag

SEQ ID NO: 329393 - DNA, 228 bp, Artificial Sequence
  derived and/or modified sequence
tgcttcagccacagcttcttcttcttcttcttcttcctgcgctggagcctggccctgagcccccggctggagtgcagcggggccatcagcgcccactgcaagctgcggctgctgggcagccgccacagccctgccagcgccagccgggtggccggcaccaccggggcctgccaccacgcccggctcttcttctgcatcttcagcagagatggagtgagcccctgctag

SEQ ID NO: 329394 - DNA, 234 bp, Artificial Sequence
  derived and/or modified sequence
atcaactgctacagcttctacagcctcttcctgtttgtgtgcatcacagatggagtgtccctgagccccaggcctgagtgcagcggggccatcagcgcccactgccgcctgcggccccggggcagccgccacagccctgccagcgccagccgggtggccggcaccaccggggcccggcacctggcccagctgatcttctgcatcttcagcagagatggagtgtccctgtgctag

SEQ ID NO: 329395 - DNA, 228 bp, Artificial Sequence
  derived and/or modified sequence
tgcttcagccacagcttcttcttcttcttcttcttcctgcggtggtccctggctctctcgcctcggctggagtgttctggagcaatctccgcccactgcaagttacgcctgctggggtctagacactccccagcctctgcctccagggttgctggtactaccggcgcctgtcaccatgcccggctcttcttctgtatatttagtcgcgatggcgtaagtccatgttag

SEQ ID NO: 329396 - DNA, 228 bp, Artificial Sequence
  derived and/or modified sequence
tgcttcagccacagcttcttcttcttcttcttcttcctgcggtggagtctggcactgagccccagactagaatgcagcggggcgatcagtgcgcattgcaagctccgattgctgggtagccggcactcccctgccagcgcaagcagagtcgccgggacaaccggcgcttgtcaccacgcgcggctgttcttttgtatcttcagccgtgatggggtctcaccatgctag

SEQ ID NO: 329397 - DNA, 234 bp, Artificial Sequence
  derived and/or modified sequence
atcaactgctacagcttctacagcctgttcctgttcgtgtgcatcaccgacggtgtgtccctgagtccacgaccagaatgctcaggagcaatttctgcacactgtcgcttgagacctagaggctcgaggcatagccccgctagcgcatcacgggtggcagggactaccggtgcacgccatttagctcagcttattttctgtattttcagccgtgacggcgtttcattatgttag

SEQ ID NO: 329398 - DNA, 228 bp, Artificial Sequence
  derived and/or modified sequence
tgcttcagccacagcttcttcttcttcttcttcttcctgcggtggtccctcgcattaagcccccgactagaatgtagcggcgcaatatcagcacattgtaagctgcgcttgcttggctccagacactctcccgccagtgcaagccgcgtggcaggcacgacaggagcttgtcaccacgcccgcttgtttttttgcattttttcccgggatggtgtctcgccctgttag

SEQ ID NO: 329399 - DNA, 228 bp, Artificial Sequence
  derived and/or modified sequence
tgcttcagccacagcttcttcttcttcttcttcttcctgcggtggtccctggccttatcaccccggttggagtgtagtggcgctatttccgcccattgtaaacttcgcctcctcggctcccggcattcccccgcatccgcctctagggtcgcgggcaccaccggagcctgtcaccacgccaggctcttcttctgcattttttctcgcgatggggtctccccttgctag

SEQ ID NO: 329400 - DNA, 228 bp, Artificial Sequence
  derived and/or modified sequence
tgttttagtcacagcttcttcttttttttcttttttctgagatggagtctcgccttatccccacggctggaatgttccggggctataagtgcccactgcaaactcaggctgctgggtagccgtcattcacccgcttctgccagcagggtcgctggaaccacaggagcctgtcaccacgccagactgttcttttgtatattctccagagatggagtctccccatgctag

SEQ ID NO: 329401 - DNA, 228 bp, Artificial Sequence
  derived and/or modified sequence
tgtttttctcacagtttctttttctttttcttcttccttcgatggtccctcgcattgagccccaggctggagtgctccggcgctatctcggcgcattgcaagctgaggctgctcggtagtcggcactctccagcttccgcctcacgtgtggctggaacaactggcgcttgccaccatgctcgtctgttcttctgcatcttctcacgcgatggggtaagcccttgctag

SEQ ID NO: 329402 - DNA, 234 bp, Artificial Sequence
  derived and/or modified sequence
atcaattgttattctttttattcactctttctgttcgtttgcatcacagatggcgtaagcctatctccccgacctgagtgctcaggtgcaatttcagcgcactgtaggctgcgtccacggggaagtcgacactctcctgcatcagcaagtcgcgttgccggtactactggtgccagacacctggctcaattgattttctgcatattcagtagggacggggtgtcactttgttag

SEQ ID NO: 329403 - DNA, 228 bp, Artificial Sequence
  derived and/or modified sequence
tgcttctctcattctttttttttctttttcttttttctcaggtggagtctggcgctgagcccacgcctcgaatgttctggcgcaatttccgcccactgcaaactgcggctcctcgggtcgagacacagcccagcgtccgctagtagggttgcgggaacaactggcgcttgccaccatgccaggctgttcttctgcattttcagcagagacggcgtgtccccgtgctag

SEQ ID NO: 329404 - DNA, 228 bp, Artificial Sequence
  derived and/or modified sequence
tgcttcagtcatagcttctttttcttttttttctttctccggtggtctttggccctgtcacccagactcgaatgctcaggcgcaatcagcgcccactgcaaacttagactactcggctctaggcactctcctgctagcgcaagccgcgtcgccggtacgacaggcgcatgccaccacgctcgcctttttttttgcatattcagccgcgatggtgtgagcccgtgttag

SEQ ID NO: 329405 - DNA, 225 bp, Artificial Sequence
  derived and/or modified sequence
tgcttttcacactcttttttttttttttttttttttttgagatggagtctcgctctgtcgcccaggctggagtgcagtggcgcaatctcggctcactgcaaactccgcctcctgggttcacgccattctcctgcctcagcctcccgagtagctgggactacaggcgcctgccaccatgcccggctatttttttgtatttttagtagagacggggtttcaccgtgt

SEQ ID NO: 329406 - DNA, 234 bp, Artificial Sequence
  derived and/or modified sequence
ataaattgctacagcttctattctctgtttctctttgtgtgtattacagacggagtctcgctgtcgcccaggccggagtgcagtggcgcgatctcggctcactgcaggctccgcccccggggttcacgccattctcctgcctcagcctcccgagtagctgggactacaggcgcccgccacctcgcccagctaattttttgtatttttagtagagacggggtttcactgtgttag

SEQ ID NO: 329407 - DNA, 855 bp, Artificial Sequence
  derived and/or modified sequence
atgtccgataacaaggaaagaaaaagccagggcttccctaaggaggacaaccaagataccagttcgctggcagatgctgtcgagaaggttgccaaacagcagcagagccaagccagcgagatcgaaaagaataagaaggtgctctttaacctgaagaacgagctgcacgagctggaaaaagagattgcagcaattagcgccgagacaaaggaaaccgagcgccagatctatcagcaggactcagcaatagaaaatacaaagctgcactgcgattccctcgaaacccagattaaatccctgcactccgaaaatgtaaaactgaagttcgacattgagaccgctcaagaagacttcgaagaacatatgattaaatacaatgcatattacgccaaaatcaaagcccataaaaactctctgggcgaagtggagtccaaatggagtttcatgacggaactccacgagaagcgcgactttgtcaagaaacttaaaactatgaaggaggaactgatgcaggatttgcagaatccaggaggtaatcgcatcacacaggtgcaggaagacataactaatttaaaagacaagataatcactgtgaaggagtcaattatcgagaagacctgctttttagaggaggaaaaaaagacacatgagaagctgaggaaggagatagagagtctcgccccaagtcccagactggagtgttcttccgcaatctcagcacactgcaaactgtgcctgccagggtctcgacactcccctgcctcagccagtggcgtggcaggaactactggtgcctgccaccatacccaactgattttttgtatatttagcagggatggagtcagcccctgttag

SEQ ID NO: 329408 - DNA, 855 bp, Artificial Sequence
  derived and/or modified sequence
atgtctgacaacaaggagaggaagagccagggcttccccaaggaggacaaccaggacaccagcagcctggctgatgctgtggagaaggtggccaagcagcagcagagccaggccagcgagattgagaagaacaagaaggtgctcttcaacctgaagaatgagctgcacgagctggagaaggagattgctgccatctctgctgagaccaaggagacagagcggcagatctaccagcaggacagcgccatcgagaacaccaagctgcactgtgacagcctggagacccagatcaagagcctgcacagtgaaaatgtgaagctgaagtttgatattgaaacagcccaggaggactttgaggagcacatgatcaagtacaatgcctactatgccaagatcaaggcccacaagaacagcctgggggaggtggagagcaagtggagcttcatgacagagctgcacgagaagagggactttgtgaagaagctgaagaccatgaaggaggagctgatgcaggacctgcagaaccctgggggcaaccgcatcacccaggtgcaggaggacatcaccaacctgaaggacaagatcatcaccgtgaaggagagcatcatcgagaagacctgcttcctggaggaggagaagaagacccatgagaagctgaggaaggagattgagagcctggcccccagcccccggctggagtgcagcagcgccatcagcgcccactgcaagctgtgcctgcccggcagccgccacagccctgccagcgccagcggcgtggccggcaccactggagcctgccaccacacccagctgatcttctgcatcttcagcagagatggagtgagcccctgctag

SEQ ID NO: 329409 - DNA, 855 bp, Artificial Sequence
  derived and/or modified sequence
atgagcgacaacaaggagcggaagagccagggcttccccaaggaggacaaccaagacacaagctctctggccgatgctgtggagaaagttgccaaacagcagcagagccaagcgtctgaaattgagaaaaataagaaggtcttgttcaacctgaaaaatgaactgcacgagttagagaaagagatcgcggctatatctgccgagactaaagagactgagcggcaaatctaccaacaggattctgctattgagaacacgaaactccactgtgatagcttggaaacacagattaaaagtctgcattccgagaatgtcaaactcaagttcgatatagagacggcccaggaagactttgaggagcatatgattaaatacaatgcctattatgcaaagataaaggcacacaagaactcactaggagaagtcgaatccaaatggagttttatgactgagcttcacgagaagcgcgatttcgtgaaaaagctgaagacaatgaaagaagagttgatgcaagaccttcagaacccaggcggaaacaggataacacaggtgcaagaggacattaccaacctaaaggacaaaatcatcacggtgaaggagagtatcattgagaaaacctgttttctggaggaggaaaaaaaaacacatgagaaactgaggaaggagatcgagagtctggcaccaagcccacggctggaatgtagttccgccatttctgctcattgtaagctttgtctcccaggctcaaggcacagcccggccagtgccagcggtgttgccggaacaaccggagcatgtcaccatacacaacttatcttctgtattttcagtcgggatggtgtcagcccttgttag

SEQ ID NO: 329410 - DNA, 855 bp, Artificial Sequence
  derived and/or modified sequence
atgtccgataacaaagaacgaaaatcccagggttttcccaaagaagacaatcaggatacatcaagcctggctgatgccgtcgagaaggttgcaaagcagcagcagagtcaggccagtgaaattgaaaagaataaaaaggtcctctttaatctgaagaatgagcttcacgagctggaaaaagagatcgccgctatcagcgccgagaccaaagaaacagaaagacagatctaccagcaggactccgccatagagaacactaaactgcattgtgacagtttagaaacacagattaagagccttcactctgagaacgtgaaactgaagtttgatattgagacagcccaggaagacttcgaagagcatatgattaaatacaacgcatactacgctaaaattaaggcacacaaaaactctctcggtgaggtcgagagcaaatggtcctttatgaccgaactgcacgagaagcgagacttcgttaaaaagctaaaaacgatgaaggaggagctgatgcaggacctgcagaacccgggtgggaaccggatcacacaggtccaggaggacatcactaatcttaaagacaagatcattactgtaaaggagagtattattgaaaagacttgcttcctggaggaagagaagaaaactcatgaaaagcttcgtaaagagatagaatctttggccccatctccccgtctggaatgctccagcgcgatctccgcacactgcaaactgtgtctgcctggatcacgacattcaccggcttcagctagtggggtggctggaactaccggcgcatgccaccatacacaattgattttttgcatttttagcagagacggcgtgtctccatgctag

SEQ ID NO: 329411 - DNA, 1281 bp, Artificial Sequence
  derived and/or modified sequence
attgcctggccagaaaaggaagtaatccctagtgtcagcagattcagcggtactggtgtataataggatcaccaatatacaacaggaaaaaacaaaagtgaaagattatcaatatagattattgagtaggagtaaagaaggtaaatcaaaaaggggaaaagagattacagacacagaaaatgtcagacaacaaagaaaggaagagtcaaggatttcctaaagaagataaccaagacacaagttcattagctgatgctgtagagaaagttgcaaagcaacaacaatcacaagcatcagagatagaaaaaaacaaaaaggttctgttcaatttgaagaatgaacttcatgagcttgaaaaagaaatagcagctatctctgcagaaactaaagaaacagaaagacaaatttatcaacaagattctgccatagagaataccaaacttcattgtgatagcctggaaactcaaatcaaatccttacattcagaaaatgtaaagcttaaatttgacatagaaacagcccaagaagattttgaggaacacatgataaaatataatgcatattatgcaaaaataaaagcacataaaaatagtttgggggaagtagagagcaaatggtcatttatgactgaactccatgaaaagcgagattttgttaaaaaattaaagacaatgaaagaagaacttatgcaagatcttcaaaatccaggagggaaccgaataacacaagtacaggaagacattacaaacttaaaggataaaattataactgtaaaagaatctatcattgaaaaaacttgttttcttgaggaagaaaaaaagacacatgaaaaattaagaaaagaaatagagagtctcgccccatcgcccaggctagagtgcagtagtgcaatctcggctcactgcaagctctgcctcccaggttcacgccattctcctgcctcagcctccggagtagctgggactacaggcgcctgccaccacacccagctaattttttgcatttttagtagagacggggtttcaccatgttagccaggatggtcttgatctcctgacctcatgatccacccgcctcggcctcccaaagtgttgggattacaggcgtgagccaccgcgcccagccttaatttaacttttaagttcaggggtatgtatgcaggtttgttatataggtaaatttctgtcatagtttgttgtacagattatttcaatagccaggtattaagcctagtacccattagttatttttcctgatcctttccctcctctcaccctccag

SEQ ID NO: 329412 - DNA, 855 bp, Artificial Sequence
  derived and/or modified sequence
atgagcgacaacaaggagagaaagagccagggcttccccaaggaggacaaccaggacaccagcagcctggccgacgccgtggagaaggtggccaagcagcagcagagccaggccagcgagatcgagaagaacaagaaggtgctgttcaacctgaagaacgagctgcacgagctggagaaggagatcgccgccatcagcgccgagaccaaggagaccgagagacagatctaccagcaggacagcgccatcgagaacaccaagctgcactgcgacagcctggagacccagatcaagagcctgcacagcgagaacgtgaagctgaagttcgacatcgagaccgcccaggaggacttcgaggagcacatgatcaagtacaacgcctactacgccaagatcaaggcccacaagaacagcctgggcgaggtggagagcaagtggagcttcatgaccgagctgcacgagaagagagacttcgtgaagaagctgaagaccatgaaggaggagctgatgcaggacctgcagaaccccggcggcaacagaatcacccaggtgcaggaggacatcaccaacctgaaggacaagatcatcaccgtgaaggagagcatcatcgagaagacctgcttcctggaggaggagaagaagacccacgagaagctgagaaaggagatcgagagcctggcccccagccccagactggagtgcagcagcgccatcagcgcccactgcaagctgtgcctgcccggcagcagacacagccccgccagcgccagcggcgtggccggcaccaccggcgcctgccaccacacccagctgatcttctgcatcttcagcagagacggcgtgagcccctgctag

SEQ ID NO: 329413 - protein, 619 aa, Artificial Sequence
  derived and/or modified sequence
MAAVVQQNDLVFEFASNVMEDERQLGDPAIFPAVIVEHVPGADILNSYAGLACVEEPNDMITESSLDVAEEEIIDDDDDDITLTVEASCHDGDETIETIEAAEALLNMDSPGPMLDEKRINNNIFSSPEDDMVVAPVTHVSVTLDGIPEVMETQQVQEKYADSPGASSPEQPKRKKGRKTKPPRPDSPATTPNISVKKKNKDGKGNTIYLWEFLLALLQDKATCPKYIKWTQREKGIFKLVDSKAVSRLWGKHKNKPDMNYETMGRALRYYYQRGILAKVEGQRLVYQFKEMPKDLIYINDEDPSSSIESSDPSLSSSATSNRNQTSRSRVSSSPGVKGGATTVLKPGNSKAAKPKDPVEVAQPSEVLRTVQPTQSPYPTQLFRTVHVVQPVQAVPEGEAARTSTMQDETLNSSVQSIRTIQAPTQVPVVVSPRNQQLHTVTLQTVPLTTVIASTDPSAGTGSQKFILQAIPSSQPMTVLKENVMLQSQKAGSPPSIVLGPAQVQQVLTSNVQTICNGTVSVASSPSFSATAPVVTFSPRSSQLVAHPPGTVITSVIKTQETKTLTQEVEKKESEDHLKENTEKTEQQPQPYVMVVSSSNGFTSQVAMKQNELLEPNSF

SEQ ID NO: 329414 - DNA, 3564 bp, Artificial Sequence
  derived and/or modified sequence
tctacaggagccattttaacagctaaaacttgtcggattgctttttattttcaagctcaaaagacgatagagaaagaatacttgaaggccaagaagcttgagagaagaaaaatttcagaaaaattgtctcaatttgactagaatatcaatgaaccaggaaaactgaagcaccttccctaaagaaaacttgggtatacaattactccacagacagagctgagggttttttacccaaatcagtcactggattttgctgcctgatacgtgaatcttcttggaatttttctcatgtggatctaaggggaatgctttattatggctgctgttgtccaacagaacgacctagtatttgaatttgctagtaacgtcatggaggatgaacgacagcttggtgatccagctatttttcctgccgtaattgtggaacatgttcctggtgctgatattctcaatagttatgccggtctagcctgtgtggaagagcccaatgacatgattactgagagttcactggatgttgctgaagaagaaatcatagacgatgatgatgatgacatcacccttacagttgaagcttcttgtcatgacggggatgaaacaattgaaactattgaggctgctgaggcactcctcaatatggattcccctggccctatgctggatgaaaaacgaataaataataatatatttagttcacctgaagatgacatggttgttgccccagtcacccatgtgtccgtcacattagatgggattcctgaagtgatggaaacacagcaggtgcaagaaaaatatgcagactcaccgggagcctcatcaccagaacagcctaagaggaaaaaaggaagaaaaactaaaccaccacgaccagattccccagccactacgccaaatatatctgtgaagaagaaaaacaaagatggaaagggaaacacaatttatctttgggagtttttactggcactgctccaggacaaggctacttgtcctaaatacatcaagtggacccagcgagagaaaggcatttttaaattggtggattctaaagcagtgtccaggttgtgggggaagcacaaaaacaaacctgatatgaattatgagaccatgggaagagcactcaggtactattaccaaaggggtattctggcaaaagtggaaggtcagcgcttggtgtatcagtttaaagaaatgccaaaagatcttatatatataaatgatgaggatccaagttccagcatagagtcttcagatccatcactatcttcatcagccacttcaaataggaatcaaaccagccggtcgagagtatcttcaagtccaggggtaaaaggaggagccactacagttctaaaaccagggaattctaaagctgcaaaacccaaagatcctgtggaagttgcacaaccatcagaagttttgaggacagtgcagcccacgcagtctccatatcctacccagctcttccggactgttcatgtagtacagccagtacaggctgtcccagagggagaagcagctagaaccagtaccatgcaggatgaaacattaaattcttccgttcagagtattaggactatacaggctccaacccaagttccagtggttgtgtctcctaggaatcagcagttgcatacagtaacactccaaacagtgccactcacaacagttatagccagcacagatccatcagcaggtactggatctcagaagtttattttacaagccattccatcatcacagcccatgacagtactgaaagaaaatgtcatgctgcagtcacaaaaggcgggctctcctccttcaattgtcttgggccctgcccaggttcagcaggtccttactagcaatgttcagaccatttgcaatggaaccgtcagtgtggcttcctctccatccttcagtgctactgcacctgtggtgaccttttctcctcgcagttcacagctggttgctcacccacctggcactgtaatcacttcagttatcaaaactcaagaaacaaaaactcttacacaggaagtagagaaaaaggaatctgaagatcatttgaaagagaacactgagaaaacggagcagcagccacagccttatgtgatggtagtgtccagttccaatggatttacttctcaggtagctatgaaacaaaacgaactgctggaacccaactctttttagttaatataccaaagcttatgaataattgtttgttaattgaacattttcaattatatgcagactgactgattctaagataaattctaaggaggtttctaatttgtaattgttaaaaatagagttaattttgactttgttagatgagggaggaaaactcaactgtttctctttgttatctaaatgtttcagaattcaatcgtgaaggaacaggcattttacactatgaagacattcttttgagatttttatttcagttgctatatcataagcatttttaaagtttcttttctaattttacattgtattagattttctgattcttttgtaaatacagaacttaaatagaaggcaacaggaaatttatataggaactattttcattccacttgtgtaagttaagtcttgactctttcaaatgcaaaaaacctattttatgctttgttaaaattatggtgtcacttagattgactttagttgactgcactatataatatagaactatgaatatgtagaataacatgaaaaattggaggtgctggtggtatggctgaccctgtttcagaagcaggatagtataaaagcatcagcctaagaatggcactcccactaactagctatgtaatcttgacctctttgggctttagttcctctcataaaaggaagagatgtattggattagactagatgatcaccactttctcttctagttctaatttttttaattctaatacctatattttcaagttatgtcaattaaatcattatcaggttatttcctaatgtaagatagctaaaatgttgcagagaaataagtgacccaacaaaatttattcatctgttatgggtcaagatctgccataaattcttcctaaataatttgtttactaactctttaggccactgtgctttgcggtccattagtaaacttgtgttgctaagtgctaaacagaatactgctattttgagagagtcaagactctttcttaagggccaagaaagcaacttgagccttgggctaatctggctgagtagtcagttataaaagcataattgctttatattttggatcattttttactgggggcggacttgggggggttgcatatcaaagataacatatatatccaactttctgaaatgaaatgtttttagattacttttcaactgtaaataatgtacatttaatgtcacaagaaaaaaatgtcttctgcaaattttctagtataacagaaatttttgtagatgaaaaaaatcattatgtttagaggtctaatgctatgttttcatattacagagtgaatttgtatttaaacaaaaatttaaattttggaatcctctaaacatttttgtatctttaattggtttattattaaataaatcatataaaaa

SEQ ID NO: 329415 - DNA, 1860 bp, Artificial Sequence
  derived and/or modified sequence
atggcggctgttgtacagcaaaacgatctagtcttcgaatttgcgtcaaacgtgatggaggacgagcgccagctgggtgaccccgccatttttcctgctgtgatagtggaacatgtgcccggcgcagacattctgaattcctatgccggtctcgcgtgtgtggaggaaccgaatgacatgattactgaaagtagcctcgacgtcgccgaggaagagataatagatgacgatgacgacgacattacactgaccgtcgaagcaagctgccacgatggcgatgagactattgagaccattgaagccgcagaggcccttctaaacatggactcacctgggccgatgctggacgagaagaggataaacaacaacatattttcctcccctgaggacgatatggttgtcgctcccgtgacccatgtgtcggtaacactggatgggatccccgaggtgatggaaactcagcaagtccaggaaaaatatgcggatagcccaggggcaagctcacctgaacagcctaagcgcaagaaagggaggaaaacaaagccacctcgcccagattccccagccaccactcccaacataagcgtgaagaagaagaataaagacggcaaaggaaatacaatctatctttgggagtttctgctggccctgttgcaagacaaggccacctgtccaaagtatatcaagtggacccagagggagaaaggaatatttaagcttgtcgacagtaaagccgtctcccgactctgggggaaacacaaaaacaagcccgatatgaactatgagaccatgggccgggcactgaggtactattaccagaggggcatccttgccaaggtggagggccagcggttggtgtaccaattcaaggaaatgccaaaagatctcatctatattaacgacgaggaccctagcagctccatcgaatcctcagacccttccctctcgagctcagccactagcaatcgcaaccaaacctcccggtctcgcgtctctagctctccaggggtgaaggggggggctacaacagtcctcaagccaggcaattcgaaagcagccaagcctaaggaccccgtggaggtggctcaaccctcagaggtgttgagaaccgtgcagccaactcaatctccatatcccacccagctctttcggacagtccacgtagtgcagccagtccaggccgtccccgaaggggaggctgctaggacatccacaatgcaagatgagacgcttaattcctcggtacaatctatccgaacgattcaagcacctactcaagtccccgtcgtggtaagccctagaaaccaacaattgcataccgttaccctgcagacagtcccactcactactgttatcgcgtccaccgacccctctgcgggtaccggctctcaaaaatttatcctgcaggccattcctagctcacagccaatgaccgtgcttaaagaaaacgttatgctgcaaagtcagaaagccggtagtccgccatcgattgtgctgggccccgctcaggtgcagcaggtgctgacttctaacgtacagacaatttgtaatggtaccgttagcgtggcgagcagcccatctttttcggcaaccgcccctgtggtgacattctcaccacgtagctcccagctcgttgcccatcccccaggtaccgtaattacctccgtcattaaaacccaggaaactaaaacgctcacacaggaagtggaaaagaaagagtccgaggaccacctcaaggagaatacagagaaaaccgaacagcagccccagccctacgtgatggtcgtgtcatcaagtaatggattcacatcacaagtagcgatgaagcagaatgagctgctggaacctaactctttctag

SEQ ID NO: 329416 - DNA, 75 bp, Artificial Sequence
  derived and/or modified sequence
atggccgcagtcgttcagcagaacgacctggtgtttgaattcgcttcaaacgtgatggaggatgagagacagtag

SEQ ID NO: 329417 - DNA, 1860 bp, Artificial Sequence
  derived and/or modified sequence
atggctgctgtggtgcagcagaatgacctggtgtttgaatttgccagcaatgtgatggaggatgagcggcagctgggggaccctgccatcttccctgctgtgattgtggagcacgtgcctggagctgacatcctgaacagctatgccggcctggcctgtgtggaggagcccaatgacatgatcacagagagcagcctggatgtggccgaggaggagatcattgatgatgatgatgatgacatcaccctgactgtggaggccagctgccatgatggagatgagaccatcgagaccattgaagctgctgaggccctgctgaacatggacagccctggccccatgctggatgagaagaggatcaacaacaacatcttcagcagcccagaagatgacatggtggtggcccctgtgacccacgtgtctgtgaccctggatggcatccctgaggtgatggagacccagcaggtgcaggagaagtatgctgacagccctggggccagcagccctgagcagcccaagaggaagaagggcaggaagaccaagccacccaggccagacagccctgccaccacccccaacatctctgtgaagaagaagaacaaggatggcaagggcaacaccatctacctgtgggagttcctgctggccctgctgcaggacaaggccacctgccccaagtacatcaagtggacccagcgggagaagggcatcttcaagctggtggacagcaaggctgtgtcccggctgtggggcaagcacaagaacaagccagacatgaactatgagaccatgggccgggccctgcgctactactaccagaggggcatcctggccaaggtggagggccagaggctggtgtaccagttcaaggagatgcccaaggacctgatctacatcaatgatgaggaccccagcagcagcattgagagcagtgaccccagcctgagcagcagcgccaccagcaacagaaaccagaccagccgcagccgggtgagcagcagccctggggtgaagggcggggccaccaccgtgctgaagccaggcaacagcaaggccgccaagcccaaggaccctgtggaggtggcccagcccagcgaggtgctgaggacagtgcagcccacccagagcccctaccccacccagctgttcagaacagtgcacgtggtgcagcctgtgcaggccgtgcctgagggggaggccgcccggaccagcaccatgcaggatgagaccctgaacagctctgtgcagagcatccgcaccatccaggcccccacccaggtgcctgtggtggtgagccccaggaaccagcagctgcacacagtgaccctgcagacagtgcccctgaccaccgtcatcgccagcacagaccccagcgctggcaccggcagccagaagttcatcctgcaggccatccccagcagccagcccatgacagtgctgaaggaaaatgtgatgctgcagagccagaaggccggcagcccccccagcatcgtgctgggccctgcccaggtgcagcaggtgctgaccagcaatgtgcagaccatctgcaatggaacagtgtctgtggccagcagccccagcttcagcgccacagcccctgtggtgaccttcagccccaggagcagccagctggtggcccaccccccaggcaccgtcatcaccagcgtcatcaagacccaggagaccaagaccctgacccaggaggtggagaagaaggagagcgaggaccacctgaaggagaacacagagaagacagagcagcagccccagccctacgtgatggtggtgagcagcagcaatggcttcaccagccaggtggccatgaagcagaatgagctgctggagcccaacagcttctag

SEQ ID NO: 329418 - DNA, 75 bp, Artificial Sequence
  derived and/or modified sequence
atggctgctgtggtgcagcagaatgacctggtgtttgaatttgccagcaatgtgatggaggatgagcggcagtag

SEQ ID NO: 329419 - DNA, 1860 bp, Artificial Sequence
  derived and/or modified sequence
atggccgccgtggtgcagcagaacgacctggtgttcgagttcgcctctaacgtcatggaggacgaacgacagctgggcgatcctgcaatattccccgcagttattgtggagcatgtacccggtgccgacattctcaacagctacgcagggttggcatgcgtggaggagcctaacgatatgattactgagtcttcattagatgtggctgaagaagaaattattgatgatgatgacgatgacattacactgacagtggaagcttcatgccatgatggggacgaaactatcgagaccattgaggcagccgaggctctgttaaatatggacagtcccggacctatgctcgatgaaaagaggatcaataacaatatcttctcctctcctgaggatgatatggtggttgcgccagtcacccacgtatctgtcacgctggacggcattccagaagtgatggaaactcagcaggtgcaggagaaatatgcagatagccctggagcttcctcccctgaacaacccaagagaaaaaaagggagaaagaccaagccccctcggcctgatagcccagcgacaactccaaatattagcgtaaagaagaaaaacaaggatggaaaaggcaatacgatatacctgtgggagttcctcctcgcccttctacaggataaggccacctgccctaagtacataaaatggactcagcgcgaaaaaggaatctttaagctcgtcgatagcaaagccgttagtagactctggggaaagcacaaaaacaagcccgacatgaattatgaaactatgggacgagccctgcgctactattatcaaagagggattcttgctaaggtcgaaggacagcgacttgtgtaccagtttaaggagatgccaaaggatctcatttatattaatgacgaggatcctagcagctccatcgagtctagcgaccccagtctatcaagttctgcgacgagtaacagaaaccagactagcagatctcgagtgagcagttctcctggggtaaagggcggggctacaactgtccttaagccgggcaactctaaggccgcgaagcccaaggatcccgttgaggtagcacagccgagtgaggtactgcgaaccgtccagcccacccagtctccttatcccacacagctctttcgaaccgtccacgtggtccaaccagtacaagcagtgcctgagggcgaggccgctaggacctccactatgcaggacgaaacattgaactcatccgtgcagagcattcggactatccaggcccccacacaggtccccgtcgttgtgagcccccgtaaccagcagctgcacactgttacgcttcagactgtgccactgactaccgtgatagcttcaactgatccgtcagcggggaccggctctcagaagtttatactgcaggcgataccaagttcccagccaatgacagtgctcaaagagaacgttatgctccagtcacaaaaagctggaagtcctccttcaattgttttaggtccagcacaggtgcagcaggtgcttactagtaatgtgcaaactatttgcaacggcacagtgtccgttgccagctccccctcattttctgctaccgcgcccgtggtcaccttttcacctaggagctcacagttagtcgcacatccgccaggaaccgtcatcaccagcgtgatcaaaacccaggaaactaagaccctgacgcaggaggttgaaaaaaaggagtcggaagaccatctgaaggagaacaccgagaaaactgaacagcagcctcagccttatgtcatggtcgtctcctcctccaatggcttcacatcccaagtggcaatgaagcaaaatgagctgctggaacccaatagcttctag

SEQ ID NO: 329420 - DNA, 75 bp, Artificial Sequence
  derived and/or modified sequence
atggccgccgtggtgcagcagaacgacctggtgttcgagttcgccagcaacgtgatggaagacgaacgacagtag

SEQ ID NO: 329421 - DNA, 1860 bp, Artificial Sequence
  derived and/or modified sequence
atggccgctgtcgtacagcagaatgacctcgtgttcgaatttgcctcaaacgtgatggaggatgaacggcagctcggcgatcctgccatttttcccgctgtaatcgtcgaacatgtgccaggcgcagatattctgaactcctacgccggacttgcttgcgtagaagaacccaatgacatgatcactgaaagcagcctggatgttgctgaggaggagatcattgatgatgatgatgacgacattacattgacagtagaagccagctgtcacgatggcgacgaaaccatcgagacgatcgaagcagctgaagctctgttaaatatggactcccctggccctatgctggacgagaaacgcatcaataacaacatattttcaagccccgaggacgacatggttgtcgcaccagtcacccacgtgtctgtcaccctagatgggatacctgaggttatggaaacgcaacaagtgcaggagaagtacgctgactccccaggcgcaagcagccccgaacagccaaagcggaaaaaaggccgaaagaccaagccaccacggccagactcacctgccaccacgcccaatatcagcgtgaagaaaaagaacaaggacggaaaagggaacacaatatacctttgggagttcctgctggcgctgctgcaggacaaagccacatgccccaagtacatcaaatggactcagagagagaagggaatctttaagctggttgactctaaggcagtgagtcggttatggggaaagcacaaaaacaagcccgatatgaactatgagacaatggggagggcactccgatattactaccagcgaggaatcctcgccaaggtagaaggtcaaaggctagtatatcagtttaaagaaatgccaaaagacctcatttacatcaacgatgaggatcccagctctagcatcgagagtagcgatcccagtcttagttctagcgcaacaagcaacagaaaccaaacctccagaagccgtgtgtcatcctctcctggggtgaaggggggtgctaccaccgttctaaagcctggcaacagcaaggctgccaaacctaaggatccagtcgaagtggcccagccatccgaggtcttaagaacagtccagccaacccaaagtccctacccaacgcagctgtttaggaccgtacacgtggtgcagcccgttcaagccgttcccgagggcgaggctgctaggacgtctaccatgcaggacgaaacactgaacagttctgtccaatccatcagaaccatccaggctcctacccaggtaccagtggtggtgtcccctcggaaccagcagttgcataccgtgacactacagacagtcccattgaccacagtgatcgcctccaccgatccgtctgctggtacaggcagtcagaaatttatactccaggcaatcccctcgtcacagcccatgaccgtgcttaaggagaatgtgatgctgcaatcccagaaggcaggctcacctccatctatcgtactcggacccgcacaagttcagcaggtcctcaccagtaacgtccagacaatctgcaatggcacagtgtctgtggcctcctctccgtcattctcagctactgcacccgtggtcactttcagccccaggagttcccagttagtggcacatccccctggcaccgtaattacctctgtgatcaagacccaggagactaaaactctcacacaagaagttgaaaagaaagagagcgaggatcacctaaaggagaacacagaaaaaacagaacagcagccccagccatacgtcatggtcgtctctagttctaacgggttcacaagccaggtagccatgaagcagaacgaactgcttgagccaaactctttttag

SEQ ID NO: 329422 - DNA, 75 bp, Artificial Sequence
  derived and/or modified sequence
atggctgcagttgtacagcaaaatgatcttgtgtttgagttcgcgtccaatgtaatggaagatgagcggcaatag

SEQ ID NO: 329423 - DNA, 3566 bp, Artificial Sequence
  derived and/or modified sequence
tctacaggagccattttaacagctaaaacttgtcggattgctttttattttcaagctcaaaagacgatagagaaagaatacttgaaggccaagaagcttgagagaagaaaaatttcagaaaaattgtctcaatttgactagaatatcaatgaaccaggaaaactgaagcaccttccctaaagaaaacttgggtatacaattactccacagacagagctgagggttttttacccaaatcagtcactggattttgctgcctgatacgtgaatcttcttggaatttttctcatgtggatctaaggggaatgctttattatggctgctgttgtccaacagaacgacctagtatttgaatttgctagtaacgtcatggaggatgaacgacagcttggtgatccagctatttttcctgccgtaattgtggaacatgttcctggtgctgatattctcaatagttatgccggtctagcctgtgtggaagagcccaatgacatgattactgagagttcactggatgttgctgaagaagaaatcatagacgatgatgatgatgacatcacccttacagttgaagcttcttgtcatgacggggatgaaacaattgaaactattgaggctgctgaggcactcctcaatatggattcccctggccctatgctggatgaaaaacgaataaataataatatatttagttcacctgaagatgacatggttgttgccccagtcacccatgtgtccgtcacattagatgggattcctgaagtgatggaaacacagcaggtgcaagaaaaatatgcagactcaccgggagcctcatcaccagaacagcctaagaggaaaaaaggaagaaaaactaaaccaccacgaccagattccccagccactacgccaaatatatctgtgaagaagaaaaacaaagatggaaagggaaacacaatttatctttgggagtttttactggcactgctccaggacaaggctacttgtcctaaatacatcaagtggacccagcgagagaaaggcatttttaaattggtggattctaaagcagtgtccaggttgtgggggaagcacaaaaacaaacctgatatgaattatgagaccatgggaagagcactcaggtactattaccaaaggggtattctggcaaaagtggaaggtcagcgcttggtgtatcagtttaaagaaatgccaaaagatcttatatatataaatgatgaggatccaagttccagcatagagtcttcagatccatcgctatcttcatcagccacttcaaataggaatcaaaccagccggtcgagagtatcttcaagtccaggggtaaaaggaggagccactacagttctaaaaccagggaattctaaagctgcaaaacccaaagatcctgtggaagttgcacaaccatcagaagttttgaggacagtgcagcccacgcagtctccatatcctacccagctcttccggactgttcatgtagtacagccagtacaggctgtcccagagggagaagcagctagaaccagtaccatgcaggatgaaacattaaattcttccgttcagagtattaggactatacaggctccaacccaagttccagtggttgtgtctcctaggaatcagcagttgcatacagtaacactccaaacagtgccactcacaacagttatagccagcacagatccatcagcaggtactggatctcagaagtttattttacaagccattccatcatcacagcccatgacagtactgaaagaaaatgtcatgctgcagtcacaaaaggcgggctctcctccttcaattgtcttgggccctgcccaggttcagcaggtccttactagcaatgttcagaccatttgcaatggaaccgtcagtgtggcttcctctccatccttcagtgctactgcacctgtggtgaccttttctcctcgcagttcacagctggttgctcacccacctggcactgtaatcacttcagttatcaaaactcaagaaacaaaaactcttacacaggaagtagagaaaaaggaatctgaagatcatttgaaagagaacactgagaaaacggagcagcagccacagccttatgtgatggtagtgtccagttccaatggatttacttctcaggtagctatgaaacaaaacgaactgctggaacccaactctttttagttaatataccaaagcttatgaataattgtttgttaattgaacattttcaattatatgcagactgactgattctaagataaattctaaggaggtttctaattttgtaattgttaaaaatagagttaattttgactttgttagatgagggaggaaaactcaactgtttctctttgttatctaaatgtttcagaattcaatcgtgaaggaacaggcattttacactatgaagacattcttttgagatttttatttcagttgctatatcataagcatttttaaagtttcttttctaattttacattgtattagattttctgattcttttgtaaatacagaacttaaatagaaggcaacaggaaatttatataggaactattttcattccacttgtgtaagttaagtcttgactctttcaaatgcaaaaaacctattttatgctttgttaaaattatggtgtcacttagattgactttagttgactgcactatataatatagaactatgaatatgtagaataacatgaaaaattggaggtgctggtggtatggctgaccctgtttcagaagcaggatagtataaaagcatcagcctaagaatggcactcccactaactagctatgtaatcttgacctctttgggctttagttcctctcataaaaggaagagatgtattggattagactagatgatcaccactttctcttctagttctaatttttttaattctaatacctatattttcaagttatgtcaattaaatcattatcaggttatttcctaatgtaagaatagctaaaatgttgcagagaaataagtgacccaacaaaatttattcatctgttatgggtaagatctgccataaattcttcctaaataatttgtttactaactctttaggccactgtgctttgcggtccattagtaaacttgtgttgctaagtgctaaacagaatactgctattttgagagagtcaagactctttcttaagggccaagaaagcaacttgagccttgggctaatctggctgagtagtcagttataaaagcataattgctttatattttggatcattttttactgggggcggacttggggggggttgcatacaaagataacatatatatccaactttctgaaatgaaatgtttttagattactttttcaactgtaaataatgtacatttaatgtcacaagaaaaaaatgtcttctgcaaattttctagtataacagaaatttttgtagatgaaaaaaatcattatgtttagaggtctaatgctatgttttcatattacagagtgaatttgtatttaaacaaaaatttaaattttggaatcctctaaacatttttgtatctttaattggtttattattaaataaatcatataaaaa

SEQ ID NO: 329424 - DNA, 1860 bp, Artificial Sequence
  derived and/or modified sequence
atggccgccgtggtgcagcagaacgacctggtgttcgagttcgccagcaacgtgatggaggacgagagacagctgggcgaccccgccatcttccccgccgtgatcgtggagcacgtgcccggcgccgacatcctgaacagctacgccggcctggcctgcgtggaggagcccaacgacatgatcaccgagagcagcctggacgtggccgaggaggagatcatcgacgacgacgacgacgacatcaccctgaccgtggaggccagctgccacgacggcgacgagaccatcgagaccatcgaggccgccgaggccctgctgaacatggacagccccggccccatgctggacgagaagagaatcaacaacaacatcttcagcagccccgaggacgacatggtggtggcccccgtgacccacgtgagcgtgaccctggacggcatccccgaggtgatggagacccagcaggtgcaggagaagtacgccgacagccccggcgccagcagccccgagcagcccaagagaaagaagggcagaaagaccaagccccccagacccgacagccccgccaccacccccaacatcagcgtgaagaagaagaacaaggacggcaagggcaacaccatctacctgtgggagttcctgctggccctgctgcaggacaaggccacctgccccaagtacatcaagtggacccagagagagaagggcatcttcaagctggtggacagcaaggccgtgagcagactgtggggcaagcacaagaacaagcccgacatgaactacgagaccatgggcagagccctgagatactactaccagagaggcatcctggccaaggtggagggccagagactggtgtaccagttcaaggagatgcccaaggacctgatctacatcaacgacgaggaccccagcagcagcatcgagagcagcgaccccagcctgagcagcagcgccaccagcaacagaaaccagaccagcagaagcagagtgagcagcagccccggcgtgaagggcggcgccaccaccgtgctgaagcccggcaacagcaaggccgccaagcccaaggaccccgtggaggtggcccagcccagcgaggtgctgagaaccgtgcagcccacccagagcccctaccccacccagctgttcagaaccgtgcacgtggtgcagcccgtgcaggccgtgcccgagggcgaggccgccagaaccagcaccatgcaggacgagaccctgaacagcagcgtgcagagcatcagaaccatccaggcccccacccaggtgcccgtggtggtgagccccagaaaccagcagctgcacaccgtgaccctgcagaccgtgcccctgaccaccgtgatcgccagcaccgaccccagcgccggcaccggcagccagaagttcatcctgcaggccatccccagcagccagcccatgaccgtgctgaaggagaacgtgatgctgcagagccagaaggccggcagcccccccagcatcgtgctgggccccgcccaggtgcagcaggtgctgaccagcaacgtgcagaccatctgcaacggcaccgtgagcgtggccagcagccccagcttcagcgccaccgcccccgtggtgaccttcagccccagaagcagccagctggtggcccacccccccggcaccgtgatcaccagcgtgatcaagacccaggagaccaagaccctgacccaggaggtggagaagaaggagagcgaggaccacctgaaggagaacaccgagaagaccgagcagcagccccagccctacgtgatggtggtgagcagcagcaacggcttcaccagccaggtggccatgaagcagaacgagctgctggagcccaacagcttctag

SEQ ID NO: 329425 - DNA, 75 bp, Artificial Sequence
  derived and/or modified sequence
atggccgccgtggtgcagcagaacgacctggtgttcgagttcgccagcaacgtgatggaggacgagagacagtag

SEQ ID NO: 329426 - protein, 361 aa, Artificial Sequence
  derived and/or modified sequence
MNYETMGRALRYYYQRGILAKVEGQRLVYQFKEMPKDLIYINDEDPSSSIESSDPSLSSSATSNRNQTSRSRVSSSPGVKGGATTVLKPGNSKAAKPKDPVEVAQPSEVLRTVQPTQSPYPTQLFRTVHVVQPVQAVPEGEAARTSTMQDETLNSSVQSIRTIQAPTQVPVVVSPRNQQLHTVTLQTVPLTTVIASTDPSAGTGSQKFILQAIPSSQPMTVLKENVMLQSQKAGSPPSIVLGPAQVQQVLTSNVQTICNGTVSVASSPSFSATAPVVTFSPRSSQLVAHPPGTVITSVIKTQETKTLTQEVEKKESEDHLKENTEKTEQQPQPYVMVVSSSNGFTSQVAMKQNELLEPNSF

SEQ ID NO: 329427 - DNA, 1086 bp, Artificial Sequence
  derived and/or modified sequence
atgaactatgagactatgggccgcgcccttcgttattactaccagagagggattctcgcaaaagtcgagggccaaaggcttgtctatcagtttaaggagatgcctaaagacctgatttatatcaacgatgaggacccttcttccagcatcgagtcgtcagatccttccttaagtagtagcgccaccagtaaccgcaatcagacgtctcgcagtcgggtttcctcaagtcccggggttaaggggggcgctactaccgtcctaaagccaggcaattccaaagccgctaagcccaaggatcctgtggaggttgcgcagcctagcgaagtactgcggaccgtccagccaacccagtccccgtaccctacacagttgttccgcaccgtacatgttgtgcaacctgttcaggcagttcccgagggagaagcagctcgcacctcgactatgcaggatgagacactgaacagctctgttcagtctatccgcacgatacaggcccctacccaagtccccgtggtcgtctcccctaggaaccagcagttacacactgtgacactccagactgtccctctgacaactgtcattgcctcaaccgatccatcggccgggaccgggtcacagaaattcatcctgcaggccataccatcatcccagcccatgacggtcttgaaagaaaacgtgatgctgcaaagtcagaaggcagggtcacccccatctatagtcctggggccagcccaggttcagcaggttttgacaagtaatgttcagaccatctgtaacggcaccgttagtgtggcttcttcaccctctttctccgccaccgctcccgttgtcacatttagtccaagatcttctcagctggtggcccatccccctgggaccgttattacctcagtcattaaaacccaggaaaccaagaccctcacacaggaggtcgagaagaaagaatctgaagaccatctgaaggagaatacggagaagaccgaacagcagccacagccttatgtcatggtggtctcttccagcaacggctttacttctcaggttgccatgaagcagaacgagcttttggagcccaactccttctag

SEQ ID NO: 329428 - DNA, 1086 bp, Artificial Sequence
  derived and/or modified sequence
atgaactatgagaccatgggccgggccctgcgctactactaccagaggggcatcctggccaaggtggagggccagaggctggtgtaccagttcaaggagatgcccaaggacctgatctacatcaatgatgaggaccccagcagcagcattgagagcagtgaccccagcctgagcagcagcgccaccagcaacagaaaccagaccagccgcagccgggtgagcagcagccctggggtgaagggcggggccaccaccgtgctgaagccaggcaacagcaaggccgccaagcccaaggaccctgtggaggtggcccagcccagcgaggtgctgaggacagtgcagcccacccagagcccctaccccacccagctgttcagaacagtgcacgtggtgcagcctgtgcaggccgtgcctgagggggaggccgcccggaccagcaccatgcaggatgagaccctgaacagctctgtgcagagcatccgcaccatccaggcccccacccaggtgcctgtggtggtgagccccaggaaccagcagctgcacacagtgaccctgcagacagtgcccctgaccaccgtcatcgccagcacagaccccagcgctggcaccggcagccagaagttcatcctgcaggccatccccagcagccagcccatgacagtgctgaaggaaaatgtgatgctgcagagccagaaggccggcagcccccccagcatcgtgctgggccctgcccaggtgcagcaggtgctgaccagcaatgtgcagaccatctgcaatggaacagtgtctgtggccagcagccccagcttcagcgccacagcccctgtggtgaccttcagccccaggagcagccagctggtggcccaccccccaggcaccgtcatcaccagcgtcatcaagacccaggagaccaagaccctgacccaggaggtggagaagaaggagagcgaggaccacctgaaggagaacacagagaagacagagcagcagccccagccctacgtgatggtggtgagcagcagcaatggcttcaccagccaggtggccatgaagcagaatgagctgctggagcccaacagcttctag

SEQ ID NO: 329429 - DNA, 1086 bp, Artificial Sequence
  derived and/or modified sequence
atgaactacgagaccatgggccgggccctgcggtactactaccagaggggcattctcgccaaggtcgagggccagcggttggtataccagttcaaggagatgccaaaggatctgatttatatcaacgatgaggacccctccagtagtattgagagctccgacccatcactaagcagctctgccaccagtaaccgcaatcagacatccaggagccgagtgtcctctagccccggagtgaagggtggcgccaccacggtcctgaaacctggtaacagtaaagctgccaaacccaaagaccccgttgaagtggcccaaccttcagaagtcctgcgcacagtgcagccaactcaatctccctatccaacccagcttttcaggaccgttcatgttgtgcaaccagtacaggctgtgcccgagggcgaagcggcacggactagcacgatgcaggacgagacgcttaatagttccgtgcagtctattcgcacaatccaggcacccacgcaagtgcctgtagtcgtctcacctcgcaaccagcagttacacacggtaacactccagactgtcccactaactacggttatcgcctctactgatccctctgccggcactggctcgcagaaattcatcctgcaggctatacccagcagtcaacccatgacagtcctgaaagaaaatgtcatgctgcagagtcagaaagctgggtctccaccatctatcgtgctgggccctgcacaggtccagcaagtgttgaccagcaatgtgcaaaccatttgcaatggcacagtttcagtggcctcctctccctcattctccgctactgcccccgtggtgactttctcccctcgcagcagtcagctcgtagcccatccaccaggcaccgtgattacaagtgtaatcaaaacacaagaaacaaagacgctgactcaggaagttgagaaaaaagagtccgaggatcacctcaaggaaaatacagaaaaaacagagcagcagccgcagccatatgtgatggtggtgtcgagttctaatgggtttacttcccaggtagctatgaagcagaacgaactgcttgagcctaattccttctag

SEQ ID NO: 329430 - DNA, 1086 bp, Artificial Sequence
  derived and/or modified sequence
atgaactatgagactatgggaagagcactgcggtattattatcagcggggtatactggcaaaagtcgagggacagaggttagtctaccaattcaaggaaatgccaaaagacttaatatatataaatgacgaagacccctcgtctagcattgaatctagtgacccgtcattatcctcatcagctactagcaatcgtaaccagacctctagaagcagagtctccagttctcccggtgtgaaagggggagccacaaccgtgctcaagcctgggaatagcaaggctgctaagcccaaagatcccgtcgaagttgcacagccgtctgaggtgctccgcaccgtccaacctacccagtcaccctaccctacacagctgtttaggacagtgcatgtggttcagcccgtccaggctgtgccagaaggagaggccgctaggacatccacaatgcaggatgagacactgaacagttccgtgcagagtataaggacaatacaagcgccaacccaggtgccagtggtggtgtcacctcggaaccaacagctgcacaccgttacgttacagactgtgcccctcaccacagtcatagcctcaacagatccctcagccggaacaggatctcagaagttcattttacaagcaattccttctagccaacctatgactgttcttaaggaaaacgtgatgcttcagtctcagaaagccggtagtcccccaagcatcgttctcggcccagcccaggtgcagcaagtgctcacgtcgaacgtgcagaccatttgtaacggcaccgtcagcgtggccagttcccccagtttcagcgcgactgccccagtggttaccttttctccgaggtcaagccaacttgtggcccacccaccgggaacagtcatcacctctgttataaagacccaggagaccaagactctgacacaggaagttgaaaagaaggaatcggaggatcacctgaaagagaacactgagaagactgaacaacaacctcagccatacgtgatggtcgtgagttcctccaacggctttacgtcacaagttgctatgaaacagaatgaactcttggagccaaactccttctag

SEQ ID NO: 329431 - DNA, 3017 bp, Artificial Sequence
  derived and/or modified sequence
gcggcggcggcggcggcggcggcggcagcagcagcttcagtagcgcagaggcggcggtggcgagaggtgcggcgaaggaggcagaggcacttatgcttgtcaggccaagaagcttgagagaagaaaaatttcagaaaaattgtctcaatttgactagaatatcaatgaaccaggaaaactggaagaaaaactaaaccaccacgaccagattccccagccactacgccaaatatatctgtgaagaagaaaaacaaagatggaaagggaaacacaatttatctttgggagtttttactggcactgctccaggacaaggctacttgtcctaaatacatcaagtggacccagcgagagaaaggcatttttaaattggtggattctaaagcagtgtccaggttgtgggggaagcacaaaaacaaacctgatatgaattatgagaccatgggaagagcactcaggtactattaccaaaggggtattctggcaaaagtggaaggtcagcgcttggtgtatcagtttaaagaaatgccaaaagatcttatatatataaatgatgaggatccaagttccagcatagagtcttcagatccatcgctatcttcatcagccacttcaaataggaatcaaaccagccggtcgagagtatcttcaagtccaggggtaaaaggaggagccactacagttctaaaaccagggaattctaaagctgcaaaacccaaagatcctgtggaagttgcacaaccatcagaagttttgaggacagtgcagcccacgcagtctccatatcctacccagctcttccggactgttcatgtagtacagccagtacaggctgtcccagagggagaagcagctagaaccagtaccatgcaggatgaaacattaaattcttccgttcagagtattaggactatacaggctccaacccaagttccagtggttgtgtctcctaggaatcagcagttgcatacagtaacactccaaacagtgccactcacaacagttatagccagcacagatccatcagcaggtactggatctcagaagtttattttacaagccattccatcatcacagcccatgacagtactgaaagaaaatgtcatgctgcagtcacaaaaggcgggctctcctccttcaattgtcttgggccctgcccaggttcagcaggtccttactagcaatgttcagaccatttgcaatggaaccgtcagtgtggcttcctctccatccttcagtgctactgcacctgtggtgaccttttctcctcgcagttcacagctggttgctcacccacctggcactgtaatcacttcagttatcaaaactcaagaaacaaaaactcttacacaggaagtagagaaaaaggaatctgaagatcatttgaaagagaacactgagaaaacggagcagcagccacagccttatgtgatggtagtgtccagttccaatggatttacttctcaggtagctatgaaacaaaacgaactgctggaacccaactctttttagttaatataccaaagcttatgaataattgtttgttaattgaacattttcaattatatgcagactgactgattctaagataaattctaaggaggtttctaattttgtaattgttaaaaatagagttaattttgactttgttagatgagggaggaaaactcaactgtttctctttgttatctaaatgtttcagaattcaatcgtgaaggaacaggcattttacactatgaagacattcttttgagatttttatttcagttgctatatcataagcatttttaaagtttcttttctaattttacattgtattagattttctgattcttttgtaaatacagaacttaaatagaaggcaacaggaaatttatataggaactattttcattccacttgtgtaagttaagtcttgactctttcaaatgcaaaaaacctattttatgctttgttaaaattatggtgtcacttagattgactttagttgactgcactatataatatagaactatgaatatgtagaataacatgaaaaattggaggtgctggtggtatggctgaccctgtttcagaagcaggatagtataaaagcatcagcctaagaatggcactcccactaactagctatgtaatcttgacctctttgggctttagttcctctcataaaaggaagagatgtattggattagactagatgatcaccactttctcttctagttctaatttttttaattctaatacctatattttcaagttatgtcaattaaatcattatcaggttatttcctaatgtaagaatagctaaaatgttgcagagaaataagtgacccaacaaaatttattcatctgttatgggtaagatctgccataaattcttcctaaataatttgtttactaactctttaggccactgtgctttgcggtccattagtaaacttgtgttgctaagtgctaaacagaatactgctattttgagagagtcaagactctttcttaagggccaagaaagcaacttgagccttgggctaatctggctgagtagtcagttataaaagcataattgctttatattttggatcattttttactgggggcggacttggggggggttgcatacaaagataacatatatatccaactttctgaaatgaaatgtttttagattactttttcaactgtaaataatgtacatttaatgtcacaagaaaaaaatgtcttctgcaaattttctagtataacagaaatttttgtagatgaaaaaaatcattatgtttagaggtctaatgctatgttttcatattacagagtgaatttgtatttaaacaaaaatttaaattttggaatcctctaaacatttttgtatctttaattggtttattattaaataaatcatataaaaattctcagtgtctgttttcaggcaaaagtttcttaaagaataagtgtgcagagaatattactagaacatcagcattacttaatgtttataaataaatttcattagtcagaattgc

SEQ ID NO: 329432 - DNA, 1086 bp, Artificial Sequence
  derived and/or modified sequence
atgaactacgagaccatgggcagagccctgagatactactaccagagaggcatcctggccaaggtggagggccagagactggtgtaccagttcaaggagatgcccaaggacctgatctacatcaacgacgaggaccccagcagcagcatcgagagcagcgaccccagcctgagcagcagcgccaccagcaacagaaaccagaccagcagaagcagagtgagcagcagccccggcgtgaagggcggcgccaccaccgtgctgaagcccggcaacagcaaggccgccaagcccaaggaccccgtggaggtggcccagcccagcgaggtgctgagaaccgtgcagcccacccagagcccctaccccacccagctgttcagaaccgtgcacgtggtgcagcccgtgcaggccgtgcccgagggcgaggccgccagaaccagcaccatgcaggacgagaccctgaacagcagcgtgcagagcatcagaaccatccaggcccccacccaggtgcccgtggtggtgagccccagaaaccagcagctgcacaccgtgaccctgcagaccgtgcccctgaccaccgtgatcgccagcaccgaccccagcgccggcaccggcagccagaagttcatcctgcaggccatccccagcagccagcccatgaccgtgctgaaggagaacgtgatgctgcagagccagaaggccggcagcccccccagcatcgtgctgggccccgcccaggtgcagcaggtgctgaccagcaacgtgcagaccatctgcaacggcaccgtgagcgtggccagcagccccagcttcagcgccaccgcccccgtggtgaccttcagccccagaagcagccagctggtggcccacccccccggcaccgtgatcaccagcgtgatcaagacccaggagaccaagaccctgacccaggaggtggagaagaaggagagcgaggaccacctgaaggagaacaccgagaagaccgagcagcagccccagccctacgtgatggtggtgagcagcagcaacggcttcaccagccaggtggccatgaagcagaacgagctgctggagcccaacagcttctag

SEQ ID NO: 329433 - DNA, 198 bp, Artificial Sequence
  derived and/or modified sequence
atgtcggaacagaacatctgcaatcagaaggacaaaagcaccctcccattttgtcaagctcacctgtgtgaagaaaccacaaaccggctctgcgtctctaacaaagccgtctactccctggagtgtaagtgggccgagtcagagaacagagtaagcgaggggcggtggggacgaggttgttttatcggcgtggggtag

SEQ ID NO: 329434 - DNA, 903 bp, Artificial Sequence
  derived and/or modified sequence
cccggctccaaagaggtggggtcggtataaaggggttgaggtcaccgggaaggggtaaaagcgcgacgggacctgagctgaaggacgggatctcaagcctcaagtccctgcgccatcccgccgtctctgtgtcctcccctggggcccaaaacctccatcctccttctaggctcgctggctcaaggccaaggagctcagcgcgccgcctccgcccggaacgcaaacagctgttcccagagacgtctccgctctcaactttgccaactactccgcacgcactttgaccagcggagcaaccgggacctgtgggtcggggtcctctggcggagttaaaaaaaaaagaggtgaaactgcgggaccggcgctgcgagtcgctaggcttcgcctcaaactttgctgttgcagcggagcggccccgcccctcctctcccctacgacgcccacgcgctcggatggggcttgttccctagctcgggagcgtgtgggcagcagcagcggcggcggcggcggcggcggcggcggcggcagcagcagcttcagtagcgcagaggcggcggtggcgagaggtgcggcgaaggaggcagaggcacttatgcttgtcaggccaagaagcttgagagaagaaaaatttcagaaaaattgtctcaatttgactagaatatcaatgaaccaggaaaactgaagcaccttccctaaagaaaacttgggtatacaattactccacagacagagctgagggttttttacccaaatcagtcactggattttgctgcctgatacgtgaatcttcttggaatttttctcatgtggatctaaggggaatgctttattatggctgctgttgtccaacagaacgacctagtatttgaatttgctagtaacgtcatggaggatgaacgacag

SEQ ID NO: 329435 - protein, 282 aa, Artificial Sequence
  derived and/or modified sequence
MALKQISSNKCFGGLQKVFEHDSVELNCKMKFAVYLPPKAETGKCPALYWLSGLTCTEQNFISKSGYHQSASEHGLVVIAPDTSPRGCNIKGEDESWDFGTGAGFYVDATEDPWKTNYRMYSYVTEELPQLINANFPVDPQRMSIFGHSMGGHGALICALKNPGKYKSVSAFAPICNPVLCPWGKKAFSGYLGTDQSKWKAYDATHLVKSYPGSQLDILIDQGKDDQFLLDGQLLPDNFIAACTEKKIPVVFRLQEGYDHSYYFIATFITDHIRHHAKYLNA

SEQ ID NO: 329436 - DNA, 849 bp, Artificial Sequence
  derived and/or modified sequence
atggcactgaaacagatctcatcaaataagtgctttggcggcctgcagaaagtctttgagcacgacagcgtggagctgaactgcaagatgaagttcgctgtgtaccttcctcccaaggccgaaactggtaaatgccccgccttgtactggctgtctgggcttacctgtactgagcaaaactttatctcaaaatctggataccaccagagtgccagtgaacacggcctcgtcgttattgcaccggacacatccccacgtgggtgcaacattaaaggggaggacgaaagctgggatttcggaacgggagcaggattctacgtggatgccaccgaggacccttggaaaacaaattataggatgtatagctacgtgaccgaggagcttccacagttaattaatgcaaacttcccggtagatccacaacgcatgtctatatttggacacagcatgggggggcacggggctctcatctgtgccctgaagaatcccggtaaatacaaaagcgtttcagccttcgctcccatatgtaatcccgtgttgtgcccatggggtaaaaaggccttcagtggatacttgggtaccgaccagagtaagtggaaagcgtacgacgccactcatctcgtgaagtcataccctgggagtcaattggacatccttatcgatcaaggaaaggatgaccagtttctattggacggacagctgctgcctgacaatttcatcgccgcgtgtaccgaaaagaagatcccagtggtcttccggctacaggagggatatgaccactcttattactttatagccactttcattaccgatcacattagacaccacgctaagtacctgaacgcttag

SEQ ID NO: 329437 - DNA, 849 bp, Artificial Sequence
  derived and/or modified sequence
atggccctgaagcagatcagcagcaacaagtgcttcggcggcctgcagaaggtgtttgaacatgattctgtggagctgaactgcaagatgaagtttgctgtgtacctgccccccaaggccgagaccgggaagtgcccagccctgtactggctgagcggcctgacctgcacagagcagaacttcatcagcaagagcggctaccaccagagcgccagcgagcacggcctggtggtgattgccccagacaccagcccccggggctgcaacatcaagggagaagatgagagctgggactttggaactggagctggcttctacgtggatgccacagaggacccctggaagaccaactacaggatgtacagctatgtgacagaggagctgccccagctgatcaatgccaacttccctgtggacccccagaggatgagcatcttcggccacagcatgggcggccatggagccctgatctgtgccctgaagaaccctgggaagtacaagtctgtgtctgcctttgcccccatctgcaaccctgtgctgtgcccctggggcaagaaggccttcagcggctacctgggcacagaccagagcaagtggaaggcctatgatgccacccacctggtgaagagctacccaggcagccagctggacatcctgattgaccagggcaaggatgaccagttcctgctggatggccagctgctgcctgacaacttcatcgccgcctgcacagagaagaagatccctgtggtgttccggctgcaggagggctatgaccacagctactacttcatcgccaccttcatcacagaccacatccgccaccacgccaagtacctgaatgcctag

SEQ ID NO: 329438 - DNA, 849 bp, Artificial Sequence
  derived and/or modified sequence
atggccctgaagcagatcagcagcaacaagtgcttcggcggcctgcagaaggtttttgagcacgactcagttgagttgaactgtaagatgaaattcgctgtgtatctaccccccaaagccgagacgggcaagtgcccggccctgtattggctgagcgggctgacatgtactgagcagaacttcatatctaagtcaggttaccaccaatctgcttcagaacacggcttagttgtgatcgcccctgataccagcccccgcggatgtaacattaagggtgaggatgagagctgggattttggaacgggagctggattctacgttgatgccaccgaggatccttggaaaaccaattatagaatgtactcttacgtgacagaggaactgccccagttgatcaatgctaacttcccagtggatcctcagcggatgtctatcttcgggcatagcatgggtgggcacggcgccctcatctgcgccctgaaaaatcccggcaagtataagagtgtgtcggcattcgcgccgatatgtaatcccgttctgtgtccatggggcaaaaaggcattcagcgggtatctgggaaccgaccagagcaagtggaaggcctacgatgctactcacttagtaaagagctacccagggagccagctggacattctgatcgaccagggaaaggacgaccagttcctgctcgatgggcaactacttcctgacaacttcattgctgcatgtacagagaagaagatccccgtggtgtttcgccttcaagaaggctatgaccacagctactacttcatcgcaaccttcattacagatcacatcagacatcacgcaaaatacctgaatgcgtag

SEQ ID NO: 329439 - DNA, 849 bp, Artificial Sequence
  derived and/or modified sequence
atggccctcaaacagatttctagcaacaaatgtttcggcggattgcaaaaggttttcgaacacgactctgttgaactcaactgcaagatgaagttcgctgtttacctcccaccaaaggctgagacaggtaagtgccctgcgctgtactggttaagcggactgacatgcaccgagcagaattttattagtaagtccggctatcatcagtcagcgtccgaacatggtctggtcgtgattgccccagacaccagccctagaggctgcaatattaagggagaggatgaatcatgggacttcggaaccggagcaggcttctatgtggacgccacagaagacccctggaagactaattatcgcatgtactcttacgtgactgaggaactgcctcagctgatcaacgctaactttccagttgatcctcagcgcatgtccatatttggacacagcatgggcggtcacggagccctgatctgcgctcttaagaacccaggaaagtacaagtctgtctccgcttttgccccaatctgtaacccggtcctttgcccttggggaaaaaaagccttttctggctatcttgggacagatcagagtaaatggaaggcctacgatgccacacatttggtcaaatcttaccctgggtctcaattggacatccttattgatcaagggaaggatgaccagttcttgctcgatggccagctgctgcccgataattttattgctgcctgtaccgagaaaaagattccagtcgtgtttcggctccaagagggctacgaccattcatattatttcatcgccacgtttatcaccgaccatatcagacaccatgccaaatacctcaacgcgtag

SEQ ID NO: 329440 - DNA, 849 bp, Artificial Sequence
  derived and/or modified sequence
atggccctgaagcagatcagcagcaacaagtgcttcggcggcctgcagaaggtgttcgagcacgacagcgtggagctgaactgcaagatgaagttcgccgtgtacctgccccccaaggccgagaccggcaagtgccccgccctgtactggctgagcggcctgacctgcaccgagcagaacttcatcagcaagagcggctaccaccagagcgccagcgagcacggcctggtggtgatcgcccccgacaccagccccagaggctgcaacatcaagggcgaggacgagagctgggacttcggcaccggcgccggcttctacgtggacgccaccgaggacccctggaagaccaactacagaatgtacagctacgtgaccgaggagctgccccagctgatcaacgccaacttccccgtggacccccagagaatgagcatcttcggccacagcatgggcggccacggcgccctgatctgcgccctgaagaaccccggcaagtacaagagcgtgagcgccttcgcccccatctgcaaccccgtgctgtgcccctggggcaagaaggccttcagcggctacctgggcaccgaccagagcaagtggaaggcctacgacgccacccacctggtgaagagctaccccggcagccagctggacatcctgatcgaccagggcaaggacgaccagttcctgctggacggccagctgctgcccgacaacttcatcgccgcctgcaccgagaagaagatccccgtggtgttcagactgcaggagggctacgaccacagctactacttcatcgccaccttcatcaccgaccacatcagacaccacgccaagtacctgaacgcctag

SEQ ID NO: 329441 - DNA, 1192 bp, Artificial Sequence
  derived and/or modified sequence
aaagcgagagtgagtgggaccggaggggcggggcatcatatgggcggggctgaggcgaggccccggcggccatcttgagccccgccttttacttcggcccgcttcttctggtcactccgccaccgtagaatcgcctaccatttggtgcaagcaaaaagcaatcagcaattggacaggaaaagaatggcattgaagcagatttccagcaacaagtgctttgggggattgcagaaagtttttgaacatgacagtgttgaactaaactgcaaaatgaaatttgctgtctacttaccaccaaaggcagaaacaggaaagtgccctgcactgtattggctctcaggtttaacttgcacagagcaaaattttatatcaaaatctggttatcatcagtctgcttcagaacatggtcttgttgtcattgctccagataccagccctcgtggctgcaatattaaaggtgaagatgagagctgggactttggcactggtgctggattttatgttgatgccactgaagatccttggaaaaccaactacagaatgtactcttatgtcacagaggagcttccccaactcataaatgccaattttccagtggatccccaaaggatgtctatttttggccactccatgggaggtcatggagctctgatctgtgctttgaaaaatcctggaaaatacaaatctgtgtcagcatttgctccaatttgcaaccctgtactctgtccctggggcaaaaaagcctttagtggatatttgggaacagatcaaagtaaatggaaggcttatgatgctacccaccttgtgaaatcctatccaggatctcagctggacatactaattgatcaagggaaagatgaccagtttcttttagatggacagttactccctgataacttcatagctgcctgtacagaaaagaaaatccccgttgtttttcgattgcaagagggttatgatcatagctactacttcattgcaacctttattactgaccacatcagacatcatgctaaatacctgaatgcatgaaaaaactccaaataagagaatctcttcaggattataaaagttgtaaaatgcaactgtattgctgagcaaaaaaaaaaaaaattcaaaacattggattttatagtgctaaaagggctttattctatagttgaatcacctctgaataaagatataaaaccta

SEQ ID NO: 329442 - protein, 278 aa, Artificial Sequence
  derived and/or modified sequence
MAALFLKRLTLQTVKSENSCIRCFGKHILQKTAPAQLSPIASAPRLSFLIHAKAFSTAEDTQNEGKKTKKNKTAFSNVGRKISQRVIHLFDEKGNDLGNMHRANVIRLMDERDLRLVQRNTSTEPAEYQLMTGLQILQERQRLREMEKANPKTGPTLRKELILSSNIGQHDLDTKTKQIQQWIKKKHLVQITIKKGKNVDVSENEMEEIFHQILQTMPGIATFSSRPQAVQGGKALMCVLRAFSKNEEKAYKETQETQERDTLNKDHGNDKESNVLHQ

SEQ ID NO: 329443 - DNA, 837 bp, Artificial Sequence
  derived and/or modified sequence
atggccgccctgttcctgaagagactgaccctgcagaccgtgaagagcgagaacagctgcatcagatgcttcggcaagcacatcctgcagaagaccgcccccgcccagctgagccccatcgccagcgcccccagactgagcttcctgatccacgccaaggccttcagcaccgccgaggacacccagaacgagggcaagaagaccaagaagaacaagaccgccttcagcaacgtgggcagaaagatcagccagagagtgatccacctgttcgacgagaagggcaacgacctgggcaacatgcacagagccaacgtgatcagactgatggacgagagagacctgagactggtgcagagaaacaccagcaccgagcccgccgagtaccagctgatgaccggcctgcagatcctgcaggagagacagagactgagagagatggagaaggccaaccccaagaccggccccaccctgagaaaggagctgatcctgagcagcaacatcggccagcacgacctggacaccaagaccaagcagatccagcagtggatcaagaagaagcacctggtgcagatcaccatcaagaagggcaagaacgtggacgtgagcgagaacgagatggaggagatcttccaccagatcctgcagaccatgcccggcatcgccaccttcagcagcagaccccaggccgtgcagggcggcaaggccctgatgtgcgtgctgagagccttcagcaagaacgaggagaaggcctacaaggagacccaggagacccaggagagagacaccctgaacaaggaccacggcaacgacaaggagagcaacgtgctgcaccagtag

SEQ ID NO: 329444 - DNA, 837 bp, Artificial Sequence
  derived and/or modified sequence
atggccgctttattcttgaagaggctcacgcttcagaccgtcaaaagtgaaaactcttgtatccgctgcttcggtaaacatatccttcagaagactgcccctgctcaactgtcacccatcgcttctgctccccgactgtcctttctgatccatgccaaggccttttcgaccgcagaagacacccagaatgaaggaaagaaaaccaaaaagaacaagacagcattttctaatgttggcaggaagatttcacaaagagtcatccacctattcgacgagaaagggaatgacttaggcaatatgcacagagctaacgtgatacggctaatggacgagagagacctgcgcctggtgcagagaaacacaagtacagagcccgcggagtaccagttaatgacgggtctgcaaattctgcaggagaggcagcgtctccgtgagatggagaaagccaaccccaaaaccggccccacccttagaaaagaactaatattaagtagcaatataggccagcacgacttagatacaaaaacgaagcagatccagcagtggatcaagaagaagcacttggtgcagatcaccattaagaagggtaagaacgtggatgtgtcagaaaacgaaatggaagaaatttttcaccaaatcttgcagacgatgcccggtattgcgacattctccagccggccgcaggccgtgcagggtgggaaggctttgatgtgcgtcctaagagcttttagtaagaacgaggagaaggcttataaggagacccaggagacacaggagagggacacactcaataaagaccacggtaacgataaagaaagcaatgtgttgcaccaatag

SEQ ID NO: 329445 - DNA, 837 bp, Artificial Sequence
  derived and/or modified sequence
atggctgctctctttctcaaacgactgacgctccagaccgttaagagtgagaacagttgcattagatgttttggtaaacacattcttcaaaaaacggcccctgcccagctctctcccatcgccagcgctccccggttaagttttctgatccacgccaaggcgtttagcaccgctgaagacacccagaacgagggcaagaaaactaagaaaaacaagacagccttcagcaatgtgggccggaaaatttcccaaagggtcatacacctgtttgatgagaaggggaacgatctcggcaatatgcacagggccaacgtgattcgactcatggatgagagggacctcagattggtgcagcgaaatacaagtacagagccagccgagtaccaactgatgaccgggctgcagatactgcaggaacgtcagcgactgagggagatggagaaagccaaccctaaaaccggccctaccttgcgaaaagaattgatcctctcaagcaacatcggacagcacgacttggacaccaagaccaagcagatccaacagtggatcaaaaagaagcacttagttcaaataacaatcaagaagggtaagaatgtggacgtgtcagagaacgaaatggaggaaatctttcatcaaatcttgcagactatgccaggtattgccacatttagttctcggccacaggccgtgcagggtggaaaggccctgatgtgcgtcttaagggccttcagcaagaacgaagagaaagcctacaaggagactcaggagacccaagagcgggacacacttaacaaagatcacggcaatgacaaggaaagtaacgtcctccatcagtag

SEQ ID NO: 329446 - DNA, 837 bp, Artificial Sequence
  derived and/or modified sequence
atggcggccctgttcttgaagaggttgacattgcagaccgtgaagtccgaaaactcttgcattcgctgtttcgggaagcacattttacaaaagaccgcgcctgcccaactgtctcccattgctagcgccccacgcttgagttttctcattcacgctaaagccttcagcacggctgaggacacccagaacgagggcaagaagaccaaaaaaaataaaacagcttttagcaacgtgggacgcaaaatcagtcaacgcgtcattcacctgtttgatgagaagggtaacgaccttggaaatatgcaccgtgctaacgtcatccgactaatggacgagagggatctgcgcttagtgcagcgcaatacctcaactgagccggccgaatatcagttgatgactggactgcagatactccaggagcggcagcggcttagggaaatggaaaaagctaaccccaaaaccggccccaccctaagaaaagagctcattctgtcaagcaacatcgggcaacatgacctcgatactaagacgaaacagatccagcagtggatcaagaagaagcatctggtgcaaataaccatcaaaaaagggaagaacgtagatgtcagcgagaacgaaatggaagagatattccatcaaattttgcagactatgccaggcatagccacattcagctctaggccgcaggccgtccaggggggtaaagctctcatgtgtgtgctgcgcgccttctccaagaacgaggaaaaggcatacaaagaaacccaggaaacccaggagagggatactctcaacaaggaccacggaaatgacaaagaaagtaacgttctgcaccagtag

SEQ ID NO: 329447 - DNA, 837 bp, Artificial Sequence
  derived and/or modified sequence
atggcagctttattcctcaaacgcttaactctgcagaccgtgaagtccgagaatagctgtattcggtgttttgggaaacatatactgcagaaaacagctccagctcagttatcccctatagcaagcgccccacgattgtcgttcctgattcatgccaaagcttttagtaccgctgaagacactcagaatgaagggaagaagacaaagaagaataagactgctttctctaacgtcgggcgcaagatttcccaacgtgtgatccatctgtttgacgaaaaaggtaatgaccttggcaacatgcatcgcgccaatgttatccggctgatggacgaacgcgacctcagattggtacaacggaacacgtctactgaacccgcagaataccaactgatgacaggtcttcagattcttcaggagcggcagcggctacgtgagatggaaaaggccaacccaaagaccggaccaactctcagaaaggaactgatcctcagtagcaacattggacaacacgacctcgacacaaagacaaagcaaatccagcagtggatcaagaaaaagcaccttgtacagattaccattaagaagggcaagaacgtggacgtaagcgagaatgaaatggaagagatctttcatcagatactgcagacaatgcccgggatcgcgacattttcttctagaccccaggcggtgcagggcgggaaagctctgatgtgcgtgctcagagccttttccaaaaatgaagaaaaggcatataaggagacacaggaaacacaggaaagagacacattaaataaagatcacggcaacgataaggaatcaaatgtgctgcatcagtag

SEQ ID NO: 329448 - DNA, 837 bp, Artificial Sequence
  derived and/or modified sequence
atggccgccctcttcctgaagaggctgaccctgcagacagtgaagtctgagaacagctgcatccgctgcttcggcaagcacatcctgcagaagacagccccagcccagctgagccccatcgccagcgccccccggctgtccttcctgattcatgccaaggccttcagcacagctgaggacacccagaatgaaggcaagaagaccaagaagaacaagacagccttcagcaatgtgggcaggaagatcagccagagggtcatccacctgtttgatgagaagggaaatgacctgggcaacatgcaccgggccaacgtcatccggctgatggatgagcgggacctgcggctggtgcagaggaacaccagcacagagcctgctgagtaccagctgatgacaggcctgcagatcctgcaggagcggcagaggctgcgggagatggagaaggccaaccccaagacaggccccaccctgaggaaggagctgatcctgagcagcaacatcggccagcacgacctggacaccaagaccaagcagatccagcagtggatcaagaagaagcacctggtgcagatcaccatcaagaagggcaagaatgtggatgtgtctgaaaatgagatggaggagatcttccaccagatcctgcagaccatgcctggcatcgccaccttcagcagccggccccaggccgtgcagggcggcaaggccctgatgtgtgtgctgcgggccttcagcaagaatgaggagaaggcctacaaggagacccaggagacccaggagcgggacaccctgaacaaggaccatggaaatgacaaggagagcaatgtgctgcaccagtag

SEQ ID NO: 329449 - DNA, 1104 bp, Artificial Sequence
  derived and/or modified sequence
gcagatccgctgtacttgcgtccgctacagtatgtcaatcgcttgccccagcacagtgggctccgtggcttaagacttgaaccaagtaaacgaagttctcttactgagaagtctcagtttcaaaagagcttctcctcatcaactggggatgattacagttcttcctaaaaaagcctacttgatgtgaagacaatgaggatgaagacctttatggtgatccacttccacttaatagatggctgctctttttctaaagaggttaacactacaaactgtaaagtctgaaaatagttgcattagatgttttggtaaacacatcctgcaaaagacagcaccagcacagttgtcccctattgcttctgccccaagactctccttcctaattcatgcaaaagcctttagtaccgctgaagacacccagaatgaaggaaaaaagacaaaaaagaataaaacagcttttagtaacgttggaagaaaaattagtcagcgagttattcacttatttgatgagaagggcaatgatttgggaaacatgcaccgagcaaatgtgattagacttatggatgagcgagacctgcgactggttcaaaggaacaccagcacagaacctgcagagtatcagctcatgacaggattgcagatcctccaggagcggcagaggctgagggagatggagaaggcgaaccccaaaactggaccaaccctgagaaaggaactgattttgtcttcaaatattggacaacatgatttggacacaaagactaaacagattcagcagtggattaagaaaaaacacctagtccagattaccataaagaaaggaaaaaatgtagacgtgtcagaaaatgaaatggaggagatatttcatcaaatactccagactatgcctggaatagctacattctcatctaggccacaagctgttcaaggaggaaaagctttaatgtgtgttcttcgtgctttcagcaaaaatgaggagaaggcatataaagaaactcaagagacccaggaaagagacactttgaacaaagaccatggaaatgataaggaatcaaatgttctgcatcagtaattttaataaagaaaagcatgctctgagagaaa

SEQ ID NO: 329450 - DNA, 1005 bp, Artificial Sequence
  derived and/or modified sequence
gggactcgccgcagatccgctgtacttgcgtccgctacagtatgtcaatcgcttgccccagcacagctgtcattcttctctacagaagagcttctcctcatcaactggggatgattacagttcttcctaaaaaaggatggctgctctttttctaaagaggttaacactacaaactgtaaagtctgaaaatagttgcattagatgttttggtaaacacatcctgcaaaagacagcaccagcacagttgtcccctattgcttctgccccaagactctccttcctaattcatgcaaaagcctttagtaccgctgaagacacccagaatgaaggaaaaaagacaaaaaagaataaaacagcttttagtaacgttggaagaaaaattagtcagcgagttattcacttatttgatgagaagggcaatgatttgggaaacatgcaccgagcaaatgtgattagacttatggatgagcgagacctgcgactggttcaaaggaacaccagcacagaacctgcagagtatcagctcatgacaggattgcagatcctccaggagcggcagaggctgagggagatggagaaggcgaaccccaaaactggaccaaccctgagaaaggaactgattttgtcttcaaatattggacaacatgatttggacacaaagactaaacagattcagcagtggattaagaaaaaacacctagtccagattaccataaagaaaggaaaaaatgtagacgtgtcagaaaatgaaatggaggagatatttcatcaaatactccagactatgcctggaatagctacattctcatctaggccacaagctgttcaaggaggaaaagctttaatgtgtgttcttcgtgctttcagcaaaaatgaggagaaggcatataaagaaactcaagagacccaggaaagagacactttgaacaaagaccatggaaatgataaggaatcaaatgttctgcatcagtaattttaataaagaaaagcatgctctgagagaaa

SEQ ID NO: 329451 - DNA, 1069 bp, Artificial Sequence
  derived and/or modified sequence
gctacgtcccgtctctagccctggcgctccgccggtcccgttctgcaggtgggcgtcgccgccgacttaccaacaaccgggtcgggggctcccggaagtgctcttgcggcttactgcctggcacagctgtcattcttctctacagaagagcttctcctcatcaactggggatgattacagttcttcctaaaaaaggatggctgctctttttctaaagaggttaacactacaaactgtaaagtctgaaaatagttgcattagatgttttggtaaacacatcctgcaaaagacagcaccagcacagttgtcccctattgcttctgccccaagactctccttcctaattcatgcaaaagcctttagtaccgctgaagacacccagaatgaaggaaaaaagacaaaaaagaataaaacagcttttagtaacgttggaagaaaaattagtcagcgagttattcacttatttgatgagaagggcaatgatttgggaaacatgcaccgagcaaatgtgattagacttatggatgagcgagacctgcgactggttcaaaggaacaccagcacagaacctgcagagtatcagctcatgacaggattgcagatcctccaggagcggcagaggctgagggagatggagaaggcgaaccccaaaactggaccaaccctgagaaaggaactgattttgtcttcaaatattggacaacatgatttggacacaaagactaaacagattcagcagtggattaagaaaaaacacctagtccagattaccataaagaaaggaaaaaatgtagacgtgtcagaaaatgaaatggaggagatatttcatcaaatactccagactatgcctggaatagctacattctcatctaggccacaagctgttcaaggaggaaaagctttaatgtgtgttcttcgtgctttcagcaaaaatgaggagaaggcatataaagaaactcaagagacccaggaaagagacactttgaacaaagaccatggaaatgataaggaatcaaatgttctgcatcagtaattttaataaagaaaagcatgctctgagagaaagctc

SEQ ID NO: 329452 - DNA, 1098 bp, Artificial Sequence
  derived and/or modified sequence
gaagccccgcccactacggagagcgaaggggactcgccgcagatccgctgtacttgcgtccgctacagtatgtcaatcgcttgccccagcacagctgtcattcttctctacagaagagcttctcctcatcaactggggatgattacagttcttcctaaaaaagcctacttgatgtgaagacaatgaggatgaagacctttatggtgatccacttccacttaatagatggctgctctttttctaaagaggttaacactacaaactgtaaagtctgaaaatagttgcattagatgttttggtaaacacatcctgcaaaagacagcaccagcacagttgtcccctattgcttctgccccaagactctccttcctaattcatgcaaaagcctttagtaccgctgaagacacccagaatgaaggaaaaaagacaaaaaagaataaaacagcttttagtaacgttggaagaaaaattagtcagcgagttattcacttatttgatgagaagggcaatgatttgggaaacatgcaccgagcaaatgtgattagacttatggatgagcgagacctgcgactggttcaaaggaacaccagcacagaacctgcagagtatcagctcatgacaggattgcagatcctccaggagcggcagaggctgagggagatggagaaggcgaaccccaaaactggaccaaccctgagaaaggaactgattttgtcttcaaatattggacaacatgatttggacacaaagactaaacagattcagcagtggattaagaaaaaacacctagtccagattaccataaagaaaggaaaaaatgtagacgtgtcagaaaatgaaatggaggagatatttcatcaaatactccagactatgcctggaatagctacattctcatctaggccacaagctgttcaaggaggaaaagctttaatgtgtgttcttcgtgctttcagcaaaaatgaggagaaggcatataaagaaactcaagagacccaggaaagagacactttgaacaaagaccatggaaatgataaggaatcaaatgttctgcatcagtaattttaataaagaaaagcatgctctgagagaaagctc

SEQ ID NO: 329453 - DNA, 837 bp, Artificial Sequence
  derived and/or modified sequence
atggccgccctgttcctgaagcggctgaccctgcagaccgtgaagtcagagaattcatgcattcgctgtttcggtaaacatattctgcagaagacggcccccgcacaattatctcccattgcctccgcgccgcgcctgagctttttgattcatgctaaagccttcagtacagctgaggacacccaaaatgagggcaagaagaccaaaaaaaacaagaccgccttctccaacgttggccgtaaaatcagccagcgggttattcatctgttcgacgaaaaggggaacgacttaggcaacatgcacagggccaacgtcatcaggctgatggacgagcgtgatctgagactggtccagcggaataccagtacggaaccagctgagtatcagctcatgacaggcttgcagatcttgcaagagcgccagcgtctgcgcgagatggagaaggcaaatccaaagacaggaccaaccctaagaaaagaactaatcctctcctctaacattggtcaacacgatctggacacaaaaacgaagcagatacaacaatggattaagaaaaaacatctggtccagataaccatcaagaagggtaagaacgtggacgtgtctgaaaacgaaatggaagagatattccaccaaattcttcaaaccatgcccggaattgctactttctccagccgcccccaagccgtccaggggggcaaggctctgatgtgtgtattacgcgctttcagtaagaatgaggagaaagcttacaaagaaacccaggaaacacaggaacgcgacacactgaacaaggaccacggcaatgacaaagaaagtaatgtgctgcaccaatag

SEQ ID NO: 329454 - DNA, 837 bp, Artificial Sequence
  derived and/or modified sequence
atggccgccctgttcctgaagcggctgaccctgcagaccgtgaagtccgagaatagctgtatcaggtgcttcggaaagcatattcttcaaaagaccgcacctgcgcagctcagccccatcgcgtcagccccacgactcagttttctgatacacgcgaaggcatttagcactgccgaagatacgcagaatgagggcaagaagacaaaaaagaataagaccgctttttccaacgtcggtcgaaaaatctcccaacgtgtcatacacctgtttgacgagaaggggaacgacttgggcaatatgcacagagctaacgtcatccggctcatggacgagcgtgacctcagattagttcagcgcaacaccagcacagagcccgctgagtatcaactgatgaccggattgcagattttgcaagaaaggcagcgtttgagggagatggagaaggccaatccaaagacaggcccaacgcttagaaaggaattgatcttgtcaagcaacattggccagcacgatcttgatacaaagacgaagcagatccagcagtggataaagaagaagcacttagtccagatcacaatcaaaaagggcaagaacgtcgatgtcagcgaaaatgaaatggaggagatatttcaccagatcctgcagaccatgcctggcattgccactttctctagtagaccccaagccgtccaaggaggaaaggctttgatgtgcgtgcttcgcgcctttagtaaaaatgaggagaaggcgtacaaggaaactcaggagacacaggagcgggataccctgaacaaagaccacggaaacgacaaagagagcaacgtactgcatcagtag

SEQ ID NO: 329455 - DNA, 837 bp, Artificial Sequence
  derived and/or modified sequence
atggccgccctgttcctgaagcggctgaccctgcagaccgtgaagagtgaaaactcttgtattaggtgtttcggcaaacatatactacagaaaactgcccccgctcaactgtcccccattgcctcggctcctaggttatcctttctaatacacgccaaggcattcagcaccgccgaggatacccagaatgaggggaagaagacaaaaaaaaacaaaacagctttcagcaacgtggggaggaaaatcagccagcgggtgattcacctgttcgatgagaagggaaatgatcttggcaatatgcatagagctaatgtgatcaggcttatggacgaacgagatttgagattagtgcagcgcaacacttcaaccgaaccagctgaatatcagctgatgactggacttcagatcctccaggaacgtcagaggctgagagagatggagaaggcaaaccccaaaactgggcctaccctgaggaaggaactgatcctcagcagcaatattgggcagcatgacttagataccaaaacaaagcagatccagcagtggatcaagaagaaacatctagttcagatcacaattaaaaagggtaagaacgttgatgtgtccgagaacgagatggaggaaatctttcaccaaattcttcagaccatgcccgggatagccacgttttcctctcgacctcaagcagtgcagggtgggaaggctttgatgtgcgttctcagggccttttcaaaaaacgaggaaaaggcatacaaggagacccaagagacccaggagcgcgacacacttaataaggaccacggcaatgacaaggagagtaatgttctccaccagtag

SEQ ID NO: 329456 - DNA, 837 bp, Artificial Sequence
  derived and/or modified sequence
atggccgccctgttcctgaagcggctgaccctgcagaccgtgaagagcgaaaactcttgtatccgttgttttggcaaacacatccttcagaagaccgcacctgcacagttatctccaatagcctctgctccgagattgtccttcctgatccacgccaaggctttcagtaccgcggaggatacacagaatgaaggcaagaagaccaaaaagaataaaacagcttttagcaacgtgggccgaaaaattagccagagagtcatccatctgtttgacgagaagggtaacgacctggggaatatgcacagagccaacgttatcagactgatggacgaaagagatttgagactcgtgcagcggaacacttcaactgaacccgccgagtatcagctgatgacagggcttcagatacttcaggaacggcagaggctacgcgagatggaaaaggcgaaccccaaaactggccctacgctgaggaaggaactcatactttcatccaacataggccagcacgatctggatacaaaaacaaaacagattcagcaatggatcaagaagaagcacctggttcagattacaatcaaaaagggtaagaatgttgacgtctccgaaaatgaaatggaggagatatttcatcagattctgcagactatgccaggtatcgcgactttctcctcccggccgcaggcggtgcaggggggaaaggccctgatgtgtgtgctgagggcatttagtaagaatgaggagaaggcttacaaggaaacgcaggaaacacaggaaagagataccttaaacaaggatcatggcaacgacaaagagagcaatgtcctccaccagtag

SEQ ID NO: 329457 - DNA, 837 bp, Artificial Sequence
  derived and/or modified sequence
atggccgcactattccttaagcggcttactctccagacggtcaaatccgaaaattcctgtattcgctgcttcggaaagcatatcttgcagaaaaccgcccctgctcagctgagtccgatcgcatctgcaccgcgactcagttttctcattcacgctaaagcattctctaccgcagaagacacccaaaatgagggtaaaaagactaagaagaataagactgcgttcagtaacgttggacgcaaaatctcccagcgggtgattcacctgtttgacgagaaagggaacgacctgggcaatatgcatcgcgctaatgtgatcaggctgatggacgagagggatttgaggctggtgcagcgaaatacgtctactgaaccggctgagtaccagcttatgaccggactccagattctgcaagaacgccagcggttgcgggagatggagaaggccaaccccaagacgggcccaactctgcggaaagaactgatcctctcatccaacatcggacaacacgacctggacaccaagaccaagcaaatacagcaatggatcaaaaaaaagcatttggtgcaaattaccatcaagaagggcaagaatgtagacgtgagcgaaaatgaaatggaggaaattttccaccagatcctacagacgatgcccggtattgccaccttttcttccagacctcaggctgtgcaggggggtaaagccctcatgtgcgtgctgcgggctttcagcaagaacgaggagaaggcatataaggaaacgcaggagacacaggagcgtgataccttaaacaaagatcatggtaacgataaggaaagtaacgttctgcaccagtag

SEQ ID NO: 329458 - DNA, 837 bp, Artificial Sequence
  derived and/or modified sequence
atggccgcactgttccttaaacgtctgactctgcagaccgtcaagtccgaaaatagctgcattagatgctttggaaagcatattctccagaaaaccgcgccagcacagctcagccccattgccagcgcacctcgtctgtcattcctgatccacgccaaagcctttagcaccgcagaggatacccagaacgagggaaaaaaaaccaagaagaataaaaccgctttctccaatgtgggccgaaaaattagtcaaagggtaattcacctctttgacgagaaggggaacgatcttggaaatatgcacagagccaacgtgatccgcctcatggacgaacgtgacttgaggttggtgcaacgaaacacctcaaccgagcctgccgaataccagctgatgacaggactgcagatattgcaggagaggcagagactcagagaaatggagaaagccaaccccaaaaccggtcctacgctgcgcaaagagttgatattaagttccaacatcggacaacatgaccttgatacaaagacgaagcaaatacagcaatggatcaaaaagaagcatctggtgcagatcaccattaaaaaaggcaagaacgtggatgtgtctgagaatgaaatggaggaaatctttcatcagattctccagacaatgccgggtatcgccacattttcttccaggcctcaggctgtccagggcggtaaggctctgatgtgtgttttgagggcattctccaagaatgaggagaaggcatacaaagaaacgcaagagacacaggaaagagacacgttgaataaagatcacgggaacgacaaagaatctaacgttttacaccagtag

SEQ ID NO: 329459 - DNA, 837 bp, Artificial Sequence
  derived and/or modified sequence
atggcagctctgtttcttaaacgtttaactctccagacagtgaaaagtgagaacagctgcatccgatgcttcggcaagcacattctgcaaaaaacagccccagctcagctaagccccatcgcgtccgcaccccgtcttagctttctgatccatgccaaggccttttctaccgcagaggatactcaaaatgaaggaaagaaaaccaagaaaaacaaaacggcattttccaacgtgggcaggaaaataagccaaagggtgattcacctctttgacgaaaagggcaatgacctcggcaacatgcacagagcgaatgttatccgcttgatggacgaaagggacctgcggctcgtgcagcgcaatactagtactgaacccgcagagtatcagctgatgacaggcttgcagatccttcaggagaggcagaggctgagagagatggagaaggccaatcctaagactgggccaacactgcgcaaagaacttatactctccagcaacatcggccagcatgacttagacactaaaacaaagcaaattcagcaatggatcaagaagaagcacttagtgcagattacaatcaagaaaggcaaaaatgtggatgtctcggaaaatgagatggaagaaatctttcatcagatcctgcagaccatgccagggatcgccaccttcagcagtcgccctcaggccgttcaggggggaaaggccttgatgtgcgtgctgagggccttctctaagaacgaagaaaaagcgtacaaagaaacccaggaaacccaggagcgggacacccttaataaagaccatggcaacgataaggaatctaatgtgctgcaccagtag

SEQ ID NO: 329460 - DNA, 837 bp, Artificial Sequence
  derived and/or modified sequence
atggccgcactgttcctcaaacggttgacattgcagaccgttaaaagcgagaacagttgcatacggtgcttcggaaagcatatcttacagaagaccgcgcctgctcagttatcacctatcgcctccgccccacgcctcagtttcctgattcacgccaaggccttcagtaccgccgaggacacccagaacgaaggtaagaaaacaaagaaaaacaaaaccgctttttcgaatgtgggcaggaagatcagtcagcgggtgattcatctcttcgacgaaaaaggtaacgacctaggcaatatgcatagggcaaacgtgattagactgatggacgagcgggacctccgactggtccagaggaacacttcaacagagcctgctgaatatcagctcatgacagggctccaaatactgcaggagcgccagagactgcgagaaatggaaaaggctaatcccaaaaccgggcctacactaaggaaagaacttatactctcttctaatatcggccagcatgacctggacaccaagacaaagcaaattcagcagtggatcaagaagaaacacctcgtgcagatcactattaaaaaggggaagaatgtcgatgtgtccgagaacgaaatggaagagatcttccatcagatccttcagaccatgcctggcattgccacctttagcagcaggccacaggcagtacaggggggtaaagcactgatgtgtgttctccgcgctttttcgaaaaacgaggagaaagcctataaagagacccaggaaacacaagaacgtgacacactcaacaaagaccacgggaatgacaaagagtctaatgttttgcaccaatag

SEQ ID NO: 329461 - DNA, 591 bp, Artificial Sequence
  derived and/or modified sequence
agaagaagaaggaagaggaggacccccatgagccgccgcagcctgtgccggcccacccacagcagcagcgagaccctgcggccccccagccgggtgaggacccctgtgcccctgtctgtgacctgccccaagtcctggccaccctgtggcacagcctgggagaggaacagaagcaggaccagcaggaccagcctgagcagccctgctgcccgggaccctgcccacctggcccaccccaccccacctgctgctggcaccggcacagctgccacccctgtgggctctgtggccagcgccccagctgcctgcagccctggcaccaacagaagcaccagccccaacccagccagcctgcccagcctgcggctggccggccgccactgcagcgagcctgagggcctgacagctgagaagaggccctggccagaggccggctggcccatcggggagagcagtgacacccccatcgcccggggcctgagcctcttcctgaacctgcccccagacagcgctgaggccgcccactgccccccaccagcccagaggacctgcaggaacctgcccccagctgacctgctggcccctggatag

SEQ ID NO: 329462 - DNA, 591 bp, Artificial Sequence
  derived and/or modified sequence
agaagaagaagaaagagaagaacccccatgagcagaagaagcctgtgcagacccacccacagcagcagcgagaccctgagaccccccagcagagtgagaacccccgtgcccctgagcgtgacctgccccaagagctggcccccctgcggcaccgcctgggagagaaacagaagcagaaccagcagaaccagcctgagcagccccgccgccagagaccccgcccacctggcccaccccaccccccccgccgccggcaccggcaccgccgccacccccgtgggcagcgtggccagcgcccccgccgcctgcagccccggcaccaacagaagcaccagccccaaccccgccagcctgcccagcctgagactggccggcagacactgcagcgagcccgagggcctgaccgccgagaagagaccctggcccgaggccggctggcccatcggcgagagcagcgacacccccatcgccagaggcctgagcctgttcctgaacctgccccccgacagcgccgaggccgcccactgccccccccccgcccagagaacctgcagaaacctgccccccgccgacctgctggcccccggctag

SEQ ID NO: 329463 - DNA, 90 bp, Artificial Sequence
  derived and/or modified sequence
atacaactaaagcaaatataagcaactaaagcaacagtacaactaaagcaaaacagaacaagactgccagggcctagaaaagccaagaac

SEQ ID NO: 329464 - protein, 258 aa, Artificial Sequence
  derived and/or modified sequence
MARLQEEHGDQLLSIRCQHQEQVEDLTASHDAALLEMENNHTVAITILQDDHDHKVQELMSTHELEKKELEENFEKLRLSLQDQVDTLTFQSQSLRDRARRFEEALRKNTEEQLEIALAPYQHLEEDMKSLKQVLEMKNQQIHEQEKKILELEKLAEKNIILEEKIQVLQQQNEDLKARIDQNTVVTRQLSEENANLQEYVEKETQEKKRLSRTNEELLWKLQTGDPTSPIKLSPTSPVYRGSSSGPSSPARVSTTPR

SEQ ID NO: 329465 - DNA, 11490 bp, Artificial Sequence
  derived and/or modified sequence
atgaacaccttctggcccggcagagagctgatcgtgcagtggtaccccttcgacgagaacagaaaccaccccagcgtgagctggctgaagatggtgtggaagaacctgtacatccacttcagcgaggacctgaccctgttcgacgagatgcccctgatccccagaaccatcctggaggagggccagacctgcgtggagctgatcagactgagaatccccagcctggtgatcctggacgacgagagcgaggcccagctgcccgagttcctggccgacatcgtgcagaagctgggcggcttcgtgctgaagaagctggacgccagcatccagcaccccctgatcaagaagtacatccacagccccctgcccagcgccgtgctgcagatcatggagaagatgcccctgcagaagctgtgcaaccagatcaccagcctgctgcccacccacaaggacgccctgagaaagttcctggccagcctgaccgacagcagcgagaaggagaagagaatcatccaggagctggccatcttcaagagaatcaaccacagcagcgaccagggcatcagcagctacaccaagctgaagggctgcaaggtgctgcaccacaccgccaagctgcccgccgacctgagactgagcatcagcgtgatcgacagcagcgacgaggccaccatcagactggccaacatgctgaagatcgagcagctgaagaccaccagctgcctgaagctggtgctgaaggacatcgagaacgccttctacagccacgaggaggtgacccagctgatgctgtgggtgctggagaacctgagcagcctgaagaacgagaaccccaacgtgctggagtggctgacccccctgaagttcatccagatcagccaggagcagatggtgagcgccggcgagctgttcgaccccgacatcgaggtgctgaaggacctgttctgcaacgaggagggcacctacttcccccccagcgtgttcaccagccccgacatcctgcacagcctgagacagatcggcctgaagaacgaggccagcctgaaggagaaggacgtggtgcaggtggccaagaagatcgaggccctgcaggtgggcgcctgccccgaccaggacgtgctgctgaagaaggccaagaccctgctgctggtgctgaacaagaaccacaccctgctgcagagcagcgagggcaagatgaccctgaagaagatcaagtgggtgcccgcctgcaaggagagaccccccaactaccccggcagcctggtgtggaagggcgacctgtgcaacctgtgcgccccccccgacatgtgcgacgtgggccacgccatcctgatcggcagcagcctgcccctggtggagagcatccacgtgaacctggagaaggccctgggcatcttcaccaagcccagcctgagcgccgtgctgaagcacttcaagatcgtggtggactggtacagcagcaagaccttcagcgacgaggactactaccagttccagcacatcctgctggagatctacggcttcatgcacgaccacctgaacgagggcaaggacagcttcagagccctgaagttcccctgggtgtggaccggcaagaagttctgccccctggcccaggccgtgatcaagcccatccacgacctggacctgcagccctacctgcacaacgtgcccaagaccatggccaagttccaccagctgttcaaggtgtgcggcagcatcgaggagctgaccagcgaccacatcagcatggtgatccagaagatctacctgaagagcgaccaggacctgagcgagcaggagagcaagcagaacctgcacctgatgctgaacatcatcagatggctgtacagcaaccagatccccgccagccccaacacccccgtgcccatccaccacagcaagaaccccagcaagctgatcatgaagcccatccacgagtgctgctactgcgacatcaaggtggacgacctgaacgacctgctggaggacagcgtggagcccatcatcctggtgcacgaggacatccccatgaagaccgccgagtggctgaaggtgccctgcctgagcaccagactgatcaaccccgagaacatgggcttcgagcagagcggccagagagagcccctgaccgtgagaatcaagaacatcctggaggagtaccccagcgtgagcgacatcttcaaggagctgctgcagaacgccgacgacgccaacgccaccgagtgcagcttcctgatcgacatgagaagaaacatggacatcagagagaacctgctggaccccggcatggccgcctgccacggccccgccctgtggagcttcaacaacagccagttcagcgacagcgacttcgtgaacatcaccagactgggcgagagcctgaagagaggcgaggtggacaaggtgggcaagttcggcctgggcttcaacagcgtgtaccacatcaccgacatccccatcatcatgagcagagagttcatgatcatgttcgaccccaacatcaaccacatcagcaagcacatcaaggacaagagcaaccccggcatcaagatcaactggagcaagcagcagaagagactgagaaagttccccaaccagttcaagcccttcatcgacgtgttcggctgccagctgcccctgaccgtggaggccccctacagctacaacggcaccctgttcagactgagcttcagaacccagcaggaggccaaggtgagcgaggtgagcagcacctgctacaacaccgccgacatctacagcctggtggacgagttcagcctgtgcggccacagactgatcatcttcacccagagcgtgaagagcatgtacctgaagtacctgaagatcgaggagaccaaccccagcctggcccaggacaccgtgatcatcaagaagaagagctgcagcagcaaggccctgaacacccccgtgctgagcgtgctgaaggaggccgccaagctgatgaagacctgcagcagcagcaacaagaagctgcccagcgacgagcccaagagcagctgcatcctgcagatcaccgtggaggagttccaccacgtgttcagaagaatcgccgacctgcagagccccctgttcagaggccccgacgacgaccccgccgccctgttcgagatggccaagagcggccagagcaagaagcccagcgacgagctgagccagaagaccgtggagtgcaccacctggctgctgtgcacctgcatggacaccggcgaggccctgaagttcagcctgagcgagagcggcagaagactgggcctggtgccctgcggcgccgtgggcgtgcagctgagcgagatccaggaccagaagtggaccgtgaagccccacatcggcgaggtgttctgctacctgcccctgagaatcaagaccggcctgcccgtgcacatcaacggctgcttcgccgtgaccagcaacagaaaggagatctggaagaccgacaccaagggcagatggaacaccaccttcatgagacacgtgatcgtgaaggcctacctgcaggtgctgagcgtgctgagagacctggccaccagcggcgagctgatggactacacctactacgccgtgtggcccgaccccgacctggtgcacgacgacttcagcgtgatctgccagggcttctacgaggacatcgcccacggcaagggcaaggagctgaccaaggtgttcagcgacggcagcacctgggtgagcatgaagaacgtgagattcctggacgacagcatcctgaagagaagagacgtgggcagcgccgccttcaagatcttcctgaagtacctgaagaagaccggcagcaagaacctgtgcgccgtggagctgcccagcagcgtgaagctgggcttcgaggaggccggctgcaagcagatcctgctggagaacaccttcagcgagaagcagttcttcagcgaggtgttcttccccaacatccaggagatcgaggccgagctgagagaccccctgatgatcttcgtgctgaacgagaaggtggacgagttcagcggcgtgctgagagtgaccccctgcatcccctgcagcctggagggccaccccctggtgctgcccagcagactgatccaccccgagggcagagtggccaagctgttcgacatcaaggacggcagattcccctacggcagcacccaggactacctgaaccccatcatcctgatcaagctggtgcagctgggcatggccaaggacgacatcctgtgggacgacatgctggagagagccgtgagcgtggccgagatcaacaagagcgaccacgtggccgcctgcctgagaagcagcatcctgctgagcctgatcgacgagaagctgaagatcagagaccccagagccaaggacttcgccgccaagtaccagaccatcagattcctgcccttcctgaccaagcccgccggcttcagcctggactggaagggcaacagcttcaagcccgagaccatgttcgccgccaccgacctgtacaccgccgagcaccaggacatcgtgtgcctgctgcagcccatcctgaacgagaacagccacagcttcagaggctgcggcagcgtgagcctggccgtgaaggagttcctgggcctgctgaagaagcccaccgtggacctggtgatcaaccagctgaaggaggtggccaagagcgtggacgacggcatcaccctgtaccaggagaacatcaccaacgcctgctacaagtacctgcacgaggccctgatgcagaacgagatcaccaagatgagcatcatcgacaagctgaagcccttcagcttcatcctggtggagaacgcctacgtggacagcgagaaggtgagcttccacctgaacttcgaggccgccccctacctgtaccagctgcccaacaagtacaagaacaacttcagagagctgttcgagaccgtgggcgtgagacagagctgcaccgtggaggacttcgccctggtgctggagagcatcgaccaggagagaggcaccaagcagatcaccgaggagaacttccagctgtgcagaagaatcatcagcgagggcatctggagcctgatcagagagaagaagcaggagttctgcgagaagaactacggcaagatcctgctgcccgacaccaacctgatgctgctgcccgccaagagcctgtgctacaacgactgcccctggatcaaggtgaaggacaccaccgtgaagtactgccacgccgacatccccagagaggtggccgtgaagctgggcgccgtgcccaagagacacaaggccctggagagatacgccagcaacgtgtgcttcaccaccctgggcaccgagttcggccagaaggagaagctgaccagcagaatcaagagcatcctgaacgcctaccccagcgagaaggagatgctgaaggagctgctgcagaacgccgacgacgccaaggccaccgagatctgcttcgtgttcgaccccagacagcaccccgtggacagaatcttcgacgacaagtgggcccccctgcagggccccgccctgtgcgtgtacaacaaccagcccttcaccgaggacgacgtgagaggcatccagaacctgggcaagggcaccaaggagggcaacccctacaagaccggccagtacggcatcggcttcaacagcgtgtaccacatcaccgactgccccagcttcatcagcggcaacgacatcctgtgcatcttcgacccccacgccagatacgcccccggcgccaccagcatcagccccggcagaatgttcagagacctggacgccgacttcagaacccagttcagcgacgtgctggacctgtacctgggcacccacttcaagctggacaactgcaccatgttcagattccccctgagaaacgccgagatggccaaggtgagcgagatcagcagcgtgcccgccagcgacagaatggtgcagaacctgctggacaagctgagaagcgacggcgccgagctgctgatgttcctgaaccacatggagaagatcagcatctgcgagatcgacaagagcaccggcgccctgaacgtgctgtacagcgtgaagggcaagatcaccgacggcgacagactgaagagaaagcagttccacgccagcgtgatcgacagcgtgaccaagaagagacagctgaaggacatccccgtgcagcagatcacctacaccatggacaccgaggacagcgagggcaacctgaccacctggctgatctgcaacagaagcggcttcagcagcatggagaaggtgagcaagagcgtgatcagcgcccacaagaaccaggacatcaccctgttccccagaggcggcgtggccgcctgcatcacccacaactacaagaagccccacagagccttctgcttcctgcccctgagcctggagaccggcctgcccttccacgtgaacggccacttcgccctggacagcgccagaagaaacctgtggagagacgacaacggcgtgggcgtgagaagcgactggaacaacagcctgatgaccgccctgatcgcccccgcctacgtggagctgctgatccagctgaagaagagatacttccccggcagcgaccccaccctgagcgtgctgcagaacacccccatccacgtggtgaaggacaccctgaagaagttcctgagcttcttccccgtgaacagactggacctgcagcccgacctgtactgcctggtgaaggccctgtacaactgcatccacgaggacatgaagagactgctgcccgtggtgagagcccccaacatcgacggcagcgacctgcacagcgccgtgatcatcacctggatcaacatgagcaccagcaacaagaccagacccttcttcgacaacctgctgcaggacgagctgcagcacctgaagaacgccgactacaacatcaccaccagaaagaccgtggccgagaacgtgtacagactgaagcacctgctgctggagatcggcttcaacctggtgtacaactgcgacgagaccgccaacctgtaccactgcctgatcgacgccgacatccccgtgagctacgtgacccccgccgacatcagaagcttcctgatgaccttcagcagccccgacaccaactgccacatcggcaagctgccctgcagactgcagcagaccaacctgaagctgttccacagcctgaagctgctggtggactactgcttcaaggacgccgaggagaacgagatcgaggtggagggcctgcccctgctgatcaccctggacagcgtgctgcagaccttcgacgccaagagacccaagttcctgaccacctaccacgagctgatccccagcagaaaggacctgttcatgaacaccctgtacctgaagtacagcaacatcctgctgaactgcaaggtggccaaggtgttcgacatcagcagcttcgccgacctgctgagcagcgtgctgcccagagagtacaagaccaagagctgcaccaagtggaaggacaacttcgccagcgagagctggctgaagaacgcctggcacttcatcagcgagagcgtgagcgtgaaggaggaccaggaggagaccaagcccaccttcgacatcgtggtggacaccctgaaggactgggccctgctgcccggcaccaagttcaccgtgagcgccaaccagctggtggtgcccgagggcgacgtgctgctgcccctgagcctgatgcacatcgccgtgttccccaacgcccagagcgacaaggtgttccacgccctgatgaaggccggctgcatccagctggccctgaacaagatctgcagcaaggacagcgccttcgtgcccctgctgagctgccacaccgccaacatcgagagccccaccagcatcctgaaggccctgcactacatggtgcagaccagcaccttcagagccgagaagctggtggagaacgacttcgaggccctgctgatgtacttcaactgcaacctgaaccacctgatgagccaggacgacatcaagatcctgaagagcctgccctgctacaagagcatcagcggcagatacgtgagcatcggcaagttcggcacctgctacgtgctgaccaagagcatccccagcgccgaggtggagaagtggacccagagcagcagcagcgccttcctggaggagaagatccacctgaaggagctgtacgaggtgatcggctgcgtgcccgtggacgacctggaggtgtacctgaagcacctgctgcccaagatcgagaacctgagctacgacgccaagctggagcacctgatctacctgaagaacagactgagcagcgccgaggagctgagcgagatcaaggagcagctgttcgagaagctggagagcctgctgatcatccacgacgccaacagcagactgaagcaggccaagcacttctacgacagaaccgtgagagtgttcgaggtgatgctgcccgagaagctgttcatccccaacgacttcttcaagaagctggagcagctgatcaagcccaagaaccacgtgaccttcatgaccagctgggtggagttcctgagaaacatcggcctgaagtacatcctgagccagcagcagctgctgcagttcgccaaggagatcagcgtgagagccaacaccgagaactggagcaaggagaccctgcagaacaccgtggacatcctgctgcaccacatcttccaggagagaatggacctgctgagcggcaacttcctgaaggagctgagcctgatccccttcctgtgccccgagagagcccccgccgagttcatcagattccacccccagtaccaggaggtgaacggcaccctgcccctgatcaagttcaacggcgcccaggtgaaccccaagttcaagcagtgcgacgtgctgcagctgctgtggaccagctgccccatcctgcccgagaaggccacccccctgagcatcaaggagcaggagggcagcgacctgggcccccaggagcagctggagcaggtgctgaacatgctgaacgtgaacctggacccccccctggacaaggtgatcaacaactgcagaaacatctgcaacatcaccaccctggacgaggagatggtgaagaccagagccaaggtgctgagaagcatctacgagttcctgagcgccgagaagagagagttcagattccagctgagaggcgtggccttcgtgatggtggaggacggctggaagctgctgaagcccgaggaggtggtgatcaacctggagtacgagagcgacttcaagccctacctgtacaagctgcccctggagctgggcaccttccaccagctgttcaagcacctgggcaccgaggacatcatcagcaccaagcagtacgtggaggtgctgagcagaatcttcaagaacagcgagggcaagcagctggaccccaacgagatgagaaccgtgaagagagtggtgagcggcctgttcagaagcctgcagaacgacagcgtgaaggtgagaagcgacctggagaacgtgagagacctggccctgtacctgcccagccaggacggcagactggtgaagagcagcatcctggtgttcgacgacgccccccactacaagagcagaatccagggcaacatcggcgtgcagatgctggtggacctgagccagtgctacctgggcaaggaccacggcttccacaccaagctgatcatgctgttcccccagaagctgagacccagactgctgagcagcatcctggaggagcagctggacgaggagacccccaaggtgtgccagttcggcgccctgtgcagcctgcagggcagactgcagctgctgctgagcagcgagcagttcatcaccggcctgatcagaatcatgaagcacgagaacgacaacgccttcctggccaacgaggagaaggccatcagactgtgcaaggccctgagagagggcctgaaggtgagctgcttcgagaagctgcagaccaccctgagagtgaagggcttcaaccccatcccccacagcagaagcgagaccttcgccttcctgaagagattcggcaacgccgtgatcctgctgtacatccagcacagcgacagcaaggacatcaacttcctgctggccctggccatgaccctgaagagcgccaccgacaacctgatcagcgacaccagctacctgatcgccatgctgggctgcaacgacatctacagaatcggcgagaagctggacagcctgggcgtgaagtacgacagcagcgagcccagcaagctggagctgcccatgcccggcacccccatccccgccgagatccactacaccctgctgatggaccccatgaacgtgttctaccccggcgagtacgtgggctacctggtggacgccgagggcggcgacatctacggcagctaccagcccacctacacctacgccatcatcgtgcaggaggtggagagagaggacgccgacaacagcagcttcctgggcaagatctaccagatcgacatcggctacagcgagtacaagatcgtgagcagcctggacctgtacaagttcagcagacccgaggagagcagccagagcagagacagcgcccccagcacccccaccagccccaccgagttcctgacccccggcctgagaagcatcccccccctgttcagcggcagagagagccacaagaccagcagcaagcaccagagccccaagaagctgaaggtgaacagcctgcccgagatcctgaaggaggtgaccagcgtggtggagcaggcctggaagctgcccgagagcgagagaaagaagatcatcagaagactgtacctgaagtggcaccccgacaagaaccccgagaaccacgacatcgccaacgaggtgttcaagcacctgcagaacgagatcaacagactggagaagcaggccttcctggaccagaacgccgacagagccagcagaagaaccttcagcaccagcgccagcagattccagagcgacaagtacagcttccagagattctacaccagctggaaccaggaggccaccagccacaagagcgagagacagcagcagaacaaggagaagtgcccccccagcgccggccagacctacagccagagattcttcgtgccccccaccttcaagagcgtgggcaaccccgtggaggccagaagatggctgagacaggccagagccaacttcagcgccgccagaaacgacctgcacaagaacgccaacgagtgggtgtgcttcaagtgctacctgagcaccaagctggccctgatcgccgccgactacgccgtgagaggcaagagcgacaaggacgtgaagcccaccgccctggcccagaagatcgaggagtacagccagcagctggagggcctgaccaacgacgtgcacaccctggaggcctacggcgtggacagcctgaagaccagataccccgacctgctgcccttcccccagatccccaacgacagattcaccagcgaggtggccatgagagtgatggagtgcaccgcctgcatcatcatcaagctggagaacttcatgcagcagaaggtgtag

SEQ ID NO: 329466 - DNA, 11490 bp, Artificial Sequence
  derived and/or modified sequence
atgaacactttttggcccgggagggagctcattgttcagtggtatccttttgacgagaatcgcaaccatccatctgttagttggttgaaaatggtctggaagaatctgtacatacattttagtgaagacctgacactctttgacgagatgcccctcatccctagaactatcttggaggagggacaaacctgcgttgaactgatccgactgcggattccgtccctggtgatcctggatgatgagtctgaagcccagctgccagaatttctcgctgacatcgtccaaaagcttggcggttttgttctgaaaaagctggatgcctcaatccaacatcctcttataaagaagtatattcattctccactgcccagcgcggtcctccagattatggagaaaatgccactccagaaactttgtaaccagatcacatcattactgcccacccacaaggatgcacttcggaaattcctagcatctctcactgactcctctgagaaagagaagcgaattattcaggagttagcgatcttcaaaaggatcaatcactcatcagatcagggcatttcatcgtatacaaagctgaagggatgcaaggtgcttcatcacactgccaaactgcctgcagacctgagactgtctatcagtgtgattgattccagcgatgaagctaccatacgtttagcaaatatgctgaagatagagcagctgaagacaacgagttgtctcaaattggtgctgaaggatatcgagaacgccttttattctcacgaggaggtaacacagttgatgttatgggtgcttgagaatctgtcctctctgaaaaacgagaatccaaatgtgctcgagtggttaacccccctgaagtttatacagatttcccaggaacagatggtttctgctggagagttgttcgaccccgacatcgaagttctgaaggacctcttttgtaacgaagaaggtacctatttcccgccaagtgtttttacaagtcccgacatacttcatagtctccggcaaatcggactgaaaaatgaagcctctcttaaggaaaaagatgtggttcaagtcgcaaaaaagattgaggcgcttcaggttggagcctgcccagatcaggatgttttgctcaagaaggccaaaacactgctgctggtgcttaacaagaaccacacactgctccaatcctccgaagggaaaatgacgcttaaaaagataaaatgggtcccagcatgcaaggaaaggccccccaactatcctgggtctctggtgtggaaaggagacctctgcaacctctgtgcaccaccagacatgtgcgacgtgggccatgccattctgattggctcaagcttacccctcgtggagtcaatccacgtcaatctagaaaaagctctgggaattttcaccaaaccgtccctgtcagctgttttgaagcatttcaagattgtggttgactggtattcgtccaaaacattctctgacgaagactattaccagtttcagcacatattattagagatttacggcttcatgcacgaccacctgaatgagggtaaagactcatttcgagcgcttaagttcccttgggtgtggacaggtaagaagttctgtcctctggcccaggctgtgataaaacctatccacgatctcgaccttcagccatacctgcacaacgtgcctaagaccatggctaaattccatcagctgttcaaggtgtgtggctccatcgaagagttgacctctgaccacatctctatggtgatccagaaaatctacttaaaaagcgaccaagatcttagtgagcaggagagcaagcaaaacttacacttgatgctaaacattatcaggtggctatactccaaccagatcccggcctctccgaacacccccgttcctatacatcactccaagaacccttctaaactcattatgaagcctattcacgaatgctgctactgcgacattaaggtggatgaccttaatgaccttctggaggactctgtggagccgatcatcctggttcacgaagatattcctatgaaaaccgcagaatggctaaaggtgccgtgtttatcaactcggttgataaatccggagaacatggggtttgagcagagcgggcagagagagcctctcacggttcgcatcaagaacattctggaagagtatcccagcgtgtctgatatcttcaaagaactgctgcagaatgccgacgacgctaacgcaacggagtgtagcttcttaatcgacatgagacgcaatatggacataagggagaatctgctcgaccctgggatggccgcatgtcacggccccgctctgtggtcctttaataacagccaattctctgattctgacttcgttaacataaccagacttggcgagtcgctcaaacgcggcgaggttgataaagttggtaaatttgggttaggcttcaactccgtgtaccatataacggacatccctattattatgtctagggaattcatgataatgtttgacccgaacataaatcacatcagcaagcacattaaagataagagcaaccctggtatcaagattaattggtcgaagcagcagaagagactgagaaagttccctaatcagtttaagccattcatcgatgtgtttggctgccagctgccgctgaccgttgaggcgccgtactcttacaatggcacccttttccggttatcttttcgcactcagcaggaggctaaagtaagcgaagtttcctctacgtgttacaataccgctgatatctactcactcgttgacgaattcagtctttgtgggcacagattaatcatcttcactcagtctgtgaagtccatgtacctgaagtacctgaagatcgaggaaactaatccttccttagcacaggacacagtcataataaagaagaagagctgcagtagtaaggccctgaacacacccgtcctgtctgtactgaaagaagcggccaaactcatgaagacgtgttcatcgagcaataaaaaactgccatcagatgaacctaaaagttcttgcatactgcagattaccgtggaggagttccatcacgtgtttaggcgcatagccgacctacaatctcctctgtttaggggcccggacgatgatcctgctgcactgtttgaaatggctaagtcaggccagagtaaaaagccatcagatgaactgagccaaaagacagttgaatgtaccacttggctcctttgcacctgcatggacacaggcgaagctttaaaattttcactcagcgagtctggccgcagactcggcctggtaccatgcggggccgttggtgtgcagcttagtgagatccaggaccagaaatggaccgtaaaaccacacatcggcgaggtcttttgttatctccccttacgtataaaaaccggccttccggtgcatattaacggctgtttcgctgtcaccagcaaccgtaaagagatttggaagaccgatacgaaaggccggtggaacacgacttttatgcgccatgtgatcgttaaagcttacttgcaggttctgagtgttctccgcgacctcgccacaagcggtgaactaatggactacacatattacgcagtctggccagaccctgacctggtgcacgatgatttctcagtaatctgccagggtttttatgaagatatagcccatggcaaaggcaaggaactgaccaaagtgttttcagatggttctacatgggtgtctatgaagaatgtgcggtttctcgatgatagcatccttaaacggagagatgtcggctccgctgccttcaaaatctttctaaaatatctgaaaaagactggttccaagaacttgtgcgctgtcgagctgccatcctctgtgaagttaggatttgaagaggcaggctgcaagcaaatactactagagaacactttcagtgaaaagcagttctttagcgaggtttttttccccaatattcaggaaatagaggccgaacttagagaccccttaatgatctttgtgttaaacgagaaagtggacgaattttcaggggtgctccgggttaccccttgtatcccatgctctctggagggacacccattagtcctaccttcaaggctcattcaccccgagggtagggtcgctaagctcttcgacatcaaagacggcagatttccctacggctcaacgcaggactacttgaacccaataattctgattaaactggttcagcttgggatggctaaagatgacatcctgtgggatgatatgctcgaacgggcagtgtcagtggctgagatcaacaagagtgaccacgtggctgcctgcctgagaagttctatccttttaagccttattgatgagaagcttaaaatcagagatccaagagcaaaagatttcgccgcgaaataccagacaatccgcttcctgccatttctgacaaaaccagccgggttctccttggattggaagggtaatagttttaaacctgagactatgtttgctgctaccgacctttatacggcggaacatcaggacatcgtgtgtctgctgcagccaatacttaacgagaactctcactcatttagaggttgtggcagcgtgtccctcgccgtgaaggagtttctgggactcctgaaaaaaccaacagtggatcttgttataaaccaactcaaagaggtagcaaaaagtgtagacgatggaattacactctatcaggagaacatcactaacgcttgctacaagtacctccacgaggccctcatgcagaacgagatcaccaaaatgtctattatcgataagttaaaacccttctcgttcatactggtcgaaaacgcttacgtagatagtgagaaggtgagcttccacctcaactttgaagcggccccatatctttaccaattgccaaacaagtacaaaaacaattttcgtgagttgtttgagacagtaggggtccggcagagttgcacagtggaagattttgccttagtgctggagtccatagaccaagagaggggcaccaaacagattactgaagagaatttccagctgtgcaggaggattatctccgagggtatttggagcttgatacgggagaaaaagcaagagttttgcgagaaaaattacggcaagattctcctcccagacaccaatctgatgctgctcccagccaagagtctttgctataacgattgcccctggatcaaggttaaagataccaccgtgaaatactgtcacgccgatatccctcgggaggtagccgtgaagctcggcgctgtgcctaagcggcacaaggcgcttgaacgctatgcctcaaacgtttgttttactacactggggaccgaatttggccaaaaagaaaaacttacatctaggattaaatctattctgaacgcttacccctccgaaaaagagatgctgaaagagctcctccagaacgcagatgatgccaaggctacagaaatctgttttgtatttgaccccagacagcatccagttgatcgcattttcgacgataagtgggctccactccagggcccggcactgtgcgtgtacaacaaccaacctttcactgaggatgatgtgagaggcatacagaacctgggtaaggggacaaaggagggcaatccgtacaagacagggcagtacggcatcggtttcaactccgtgtatcacatcactgactgcccatctttcatctctggcaacgacatcctgtgtatattcgatccacacgcaaggtacgccccaggtgccacttcgatctcaccgggaagaatgttcagggatctcgacgccgactttagaactcagtttagcgatgtactagatctgtacttggggactcactttaagctggacaactgtacgatgtttcggttccctttaagaaacgccgagatggctaaggtttctgaaatttccagtgtgccggcaagcgatcgaatggtccagaaccttttggacaagctgagatctgatggcgcggaattgctgatgtttctgaaccacatggaaaagatttctatctgtgaaatcgataagagtaccggtgcgctgaatgttctgtatagtgttaaggggaagatcactgatggggacagactgaaacgtaagcaatttcacgcctcagtgatcgactccgtgacaaagaagcgccaactcaaagacatccctgtccagcaaattacttatacgatggatacggaggacagtgagggtaatctgacaacctggctgatttgcaacaggtcaggcttctcaagtatggagaaagtgtccaaatcagttataagcgcccacaagaatcaggacatcacgctgtttcctcgcgggggagtcgcggcctgcataacacataactataaaaaaccccatcgggcgttctgcttcctcccactcagcttggaaaccggtctcccctttcacgtgaatggccacttcgccctcgactctgctcgaagaaacctttggcgggatgataatggggtcggtgttcgcagtgactggaacaactctctgatgactgctcttatcgctccagcatacgtcgaattgctcatccagctcaagaaacgctattttcccggtagtgaccctaccctgagcgtccttcaaaatacacccattcacgttgtcaaagacacactgaaaaagttcctctcattctttcccgtaaacagacttgatctccagccagacctatactgtctggttaaggctttgtacaactgcattcacgaagatatgaagcggctgctgccagtggttagagctcccaacatcgacgggtctgacctgcattccgccgtgattatcacatggatcaatatgagcacttccaacaaaacccgtccgtttttcgacaatctgctccaggatgagctccagcaccttaagaatgccgactacaatattaccactcgaaaaactgtggcggagaacgtttataggttgaaacatcttctgttggaaattggcttcaacctggtctacaactgcgacgaaacggctaacctttaccattgccttatcgatgccgacatacctgtcagttacgtcacacccgcagatatcaggtccttcctcatgacctttagcagcccggacactaactgccacatcggaaaactcccttgcagactccagcagacaaacctgaaactttttcacagcctcaagctcctcgtggactattgcttcaaggatgccgaagagaacgaaatagaggtcgagggcttgccgttactaatcaccttagattctgtactccagacgttcgacgcaaaaagacccaagttcctgaccacataccacgaattgatcccctccaggaaggatctgttcatgaacactctctatctcaaatactctaatatcctgctgaactgtaaagttgctaaggttttcgatatctcctccttcgccgacttacttagctcggtgctccccagagaatataagacaaagagttgcacgaaatggaaggataacttcgcctccgagtcttggctgaagaatgcttggcacttcattagcgaatctgttagcgttaaggaggatcaggaggaaactaagcccacgtttgatatcgtcgtggacacactcaaagattgggctctgctcccaggaaccaagttcaccgtatctgctaatcagctggtggtgcctgagggagatgttttgcttcctttgagcctgatgcacatcgctgttttcccgaacgcccaatccgacaaggttttccatgctttgatgaaggctggttgcatccagcttgctctgaataagatttgttccaaggactccgcattcgtgccactgttgagctgccacacagctaatattgaatcgcccacctctattctgaaggccttacactatatggttcagacctctacgtttcgggccgaaaagctggttgagaacgacttcgaggctctccttatgtatttcaattgtaacttgaaccacctgatgtcccaggacgacatcaaaattctcaagagcctgccttgctacaaatcaatatctggcaggtatgtttccataggcaagttcggcacctgctacgtcctaactaagtctataccctcagcggaagttgagaaatggactcagagctcgtccagcgccttcctagaagagaaaatacacttgaaagagctgtatgaggtgattggctgtgtccctgtggacgacctagaggtgtaccttaagcatctgcttccgaaaatcgagaatttgagttatgatgcaaaattggagcacttgatctacctcaaaaatcgtttgtccagcgcagaggagttgagcgaaatcaaggaacagctgttcgaaaaacttgaatcactgctgattattcatgacgccaacagcagactgaaacaagccaaacacttctatgaccggaccgtacgagtttttgaggtcatgcttcctgaaaaactgtttattcccaatgatttttttaagaaactagaacagctcattaagcctaaaaaccatgtgacgtttatgacctcgtgggtggagttcttgagaaacatcgggctgaagtacatcttgtcacagcagcaactgctccaattcgctaaagagatctcagtaagagctaatactgagaattggagtaaagaaacccttcagaacacagtggatatcctgctacaccacattttccaggagcggatggaccttctatcgggtaattttctgaaggaactgtctctgataccctttctatgtcctgagcgtgctccggctgagttcatcaggttccacccgcagtatcaggaagtgaacggcacgttgccactgatcaagtttaatggggcccaggtgaatcccaaattcaaacagtgcgacgtattacagcttctctggacctcctgccccattctgccagaaaaagctactcccctgtcaataaaggagcaggaggggagtgacctgggcccccaggaacagttggaacaagtcctcaatatgctcaacgtcaatctcgatcctcccttagataaagtgataaacaactgccgcaacatatgcaatattactactctggacgaggagatggttaaaacacgggcaaaagttctgaggagcatctatgagttcctgtccgctgagaagagggagtttcggttccagttacgcggggttgctttcgttatggttgaggatggctggaagctccttaagcccgaagaggttgtgataaacctggaatatgagtcagactttaaaccatatctctacaagctgcccctggagctaggaacgtttcaccaactgttcaagcacctgggcaccgaggatatcatctccactaagcagtacgtagaagttctgagccgcatttttaagaactctgaaggaaaacagctagatcctaacgagatgcggaccgtcaaacgggtggtgtccgggttgtttcgctcactccaaaacgattctgtcaaagtgcggtctgacctggagaatgtaagggatctagcgctctatcttccctctcaagacggaagactggtcaaaagttctatactggttttcgacgacgctccacactataagtctagaatccaggggaacatcggggtgcagatgctcgtcgacttgtcgcaatgctacctggggaaggatcacgggttccatactaagctgataatgctgtttccccagaaattacgcccccggctcctgtcctcaatcctcgaggaacagctggacgaagaaacaccaaaggtgtgccagtttggagcgttatgtagtctacaagggcgcctgcagctattgcttagtagcgaacaattcatcacgggactgatcaggattatgaagcatgaaaacgataacgccttcctggccaacgaagagaaggccattagactgtgtaaggctctccgggagggtctgaaggtgagctgtttcgagaaactgcagaccaccctgagagtgaaaggctttaatcctatcccgcattcaagatctgaaacctttgcatttctcaagaggttcggcaacgccgttattctgctgtatattcagcacagcgattccaaagacatcaactttctcctcgccctggccatgacccttaaaagcgccaccgacaacctcattagtgatacctcatacctgatcgccatgctgggctgcaatgacatttacaggatcggggaaaaattggatagccttggcgttaaatacgacagctcggagccctcaaaactagagctgccaatgcctggcacacctattccagctgaaatccactacacacttctgatggatcccatgaacgtgttctacccaggggagtacgttgggtatctggtcgatgccgagggcggtgatatctacggaagctatcagcctacttacacatacgccattatcgtccaggaagtcgagcgcgaggacgccgacaactcctcattcctggggaagatataccagatagacatcggctactccgagtacaaaatcgtaagtagcttagacctctacaaattttctcgacctgaggaaagctctcagagcagggatagtgcccccagtaccccaactagccctacagagtttctgacgcccgggctgagatctattcccccacttttctctgggcgagagtcacacaagacttcctcaaagcatcagtctccaaagaaattgaaggtaaatagcctgccagagattttgaaggaagtcacctccgtggtcgagcaagcatggaagctgcccgagagtgagagaaaaaagataatccggagattatatctaaaatggcacccagacaaaaatccagaaaaccacgacatcgccaacgaggtgttcaaacaccttcagaacgagattaatagactcgagaaacaggcttttctcgaccaaaatgcagatagggcatcccgcaggaccttttccacctcagccagccgctttcaatccgacaaatactctttccagaggttttacacttcttggaatcaggaggccacctctcacaagagtgagcggcaacagcagaataaggagaaatgtcctcccagcgccgggcagacttactcccaacgtttctttgtgccgcctaccttcaagtcagtggggaacccagtggaagcccggcggtggctgcgccaagcgagagcgaatttctccgccgcacgtaatgatcttcacaagaacgcgaacgaatgggtctgcttcaaatgctatctgagcactaagcttgctttgatcgcggctgactacgccgtccgcggaaagagcgataaagacgtgaagcccaccgctctcgcccagaaaattgaggagtattcccagcagctggaaggcctgactaacgatgtgcataccctggaagcttacggtgtcgattcattgaagactagatatccggatctgctccctttcccacagatccccaacgatcggttcacctctgaagtggccatgcgtgtgatggaatgtactgcatgcatcatcatcaagctggagaacttcatgcaacagaaagtatag

SEQ ID NO: 329467 - DNA, 11490 bp, Artificial Sequence
  derived and/or modified sequence
atgaacaccttctggccaggccgggagctgattgtgcagtggtacccctttgatgaaaatagaaaccaccccagcgtgtcctggctgaagatggtgtggaagaacctgtacatccacttcagcgaggacctgaccctgtttgatgagatgcccctcatccccaggaccatcctggaggagggccagacctgtgtggagctgatccggctgcgcatccccagcctggtgatcctggatgatgagagcgaggcccagctgcctgagttcctggccgacatcgtgcagaagctgggcggctttgtgctgaagaagctggatgccagcatccagcaccccctcatcaagaagtacatccacagccccctgcccagcgctgtgctgcagatcatggagaagatgcccctgcagaagctgtgcaaccagatcaccagcctgctgcccacccacaaggatgccctgaggaagttcctggccagcctgacagacagcagcgagaaggagaagaggatcatccaggagctggccatcttcaagaggatcaaccacagcagtgaccagggcatcagcagctacaccaagctgaagggctgcaaggtgctgcaccacacagccaagctgcctgctgacctgcggctgagcatctctgtgattgacagcagtgatgaggccaccatccggctggccaacatgctgaagattgagcagctgaagaccaccagctgcctgaagctggtgctgaaggacattgaaaatgccttctacagccatgaggaggtgacccagctgatgctgtgggtgctggagaacctgagcagcctgaagaatgaaaaccccaacgtgctggagtggctgacccccctgaagttcatccagatcagccaggagcagatggtgtctgctggggagctgtttgatcctgacatcgaggtgctgaaggacctcttctgcaatgaggagggcacctacttcccccccagcgtcttcaccagcccagacatcctgcacagcctgcggcagatcggcctgaagaatgaggccagcctgaaggagaaggatgtggtgcaggtggccaagaagattgaggccctgcaggtgggcgcctgcccagaccaggatgtgctgctgaagaaggccaagaccctgctgctggtgctgaacaagaaccacaccctgctgcagagcagcgagggcaagatgaccctgaagaagatcaagtgggtgcctgcctgcaaggagcggccccccaactacccaggcagcctggtgtggaagggggacctgtgcaacctgtgtgcccccccagacatgtgtgatgtgggccacgccatcctgattggcagcagcctgcccctggtggagagcatccacgtgaacctggagaaggccctgggcatcttcaccaagcccagcctgtctgctgtgctgaagcacttcaagatcgtggtggactggtacagcagcaagaccttcagtgatgaggactactaccagttccagcacatcctgctggagatctacggcttcatgcatgaccacctgaatgaaggcaaggacagcttccgggccctgaagttcccctgggtgtggacaggcaagaagttctgccccctggcccaggccgtcatcaagcccatccatgacctggacctgcagccctacctgcacaacgtgcccaagaccatggccaagttccaccagctgttcaaggtgtgtggcagcattgaggagctgaccagtgaccacatctccatggtgatccagaagatctacctgaagagtgaccaggacctgtctgagcaggagagcaagcagaacctgcacctgatgctgaacatcatccgctggctgtacagcaaccagatcccagccagccccaacacccctgtgcccatccaccacagcaagaaccccagcaagctgatcatgaagcccatccacgagtgctgctactgtgacatcaaggtggatgacctgaatgacctgctggaggacagcgtggagcccatcatcctggtgcatgaggacatccccatgaagacagctgagtggctgaaggtgccctgcctgagcaccaggctcatcaaccctgagaacatgggctttgagcagagcggccagcgggagcccctgactgtgcgcatcaagaacatcctggaggagtaccccagcgtgtctgacatcttcaaggagctgctgcagaatgctgatgatgccaatgccacagagtgcagcttcctgattgacatgagaagaaacatggacatccgggagaacctgctggaccccggcatggccgcctgccacggccctgccctgtggagcttcaacaacagccagttcagtgacagcgactttgtgaacatcacccggctgggggagagcctgaagagaggagaggtggacaaggtgggcaagtttggcctgggcttcaacagcgtgtaccacatcacagacatccccatcatcatgagccgggagttcatgatcatgtttgaccccaacatcaaccacatcagcaagcacatcaaggacaagagcaaccctggcatcaagatcaactggagcaagcagcagaagaggctgaggaagttccccaaccagttcaagcccttcattgatgtgtttggctgccagctgcccctgactgtggaggccccctacagctacaacggcaccctcttccggctgtccttccgcacccagcaggaggccaaggtgtctgaggtgagcagcacctgctacaacacagctgacatctacagcctggtggatgagttcagcctgtgtggccacaggctcatcatcttcacccagagcgtgaagtccatgtacctgaagtacctgaagattgaggagaccaaccccagcctggcccaggacaccgtcatcatcaagaagaagagctgcagcagcaaggccctgaacacccctgtgctgtctgtgctgaaggaggccgccaagctgatgaagacctgcagcagcagcaacaagaagctgcccagtgatgagcccaagagcagctgcatcctgcagatcaccgtggaggagttccaccacgtgttcagaagaattgctgacctgcagagccccctcttccggggcccagatgatgatcctgctgccctgtttgagatggccaagagcggccagagcaagaagcccagtgatgagctgagccagaagacagtggagtgcaccacctggctgctgtgcacctgcatggacaccggggaggccctgaagttcagcctgtctgagagcggccgccgcctgggcctggtgccctgtggggctgtgggcgtgcagctgtctgagatccaggaccagaagtggacagtgaagccccacatcggggaggtgttctgctacctgcccctgcgcatcaagacaggcctgcctgtgcacatcaatggctgctttgctgtgaccagcaacaggaaggagatctggaagacagacaccaagggccgctggaacaccaccttcatgagacatgtgattgtgaaggcctacctgcaggtgctgtctgtgctgcgggacctggccaccagcggggagctgatggactacacctactatgctgtgtggccagaccctgacctggtgcatgatgacttcagcgtcatctgccagggcttctatgaagatattgcccacggcaagggcaaggagctgaccaaggtgttcagtgatggcagcacctgggtgtccatgaagaatgtgcgcttcctggatgacagcatcctgaagagaagagatgtgggcagcgctgccttcaagatcttcctgaagtacctgaagaagacaggcagcaagaacctgtgtgctgtggagctgcccagctctgtgaagctgggctttgaggaggccggctgcaagcagatcctgctggagaacaccttcagcgagaagcagttcttcagcgaggtgttcttccccaacatccaggagattgaggccgagctgcgggaccccctgatgatctttgtgctgaatgagaaggtggatgagttctctggagtgctgcgggtgaccccctgcatcccctgcagcctggagggccaccccctggtgctgcccagccgcctcatccaccctgagggccgggtggccaagctgtttgacatcaaggatggccgcttcccctacggcagcacccaggactacctgaaccccatcatcctgatcaagctggtgcagctgggcatggccaaggatgacatcctgtgggatgacatgctggagagagctgtgtctgtggccgagatcaacaagagtgaccacgtggccgcctgcctgcggagcagcatcctgctgagcctgattgatgagaagctgaagatccgggacccccgggccaaggactttgctgccaagtaccagaccatccgcttcctgcccttcctgaccaagccagctggcttcagcctggactggaagggcaacagcttcaagccagagaccatgtttgctgccacagacctgtacacagctgagcaccaggacatcgtgtgcctgctgcagcccatcctgaatgaaaacagccacagcttccggggctgcggctctgtgtccctggccgtgaaggagttcctgggcctgctgaagaagcccaccgtggacctggtgatcaaccagctgaaggaggtggccaagtctgtggatgatggcatcaccctgtaccaggagaacatcaccaatgcctgctacaagtacctgcacgaggccctgatgcagaatgagatcaccaagatgagcatcatcgacaagctgaagcccttctccttcatcctggtggagaatgcctacgtggacagcgagaaggtgtccttccacctgaactttgaagctgccccctacctgtaccagctgcccaacaagtacaagaacaacttccgggagctgtttgagaccgtgggcgtgcggcagagctgcaccgtggaggactttgccctggtgctggagagcattgaccaggagcggggcaccaagcagatcacagaggagaacttccagctgtgccgccgcatcatcagcgagggcatctggagcctcatccgggagaagaagcaggagttctgtgagaagaactacggcaagatcctgctgcctgacaccaacctgatgctgctgcctgccaagagcctgtgctacaatgactgcccctggatcaaggtgaaggacaccaccgtgaagtactgccacgccgacatcccccgggaggtggccgtgaagctgggcgctgtgcccaagaggcacaaggccctggagagatatgccagcaatgtgtgcttcaccaccctgggcacagaatttggccagaaggagaagctgaccagccgcatcaagagcatcctgaatgcctaccccagcgagaaggagatgctgaaggagctgctgcagaatgctgatgatgccaaggccacagagatctgctttgtgtttgacccccggcagcaccctgtggaccgcatctttgatgacaagtgggcccccctgcagggccctgccctgtgtgtgtacaacaaccagcccttcacagaagatgatgtgcggggcatccagaacctgggcaagggcaccaaggagggcaacccctacaagacaggccagtatggcatcggcttcaacagcgtgtaccacatcacagactgccccagcttcatctctggaaatgacatcctgtgcatctttgacccccacgcccgctatgcccctggggccaccagcatcagccctggccgcatgttccgggacctggatgctgacttccgcacccagttcagtgatgtgctggacctgtacctgggcacccacttcaagctggacaactgcaccatgttccgcttccccctgagaaatgctgagatggccaaggtgtctgagatcagctctgtgcctgccagtgacaggatggtgcagaacctgctggacaagctgcggagtgatggagctgagctgctgatgttcctgaaccacatggagaagatcagcatctgtgaaattgacaagagcactggagccctgaatgtgctgtacagcgtgaagggcaagatcacagatggagaccggctgaagaggaagcagttccacgcctctgtgattgattctgtgaccaagaagaggcagctgaaggacatccctgtgcagcagatcacctacaccatggacacagaagattctgagggcaacctgaccacctggctgatctgcaacagaagtggcttcagctccatggagaaggtgtccaagagcgtcatcagcgcccacaagaaccaggacatcaccctcttcccccggggcggcgtggccgcctgcatcacccacaactacaagaagccccaccgggccttctgcttcctgcccctgagcctggagaccggcctgcccttccacgtgaatggccactttgccctggacagcgcccggaggaacctgtggagagatgacaatggagtgggcgtgcggagtgactggaacaacagcctgatgacagccctgattgccccagcctacgtggagctgctgatccagctgaagaagcgctacttccctggcagtgaccccaccctgtctgtgctgcagaacacccccatccacgtggtgaaggacaccctgaagaagttcctgtccttcttccctgtgaaccggctggacctgcagcctgacctgtactgcctggtgaaggccctgtacaactgcatccacgaggacatgaagaggctgctgcctgtggtgcgggcccccaacattgatggcagtgacctgcacagcgctgtgatcatcacctggatcaacatgagcaccagcaacaagacccggcccttctttgacaacctgctgcaggatgagctgcagcacctgaagaatgctgactacaacatcaccaccaggaagacagtggctgaaaatgtgtaccgcctgaagcacctgctgctggagatcggcttcaacctggtgtacaactgtgatgaaacagccaacctgtaccactgcctgattgatgctgacatccctgtgtcctatgtgaccccagctgacatccgctccttcctgatgaccttcagcagcccagacaccaactgccacatcggcaagctgccctgccgcctgcagcagaccaacctgaagctgttccacagcctgaagctgctggtggactactgcttcaaggatgctgaagaaaatgaaattgaggtggagggcctgcccctgctgatcaccctggacagcgtgctgcagacctttgatgccaagaggcccaagttcctgaccacctaccacgagctgatccccagcaggaaggacctcttcatgaacaccctgtacctgaagtacagcaacatcctgctgaactgcaaggtggccaaggtgtttgacatcagcagctttgctgacctgctgagctctgtgctgccccgggagtacaagaccaagagctgcaccaagtggaaggacaactttgccagcgagagctggctgaagaatgcctggcacttcatcagcgagagcgtgtctgtgaaggaggaccaggaggagaccaagcccacctttgacatcgtggtggacaccctgaaggactgggccctgctgcccggcaccaagttcaccgtgtctgccaaccagctggtggtgcctgaaggagatgtgctgctgcccctgagcctgatgcacatcgctgtgttccccaatgcccagagcgacaaggtgttccacgccctgatgaaggccggctgcatccagctggccctgaacaagatctgcagcaaggacagcgcctttgtgcccctgctgagctgccacacagccaacatcgagagccccaccagcatcctgaaggccctgcactacatggtgcagaccagcaccttccgggcagagaagctggtggagaatgactttgaggccctgctgatgtacttcaactgcaacctgaaccacctgatgagccaggatgacatcaagatcctgaagagcctgccctgctacaagagcatcagcggccgctacgtgtccatcggcaagtttggcacctgctacgtgctgaccaagagcatccccagcgctgaggtggagaagtggacccagagcagcagcagcgccttcctggaggagaagatccacctgaaggagctgtatgaagtcatcggctgtgtgcctgtggatgacctggaggtgtacctgaagcacctgctgcccaagattgagaacctgtcctatgatgccaagctggagcacctgatctacctgaagaaccggctgagcagcgctgaggagctgtctgagatcaaggagcagctgtttgagaagctggagagcctgctgatcatccatgatgccaacagccggctgaagcaggccaagcacttctatgacagaacagtgcgggtgtttgaggtgatgctgcctgagaagctgttcatccccaatgacttcttcaagaagctggagcagctgatcaagcccaagaaccacgtgaccttcatgacctcctgggtggagttcctgagaaatattggcctgaagtacatcctgagccagcagcagctgctgcagtttgccaaggagatctctgtgcgggccaacacagagaactggagcaaggagaccctgcagaacacagtggacatcctgctgcaccacatcttccaggagaggatggacctgctgagcggcaacttcctgaaggagctgagcctcatccccttcctgtgcccagagcgggccccagctgagttcatccgcttccacccccagtaccaggaggtgaatggcaccctgcccctcatcaagttcaatggagcccaggtgaaccccaagttcaagcagtgtgatgtgctgcagctgctgtggaccagctgccccatcctgcctgagaaggccacccccctgagcatcaaggagcaggagggcagtgacctgggcccccaggagcagctggagcaggtgctgaacatgctgaatgtgaacctggacccccccctggacaaggtgatcaacaactgcaggaacatctgcaacatcaccaccctggatgaggagatggtgaagacccgggccaaggtgctgcggagcatctatgagttcctgtctgctgagaagcgggagttccgcttccagctgcggggcgtggcctttgtgatggtggaggatggctggaagctgctgaagccagaggaggtggtgatcaacctggagtatgaaagtgacttcaagccctacctgtacaagctgcccctggagctgggcaccttccaccagctgttcaagcacctgggcacagaggacatcatcagcaccaagcagtatgtggaggtgctgagccgcatcttcaagaacagcgagggcaagcagctggaccccaatgagatgaggacagtgaagagggtggtgtctggcctcttccgcagcctgcagaatgacagcgtgaaggtgcggagtgacctggagaatgtgcgggacctggccctgtacctgcccagccaggacggccgcctggtgaagagcagcatcctggtgtttgatgatgccccccactacaagagccgcatccagggcaacatcggcgtgcagatgctggtggacctgagccagtgctacctgggcaaggaccacggcttccacaccaagctgatcatgctgttcccccagaagctgcggccccggctgctgagcagcatcctggaggagcagctggatgaggagacccccaaggtgtgccagtttggagccctgtgcagcctgcagggccgcctgcagctgctgctgagcagcgagcagttcatcaccggcctcatccgcatcatgaagcatgaaaatgacaatgccttcctggccaatgaggagaaggccatccggctgtgcaaggccctgcgggagggcctgaaggtgtcctgctttgagaagctgcagaccaccctgcgggtgaagggcttcaaccccatcccccacagccgctctgagacctttgccttcctgaagagatttggaaatgctgtgatcctgctgtacatccagcacagcgacagcaaggacatcaacttcctgctggccctggccatgaccctgaagagcgccacagacaacctgatcagtgacaccagctacctgattgccatgctgggctgcaatgacatctaccgcatcggggagaagctggacagcctgggcgtgaagtatgacagcagcgagcccagcaagctggagctgcccatgcctggcacccccatcccagctgagatccactacaccctgctgatggaccccatgaatgtgttctacccaggagaatatgtgggctacctggtggatgctgagggcggggacatctacggcagctaccagcccacctacacctacgccatcatcgtgcaggaggtggagagagaagatgctgacaacagcagcttcctgggcaagatctaccagattgatattggctacagcgagtacaagatcgtgagcagcctggacctgtacaagttcagcaggcctgaggagagcagccagagccgggacagcgcccccagcacccccaccagccccacagagttcctgaccccaggcctgcggagcatccccccactcttcagcggccgggagagccacaagaccagcagcaagcaccagagccccaagaagctgaaggtgaacagcctgcctgagatcctgaaggaggtgacctctgtggtggagcaggcctggaagctgcctgagagcgagaggaagaagatcatccggcggctgtacctgaagtggcacccagacaagaacccagaaaatcatgacatcgccaatgaggtgttcaagcacctgcagaatgagatcaaccggctggagaagcaggccttcctggaccagaatgctgaccgggccagcaggaggaccttcagcaccagcgccagccgcttccagagcgacaagtacagcttccagcgcttctacacctcctggaaccaggaggccaccagccacaagtctgagcggcagcagcagaacaaggagaagtgccccccatctgctggccagacctacagccagcgcttctttgtgccccccaccttcaagtctgtgggcaaccctgtggaggcccggcgctggctgcggcaggcccgggccaacttctctgctgccagaaatgacctgcacaagaatgccaatgagtgggtgtgcttcaagtgctacctgagcaccaagctggccctgattgctgctgactatgctgtgcggggcaagagtgacaaggatgtgaagcccacagccctggcccagaagattgaggagtacagccagcagctggagggcctgaccaatgatgtgcacaccctggaggcctatggagtggacagcctgaagacccgctacccagacctgctgcccttcccccagatccccaatgaccgcttcaccagcgaggtggccatgagggtgatggagtgcacagcctgcatcatcatcaagctggagaacttcatgcagcagaaggtgtag

SEQ ID NO: 329468 - DNA, 11490 bp, Artificial Sequence
  derived and/or modified sequence
atgaacaccttctggcccggccgggagctgatcgtgcagtggtacccatttgatgaaaaccgcaaccatccttccgtttcttggctcaagatggtgtggaagaacctttatatccacttttccgaggatctcacacttttcgatgagatgcccttgattcctcgtaccattctggaggagggacaaacttgcgttgagttaattcgtctgcgcatcccatcactagtcatcctggacgatgaaagcgaagctcaacttccagaatttctggcagacattgttcaaaagttgggcgggttcgtcctgaagaagttggacgcctcaattcagcaccctctgattaaaaaatatatacactctccactcccatcagcagtcctccaaatcatggagaagatgcccctgcagaaactgtgtaaccaaattacttccctcctccctactcataaggacgccctgaggaagtttctcgcctccctcacagattctagcgaaaaagaaaagcggataattcaggaactggccatttttaaacggattaatcactctagtgaccaaggcatcagctcttatactaaactgaagggatgcaaggtcctgcaccacaccgctaagttgccagcagacctgcgattgtcgataagcgtaattgactccagcgacgaagccactatccggttagcaaatatgctgaagattgaacagctgaaaactacaagttgcctaaaactcgtactgaaggacattgaaaacgccttttatagccacgaagaagtgacccagctcatgctgtgggttttagaaaatttgtcttccctgaagaacgagaaccccaatgtattggaatggctgaccccgctgaagttcatccaaatctcgcaggagcagatggtctctgcgggggagttattcgatccagatattgaggtcctgaaagatttgttctgcaatgaagagggaacttatttccctccaagcgttttcacctcccccgacatcctacacagtttgaggcagattggtctcaagaatgaggcgagtctgaaggagaaggacgttgtccaggtcgccaaaaagattgaggcgctccaggttggagcgtgccctgatcaggacgtcctcctgaagaaggcaaagacgctcttgttggtcctgaacaaaaatcacaccctgcttcaatcttctgaaggtaaaatgacgctgaagaaaatcaagtgggtgccagcatgcaaggaacgaccaccaaattaccctggctctctggtgtggaagggcgatctatgtaacctgtgtgcccctcctgatatgtgcgatgtgggacacgccattctcataggcagcagcctacctctggtggagtctattcatgtgaacctcgagaaagcactcgggattttcactaagccatcactgtctgccgtgctgaagcacttcaaaattgtcgtcgactggtatagttcgaaaactttctcggacgaggactattaccaattccagcacatcctgttggaaatctatgggttcatgcatgatcaccttaacgaaggaaaggactcatttagagcgcttaaattcccttgggtctggacaggcaaaaaattttgtccgcttgcacaggccgtaattaagccaatacacgatcttgacctacagccatacctccacaacgtccccaagactatggctaaattccatcagctgttcaaagtctgcggctctatcgaagaattaaccagtgatcatatttccatggtgatacagaagatctatctgaaatcggatcaggacctatcagagcaggaatccaagcagaatctccacctgatgctgaatattatccgatggctttatagcaaccagattccagcaagcccaaacacgcccgtgccaatccaccacagcaagaacccttcaaagctcataatgaagcccatccacgagtgctgctattgcgatattaaggttgatgacctcaatgatcttctcgaggattccgtagaaccgatcatactcgtgcacgaggacatacctatgaaaactgcggaatggcttaaggtgccttgccttagtacgagactgatcaatccagagaacatgggatttgaacagagcggccaacgagaaccacttacagtgcgcattaaaaacatactggaggagtacccctctgtcagcgatatcttcaaagagcttctgcagaatgcggatgacgccaacgccactgagtgctcgttcctcatcgatatgaggcggaacatggacattagagagaaccttctggaccctggcatggctgcctgccatggtccagctctgtggtccttcaataattcacagtttagcgactccgacttcgtcaacatcaccaggctgggggaaagtctgaagaggggagaggtggataaagttgggaaattcgggctgggattcaatagcgtgtatcatattaccgatatcccaatcatcatgtcaagagagttcatgatcatgttcgacccaaatataaatcacattagcaagcatatcaaagacaaatccaacccagggatcaagataaattggtcaaaacaacagaaacgcctgcgaaagtttccaaatcagttcaagccctttattgacgtcttcggctgtcaactgccactcaccgtggaggctccatatagctacaacggcacgctcttcagattgagtttcagaactcagcaagaggctaaggttagcgaggtgagcagtacctgttataacacagcagatatctatagtctggtggatgaattttctctgtgcggtcaccgactgattatcttcacacaatccgtgaagtcaatgtacctcaaatacctcaagatcgaggagactaacccaagcctcgcacaagacacagttattatcaaaaaaaaatcatgtagcagtaaagcattgaacacaccagtcctgagcgtgctcaaggaggctgccaagctgatgaaaacttgcagtagcagtaataagaagttgccaagcgatgagccaaagagcagttgtatactgcagattaccgtggaggagttccaccatgtttttaggagaattgccgacctccagagtcccttgtttagaggcccagacgacgaccctgcagcactattcgagatggcaaaatctgggcagtctaagaagcctagcgacgagctctcacaaaagactgttgagtgtacaacgtggctgttgtgcacttgtatggacacaggagaggcgctgaagttttctctgtcggaaagtggaaggcgcttagggctggtgccgtgtggtgcagtgggtgttcaattgagcgagattcaggaccagaagtggactgtgaagccccacataggcgaggtgttctgttaccttcccctccggattaagaccggactgcccgtccacattaatggatgcttcgctgttacctcaaaccggaaggagatttggaaaaccgataccaagggccgatggaataccacgttcatgagacacgttatcgtcaaagcatacctgcaggtcctttccgtgcttcgtgacctcgctaccagcggcgagctgatggactacacatactacgcagtgtggcccgaccccgatcttgttcatgacgatttctccgtgatctgccagggattctacgaagatatcgctcatggcaaagggaaagagttaacaaaggtcttctcggatggaagtacgtgggtgtcaatgaagaacgtcagattcctcgacgactccattctcaagcggagagacgttggcagcgccgcgtttaagatctttctcaagtacctgaagaaaaccggatctaaaaatttgtgcgccgtcgagcttcctagttccgtaaagttaggcttcgaggaagcaggatgcaagcagatactgcttgaaaacactttttcagagaagcaatttttttccgaagtgtttttcccaaacattcaggagattgaggcagaattaagggatcctttgatgatttttgtgctgaacgagaaggtggacgagttttccggcgttttaagggtgactccatgtattccctgctctctggaggggcatccgttggtgctgccgagccgactcatccaccccgagggccgcgtggccaaattgtttgatatcaaagatgggagatttccttacggtagtacacaggactatttaaaccccataatactgatcaagttggtgcagctgggaatggctaaagatgacattctgtgggatgatatgttagagagggcggtctccgtggccgagatcaataagtcggaccatgtggcagcctgcctgaggagctctatcctgttatctctaatcgatgagaagctaaagatcagagatcctagggcgaaagatttcgcagccaagtatcaaactataaggtttctgccatttctgaccaaaccagctggcttcagtctggactggaagggcaattctttcaaaccagagacaatgttcgccgcaactgatctctacaccgccgagcaccaggacatcgtttgtctgttgcagccgatcctgaacgaaaattcccatagctttcgtgggtgcggaagcgtctccctggccgtcaaagagtttctgggtctgctcaagaagcctacggtggatctggtgatcaaccagttgaaagaagtggccaagtctgtggacgacggtattactctttaccaggagaacatcaccaatgcctgctataagtatctgcatgaagctctgatgcagaatgaaatcactaaaatgtctatcatcgacaaactgaagcccttttccttcattctggtggaaaatgcttatgtcgattctgagaaggtttcttttcacctgaatttcgaggcagccccttacctttaccagcttccaaacaaatacaagaataacttccgagaattgtttgagacggtgggagtgaggcaaagctgtacggtcgaggacttcgccctggtgctggagtctatcgatcaggagcgtgggacgaaacaaatcacagaggagaactttcagttgtgtcggcggataatcagcgaaggcatttggtctctgattcgtgagaagaaacaagagttctgtgaaaagaactatggaaaaatcttgctccccgacactaaccttatgcttctgccagccaagtccttgtgttacaacgactgcccctggattaaagtgaaagatactactgttaagtactgccatgccgacatcccaagggaggtggccgtgaagctgggcgccgtgccaaagcgccataaggccctggaaaggtatgcttctaatgtttgcttcacaaccctcgggaccgagtttgggcagaaagagaagctcaccagccggattaagtcaattctgaatgcgtacccttctgaaaaggagatgctgaaagagttgctgcagaacgccgatgatgctaaggcaacagaaatttgcttcgtgtttgacccacgtcagcacccagtggaccgcattttcgatgacaagtgggcaccactccaggggccggccctgtgcgtgtataataaccagccctttaccgaggacgatgtaaggggcattcagaatttgggtaaagggaccaaggaaggaaatccttacaaaacgggccaatatgggatcggcttcaattctgtgtatcatattacggactgcccctcttttatcagtggtaacgacatcttatgcatcttcgatcctcacgcccggtacgcacccggagccacatcaatctctcccgggaggatgttcagggatttggatgctgatttccgcacacagttttcagatgtgctggacctgtatttggggactcatttcaagctagataactgtacgatgtttagattccctctacgcaacgccgaaatggcgaaagtgtcagagatcagcagtgtgcccgcctccgaccgtatggtgcaaaatttgctggacaagctcaggagtgacggggcagagctcctcatgtttttgaatcacatggaaaagatcagcatttgtgagatcgataaaagtactggcgctctgaacgtcctgtactcagtcaaggggaagatcactgatggcgatcgtctcaagagaaaacaattccatgcttccgtaattgattcggtcacaaaaaagagacagctgaaggatatcccagtgcaacaaatcacgtacacaatggacacggaagatagtgagggaaacttaaccacctggctgatatgtaaccgttccggcttctcctcgatggagaaggtgagtaagagcgtgatttccgcacacaagaaccaggatattaccctctttccacgtggtggtgttgctgcctgcatcacacacaactacaagaagccacacagagcattttgtttccttcctctcagtttagagacaggactgcctttccacgtcaatgggcattttgcattggacagcgcgcggaggaatctgtggcgtgacgataacggtgtgggggtgagatccgactggaataattctctgatgactgccctgatcgcccctgcctacgtagaattactcatccagctcaaaaagcgttacttccctggtagcgatcccactttatctgtattacagaacacacccattcacgtggtgaaagacactctgaaaaaattcctgtcttttttccctgtcaaccgcttggatctgcagcctgacctgtattgcttagtaaaggcactgtataactgtatccatgaagatatgaagagacttctgcctgtggtcagagcgcccaatatagatgggtcagacctgcactccgccgtgatcatcacatggatcaacatgagcacgtccaacaagacacgtccgttcttcgacaacctgttacaagacgagctgcagcacctcaaaaatgctgactacaacatcaccactcggaagacagttgctgagaacgtgtatcgacttaagcacctgctgctggaaattggcttcaatctggtttataattgcgacgaaaccgccaatctttaccactgtctgatcgatgccgacatccctgtgtcttacgtgaccccagctgatatacgctctttcctcatgacattcagctcgcccgacactaactgccatattggcaagttgccatgccggctgcaacagaccaatcttaagctcttccattcccttaagctgttggtcgactattgtttcaaagatgccgaagaaaacgaaattgaagtcgaagggctgccattactcattactttggacagcgtactgcagacttttgacgccaaaaggcctaaatttttaaccacataccatgagctaatcccctcaagaaaggatctcttcatgaataccctatacctcaagtattccaacattctgctaaactgtaaagtcgcgaaggtgttcgatatctcttcctttgccgatctcttgtctagcgttttacctagggagtataaaactaaatcatgcaccaagtggaaagacaattttgcatctgaaagctggctgaagaacgcatggcacttcatatcagaaagtgtgtcagtcaaagaggatcaggaagagactaagcctacatttgatattgtggttgatacattaaaagattgggctcttctgcccggcaccaagttcactgtcagcgctaatcagttggtggtgccagagggcgacgttctcttgcccctgagcctgatgcatattgctgtctttccaaatgcccagtctgataaggtgttccacgcactgatgaaggccggatgtatccagttggctcttaacaagatctgcagtaaggactctgccttcgtgccgctgttgtcctgtcatacagccaacatcgagagccccacctccattctcaaggccctccactatatggttcagacttcaacctttcgggccgagaagcttgtcgagaacgacttcgaagccctcttgatgtacttcaattgtaacttgaatcacctcatgagccaggacgatatcaagatcctaaaatcacttccctgctacaagtcaatttccggcaggtacgtgtccatcggcaaatttggaacctgttacgtgctcacaaaatcgatcccctcagctgaggtggagaaatggactcaaagttcttcaagtgctttcttggaagaaaaaattcacctgaaggagctctacgaggtgatcggctgtgtaccagttgacgacctagaagtttatctcaagcatcttctgcctaagattgagaacctgagctacgacgcaaaactcgaacaccttatttatctcaagaaccggctgtcatcggcagaagagctgagtgagatcaaagagcagctattcgaaaagctggagtccctgctgattatccacgacgccaacagccgcttaaagcaggccaaacacttctacgaccgtactgtgagagtctttgaagtgatgctccccgaaaagctgttcatcccgaatgacttttttaaaaaactggaacagctgattaaacccaagaatcatgtgacgttcatgaccagttgggtggagttcctgcggaatatcggtctgaaatatatcctgagccaacagcagttgcttcagttcgccaaagaaatctccgttcgggccaatacagaaaactggtccaaggaaacactgcagaacactgtcgatatactgctacaccacatctttcaggaaaggatggaccttttatcaggcaattttttaaaagagttgagtttaattcctttcctctgtcccgaaagggccccagctgagtttatcaggtttcatcctcagtatcaagaggttaacggtacccttccactcataaaattcaatggagcacaggttaatccaaagttcaaacagtgtgatgtgctgcagctgctttggacatcttgcccaattctgccagagaaggctaccccgctgagtataaaggagcaagaaggctctgacttaggaccccaggaacagctggaacaagtgctcaacatgctcaacgtcaatctcgatcctccgctcgacaaggtgatcaacaattgtaggaacatctgtaacatcaccactctggatgaggagatggtcaagacgcgggccaaggtgctccggagcatttatgaatttctgtccgctgaaaagcgggagtttagatttcagctccgaggggtcgcattcgtgatggttgaggatggctggaagctgttaaaacccgaagaggttgtgattaatctggaatatgaaagcgatttcaagccatacctatataagcttccattagagcttggcacctttcaccaactgttcaagcacctgggcacagaggatataatctccactaagcaatatgtcgaagtactgtcaagaatcttcaaaaattcagagggcaagcagttggatcctaacgagatgcgaacagtgaaacgtgtcgtgtccggcctgttccgctcactgcagaatgactctgtgaaggtgcggtcggacttagagaacgtgcgcgacctggccctctatttaccctctcaggacggcagactcgttaaaagctctattctggtattcgacgacgccccccattataaaagccgtatccagggcaatatcggggtccagatgttggtggatttaagtcagtgctatcttgggaaggatcacggcttccataccaagcttatcatgctgtttcctcaaaagctgcgcccacgtctcctgtcttcaattcttgaggagcagcttgatgaggaaacccccaaagtatgccagtttggtgctctctgctccctacagggccggctgcagcttctactcagcagtgagcagtttattaccggactcatcagaatcatgaaacacgagaacgataatgccttcctggccaacgaggaaaaagcaatacgtttatgtaaggcccttagagaggggctaaaagtgagttgttttgagaagcttcagaccacactgagggtcaagggctttaaccccataccacactctcggtcggagacattcgcgttcctaaaacggtttggtaatgcggtgatactcctgtatattcagcattcagatagtaaagacattaacttcctcttagctctggccatgacactcaagtctgccaccgacaatctaatctctgatacaagctatttgattgcaatgcttggttgcaacgatatttatcgaataggagaaaaacttgattccctcggcgtgaagtacgactcttcagagccttctaagctcgaattgcctatgcctggaacacccatcccagctgaaatccactacaccctgctcatggaccctatgaatgtgttttatcctggggagtatgtgggctacctggtggatgctgagggaggggatatatacggttcctaccagcctacatacacatatgccataatagtgcaggaagtggaacgggaagacgctgacaactcatcttttctgggtaagatctaccagattgacattgggtacagtgagtataaaatcgtgtcttctctggacttgtataagtttagccggcctgaagaaagcagtcagtcacgagacagtgcgccctccactcccacatcacctactgaatttctcacacctggtctgaggtctatcccgcctctctttagtgggcgtgagtctcacaagacttcctccaagcaccaatcacccaagaaattgaaagtgaattccctgcccgagatcctcaaggaggtgacatccgtggtggagcaggcttggaaactgcccgaaagtgagcggaagaagatcatacgccgactgtacctgaagtggcaccccgataaaaatccagagaaccacgatatagctaacgaggtgttcaagcatctgcagaacgagataaaccggttggagaagcaggccttcttggatcagaacgctgaccgagccagcaggcggaccttcagtacttcagcctcacgattccaatcagacaagtacagctttcagcggttttatacttcctggaaccaagaggccacatcgcataaaagcgaacgccaacagcagaacaaagagaagtgtcctccaagcgccggtcagacctattcacagagatttttcgtaccacccacctttaaatcggtgggaaatcccgtggaagcccgcaggtggctgagacaggcgcgcgcaaatttttctgccgcaagaaacgacctgcacaagaacgcaaacgagtgggtctgctttaagtgctacctgagcactaagctggccttgatcgccgccgactacgcagtaaggggtaaatccgacaaggatgtcaagcccaccgcactggctcagaagatcgaggagtactctcagcagctggaggggctgaccaacgatgtgcacacactggaggcgtacggggtggacagcttgaagacccggtatcccgacttactgccctttccccagattccaaatgatcgatttacctctgaagtagccatgcgcgtgatggagtgcaccgcttgtattattatcaagctggagaatttcatgcaacagaaggtctag

SEQ ID NO: 329469 - DNA, 11490 bp, Artificial Sequence
  derived and/or modified sequence
atgaatacattctggcccggtcgcgaactgatagtccagtggtaccccttcgacgaaaatcggaaccacccttccgtgtcctggttgaagatggtgtggaagaatctgtatattcatttttctgaggatctgaccctgtttgatgaaatgccacttatccctcgaacgattctggaggaggggcagacttgtgtagagctgattcgcctgaggatccctagcctggtcatcctggacgacgaaagtgaagcccaactgcctgaattcttggcagacatagttcagaaactaggcggatttgttttgaaaaagctcgacgcttctattcagcaccctttgatcaagaagtacattcatagccctctgccatctgcggttctgcagatcatggagaaaatgcccctgcaaaaactgtgcaatcagatcacctcactgttaccgacccataaggatgcgttgcgtaagttcttggcctccctgaccgattcttcagaaaaagagaagagaatcattcaggagctggccatttttaagcgaatcaatcatagcagcgatcaaggcattagctcatacactaaattaaaaggctgtaaagtgctgcaccataccgccaagctgccagctgatctcaggctaagcattagcgtgattgactccagcgatgaggctacaataaggcttgcaaacatgctgaaaattgagcagctgaaaacaacctcctgcttaaaactggtgctcaaggacattgaaaacgctttctactcccatgaagaagtgacacaactgatgctctgggtgctcgagaatttgtcatctttgaagaacgagaaccccaacgtgctggagtggctaaccccgctgaaattcatccaaattagtcaggaacagatggtgagtgctggagagctgttcgacccagacatagaagttctcaaagacttgttctgcaacgaggaggggacttactttcctcccagtgtgttcacgagtcctgatatccttcacagccttaggcagatagggctcaagaacgaggccagccttaaggagaaggacgtggttcaggttgccaagaaaatcgaggccctgcaggtcggggcttgcccagaccaggatgttctgttgaaaaaagccaaaacattgctcctggtgctcaacaaaaatcacacactattgcagagctctgaggggaagatgacactgaaaaagattaagtgggtccccgcatgcaaagaaaggcccccaaattaccccggaagcctggtatggaagggggatctgtgcaatctgtgcgctcccccagacatgtgcgacgtagggcacgccatcttgatcggttcttccctgcccctggttgagagtattcatgtcaaccttgagaaggcgctcggaatattcaccaaaccatcgttgtcagctgtgctcaagcactttaaaatagtggttgattggtactctagcaagacattcagcgatgaggattattatcagtttcagcatatactgttggaaatttacggcttcatgcacgaccaccttaatgaagggaaggactcgtttcgggctctcaagtttccttgggtctggaccggaaagaagttctgtcccctggcccaggctgtcattaaaccgatccacgacctggacctgcagccttatctacacaacgtgcctaaaacgatggctaagttccatcaattgttcaaggtctgtggctccatcgaagagttaacatctgaccatatatcaatggtgatccaaaagatttatctgaagtctgaccaggatctgtccgagcaagagagcaagcaaaacctgcaccttatgttgaacatcatccgctggctctactccaaccagattcccgctagccccaataccccagtgcccatccaccactcaaagaacccttctaagctgatcatgaagccaattcatgaatgctgttattgcgacatcaaagttgacgacctgaatgacttgctcgaagattcggtcgagcccattattctagtgcacgaagatatccccatgaaaactgccgagtggctgaaggttccgtgcctgtcgacccggctcataaacccagaaaatatgggatttgaacagtccggacagcgggagccactgactgtgcggatcaagaacatcctggaggagtacccctccgtatcggacatttttaaggaactgctccaaaatgccgatgatgctaacgcaaccgagtgtagttttttaatcgatatgcgcagaaatatggacatcagagagaatctcctggatcctgggatggccgcttgtcacggccctgccctctggagctttaacaactctcagttctctgactctgactttgtgaatataactagactgggagaatctttgaaacgcggagaagtagataaagtgggtaaattcgggctcggcttcaactccgtttaccacattacagatatccctatcattatgagtcgagagtttatgattatgttcgatcctaatattaaccatatctccaagcacatcaaggataagtccaaccctgggataaagataaattggagcaagcagcagaaacgcctcagaaagttccctaaccagttcaaaccctttatagacgtatttggttgtcagttgccactgacagtggaagcaccttattcctacaacggcactctctttcgactgagcttccgtacgcaacaggaagccaaggtatctgaagtgagcagtacgtgttataacaccgccgatatctactccctggtcgatgagttttctttgtgcggtcacaggctgataatctttacacaatcagttaagtcaatgtacctgaaatacctgaaaattgaggaaactaaccccagcctagcccaggacactgtgataatcaaaaagaagagctgttcctcaaaagccttgaacactcctgtgttgtctgtgctgaaggaagctgcaaagctcatgaagacttgttcttcaagcaacaagaagctcccgtcagatgagcccaaatcgagttgcatcctccagattaccgtagaggagtttcatcatgtttttcggaggatcgccgatctgcaatcaccactgtttagggggcctgatgatgaccctgctgccctgtttgagatggctaaatccgggcagagcaagaagccatccgatgagttgtctcagaagaccgtggagtgcactacatggctgctctgtacttgcatggacaccggggaggccttgaaattttcactgtcagaaagtggcagacgcctggggctcgtgccctgcggcgcagtaggagtgcagttgtcggaaattcaggaccagaaatggacggttaaaccgcatatcggagaggtattctgttatttgcccctgagaattaaaaccggcctgccagtgcatatcaacggttgctttgcagttacctccaaccggaaggaaatttggaaaaccgacaccaaaggtcgctggaacacaacatttatgcggcatgtgatcgtgaaagcttacttgcaggtcctgtcagtgttacgggacctagcgacatccggggaactgatggactatacctactatgcggtttggcccgaccctgacctagtccacgacgactttagcgtgatttgccagggtttttatgaggacatcgcgcatgggaagggaaaagaattgacaaaagtgtttagcgacggctccacctgggtctccatgaaaaacgtgagattcctggatgactctatcttaaaaaggcgtgacgtgggaagcgctgcttttaagattttcctgaaatacctgaagaaaaccgggtccaagaacctgtgtgctgtagagttaccatcctccgtgaagttaggctttgaggaggcagggtgcaaacaaattttactggagaacacctttagcgaaaagcaatttttctctgaggtgttttttccgaacatacaggagatcgaggctgagctgagggatccactaatgattttcgtgctgaacgaaaaggtggatgagttctccggtgttctgcgcgtcactccatgcattccatgcagtttggagggccaccccttggtgctgccatctagactgatccaccctgagggcagagtggctaaactgtttgacattaaggatggtcgatttccatatggcagcacccaggactatctgaaccccattattctcatcaagttagtccagctcggaatggctaaagatgatatcctctgggatgacatgctggagcgagccgtgtcagttgcggaaatcaacaagagcgaccatgttgccgcatgtttgcggtcttccatcttgctgtccctgatcgacgagaaacttaagatacgggaccccagggcgaaagatttcgcggcaaagtatcagaccataagatttctgcccttcttaacaaagccagcaggattcagtctggactggaagggcaacagcttcaagcccgagaccatgtttgcggcaacagatctgtacactgccgaacaccaggacattgtgtgcttgttgcaacctatcctgaacgaaaattcgcattccttcagaggctgcgggtctgtttccttggctgtgaaggagttcctgggtctgctgaagaagcctactgttgacctggttattaaccagcttaaagaggtcgctaaatccgtggacgatggcatcacactgtatcaggaaaacattacaaatgcctgctacaaatatctccacgaagcattgatgcagaacgaaattaccaaaatgagcatcattgacaagttgaaacccttcagcttcattctagtcgaaaacgcttacgtggacagcgagaaggtgtcttttcatttaaacttcgaggcagctccttatctttatcagttgcctaacaagtacaaaaataacttccgggaattgttcgagacagtgggtgtccgacagagctgcaccgtggaggattttgcactcgtactggaatccattgaccaggagcgaggtaccaagcagattacagaagagaatttccaactctgtaggagaatcatttccgaaggaatttggagcctcatccgagaaaaaaagcaggagttctgtgagaagaattacgggaagatcctgttaccagatacaaatttgatgctgcttccggctaaaagcctatgctataatgattgcccctggatcaaggtgaaagatactaccgtgaagtactgtcatgccgacatccccagagaggtggcggtgaaactgggggctgtgccaaagaggcacaaggccctggaacggtatgcatctaacgtttgtttcaccacgcttggaaccgaattcggccaaaaagaaaagttgacaagccggatcaaaagcatcctgaatgcttacccaagcgagaaagagatgctaaaagagctgctgcaaaatgccgatgacgccaaagctacagaaatttgtttcgtatttgaccccaggcaacatcctgtggatcgtattttcgacgataaatgggccccactgcagggacctgcgctctgtgtttataataatcagccattcactgaggacgacgtccgtggcattcagaatcttggaaaaggaaccaaagagggtaatccatataaaaccgggcagtacggcataggcttcaattccgtgtaccacatcacagattgtcctagtttcatcagtggcaatgatatcttgtgcatctttgacccccatgcacggtacgctcctggggctactagcatcagtccgggacgtatgttccgggacctggatgctgacttccggacacagtttagtgacgtgcttgacctttatctagggacccattttaaactggataattgcacaatgtttagattcccattgcgtaatgctgaaatggccaaggttagcgagatttcctctgtgccggcaagcgataggatggtgcagaatctgcttgacaaactgcgatctgacggggctgaactgttaatgttccttaaccacatggagaagataagcatttgcgaaatcgacaagtccaccggagctttgaatgtgctgtattctgtgaaaggaaaaatcaccgacggcgatagactgaagcgcaagcagtttcacgcatccgtaatagacagtgttaccaagaagagacagctcaaggatatcccggttcagcagatcacttacaccatggatacggaggacagcgagggaaatttgactacatggcttatatgcaatcgatctggattcagctccatggagaaggtcagtaagtccgtgatctctgcccacaagaatcaagatataactctgttccctcgcggtggtgtggcagcatgtattactcacaactacaagaagccacatagggctttctgctttttgcctctctctctcgaaacgggtctgcccttccacgtgaacggccactttgcccttgattcggctagaaggaatttatggcgcgacgataacggtgtgggtgtcagatcggactggaataattccctgatgactgccttaattgctcccgcttacgtagagctcctgatccagcttaaaaaaaggtactttccaggatcggatcccactctctcagttctgcagaatacaccaatacacgtagtgaaagacaccctcaaaaagtttctgtccttcttccctgtgaatagattggatcttcagcctgacctctattgcttagtcaaagctttgtacaattgcatccacgaagacatgaaacggcttctacctgttgtgcgagcacctaacattgacggcagtgatctccatagtgccgtgattatcacctggataaatatgtcaacgagcaataagacacggccttttttcgataacctgctccaggatgaattgcagcacctgaaaaacgctgactataatattactacacgaaaaaccgtggccgaaaatgtgtatcgtcttaagcacctcttgcttgaaattggttttaatctggtctacaactgcgatgagacagctaacctctatcactgtttgatcgatgcggatattcccgtcagctatgtcacacctgctgatattcgatcgttcctgatgacgttctcaagtcccgacaccaattgtcatattggcaaacttccctgtaggctgcaacagaccaatctaaagctcttccattccctgaaactcctggtagactactgcttcaaggatgcggaagaaaatgaaattgaagtagagggactgcctttactcatcactcttgacagtgtgctgcagacatttgatgcaaaacggcctaagttcctgaccacctatcatgaacttatcccctcccgcaaagatctcttcatgaataccttgtacctgaagtacagcaacatattactcaattgtaaggtggctaaagtttttgatatttcaagctttgctgacctgctcagctcggtgctgcccagagagtataagacaaagtcctgcaccaagtggaaagacaacttcgcatcagagtcctggcttaaaaacgcttggcatttcatttccgaatccgtatctgtaaaggaagaccaagaggaaaccaaaccaaccttcgacattgtcgtggatactctgaaagattgggctttgctcccaggaacaaagtttacggtgtctgccaaccagctggtggtgccagaaggcgatgttctgctccccttgtcacttatgcatatcgcagtgtttcccaacgcacagtcagacaaagtattccacgccctgatgaaagctgggtgcattcagttagccttaaataagatctgttcgaaagacagcgcattcgtgccattgttgagctgccacaccgccaatatagagtcaccgacttcaattcttaaagcacttcactatatggtgcagacaagtactttcagggccgaaaagttagtcgaaaatgacttcgaggctctccttatgtacttcaattgcaatctcaaccatctgatgtctcaggacgatataaagatcttgaagtcactgccatgctataagtccattagtggtaggtacgtcagcatcgggaagttcgggacatgttatgtgctgaccaaatccatccccagcgccgaagtggaaaaatggacccagtcctctagctccgcttttctggaagaaaagatccacctcaaggaactctatgaagttatcggttgtgtgcctgtcgatgatttggaggtgtaccttaagcaccttcttcccaaaatcgagaacttgtcctacgatgctaaactagaacatctcatctacctcaagaatcgcctatcctcagccgaggagctgagcgagataaaagagcaattattcgagaagctcgagagtctgttgatcattcatgacgccaacagcagactcaagcaggcaaagcacttctatgatcgaacagtaagggtgtttgaggtcatgttgccagaaaagttgtttatccctaatgatttctttaagaagttggagcagctcattaagcctaaaaatcatgttacatttatgaccagttgggtggagtttctgcggaatatcggactcaaatacatcctcagtcagcagcagctccttcaatttgctaaagaaatctctgtcagagccaatactgaaaattggtccaaggaaaccctgcagaatactgtcgacatcctgctgcaccatatcttccaggaacggatggatctactgtcagggaatttcttgaaagaattaagcctcatcccgtttctgtgccccgaaagagcaccagccgaatttatccgctttcacccacagtaccaggaggttaacgggactctgcccttaatcaagttcaatggcgctcaggttaatcccaagtttaaacagtgtgatgtactgcagctcctttggacctcttgcccaatcctgcccgaaaaggccactcctctgtcaatcaaggagcaagaaggcagtgatcttggccctcaggagcagctggagcaggttctgaacatgctcaatgtgaatctggatccccctcttgacaaagtaatcaataactgcagaaacatctgcaacatcaccactctcgacgaagaaatggtaaagactcgggctaaggtgctgcgctctatatatgagtttctctccgcagaaaagcgggagtttaggttccagctgaggggcgtagcttttgtgatggtagaggacggctggaagctgctgaaaccagaggaggtagtgatcaacttagagtacgaatctgattttaagccgtatctttacaaattgccactggagctgggcactttccaccagctgttcaagcacctcggaacagaggatattatttcaacaaaacagtatgttgaagtgctgagcagaatattcaagaatagcgaaggtaagcagttggacccaaacgaaatgcgcacagtcaaacgagttgtcagtggtctctttcgcagccttcagaatgactccgttaaggttcgatccgacctcgaaaacgttagggatcttgccctttatctgccatctcaggacggtaggttagtgaaaagcagcatcctcgttttcgacgatgctcctcactataaatctcggatccaagggaacatcggagtgcagatgcttgtggacctatctcagtgttacctcggcaaggaccatggcttccacaccaaactgatcatgctcttcccgcagaagctccgcccacggcttctgtcttccattctggaggagcagctggacgaagagactcctaaggtttgtcagtttggggctctctgttctcttcagggcagacttcagttgttactttcatccgagcagtttattacaggtctgattagaatcatgaagcatgagaatgacaacgcttttctcgcaaatgaggaaaaagccattcgcttgtgtaaagcactgagggaggggctgaaggtgtcttgctttgaaaagttacagaccactctgagggtgaaggggttcaatccaatcccccactcgcgaagtgaaacatttgctttcctcaagaggtttggaaatgctgtgatcctcttgtacatccagcactccgactctaaagacattaacttcctgctcgcactcgcgatgacgcttaaatccgcgactgacaatctgatatccgatacctcatatctgattgctatgttaggatgcaatgatatttaccgcatcggggaaaagttggactccttaggagtgaaatacgattcgagtgagccatcaaagctggagttgccaatgcctggcactcccattcccgcagagatccactacactctcctcatggatccaatgaacgttttctacccgggtgagtacgtgggttacttagttgatgccgagggcggagacatttatgggtcatatcagcccacttatacctatgctattatagtccaggaagttgagagagaggatgccgacaactcttcctttctaggaaaaatttaccagatcgatattggatactcagaatataaaatcgtgagcagcctggacctttacaaatttagcagaccagaagagtctagtcaatcccgcgacagcgctccctctacccctaccagccctactgagtttcttacacccggactgcgcagcattccccctctcttctctgggcgagagtcccataagacctcttccaagcatcagagtcctaagaaactgaaagtcaatagcttaccggagatcctcaaagaagtgacatcagtggtagaacaagcctggaagctgcctgagtccgagagaaaaaaaattatcaggcgtctgtatctgaagtggcaccctgacaagaatcccgagaaccatgatatcgcaaatgaagtctttaaacatctgcagaacgaaattaaccgcctggagaagcaagccttcttagatcagaacgctgatagggcttccagaagaacttttagcacttcagcctcacgatttcagagcgataaatatagcttccagagattctacacatcatggaaccaggaggcaacgagccataagtctgagcgtcagcagcaaaataaagagaagtgtcccccatctgccggacaaacttactcacagaggttctttgtgcctcctacgtttaagagcgtcgggaacccagtggaggcgagacgatggctcaggcaggcccgagctaatttctcagcagcaagaaacgacctgcacaaaaatgcaaatgagtgggtctgctttaagtgttacctgagcactaagcttgccctcatcgcagctgactatgcagttcggggaaaatctgacaaggatgtaaaacctaccgctctggcccagaagatagaggaatacagtcagcagctggaagggttaacaaatgatgtccacacactcgaagcctatggagtggattcattgaagacccggtaccctgatctgcttcccttcccccagatccctaatgataggttcacgagcgaagtcgccatgcgggtcatggaatgcacagcctgcatcatcattaaactcgagaacttcatgcagcagaaggtgtac

SEQ ID NO: 329470 - protein, 277 aa, Artificial Sequence
  derived and/or modified sequence
MFSEIRAVFSRRYLLQNTALEVFMANRTSVMFNFPDQATVKKVVYSLPRVGVGTSYGLPQARRISLATPRQLYKSSNMTQRWQRREISNFEYLMFLNTIAGRTYNDLNQYPVFPWVLTNYESEELDLTLPGNFRDLSKPIGALNPKRAVFYAERYETWEDDQSPPYHYNTHYSTATSTLSWLVRIEPFTTFFLNANDGKFDHPDRTFSSVARSWRTSQRDTSDVKELIPEFYYLPEMFVNSNGYNLGVREDEVVVNDVDLPPWAKNLKTLCGSTGWP

SEQ ID NO: 329471 - protein, 98 aa, Artificial Sequence
  derived and/or modified sequence
MSNLKWFSGGDDRRKKAEVIITELLDDLEMDLGNESLRKVLGSYLKKLKNEGTSVPLVLSRMNIEISNAIKKDGVSLNENQSKKLKELMSISNIRYGY

SEQ ID NO: 329472 - DNA, 1575 bp, Artificial Sequence
  derived and/or modified sequence
atgttcgttaattccaacgggtacaatctcggcgtgagggaagacgaagtggtggtcaacgacgtggatctgcccccatgggcaaaaaaacccgaggattttgtccggatcaatcgcatggctcttgaaagcgaattcgtcagctgccagctccaccagtggattgacctgatttttgggtacaagcagcgcggcccagaagctgtccgcgcgctgaacgtgtttcattatctcacttatgagggctctgtaaatctcgactccatcactgatcctgtgctgcgggaaattcctgaagcctattttattagggatccccataccttcctcttaactaaagacttcatcaaagccatggaggcccagattcaaaactttggacagaccccttcacaactgcttatagagccccatccaccccgaagttccgccatgcacctgtgctttctcccacagtctccactgatgttcaaggatcaaatgcaacaggatgtcatcatggtgctcaagtttccctccaatagcccagtaacacacgtcgccgctaacacactgccacacctaactatccccgccgtcgtgacagtgacgtgctctagattatttgcagtcaatcggtggcacaatacagttggccttcgaggggcgcccggctatagtcttgaccaggctcaccacctgccaattgaaatggaccccctcatagccaataacagcggcgtgaataaaagacagattaccgacctcgttgatcagtccattcagatcaatgcacactgttttgtcgtcactgccgacaatagatatattctgatttgcggcttttgggataagagttttagggtgtattcgaccgagactggaaaactgactcaaatcgtatttgggcactgggatgtagtcacttgtttggcacggtcagaatcttacatcggcggcgactgctatattgtatccggatctcgggatgccacactgcttctttggtactggagcggccggcatcacattattggcgataacccgaactctagcgattaccctgctcctcgcgctgtgcttacgggacatgatcatgaagtagtgtgtgtatcggtgtgcgcagaattgggcctcgtgatctctggggcaaaggagggcccatgcctggtacatactattactggtgacctcctgcgcgcgcttgaaggccccgaaaattgtttgtttcccaggcttatcagtgtttcatccgaggggcactgtatcatctattacgagagaggcagattttctaacttctctatcaacggcaagctgcttgcacaaatggaaattaacgactccacccgcgccatcctcctgagcagtgacggacagaacctagtgactgggggagacaacggcgttgttgaagtgtggcaggcatgtgactttaagcagctttacatttatccaggctgtgatgctggcattagggctatggatttgtcgcacgatcaacgtacactgattactggcatggccagcgggtcgattgtggccttcaacatcgatttcaaccgctggcattatgaacaccaaaaccgatactag

SEQ ID NO: 329473 - DNA, 1575 bp, Artificial Sequence
  derived and/or modified sequence
atgttcgtcaattccaacggttacaatctgggcgttagagaggatgaggtggttgtgaacgacgtagatcttccaccgtgggcaaagaaaccggaggacttcgtgcggatcaatcggatggccctggagtcagagtttgttagttgtcagctgcaccaatggatagacctgatcttcggttacaagcagcgcgggccagaggccgttagggcccttaatgtttttcattacttgacgtacgagggctccgtcaacctggatagtattacagaccccgtcctccgggagatccctgaagcctattttatccgcgatccgcacacctttttactcactaaagatttcatcaaggccatggaggcgcaaatacagaattttggacagacacctagccagctgctcatcgaaccacatccaccgcggtctagtgccatgcacctgtgctttctgccccaaagccccctgatgttcaaagaccaaatgcaacaagacgtgattatggttttgaagttcccatccaatagccctgtgactcacgttgctgcaaatacactaccgcacctgactatcccagcagtggtcacggtaacctgctcaagattattcgccgtcaacagatggcacaacaccgtcgggctaagaggggccccagggtactctctcgaccaggctcaccacctgccaatagagatggatcccctgatcgcaaacaactccggagtgaacaaacgccagataacagacctggtcgatcagtccatacagataaacgcccactgttttgtcgtgaccgcagataaccgatatatcctgatttgcggattctgggacaagtctttccgtgtttattcaacggagacggggaagcttactcagatagtgttcggccattgggatgttgtgacttgcctggcacgctccgaaagttacatcggaggagattgttacatcgtctctggtagtagagacgccacactgctactgtggtactggagcggcagacatcatatcatcggggataatcctaacagctccgattacccagcccctcgcgccgtcctgacaggtcacgatcacgaggtcgtatgtgtatcagtgtgcgcagaactcggattggtgatcagcggagccaaggagggtccatgtctagtgcatacaataaccggggatctgctgagagctcttgagggcccagagaactgcctttttccacggctaatctccgtctcttccgagggccactgtatcatctactacgagcgcgggaggttctcaaacttttctataaacggcaaactcctcgctcagatggagatcaatgattcaaccagagccatactcctcagttctgatggccagaacttagtaaccggcggggacaacggggtggttgaggtatggcaagcctgcgattttaagcagctgtatatttatcctggctgcgacgctggcattcgggccatggatcttagccacgatcagcgcaccctgatcactggcatggcctcagggtccatcgtggcctttaacattgactttaatcgctggcactacgagcaccaaaatcgctactag

SEQ ID NO: 329474 - DNA, 1575 bp, Artificial Sequence
  derived and/or modified sequence
atgtttgtgaacagcaatggctacaacctgggcgtgcgggaggatgaggtggtggtgaatgatgtggacctgcccccctgggccaagaagccagaggactttgtgcgcatcaacaggatggccctggagagcgagtttgtgtcctgccagctgcaccagtggattgacctgatcttcggctacaagcagaggggccctgaggccgtgcgggccctgaatgtgttccactacctgacctatgagggctctgtgaacctggacagcatcacagatcctgtgctgcgggagatccctgaggcctacttcatccgggacccccacaccttcctgctgaccaaggacttcatcaaggccatggaggcccagatccagaactttggccagacccccagccagctgctgattgagccccaccccccaagaagcagcgccatgcacctgtgcttcctgccccagagccccctgatgttcaaggaccagatgcagcaggacgtcatcatggtgctgaagttccccagcaacagccctgtgacccacgtggccgccaacaccctgccccacctgaccatcccagctgtggtgacagtgacctgcagccggctgtttgctgtgaaccgctggcacaacacagtgggcctgcggggggcccctggctacagcctggaccaggcccaccacctgcccatcgagatggaccccctgattgccaacaacagcggcgtgaacaagaggcagatcacagacctggtggaccagagcatccagatcaatgcccactgctttgtggtgacagctgacaaccgctacatcctgatctgtggcttctgggacaagagcttccgggtgtacagcacagaaacaggcaagctgacccagatcgtgtttggccactgggatgtggtgacctgcctggcccggtctgagagctacatcggcggggactgctacatcgtgtctggcagcagagatgccaccctgctgctgtggtactggagcggccgccaccacatcatcggggacaaccccaacagcagtgactacccagcccccagggctgtgctgactggacatgaccacgaggtggtgtgtgtgtctgtgtgtgccgagctgggcctggtgatcagcggggccaaggagggcccctgcctggtgcacaccatcaccggggacctgctgcgggccctggagggccctgagaactgcctcttccccaggctcatctctgtgtcctctgagggccactgcatcatctactatgagcggggccgcttcagcaacttcagcatcaacgggaagctgctggcccagatggagatcaatgacagcacccgggccatcctgctgagcagtgatggccagaacctggtgactggaggagacaatggagtggtggaggtgtggcaggcctgtgacttcaagcagctgtacatctacccaggctgtgatgctggcatccgggccatggacctgagccatgaccagaggaccctcatcaccggcatggccagcggcagcatcgtggccttcaacatcgacttcaaccgctggcactatgagcaccagaaccgctactag

SEQ ID NO: 329475 - DNA, 1575 bp, Artificial Sequence
  derived and/or modified sequence
atgttcgtgaacagcaacggctacaacctgggcgtgcgggaggacgaggtcgtggtcaacgacgtggacctgcctccctgggcaaagaagccagaggactttgtgaggattaaccgaatggcactagagtccgagtttgtgagctgtcagctgcatcagtggatcgatctgattttcgggtataagcagcgcggccctgaggccgtccgtgccctgaacgtcttccactatctgacgtacgaaggtagtgtcaatctggacagcattacagatcccgtcctccgggagatccccgaagcttacttcatccgagatccccatacatttttgctcacaaaggatttcataaaggccatggaagcacagatacagaacttcgggcagactccaagccaacttctaatcgaaccacaccccccaagaagttcagcaatgcatttgtgtttcttgcctcagagtcctttaatgttcaaggaccaaatgcagcaggacgtcatcatggtacttaaattccccagtaattccccagttacacacgtggctgccaataccctgccccatctgacaattcccgctgtggtaaccgtaacatgttcaaggctctttgcagtaaatagatggcacaataccgtgggactgcgcggagctcctggatattccctcgatcaagcgcaccatcttcctatcgaaatggatcccctgattgcaaataattccggtgtcaacaagcgccagatcacggatctcgtggaccagtccattcagatcaatgcccattgcttcgtggtgaccgccgacaaccgctacattctcatctgcgggttctgggacaagtcctttcgcgtgtactctaccgaaacaggcaaactcacgcagattgtatttggccactgggatgtggtgacatgcctggccaggtctgagtcgtacatagggggcgattgttatattgtgagcggaagccgagatgccaccctgctcctctggtactggtcaggccggcaccacattatcggagataaccccaattcatcagactatcctgcgccacgcgccgtgctgactggacacgaccacgaggtcgtgtgcgtttcagtctgcgccgagctgggcctggtcatctcaggcgcgaaggagggtccgtgtctggtccacacaattaccggggacctgcttcgggcactcgagggtcctgaaaactgcctgttccctcgtctgatttctgtgtcgtccgaagggcattgtatcatttactatgaacggggacgcttctcaaatttctctataaatggcaaactgttagcacagatggaaatcaacgacagcacacgcgcaattttgctgtcatcagatggacagaacctcgtcaccggcggcgacaatggagtggtcgaggtgtggcaagcgtgcgacttcaagcagctttacatatatcccgggtgcgacgccggaattcgggcgatggacctctctcacgatcagcgcacgttaataaccgggatggccagcgggtcaattgtcgccttcaatatcgactttaaccgatggcattacgaacaccagaaccgatattag

SEQ ID NO: 329476 - DNA, 1575 bp, Artificial Sequence
  derived and/or modified sequence
atgttcgtgaacagcaacggctacaacctgggcgtgcgggaggacgaggtggttgtaaacgatgtggacttacctccatgggcgaaaaagcctgaggattttgtccgaatcaatcggatggcactggagagcgagtttgtatcctgtcagctccaccagtggatcgatctgatcttcggctataagcagcggggacccgaagcagtgagggcactgaatgtctttcattacctgacttatgagggcagtgtgaatctggacagcatcacggaccccgtgctgagagagattcccgaagcctacttcataagggatcctcatacgttccttctaactaaagattttatcaaggccatggaggcacaaattcagaatttcggacagaccccatcacagctcttgatcgaaccccaccccccgcggtcctccgctatgcacctgtgctttctcccacaaagccccttgatgttcaaggaccagatgcagcaggacgtgattatggtccttaaatttccatcaaattctcccgtcacccacgtcgctgccaataccctgccccatctcaccatcccggccgttgttaccgtgacatgttcgcgattgtttgcagttaatagatggcataacactgtcggtctacgaggggctcctggctattcactcgaccaagctcaccacctgcctattgaaatggaccccctcattgcaaataactcaggcgtgaataagagacagattactgatctggtcgatcaatccatccaaatcaacgcccattgctttgtagtcactgccgataacagatacatcttgatctgtggtttctgggacaagtccttcagggtgtattctactgagacaggcaagctcacccagatcgtgtttggtcattgggatgtggtgacatgtttagcacggtccgaaagctacattggcggagactgctatattgtttccggatcccgagatgcaaccctcctgctgtggtactggtcagggagacaccacatcatcggagataaccctaattcctcggattatcctgccccccgcgcggttctaaccggccacgaccatgaggtcgtatgtgtttctgtgtgtgctgagttaggccttgtgatcagcggagcaaaggagggaccctgtctcgtccatactataacaggggatctgttgagggctctcgaaggacctgaaaattgcctgtttccacgcctgatcagcgtatccagtgagggtcactgcatcatttactatgagcggggacgcttttctaacttttcaataaacggaaaattgctggcgcagatggagatcaatgactccaccagggccatcctcctctcctcagatgggcaaaatttagtcaccggtggtgacaacggtgtggtggaggtttggcaggcatgcgatttcaagcagctatacatctaccccggatgtgacgccggtattagagccatggatctctcccacgaccagcggactctgataactgggatggcctccgggtcaatcgtcgcctttaatattgacttcaatcggtggcactacgagcaccagaaccgatactag

SEQ ID NO: 329477 - DNA, 3794 bp, Artificial Sequence
  derived and/or modified sequence
attcgaaagaaaaatccaacttatgaattgtcattaatgcaaaattatttatcagaaaatcgtagagcactggaaccccatcatttcacagatgagaagaccagaagcaaaatgacctgccagagttgcagactgacaactgctgccttggcctagtcaagcccagacaggcatctcctactgccttaatttgggggcatctttctaggaccctgatctgcctccacatcttgaaggattttcaagatagccatgtttcacaaaggaacgagggcagctgtgtttagagtggtcaaatttctgattctgtttttttgcttaggaacctttcacaaccttcttcctcaatgcaaatgatggaaaatttgatcatccagatcgaaccttctcatccgttgcaaggtcttggagaactagtcagagagatacttctgatgtaaaggaactaattccagagttctactacctaccagagatgtttgtcaacagtaatggatataatcttggagtcagagaagatgaagtagtggtaaatgatgttgatcttcccccttgggcaaaaaaacctgaagactttgtgcggatcaacaggatggccctagaaagtgaatttgtttcttgccaacttcatcagtggatcgaccttatatttggctataagcagcgaggaccagaagcagttcgtgctctgaatgtttttcactacttgacttatgaaggctctgtgaacctggatagtatcactgatcctgtgctcagggagattccagaagcttatttcattagagacccccacactttccttcttacaaaggactttattaaggccatggaggcacagatacagaactttggacagacgccatctcagttgcttattgagccacatccgcctcggagctctgccatgcacctgtgtttccttccacagagtccgctcatgtttaaagatcagatgcaacaggatgtgataatggtgctgaagtttccttcaaattctccagtaacccatgtggcagccaacactctgccccacttgaccatccccgcagtggtgacagtgacttgcagccgactctttgcagtgaatagatggcacaacacagtaggcctcagaggagctccaggatactccttggatcaagcccaccatcttcccattgaaatggatccattaatagccaataattcaggtgtaaacaaacggcagatcacagacctcgttgaccagagtatacaaatcaatgcacattgttttgtggtaacagcagataatcgctatattcttatctgtggattctgggataagagcttcagagtttattctacagaaacagggaaattgactcagattgtatttggccattgggatgtggtcacttgcttggccaggtccgagtcatacattggtggggactgctacatcgtgtccggatctcgagatgccaccctgctgctctggtactggagtgggcggcaccatatcataggagacaaccctaacagcagtgactatccggcaccaagagccgtcctcacaggccatgaccatgaagttgtctgtgtttctgtctgtgcagaacttgggcttgttatcagtggtgctaaagagggcccttgccttgtccacaccatcactggagatttgctgagagcccttgaaggaccagaaaactgcttattcccacgcttgatatctgtctccagcgaaggccactgtatcatatactatgaacgagggcgattcagtaatttcagcattaatgggaaacttttggctcaaatggagatcaatgattcaacacgggccattctcctgagcagtgacggccagaacctggtcaccggaggggacaatggggtagtagaggtctggcaggcctgtgacttcaagcaactgtacatttaccctggatgtgatgctggcattagagcaatggacttgtcccatgaccagaggactctgatcactggcatggcttctggtagcattgtagcttttaatatagattttaatcggtggcattatgagcatcagaacagatactgaagataaaggaagaaccaaaagccaagttaaagctgagagcacaagtgctgcatggaaaggcaatatctctggtggaaaaaactcgtctacatcgacctccgtttgtacattccatcacacccagcaatagctgtacattgtagtcagcaaccattttactttgtgtgttttttcacgactgaacaccagctgctatcaagcaagcttatatcatgtaaattatatgaattaggagatgttttggtaattatttcatatattgttgtttattgagaaaaggttgtaggatgtgtcacaagagacttttgacaattctgaggaaccttgtgtccagttgttacaaagtttaagctttgaacctaacctgcatcccatttccagcctcttttcaagctgagaaaaaaaaaaaaaaacacgtttgatactttgtacatcagatgcatcttatttaaaagggatacttttgtaaaagtaaaaccttgtataaagaacaaaatgtttcttaattttattgtggagttacaacttgcatgttccttactcctgttggcttgatggaacaggtgcattcacactatgaaacagaaagatctgtccaaggacacagcttgtatgaaagggttgaatttgggctccatcagtaatttttgacattttcaccaaaatatagtttgcactttttaatctaaagtcatcccttctgagtgaaatttgctcataaagcatttggatactaagccattatttgccattttgggtactttatacaaagaaaattcagccctaccctgcataatttgaagacacagcagaaagggggcttagggatgaggtcctggtttttcttgtataaataggagtcatgggcgttagttctgtagtaataacttcccagcacctggacatctcttccagagttatcccactggcttggtgtgtatacattaggggaggataatctgatgctaactttttttttctctttggttcttgaatagcttagtttctttaataacaagtcaaactttattacaacaataactgaagttattcttttaggttctcgtgaaattctcactgaaagccacattcttagcctaaggcatttcatcttttatgatataaaatgatggctatcaaatgattttccatacattgtactgatcaagttatacacccaggggtatatacactttcttcatgtttcttctttgtatatttggtgactgtatcgtcatagatgtacatattgtgtcggtagggctatgaggcatgttacaggaatgtaattttctcagaatttacactcactcgcagtcatttatttaaaaagataaaacaagataatgggttctttgtattggcactttgcaccagaaacatatcattatttattgatgtgattacttatttgttatccaccttgtactagtaagttttagcactgaattccttcttcactgttgtttgtatttatgaaattctgaaattatggggaatcagcgtaatgattaagttattcatcaccaggctgtaagcaatatcttgagtttgtagcttagaattgggaggatacttaacatctggaagacaagttcatttcatcttgagatcatggtgaaatattttggatatataaattccttaagctattgtaaccatgttttattgcaaagatgtaaaatatgccagatgtgtgtgagttggaaatcaaaaaaagaaaaataaaatatgcaaagaattc

SEQ ID NO: 329478 - DNA, 1575 bp, Artificial Sequence
  derived and/or modified sequence
atgttcgtgaactccaatggctacaatctcggagtccgggaggacgaggtggtagtgaacgacgtggacttacccccatgggccaagaaaccggaagacttcgtgcgaatcaataggatggccttggagtctgaattcgtatcatgtcagttacaccagtggatcgatcttatttttggctataaacagagaggccctgaagcggtgcgagctctgaacgtattccactatctgacatatgaaggcagcgtgaacttggacagcattacagatcccgtgctgcgagagattcccgaggcctattttatacgtgaccctcatacgtttttactaactaaggatttcattaaggctatggaggcgcagatccagaactttggacagactccatcccagctgctgatagagccacaccccccacgcagcagtgccatgcacctttgctttttgccccagtcccccttgatgtttaaagatcaaatgcaacaggatgtcatcatggtgctgaaattcccttccaacagcccagtgactcacgtcgctgctaacaccctgccccacctaaccatccctgccgtggtaacagtcacttgtagccgcttgtttgccgtcaacaggtggcataacactgtgggcctcagaggggctcccggatatagccttgaccaggctcaccacttgcccatagaaatggaccccctgatcgccaataactcaggggtgaacaagagacaaattaccgatttggttgatcagagcatacaaatcaatgcccattgcttcgtcgtgacagctgataataggtatattctgatttgcggcttttgggacaaatctttccgcgtatacagtacagaaacaggcaaactcacacagatcgtcttcggccattgggacgtcgtcacgtgtctcgccagaagtgagtcctacatcggaggagactgttacattgtctcaggttccagagatgccacacttctgctgtggtactggtcagggcgacaccacatcataggagataacccaaatagttccgactaccctgccccacgcgctgtgctaaccggccatgatcacgaagtggtttgcgtctctgtatgtgccgagctcggactcgtgatatccggggcaaaagaggggccatgcctggtgcacaccataacaggtgacttgttgagggcgctggaaggtccagagaactgcctgttcccaagattaatctctgtgagttcggagggccactgtattatctactacgagagaggacgcttctctaacttcagtatcaacgggaaactgctcgcgcagatggagattaatgatagtacaagagcaatcctgttgagctccgatggtcagaatcttgtcacaggtggcgacaacggtgtggtcgaggtgtggcaggcctgtgattttaagcagctttacatctaccccggatgcgatgccggaataagagctatggacctgtctcatgatcaaaggacgctcatcacgggcatggcctcgggttcaatcgtggcttttaatatcgattttaaccgttggcattatgagcaccagaatagatactag

SEQ ID NO: 329479 - DNA, 1575 bp, Artificial Sequence
  derived and/or modified sequence
atgttcgtgaactccaatggctataacctaggggtgcgtgaggacgaagtggttgtgaatgatgtagacctgcccccttgggcaaagaaacccgaagatttcgtgaggattaaccgcatggctctcgagagcgagtttgtgtcctgtcaattacatcagtggatagatctaatcttcggatataagcaacggggacccgaagcagttcgcgcactcaacgtcttccactacctcacatatgaaggcagcgtaaatctggatagtatcaccgatcccgtgctgcgcgagatccctgaggcttacttcatccgtgaccctcataccttccttctgaccaaggatttcatcaaggccatggaggcccagattcaaaatttcggtcagactcccagccagctgctgattgagccgcacccaccaagatcaagcgctatgcacctctgcttcctaccccagtctcctctaatgttcaaagatcagatgcagcaggatgttatcatggtgctgaagttcccatctaactcccctgtgacccacgtcgctgccaacacactgccgcacttgaccattccagccgtggtcaccgtcacttgctcgcggctgtttgctgtgaatagatggcacaatacggttggactgcgtggcgctccaggctattcgctggatcaggcccaccacttgcccatcgagatggatcccctgattgctaataattctggggtcaacaaaaggcagattactgacttggtggaccagtccattcaaattaatgcccattgttttgttgtgaccgctgataatcggtatatccttatctgcggcttttgggataagagctttcgggtctatagcacagaaactggaaagttgactcagatcgtatttggacattgggatgtggtgacatgcctggctagatctgagagttatatcggcggagattgttacattgtgtctggcagtcgcgacgctaccttgctgctgtggtactggtctggccgacatcatattatcggtgataaccccaactcatccgactatccagcccctagggctgttctcaccggtcacgatcacgaagtggtgtgtgtgtccgtctgtgccgagctggggctcgtgatatctggagctaaagaaggtccatgtctcgtccatacaataacaggtgatcttctacgcgctcttgaagggcctgaaaattgccttttccccagactgatttctgttagctcagaggggcactgcatcatctactatgaaagagggagattctcaaacttttccatcaacggaaagttactcgcacagatggagataaatgactcaactagagctatcctcttatcttcagatggacaaaatttggttactggaggtgataatggtgttgtggaggtttggcaagcgtgcgactttaaacagctgtacatctatcccggttgcgatgctggaatcagggcaatggatctaagccacgaccagcgcactctgatcaccggcatggcctccggttctattgtggctttcaacatcgatttcaatagatggcattacgaacaccagaatcggtactag

SEQ ID NO: 329480 - DNA, 1575 bp, Artificial Sequence
  derived and/or modified sequence
atgttcgtgaacagcaacggctacaacctgggcgtgagagaggacgaggtggtggtgaacgacgtggacctgcccccctgggccaagaagcccgaggacttcgtgagaatcaacagaatggccctggagagcgagttcgtgagctgccagctgcaccagtggatcgacctgatcttcggctacaagcagagaggccccgaggccgtgagagccctgaacgtgttccactacctgacctacgagggcagcgtgaacctggacagcatcaccgaccccgtgctgagagagatccccgaggcctacttcatcagagacccccacaccttcctgctgaccaaggacttcatcaaggccatggaggcccagatccagaacttcggccagacccccagccagctgctgatcgagccccacccccccagaagcagcgccatgcacctgtgcttcctgccccagagccccctgatgttcaaggaccagatgcagcaggacgtgatcatggtgctgaagttccccagcaacagccccgtgacccacgtggccgccaacaccctgccccacctgaccatccccgccgtggtgaccgtgacctgcagcagactgttcgccgtgaacagatggcacaacaccgtgggcctgagaggcgcccccggctacagcctggaccaggcccaccacctgcccatcgagatggaccccctgatcgccaacaacagcggcgtgaacaagagacagatcaccgacctggtggaccagagcatccagatcaacgcccactgcttcgtggtgaccgccgacaacagatacatcctgatctgcggcttctgggacaagagcttcagagtgtacagcaccgagaccggcaagctgacccagatcgtgttcggccactgggacgtggtgacctgcctggccagaagcgagagctacatcggcggcgactgctacatcgtgagcggcagcagagacgccaccctgctgctgtggtactggagcggcagacaccacatcatcggcgacaaccccaacagcagcgactaccccgcccccagagccgtgctgaccggccacgaccacgaggtggtgtgcgtgagcgtgtgcgccgagctgggcctggtgatcagcggcgccaaggagggcccctgcctggtgcacaccatcaccggcgacctgctgagagccctggagggccccgagaactgcctgttccccagactgatcagcgtgagcagcgagggccactgcatcatctactacgagagaggcagattcagcaacttcagcatcaacggcaagctgctggcccagatggagatcaacgacagcaccagagccatcctgctgagcagcgacggccagaacctggtgaccggcggcgacaacggcgtggtggaggtgtggcaggcctgcgacttcaagcagctgtacatctaccccggctgcgacgccggcatcagagccatggacctgagccacgaccagagaaccctgatcaccggcatggccagcggcagcatcgtggccttcaacatcgacttcaacagatggcactacgagcaccagaacagatactag

SEQ ID NO: 329481 - DNA, 879 bp, Artificial Sequence
  derived and/or modified sequence
atggagaagagaacgtgcgcactgtgtcctaaggacgtggagtacaacgtcctttatttcgcccagagcgaaaatattgcagcacacgaaaattgtctcctctactcctccgggttggttgaatgcgaagatcaggatccactcaaccctgatagatcatttgatgttgagagtgtgaagaaggaaatccagcggggccgaaagctgaagtgtaaattctgccataagagaggagcaacagtgggatgcgacctaaagaactgcaacaagaattaccacttcttctgcgccaagaaagatgacgccgtgccacaatcggatggggttcgcggtatctataagctgttatgccaacagcacgctcagttccctattatagcgcaatccgctaaattttccggggtgaagagaaagagaggcaggaaaaaacctctgtcaggcaaccacgtgcagcctcccgagaccatgaaatgcaatactttcatccgtcaagtcaaagaggaacatggacggcacacagacgcgaccgtgaaggttccgttcctgaaaaaatgtaaggaagccggccttcttaactacttattggaggagatacttgacaaggtccacagcattccggaaaaactgatggatgaaaccacctcagagagcgactatgaagagatcggaagcgccctgttcgactgtcggttattcgaggataccttcgtaaattttcaggccgcaatcgaaaaaaagatccatgccagtcagcaacgatggcagcagctaaaggaggaaatcgaattgctccaggacctcaaacagacactttgttcattccaggaaaaccgcgaccttatgagctcttccacctcaatctcctccttgtcctattag

SEQ ID NO: 329482 - DNA, 861 bp, Artificial Sequence
  derived and/or modified sequence
tagaggcccggtcctagggggtgcagcgcccctgctgcgagacgccccggcccccggaggagacgctcttcgtttccgccactgtactccagtggacttgtggagtgtgaggaccaagaccccttaaaccctgatcgtagctttgacgtggaatcagtgaagaaggagattcagagagggcgcaagctcaagtgtaagttttgccacaaacgcggcgcaacggtagggtgtgacttaaaaaattgtaataaaaactaccactttttctgcgctaagaaggacgatgctgttccccaaagcgacggagtgcgagggatttacaagcttctgtgccagcagcacgcccagttcccaatcatcgcacaatctgcgaagtttagcggcgttaagaggaagcggggcagaaagaaacctctgtcagggaatcatgtgcagcctcccgaaacaatgaaatgcaatacctttattaggcaggttaaggaagagcacgggcggcacactgatgctaccgtgaaagtgccgttcttgaaaaagtgcaaggaggccggactcctaaactacttactggaagaaatcctcgataaggttcacagtatacccgagaagctcatggatgaaaccacgagtgagtccgactacgaggaaatcggttccgccctgttcgactgcagactttttgaggacacgttcgtaaatttccaagctgccattgagaaaaagatccatgcgagtcaacaacggtggcagcagctgaaagaagagattgaactgctacaagatctgaagcaaactctatgttctttccaggaaaatcgagatctcatgtcaagcagtacatccattagcagcctgtcctattag

SEQ ID NO: 329483 - DNA, 507 bp, Artificial Sequence
  derived and/or modified sequence
atggagaagcgcacctgcgctctgtgccctaaagatgtcgagtacaacgtgttgtacttcgcgcagagcgagaacatcgccgcacacgagaattgcctgctttactcgagcgggttggtggagtgcgaagatcaggatcccctgaaccccgacaggtcatttgacgtagaaagtgtgaaaaaggaaatccagagaggacgtaaactcaaatgtaagttttgccacaagagaggggcgacagtgggttgtgatcttaaaaattgtaataagaattatcactttttttgcgcaaagaaggacgatgccgtgccacagagtgatggagttcgaggtatctacaaactcctgtgccaacagcatgctcagttccccataattgctcagtccgctaagttttcaggcgtcaaaagaaagaggggacggaagaagcctctttcggggaatcacgtccagcctccagagaccatgaagtgtaatacttttattcgccaggtcaaggaggagtag

SEQ ID NO: 329484 - DNA, 297 bp, Artificial Sequence
  derived and/or modified sequence
atggaaaagagaacttgcgctctctgcccaaaggatgtggagtataacgtcttatacttcgcgcaatctgaaaacatagcagcgcacgagaactgtctgctttatagctcagggctcgtcgagtgtgaagaccaggatcctctcaacccggacaggtcatttgacgtcgagtcagttaaaaaagagattcagcgaggtaggaaacttaagtgcaagttctgccataagagaggtgcgaccgtaggatgtgatctgaagaattgcaacaagaattaccattttttctgcgccaagtag

SEQ ID NO: 329485 - DNA, 879 bp, Artificial Sequence
  derived and/or modified sequence
atggagaaacggacctgcgcactttgccctaaagacgtggagtataatgtgctgtactttgcccagtctgaaaacattgctgctcatgaaaattgcttgctgtattcttccggcctagtggaatgtgaagaccaagacccccttaaccccgacagaagtttcgacgtggagagcgtcaaaaaggagatccagcgagggcggaaactgaaatgcaagttttgtcataaacggggcgccaccgtcggatgtgacttaaagaattgtaacaagaactatcactttttctgcgcaaaaaaggacgacgccgtccctcagagcgatggagttcgcggaatttacaagctgctgtgtcaacagcacgcgcaatttcctataatcgctcaaagcgcaaaattttccggtgtgaagaggaaacgcggaaggaagaagccattgtctggaaatcacgtacagccaccagaaacaatgaagtgtaatacttttatacggcaggttaaggaagagcatggaagacatacagacgcaaccgtcaaggtccccttcctgaagaagtgcaaggaggccggcctgttgaattacttgttagaggagatacttgacaaagttcattccatccctgaaaagctaatggatgagaccacctctgagtccgactatgaagaaataggctccgcactctttgactgcaggctgttcgaggacacattcgtaaactttcaggccgcgatcgagaagaaaatccatgccagccagcagcgctggcagcaactaaaagaggagattgagttattgcaagacctgaaacagaccttgtgttcctttcaggaaaaccgggaccttatgtcttcttccacctccattagttcccttagctactag

SEQ ID NO: 329486 - DNA, 879 bp, Artificial Sequence
  derived and/or modified sequence
atggagaagaggacctgtgccctgtgccccaaggatgtggagtacaacgtgctgtactttgcccagagcgagaacattgctgcccacgagaactgcctgctgtacagcagcggcctggtggagtgtgaggaccaggaccccctgaacccagacaggagctttgatgtggagagcgtgaagaaggagatccagaggggcaggaagctgaagtgcaagttctgccacaagagaggagccaccgtgggctgtgacctgaagaactgcaacaagaactaccacttcttctgtgccaagaaggatgatgctgtgccccagagtgatggagtgcggggcatctacaagctgctgtgccagcagcacgcccagttccccatcatcgcccagagcgccaagttctctggagtgaagaggaagaggggcaggaagaagcccctgagcggcaaccacgtgcagcccccagagaccatgaagtgcaacaccttcatccggcaggtgaaggaggagcacggccgccacacagatgccaccgtgaaggtgcccttcctgaagaagtgcaaggaggccggcctgctgaactacctgctggaggagatcctggacaaggtgcacagcatccctgagaagctgatggatgagaccaccagcgagagtgactatgaggagatcggcagcgccctgtttgactgccgcctgtttgaggacacctttgtgaacttccaggccgccatcgagaagaagatccacgccagccagcagcgctggcagcagctgaaggaggagattgagctgctgcaggacctgaagcagaccctgtgcagcttccaggagaacagagacctgatgagcagcagcaccagcatcagcagcctgagctactag

SEQ ID NO: 329487 - DNA, 861 bp, Artificial Sequence
  derived and/or modified sequence
tgaagacctggcccccggggctgcagcgccccagctgcccggcggcccggccccaggagaagaagaagcagcttcccccccctgtacagcagcggcctggtggagtgtgaggaccaggaccccctgaacccagacaggagctttgatgtggagagcgtgaagaaggagatccagaggggcaggaagctgaagtgcaagttctgccacaagagaggagccaccgtgggctgtgacctgaagaactgcaacaagaactaccacttcttctgtgccaagaaggatgatgctgtgccccagagtgatggagtgcggggcatctacaagctgctgtgccagcagcacgcccagttccccatcatcgcccagagcgccaagttctctggagtgaagaggaagaggggcaggaagaagcccctgagcggcaaccacgtgcagcccccagagaccatgaagtgcaacaccttcatccggcaggtgaaggaggagcacggccgccacacagatgccaccgtgaaggtgcccttcctgaagaagtgcaaggaggccggcctgctgaactacctgctggaggagatcctggacaaggtgcacagcatccctgagaagctgatggatgagaccaccagcgagagtgactatgaggagatcggcagcgccctgtttgactgccgcctgtttgaggacacctttgtgaacttccaggccgccatcgagaagaagatccacgccagccagcagcgctggcagcagctgaaggaggagattgagctgctgcaggacctgaagcagaccctgtgcagcttccaggagaacagagacctgatgagcagcagcaccagcatcagcagcctgagctactag

SEQ ID NO: 329488 - DNA, 507 bp, Artificial Sequence
  derived and/or modified sequence
atggagaagaggacctgtgccctgtgccccaaggatgtggagtacaacgtgctgtactttgcccagagcgagaacattgctgcccacgagaactgcctgctgtacagcagcggcctggtggagtgtgaggaccaggaccccctgaacccagacaggagctttgatgtggagagcgtgaagaaggagatccagaggggcaggaagctgaagtgcaagttctgccacaagagaggagccaccgtgggctgtgacctgaagaactgcaacaagaactaccacttcttctgtgccaagaaggatgatgctgtgccccagagtgatggagtgcggggcatctacaagctgctgtgccagcagcacgcccagttccccatcatcgcccagagcgccaagttctctggagtgaagaggaagaggggcaggaagaagcccctgagcggcaaccacgtgcagcccccagagaccatgaagtgcaacaccttcatccggcaggtgaaggaggagtag

SEQ ID NO: 329489 - DNA, 297 bp, Artificial Sequence
  derived and/or modified sequence
atggagaagaggacctgtgccctgtgccccaaggatgtggagtacaacgtgctgtactttgcccagagcgagaacattgctgcccacgagaactgcctgctgtacagcagcggcctggtggagtgtgaggaccaggaccccctgaacccagacaggagctttgatgtggagagcgtgaagaaggagatccagaggggcaggaagctgaagtgcaagttctgccacaagagaggagccaccgtgggctgtgacctgaagaactgcaacaagaactaccacttcttctgtgccaagtag

SEQ ID NO: 329490 - DNA, 879 bp, Artificial Sequence
  derived and/or modified sequence
atggagaagcggacctgcgccctgtgccccaaggacgtggagtacaatgtgctctacttcgcacagtcagagaatatcgccgcccatgagaactgtctcctgtatagctctggactggttgagtgcgaggaccaggacccattgaacccagatcgttcattcgatgtcgaatccgtaaagaaggagattcagaggggcagaaagctgaaatgcaagttctgtcataagcgcggcgcaacagtcggatgcgacttgaagaactgtaacaagaattatcatttcttctgcgctaaaaaagacgacgcggtgcctcagtctgacggggttcgcggaatctacaaactgttatgtcaacaacacgcgcaatttcccattatcgcccaatccgccaaattctccggcgttaaaaggaagcggggccgaaagaaacccttgagcggcaaccacgttcaaccgcctgaaactatgaagtgtaacactttcattcgccaggtcaaggaggagcatggtagacataccgatgctacagtgaaagtcccatttctcaaaaagtgtaaagaagcagggctactcaactatctcctggaggaaatcctggacaaggtacactccatcccagagaagttgatggacgagaccacttccgaatcggattatgaagaaattggctcagcccttttcgattgtagactattcgaggatacgttcgtgaatttccaggctgcaatcgaaaagaagatccacgcaagtcagcagaggtggcagcagctcaaagaggaaatagagctgctgcaagaccttaagcagacactatgcagctttcaagagaacagggatttaatgagctcatctacttcgattagctccctcagctactag

SEQ ID NO: 329491 - DNA, 861 bp, Artificial Sequence
  derived and/or modified sequence
tgacggcccggcccccggggctgcagcgcccccgccgcccggcggccagggcccaggcgacgccggtcgagctttccccccttgtactcctccggtctggtggagtgtgaggaccaggaccctctcaaccccgaccggtctttcgatgttgaatcagttaagaaggagatccaacgagggcgaaagctgaagtgcaagttttgccacaagcggggagcgacagtaggttgtgatttgaaaaactgcaacaaaaattatcactttttctgcgctaaaaaagacgacgcggtgccacagtcggacggtgtcagagggatctataagctcctgtgtcagcaacacgcacagttccccatcattgcccagagtgccaaattctccggggtgaagcggaagaggggaaggaaaaaacctctttctgggaaccatgtgcagcccccggaaaccatgaagtgtaatacttttatccgccaggtcaaggaagaacacggaagacacacagacgccacagtcaaggtgcccttcttgaaaaagtgcaaagaggctggattgttaaactaccttctcgaggagatattagataaggtccactccatcccagagaaacttatggacgagactactagcgaatccgactacgaagagatcggcagcgccttgttcgactgccgcttatttgaagatacctttgtaaatttccaggccgccattgaaaaaaagattcacgccagccagcagcgatggcagcagttaaaggaagagatcgaacttttacaggatctgaagcagacactgtgctcctttcaagagaacagggacctaatgtcttcctccacctcaatcagtagcctatcgtactag

SEQ ID NO: 329492 - DNA, 507 bp, Artificial Sequence
  derived and/or modified sequence
atggagaagcggacctgcgccctgtgccccaaggacgtggagtacaacgtgttatacttcgcgcagtctgaaaacatcgccgctcacgaaaactgtttgctgtattctagcggccttgtggaatgcgaggaccaggaccccctcaatcccgatcggtccttcgatgtcgaaagcgtgaaaaaggagatccagcgggggaggaagctcaaatgtaagttctgccacaagagaggcgccacggtgggctgcgaccttaagaactgcaacaaaaattaccacttcttttgcgccaagaaggatgacgctgttccacaaagcgatggcgtgaggggaatatacaagctgctatgtcagcagcacgctcaatttccgataattgcacagtcggcaaaattttcgggcgtgaaaagaaagcgcggcagaaaaaagccgctgtctggcaatcacgtgcaaccaccagagaccatgaagtgtaacacgtttatcagacaggtgaaggaagagtag

SEQ ID NO: 329493 - DNA, 297 bp, Artificial Sequence
  derived and/or modified sequence
atggagaagcggacctgcgccctgtgccccaaggacgtggagtacaacgtgctgtatttcgcccaatccgagaacattgccgcccacgagaattgtctgctgtactccagtggcctggtggaatgtgaggaccaggaccccctcaatccagatcggtccttcgacgtggagtcagtgaagaaggagatccagagaggcaggaagctcaagtgcaagttttgccataaacgcggagctacagtgggctgtgacttgaagaattgtaacaagaattatcattttttctgcgcaaagtag

SEQ ID NO: 329494 - DNA, 879 bp, Artificial Sequence
  derived and/or modified sequence
atggagaagcggacctgcgccctgtgccccaaggacgtggagtacaatgtgttgtacttcgctcagtctgagaacatcgcagcgcacgagaactgcttgctgtacagttctggactggttgaatgcgaggatcaggacccactcaatccagatcgcagcttcgacgtagagagtgtgaagaaggagatccaacgaggaaggaaactcaaatgtaaattctgtcataagcgaggagctaccgtggggtgcgacctcaagaattgtaataagaattaccatttcttttgtgcaaagaaggacgacgccgttccacagtcagacggagttagaggcatatataaactcttatgccaacagcacgcccaatttccaatcatcgcccagagcgctaagttttccggcgtaaaaagaaagagggggaggaaaaaaccactcagtgggaaccacgtacagccgccagagaccatgaagtgcaacactttcatacgacaggttaaagaagaacatggacggcatactgacgccacagtcaaagttcctttcctcaaaaagtgcaaggaggcaggtcttctcaactacctgctggaagagatcctggataaggtgcacagcattccagagaaactgatggacgagacaacgtcagaatctgattatgaggagatcggctcagctctgtttgattgtagattgttcgaggatacattcgtgaactttcaagctgccatagagaaaaagatacatgccagccaacagaggtggcagcaactcaaggaagaaatcgagctgctccaagacctgaaacaaactctctgttcctttcaggagaaccgtgatctcatgtcgtcctcaacttccatatcgagcctgagttactag

SEQ ID NO: 329495 - DNA, 903 bp, Artificial Sequence
  derived and/or modified sequence
gccgccccggcccgagagggtgctcggcgccagcagcccggaggcccggcccgcgcaggaggcgctcctccttcccaccgctgtattcttcaggacttgtggaatgtgaggatcaggatccacttaatcctgatagaagttttgatgtggaatcagtaaagaaagaaatccagagaggaaggaagttgaaatgcaaattttgtcataaaagaggagccaccgtgggatgtgatttaaaaaactgtaacaagaattaccactttttctgtgccaagaaggacgacgcagttccacagtctgatggagttcgaggaatttataaactgctttgccagcaacatgctcaattcccgatcatcgctcaaagtgctaaattttcaggagtgaaaagaaaaagaggaaggaagaaacccctctcaggcaatcatgtacagccacccgaaacaatgaaatgtaatacattcataagacaagtgaaagaagagcatggcagacacacagatgcaactgtgaaagttccttttcttaagaaatgcaaggaagcaggacttcttaattacttacttgaagaaatattagacaaagttcattcaattccagaaaaactcatggatgagactacttcagaatcagactatgaagaaatcgggagtgcactttttgactgtagattgttcgaagacacatttgtaaattttcaagcagcaatagagaaaaaaattcatgcatctcaacaaaggtggcagcagttgaaggaagagattgagctacttcaggacttaaaacaaaccttgtgctcttttcaagaaaatagagatcttatgtcaagttctacatcaatatcatccctgtcttattagggattaccgtttcctaagccaagagtcatgtcaaattgcaatc

SEQ ID NO: 329496 - DNA, 879 bp, Artificial Sequence
  derived and/or modified sequence
atggagaagaggacctgtgcgctgtgcccaaaagatgttgagtacaatgtcctctattttgctcagtccgagaatattgctgcacacgagaattgtctgctgtattcatccggattagtggagtgcgaggaccaagatcctctgaatcctgacagaagttttgatgttgagtccgtcaagaaggaaattcagcgcggaagaaagctgaaatgtaaattctgtcacaagaggggggcaacggtgggatgtgacctgaaaaattgtaataaaaactaccacttcttctgcgctaagaaagacgatgcagtgccacagtctgatggcgtgaggggcatctataaactcctgtgccagcagcacgcccagttcccaatcattgcacagtccgcaaaatttagtggggtaaaacggaagagaggcagaaagaaaccactatcaggcaatcacgtgcagccacctgagaccatgaaatgcaatacatttattcgccaagttaaggaggagcatggtaggcatacagatgccacagtcaaagtaccattccttaagaagtgtaaagaagctggcctgcttaactatttgcttgaagaaatcctagacaaagttcatagtatcccagagaagctcatggatgaaacaacttcagagtctgattacgaggaaattggcagcgctctttttgattgccgccttttcgaggacactttcgtaaattttcaagcggcaatcgagaagaagatccacgccagccaacaacgctggcagcagctgaaagaggagatcgaactgctgcaagatttaaaacaaacactatgctcattccaggaaaaccgtgatttgatgtcttcgtccacaagtatcagctctctgtcctactag

SEQ ID NO: 329497 - DNA, 861 bp, Artificial Sequence
  derived and/or modified sequence
taacgcccaggaccacggggatgcagcgcacctgcagctcgcaggcctggacctagacgaagaaggagttccttcccgccattgtattcgtctggactcgtggaatgtgaagaccaagatccattgaaccctgatcgctcatttgatgtcgaaagcgtgaagaaggagatccagagaggaaggaagttgaaatgcaaattttgtcataaacgcggtgctactgttggctgcgacttaaagaattgcaataagaattatcacttcttctgcgcaaagaaagacgacgccgttccccaatctgacggcgtgaggggcatatataaattactatgccagcagcacgctcagttcccgataatcgcccagagtgcgaaatttagtggcgtgaaaagaaagcgcggacgaaagaagcccttgtctggcaatcatgtccagccacccgaaactatgaaatgcaacaccttcattaggcaggtgaaggaggaacacggacgccatactgatgctacagtaaaagttccctttctgaaaaaatgcaaggaggctggactgctgaattacctgcttgaagagatcctcgacaaagtccattccatccctgaaaagttgatggacgagacaacctcagagtccgactacgaagaaatcggaagtgcactctttgactgccggttgtttgaggacacgttcgtgaattttcaggcggcaatcgaaaaaaagatacacgcttctcagcagagatggcaacagctgaaggaggaaatcgagcttctccaggatctcaaacagacactgtgttcctttcaggagaatagggatctgatgagtagctcaacttccatctccagcctttcatactag

SEQ ID NO: 329498 - DNA, 507 bp, Artificial Sequence
  derived and/or modified sequence
atggaaaagcgcacctgcgcactgtgtcctaaagatgtcgaatataacgtcctgtattttgcacagagcgagaacattgccgctcacgagaattgtctgctatacagcagcgggctggtcgagtgcgaagatcaggacccattgaaccccgacaggtcctttgacgtagaatcagtgaagaaagagattcagcgcggtagaaagcttaagtgcaaattctgtcacaaaagaggcgctaccgtgggttgcgacctcaagaactgtaacaagaactatcattttttctgtgcgaagaaggatgacgcagtgccccaatcagacggcgtgcgcggtatttacaaactcctgtgccagcaacatgcccaattccctataatcgcccaatccgcaaagttcagcggcgtcaaacgaaaaagaggacggaagaagcccctatctggaaaccacgttcagccccctgagaccatgaagtgcaacacgttcatcaggcaggtcaaagaggagtag

SEQ ID NO: 329499 - DNA, 297 bp, Artificial Sequence
  derived and/or modified sequence
atggagaagcgaacttgtgcattgtgtcctaaagacgttgagtataacgtgctttattttgcacagagcgagaatatagccgctcatgagaactgcttattgtatagcagcggattggtggagtgtgaagatcaggacccattgaaccccgacaggtccttcgatgtcgaaagcgtgaagaaggaaatccaacgcggacgcaagctcaaatgcaaattttgccacaaaagaggggctacggtaggttgcgatctgaagaactgcaacaagaactatcatttcttctgcgccaaatag

SEQ ID NO: 329500 - DNA, 879 bp, Artificial Sequence
  derived and/or modified sequence
atggagaaacggacctgtgccctttgtcctaaggatgtggagtacaatgtactgtactttgcccagtcggagaatattgccgcacacgagaactgcctgctttatagctccgggcttgtcgagtgtgaggaccaagatcctctgaaccctgacaggtcgttcgatgtggagagcgtgaaaaaggagatccagcgcggacgcaagcttaaatgcaaattttgccataaaagaggggctaccgtgggctgcgacctgaagaattgtaataagaactaccatttcttttgtgcaaaaaaggacgatgccgtcccccaatctgacggagttcgtggaatctacaagctgttatgccagcaacatgcccaatttccaatcatcgcgcagtccgccaagttctccggggtgaagaggaaacgaggcagaaaaaaacctctgtccggcaatcacgtccagcctccggagaccatgaaatgtaacacctttatccgccaggtgaaagaggaacatggtcggcacaccgacgccactgtcaaggtcccttttttgaagaaatgtaaggaggcaggactcttgaactatcttctggaggagatccttgacaaagtccactccatcccagaaaagttgatggacgagaccacttccgagagcgattacgaagagatagggagtgctctgttcgactgccgtctttttgaggatacctttgtgaactttcaggctgccatcgagaagaagatccacgcttcacaacagaggtggcaacaactcaaggaggaaattgaactgcttcaggatctgaagcaaactctgtgctccttccaagagaaccgcgacctcatgtcatcctcaactagcatttcctctctctcatactag

SEQ ID NO: 329501 - DNA, 879 bp, Artificial Sequence
  derived and/or modified sequence
atggagaagagaacctgcgccctgtgccccaaggacgtggagtacaacgtgctgtacttcgcccagagcgagaacatcgccgcccacgagaactgcctgctgtacagcagcggcctggtggagtgcgaggaccaggaccccctgaaccccgacagaagcttcgacgtggagagcgtgaagaaggagatccagagaggcagaaagctgaagtgcaagttctgccacaagagaggcgccaccgtgggctgcgacctgaagaactgcaacaagaactaccacttcttctgcgccaagaaggacgacgccgtgccccagagcgacggcgtgagaggcatctacaagctgctgtgccagcagcacgcccagttccccatcatcgcccagagcgccaagttcagcggcgtgaagagaaagagaggcagaaagaagcccctgagcggcaaccacgtgcagccccccgagaccatgaagtgcaacaccttcatcagacaggtgaaggaggagcacggcagacacaccgacgccaccgtgaaggtgcccttcctgaagaagtgcaaggaggccggcctgctgaactacctgctggaggagatcctggacaaggtgcacagcatccccgagaagctgatggacgagaccaccagcgagagcgactacgaggagatcggcagcgccctgttcgactgcagactgttcgaggacaccttcgtgaacttccaggccgccatcgagaagaagatccacgccagccagcagagatggcagcagctgaaggaggagatcgagctgctgcaggacctgaagcagaccctgtgcagcttccaggagaacagagacctgatgagcagcagcaccagcatcagcagcctgagctactag

SEQ ID NO: 329502 - DNA, 861 bp, Artificial Sequence
  derived and/or modified sequence
tgaagacccggccccagaggctgcagcgcccccgccgccagaagacccggccccagaagaagaagaagcagcttcccccccctgtacagcagcggcctggtggagtgcgaggaccaggaccccctgaaccccgacagaagcttcgacgtggagagcgtgaagaaggagatccagagaggcagaaagctgaagtgcaagttctgccacaagagaggcgccaccgtgggctgcgacctgaagaactgcaacaagaactaccacttcttctgcgccaagaaggacgacgccgtgccccagagcgacggcgtgagaggcatctacaagctgctgtgccagcagcacgcccagttccccatcatcgcccagagcgccaagttcagcggcgtgaagagaaagagaggcagaaagaagcccctgagcggcaaccacgtgcagccccccgagaccatgaagtgcaacaccttcatcagacaggtgaaggaggagcacggcagacacaccgacgccaccgtgaaggtgcccttcctgaagaagtgcaaggaggccggcctgctgaactacctgctggaggagatcctggacaaggtgcacagcatccccgagaagctgatggacgagaccaccagcgagagcgactacgaggagatcggcagcgccctgttcgactgcagactgttcgaggacaccttcgtgaacttccaggccgccatcgagaagaagatccacgccagccagcagagatggcagcagctgaaggaggagatcgagctgctgcaggacctgaagcagaccctgtgcagcttccaggagaacagagacctgatgagcagcagcaccagcatcagcagcctgagctactag

SEQ ID NO: 329503 - DNA, 507 bp, Artificial Sequence
  derived and/or modified sequence
atggagaagagaacctgcgccctgtgccccaaggacgtggagtacaacgtgctgtacttcgcccagagcgagaacatcgccgcccacgagaactgcctgctgtacagcagcggcctggtggagtgcgaggaccaggaccccctgaaccccgacagaagcttcgacgtggagagcgtgaagaaggagatccagagaggcagaaagctgaagtgcaagttctgccacaagagaggcgccaccgtgggctgcgacctgaagaactgcaacaagaactaccacttcttctgcgccaagaaggacgacgccgtgccccagagcgacggcgtgagaggcatctacaagctgctgtgccagcagcacgcccagttccccatcatcgcccagagcgccaagttcagcggcgtgaagagaaagagaggcagaaagaagcccctgagcggcaaccacgtgcagccccccgagaccatgaagtgcaacaccttcatcagacaggtgaaggaggagtag

SEQ ID NO: 329504 - DNA, 297 bp, Artificial Sequence
  derived and/or modified sequence
atggagaagagaacctgcgccctgtgccccaaggacgtggagtacaacgtgctgtacttcgcccagagcgagaacatcgccgcccacgagaactgcctgctgtacagcagcggcctggtggagtgcgaggaccaggaccccctgaaccccgacagaagcttcgacgtggagagcgtgaagaaggagatccagagaggcagaaagctgaagtgcaagttctgccacaagagaggcgccaccgtgggctgcgacctgaagaactgcaacaagaactaccacttcttctgcgccaagtag

SEQ ID NO: 329505 - protein, 1123 aa, Artificial Sequence
  derived and/or modified sequence
MSRATSVGDQLEAPARTIYLNQPHLNKFRDNQISTAKYSVLTFLPRFLYEQIRRAANAFFLFIALLQQIPDVSPTGRYTTLVPLIIILTIAGIKEIVEDFKRHKADNAVNKKKTIVLRNGMWHTIMWKEVAVGDIVKVVNGQYLPADVVLLSSSEPQAMCYVETANLDGETNLKIRQGLSHTADMQTREVLMKLSGTIECEGPNRHLYDFTGNLNLDGKSLVALGPDQILLRGTQLRNTQWVFGIVVYTGHDTKLMQNSTKAPLKRSNVEKVTNVQILVLFGILLVMALVSSAGALYWNRSHGEKNWYIKKMDTTSDNFGYNLLTFIILYNNLIPISLLVTLEVVKYTQALFINWDTDMYYIGNDTPAMARTSNLNEELGQVKYLFSDKTGTLTCNIMNFKKCSIAGVTYGHFPELAREPSSDDFCRMPPPCSDSCDFDDPRLLKNIEDRHPTAPCIQEFLTLLAVCHTVVPEKDGDNIIYQASSPDEAALVKGAKKLGFVFTARTPFSVIIEAMGQEQTFGILNVLEFSSDRKRMSVIVRTPSGRLRLYCKGADNVIFERLSKDSKYMEETLCHLEYFATEGLRTLCVAYADLSENEYEEWLKVYQEASTILKDRAQRLEECYEIIEKNLLLLGATAIEDRLQAGVPETIATLLKAEIKIWVLTGDKQETAINIGYSCRLVSQNMALILLKEDSLDATRAAITQHCTDLGNLLGKENDVALIIDGHTLKYALSFEVRRSFLDLALSCKAVICCRVSPLQKSEIVDVVKKRVKAITLAIGDGANDVGMIQTAHVGVGISGNEGMQATNNSDYAIAQFSYLEKLLLVHGAWSYNRVTKCILYCFYKNVVLYIIEIFTALPPFTLGIFERSCTQESMLRFPQLYKITQNGEGFNTKVFWGHCINALVHSLILFWFPMKALEHDTVLTSGHATDYLFVGNIVYTYVVVTVCLKAGLETTAWTKFSHLAVWGSMLTWLVFFGIYSTIWPTIPIAPDMRGQATMVLSSAHFWLGLFLVPTACLIEDVAWRAAKHTCKKTLLEEVQELETKSRVLGKAVLRDSNGKRLNERDRLIKRLGRKTPPTLFRGSSLQQGVPHGYAFSQEEHGAVSQEEVIRAYDTTKKKSRKK

SEQ ID NO: 329506 - DNA, 3674 bp, Artificial Sequence
  derived and/or modified sequence
aggacctgttcgttcttctttgggctataagaaggcagaggatgagatgtcccgggccacgtctgttggagaccagctggaggcacccgcccgcaccatttacctcaaccaaccgcatctcaacaaattccgcgacaaccagatcagtacggccaagtacagcgtgttgacatttctacctcgattcttgtatgagcagattagaagagctgctaatgccttctttctcttcattgccttattacagcaaattccagatgtatctccaacaggaagatataccaccctggtgccattgatcattattttaacaattgcaggcatcaaagagattgtagaagattttaagcgacacaaggcagacaatgcagttaacaaaaagaaaacaatagtgttaagaaatggtatgtggcataccattatgtggaaagaggtggcagtgggagacattgtgaaggtcgtcaatgggcagtatcttccagcagatgtggtcctgctgtcatccagtgaacctcaggcaatgtgttatgttgaaacagctaatctggatggggagacgaaccttaaaatacgtcagggtttgagtcacactgctgacatgcaaacacgtgaagttctgatgaagttatctggaactatagagtgtgaagggcccaaccgccacctctatgacttcactggaaacttgaacttagatgggaaaagccttgttgcccttgggcctgaccagatcttattaagaggtacacagcttagaaatactcagtgggtctttggcatagttgtttatactggacacgacaccaaactcatgcagaattcaaccaaagcgcctctcaagagatcaaatgttgagaaggtgactaacgtgcagatcctggtgttgtttggcatcctcttggtcatggccttggtgagctcggcgggggccctgtactggaacaggtctcatggtgaaaagaactggtacatcaagaagatggacaccacctcagataattttggatacaacctactgacgttcatcatcttatacaacaatcttattcccatcagtctgttggtgactcttgaggttgtgaagtatactcaagcccttttcataaactgggacacagatatgtattatataggaaatgacactcctgccatggccaggacatcaaaccttaatgaagagcttgggcaggtgaaatatctcttttctgacaagactggaacgcttacatgcaatatcatgaactttaagaagtgcagcattgccggagtaacctatggtcacttcccagaattggcaagagagccgtcttcagatgacttctgtcggatgcctcctccctgtagtgattcctgtgactttgatgaccccaggctgttgaagaacattgaggatcgccatcccacagccccttgcattcaggagttcctcacccttctggccgtgtgccacacggttgttcctgagaaggatggagataacatcatctaccaggcctcttccccagatgaagctgctttggtgaaaggagctaaaaagctgggctttgtcttcacagccagaacaccattctcagtcatcatagaagcgatgggacaggaacaaacattcggaatccttaatgtcctggaattttctagtgacagaaaaagaatgtctgtaattgttcgaactccttcaggacgacttcggctttactgtaaaggggctgataatgtgatttttgagagactttcaaaagactcaaaatatatggaggaaacattatgccatctggaatactttgccacggaaggcttgcggactctctgtgtggcttatgctgatctctctgagaatgagtatgaggagtggctgaaagtctatcaggaagccagcaccatattgaaggacagagctcaacggttggaagagtgttacgagatcattgagaagaatttgctgctacttggagccacagccatagaagatcgccttcaagcaggagttccagaaaccatcgcaacactgttgaaggcagaaattaaaatatgggtgttgacaggagacaaacaagaaactgcgattaatatagggtattcctgccgattggtatcgcagaatatggcccttatcctattgaaggaggactctttggatgccacaagggcagccattactcagcactgcactgaccttgggaatttgctgggcaaggaaaatgacgtggccctgatcatcgatggccacaccctgaagtacgcgctctccttcgaagtccggaggagtttcctggatttggcactctcgtgcaaagcggtcatatgctgcagagtgtctcctctgcagaagtctgagatagtggatgtggtgaagaagcgggtgaaggccatcaccctcgccatcggagacggcgccaacgatgtcgggatgatccagacagcccacgtgggtgtgggaatcagtgggaatgaaggcatgcaggccaccaacaactcggattacgccatcgcacagttttcctacttagagaagcttctgttggttcatggagcctggagctacaaccgggtgaccaagtgcatcttgtactgcttctataagaacgtggtcctgtatattattgagattttcaccgctttgccgcccttcactctgggaatctttgagaggtcttgcactcaggagagcatgctcaggtttccccagctctacaaaatcacccagaatggcgaaggcttcaacacaaaggttttctggggtcactgcatcaacgccttggtccactccctcatcctcttctggtttcccatgaaagctctggagcatgatactgtgttgacaagtggtcatgctaccgactatttatttgttggaaatattgtttacacatatgttgttgttactgtttgtctgaaagctggtttggagaccacagcttggactaaattcagtcatctggctgtctggggaagcatgctgacctggctggtgttttttggcatctactcgaccatctggcccaccattcccattgctccagatatgagaggacaggcaactatggtcctgagctccgcacacttctggttgggattatttctggttcctactgcctgtttgattgaagatgtggcatggagagcagccaagcacacctgcaaaaagacattgctggaggaggtgcaggagctggaaaccaagtctcgagtcctgggaaaagcggtgctgcgggatagcaatggaaagaggctgaacgagcgcgaccgcctgatcaagaggctgggccggaagacgcccccgacgctgttccggggcagctccctgcagcagggcgtcccgcatgggtatgctttttctcaagaagaacacggagctgttagtcaggaagaagtcatccgtgcttatgacaccaccaaaaagaaatccaggaagaaataagacatgaattttcctgactgatcttaggaaagagattcagtttgttgcacccagtgttaacacatctttgtcagagaagactggcgtcagcagccaaaacaccaggaaacacatttctgtggccttagccaagcagtttgttagttacatattccctcgcaaacctggagtgcagaccacaggggaagctatctttgccctcccaactcgtctgcagtgcttagcctaacttttgtttatgtcgttatgaagcatt

SEQ ID NO: 329507 - protein, 141 aa, Artificial Sequence
  derived and/or modified sequence
MSRATSVGDQLEAPARTIYLNQPHLNKFRDNQISTAKYSVLTFLPRFLYEQIRRAANAFFLFIALLQQIPDVSPTGRYTTLVPLIIILTIAGIKEIVEDFKRHKADNAVNKKKTIVLRNGMWHTIMWKEENSPPFKEISPL

SEQ ID NO: 329508 - DNA, 426 bp, Artificial Sequence
  derived and/or modified sequence
atgtcaagggccacaagcgttggagaccagttggaggcccctgcgaggaccatttaccttaatcagccacaccttaataagttccgcgacaaccagatctcgaccgcaaaatattcagtactcacctttctgccacgcttcctgtatgaacagattcggagagctgctaatgcattctttctattcatcgcgctccttcagcagatccccgacgtgagtcctacaggtaggtataccaccctggttcccctgattataatcttaaccatcgccggcatcaaagagattgttgaggatttcaagcgacacaaagcagataacgccgtcaacaagaaaaagaccatcgtattgagaaatggcatgtggcatacgatcatgtggaaagaagaaaacagtcctcccttcaaggaaatttcccccctctag

SEQ ID NO: 329509 - DNA, 426 bp, Artificial Sequence
  derived and/or modified sequence
atgagccgggccacctctgtgggggaccagctggaggccccagcccggaccatctacctgaaccagccccacctgaacaagttccgggacaaccagatcagcacagccaagtacagcgtgctgaccttcctgccccgcttcctgtatgagcagatcagaagagctgccaatgccttcttcctgttcatcgccctgctgcagcagatcccagatgtgagccccaccggccgctacaccaccctggtgcccctcatcatcatcctgaccatcgccggcatcaaggagatcgtggaggacttcaagaggcacaaggctgacaatgctgtgaacaagaagaagaccatcgtgctgagaaatggcatgtggcacaccatcatgtggaaggaggagaacagcccccccttcaaggagatcagccccctgtag

SEQ ID NO: 329510 - DNA, 426 bp, Artificial Sequence
  derived and/or modified sequence
atgagccgggccaccagcgtgggcgaccagctggaggcccccgcccgaactatctacctcaatcagccgcacctgaataaattccgggataaccagatctcgacggccaaatacagcgtcctgaccttccttcccagatttctatacgagcagataaggagagccgccaacgcgtttttcctatttatagcactgctccaacagattcctgacgtatctcctacaggtcgatacacaactctcgtccccctgatcatcatcctgaccattgcgggtatcaaagaaattgtagaagattttaagcgtcacaaggctgacaatgccgtgaacaagaagaagactatcgtcttacgcaatggcatgtggcatacaatcatgtggaaggaggagaacagccctcctttcaaggagatatcacccctgtag

SEQ ID NO: 329511 - DNA, 426 bp, Artificial Sequence
  derived and/or modified sequence
atgtcgagggctactagtgtgggcgaccagctcgaggctcctgctagaaccatctacctgaatcagccacacctgaataagttcagggataatcagatttctaccgcgaagtactccgtgttgacgttcctccccagattcttatacgagcagattaggagagcggctaatgcttttttcctgttcatcgctctcctacaacagattccagatgttagcccgactgggagatacactacactcgtgcccctgattatcatcctgacgatcgccggtataaaagagatagtcgaagacttcaagcgccacaaggctgacaacgccgtaaacaaaaagaagacgattgtgctgcggaacggaatgtggcacactataatgtggaaagaggaaaactcaccacccttcaaggaaatttccccactgtag

SEQ ID NO: 329512 - DNA, 476 bp, Artificial Sequence
  derived and/or modified sequence
gacctgttcgttcttctttgggctataagaaggcagaggatgagatgtcccgggccacgtctgttggagaccagctggaggcacccgcccgcaccatttacctcaaccaaccgcatctcaacaaattccgcgacaaccagatcagtacggccaagtacagcgtgttgacatttctacctcgattcttgtatgagcagattagaagagctgctaatgccttctttctcttcattgccttattacagcaaattccagatgtatctccaacaggaagatataccaccctggtgccattgatcattattttaacaattgcaggcatcaaagagattgtagaagattttaagcgacacaaggcagacaatgcagttaacaaaaagaaaacaatagtgttaagaaatggtatgtggcataccattatgtggaaagaggagaattcgccaccctttaaagaaatttctcctttatagtgtttt

SEQ ID NO: 329513 - DNA, 426 bp, Artificial Sequence
  derived and/or modified sequence
atgagcagagccaccagcgtgggcgaccagctggaggcccccgccagaaccatctacctgaaccagccccacctgaacaagttcagagacaaccagatcagcaccgccaagtacagcgtgctgaccttcctgcccagattcctgtacgagcagatcagaagagccgccaacgccttcttcctgttcatcgccctgctgcagcagatccccgacgtgagccccaccggcagatacaccaccctggtgcccctgatcatcatcctgaccatcgccggcatcaaggagatcgtggaggacttcaagagacacaaggccgacaacgccgtgaacaagaagaagaccatcgtgctgagaaacggcatgtggcacaccatcatgtggaaggaggagaacagcccccccttcaaggagatcagccccctgtag

SEQ ID NO: 329514 - DNA, 1861 bp, Artificial Sequence
  derived and/or modified sequence
aaaatgttttcagctcctggaggcgaaaggtgcagagtcgctctgtgtccgtgaggccgggcggcgacctcgctcagtcggcttctcggtccgagtccccgggtctggatgctggtagccggcttcctgctggcgctgccgccgagctgggccgcgggcgccccgagggcgggcaggcgccccgcgcggccgcggggctgcgcggaccggccggaggagctactggagcagctgtacgggcgcctggcggccggcgtgctcagtgccttccaccacacgctgcagctggggccgcgtgagcaggcgcgcaacgcgagctgcccggcagggggcaggcccgccgaccgccgcttccggccgcccaccaacctgcgcagcgtgtcgccctgggcctacagaatctcctacgacccggcgaggtaccccaggtacctgcctgaagcctactgcctgtgccggggctgcctgaccgggctgttcggcgaggaggacgtgcgcttccgcagcgcccctgtctacatgcccaccgtcgtcctgcgccgcacccccgcctgcgccggcggccgttccgtctacaccgaggcctacgtcaccatccccgtgggctgcacctgcgtccccgagccggagaaggacgcagacagcatcaactccagcatcgacaaacagggcgccaagctcctgctgggccccaacgacgcgcccgctggcccctgaggccggtcctgccccgggaggtctccccggcccgcatcccgaggcgcccaagctggagccgcctggagggctcggtcggcgacctctgaagagagtgcaccgagcaaaccaagtgccggagcaccagcgccgcctttccatggagactcgtaagcagcttcatctgacacgggcatccctggcttgcttttagctacaagcaagcagcgtggctggaagctgatgggaaacgacccggcacgggcatcctgtgtgcggcccgcatggagggtttggaaaagttcacggaggctccctgaggagcctctcagatcggctgctgcgggtgcagggcgtgactcaccgctgggtgcttgccaaagagatagggacgcatatgctttttaaagcaatctaaaaataataataagtatagcgactatatacctacttttaaaatcaactgttttgaatagaggcagagctattttatattatcaaatgagagctactctgttacatttcttaacatataaacatcgttttttacttcttctggtagaattttttaaagcataattggaatccttggataaattttgtagctggtacactctggcctgggtctctgaattcagcctgtcaccgatggctgactgatgaaatggacacgtctcatctgacccactcttccttccactgaaggtcttcacgggcctccaggtggaccaaagggatgcacaggcggctcgcatgccccagggccagctaagagttccaaagatctcagatttggttttagtcatgaatacataaacagtctcaaactcgcacaattttttcccccttttgaaagccactggggccaatttgtggttaagaggtggtgagataagaagtggaacgtgacatctttgccagttgtcagaagaatccaagcaggtattggcttagttgtaagggctttaggatcaggctgaatatgaggacaaagtgggccacgttagcatctgcagagatcaatctggaggcttctgtttctgcattctgccacgagagctaggtccttgatcttttctttagattgaaagtctgtctctgaacacaattatttgtaaaagttagtagttcttttttaaatcattaaaagaggcttgctgaagga

SEQ ID NO: 329515 - protein, 1400 aa, Artificial Sequence
  derived and/or modified sequence
MPEQERQITAREGASRKILSKLSLPTRAWEPAMKKSFAFDNVGYEGGLDGLGPSSQVATSTVRILGMTCQSCVKSIEDRISNLKGIISMKVSLEQGSATVKYVPSVVCLQQVCHQIGDMGFEASIAEGKAASWPSRSLPAQEAVVKLRVEGMTCQSCVSSIEGKVRKLQGVVRVKVSLSNQEAVITYQPYLIQPEDLRDHVNDMGFEAAIKSKVAPLSLGPIDIERLQSTNPKRPLSSANQNFNNSETLGHQGSHVVTLQLRIDGMHCKSCVLNIEENIGQLLGVQSIQVSLENKTAQVKYDPSCTSPVALQRAIEALPPGNFKVSLPDGAEGSGTDHRSSSSHSPGSPPRNQVQGTCSTTLIAIAGMTCASCVHSIEGMISQLEGVQQISVSLAEGTATVLYNPSVISPEELRAAIEDMGFEASVVSESCSTNPLGNHSAGNSMVQTTDGTPTSVQEVAPHTGRLPANHAPDILAKSPQSTRAVAPQKCFLQIKGMTCASCVSNIERNLQKEAGVLSVLVALMAGKAEIKYDPEVIQPLEIAQFIQDLGFEAAVMEDYAGSDGNIELTITGMTCASCVHNIESKLTRTNGITYASVALATSKALVKFDPEIIGPRDIIKIIEEIGFHASLAQRNPNAHHLDHKMEIKQWKKSFLCSLVFGIPVMALMIYMLIPSNEPHQSMVLDHNIIPGLSILNLIFFILCTFVQLLGGWYFYVQAYKSLRHRSANMDVLIVLATSIAYVYSLVILVVAVAEKAERSPVTFFDTPPMLFVFIALGRWLEHLAKSKTSEALAKLMSLQATEATVVTLGEDNLIIREEQVPMELVQRGDIVKVVPGGKFPVDGKVLEGNTMADESLITGEAMPVTKKPGSTVIAGSINAHGSVLIKATHVGNDTTLAQIVKLVEEAQMSKAPIQQLADRFSGYFVPFIIIMSTLTLVVWIVIGFIDFGVVQRYFPIKTVMFDKTGTITHGVPRVMRVLLLGDVATLPLRKVLAVVGTAEASSEHPLGVAVTKYCKEELGTETLGYCTDFQAVPGCGIGCKVSNVEGILAHSERPLSAPASHLNEAGSLPAEKDAVPQTFSVLIGNREWLRRNGLTISSDVSDAMTDHEMKGQTAILVAIDGVLCGMIAIADAVKQEAALAVHTLQSMGVDVVLITGDNRKTARAIATQVGINKVFAEVLPSHKVAKVQELQNKGKKVAMVGDGVNDSPALAQADMGVAIGTGTDVAIEAADVVLIRNDLLDVVASIHLSKRTVRRIRINLVLALIYNLVGIPIAAGVFMPIGIVLQPWMGSAAMAASSVSVVLSSLQLKCYKKPDLERYEAQAHGHMKPLTASQVSVHIGMDDRWRDSPRATPWDQVSYVSQVSLSSLTSDKPSRHSAAADDDGDKWSLLLNGRDEEQYI

SEQ ID NO: 329516 - DNA, 4203 bp, Artificial Sequence
  derived and/or modified sequence
atgcccgagcaggagagacagatcaccgccagagagggcgccagcagaaagatcctgagcaagctgagcctgcccaccagagcctgggagcccgccatgaagaagagcttcgccttcgacaacgtgggctacgagggcggcctggacggcctgggccccagcagccaggtggccaccagcaccgtgagaatcctgggcatgacctgccagagctgcgtgaagagcatcgaggacagaatcagcaacctgaagggcatcatcagcatgaaggtgagcctggagcagggcagcgccaccgtgaagtacgtgcccagcgtggtgtgcctgcagcaggtgtgccaccagatcggcgacatgggcttcgaggccagcatcgccgagggcaaggccgccagctggcccagcagaagcctgcccgcccaggaggccgtggtgaagctgagagtggagggcatgacctgccagagctgcgtgagcagcatcgagggcaaggtgagaaagctgcagggcgtggtgagagtgaaggtgagcctgagcaaccaggaggccgtgatcacctaccagccctacctgatccagcccgaggacctgagagaccacgtgaacgacatgggcttcgaggccgccatcaagagcaaggtggcccccctgagcctgggccccatcgacatcgagagactgcagagcaccaaccccaagagacccctgagcagcgccaaccagaacttcaacaacagcgagaccctgggccaccagggcagccacgtggtgaccctgcagctgagaatcgacggcatgcactgcaagagctgcgtgctgaacatcgaggagaacatcggccagctgctgggcgtgcagagcatccaggtgagcctggagaacaagaccgcccaggtgaagtacgaccccagctgcaccagccccgtggccctgcagagagccatcgaggccctgccccccggcaacttcaaggtgagcctgcccgacggcgccgagggcagcggcaccgaccacagaagcagcagcagccacagccccggcagcccccccagaaaccaggtgcagggcacctgcagcaccaccctgatcgccatcgccggcatgacctgcgccagctgcgtgcacagcatcgagggcatgatcagccagctggagggcgtgcagcagatcagcgtgagcctggccgagggcaccgccaccgtgctgtacaaccccagcgtgatcagccccgaggagctgagagccgccatcgaggacatgggcttcgaggccagcgtggtgagcgagagctgcagcaccaaccccctgggcaaccacagcgccggcaacagcatggtgcagaccaccgacggcacccccaccagcgtgcaggaggtggccccccacaccggcagactgcccgccaaccacgcccccgacatcctggccaagagcccccagagcaccagagccgtggccccccagaagtgcttcctgcagatcaagggcatgacctgcgccagctgcgtgagcaacatcgagagaaacctgcagaaggaggccggcgtgctgagcgtgctggtggccctgatggccggcaaggccgagatcaagtacgaccccgaggtgatccagcccctggagatcgcccagttcatccaggacctgggcttcgaggccgccgtgatggaggactacgccggcagcgacggcaacatcgagctgaccatcaccggcatgacctgcgccagctgcgtgcacaacatcgagagcaagctgaccagaaccaacggcatcacctacgccagcgtggccctggccaccagcaaggccctggtgaagttcgaccccgagatcatcggccccagagacatcatcaagatcatcgaggagatcggcttccacgccagcctggcccagagaaaccccaacgcccaccacctggaccacaagatggagatcaagcagtggaagaagagcttcctgtgcagcctggtgttcggcatccccgtgatggccctgatgatctacatgctgatccccagcaacgagccccaccagagcatggtgctggaccacaacatcatccccggcctgagcatcctgaacctgatcttcttcatcctgtgcaccttcgtgcagctgctgggcggctggtacttctacgtgcaggcctacaagagcctgagacacagaagcgccaacatggacgtgctgatcgtgctggccaccagcatcgcctacgtgtacagcctggtgatcctggtggtggccgtggccgagaaggccgagagaagccccgtgaccttcttcgacaccccccccatgctgttcgtgttcatcgccctgggcagatggctggagcacctggccaagagcaagaccagcgaggccctggccaagctgatgagcctgcaggccaccgaggccaccgtggtgaccctgggcgaggacaacctgatcatcagagaggagcaggtgcccatggagctggtgcagagaggcgacatcgtgaaggtggtgcccggcggcaagttccccgtggacggcaaggtgctggagggcaacaccatggccgacgagagcctgatcaccggcgaggccatgcccgtgaccaagaagcccggcagcaccgtgatcgccggcagcatcaacgcccacggcagcgtgctgatcaaggccacccacgtgggcaacgacaccaccctggcccagatcgtgaagctggtggaggaggcccagatgagcaaggcccccatccagcagctggccgacagattcagcggctacttcgtgcccttcatcatcatcatgagcaccctgaccctggtggtgtggatcgtgatcggcttcatcgacttcggcgtggtgcagagatacttccccatcaagaccgtgatgttcgacaagaccggcaccatcacccacggcgtgcccagagtgatgagagtgctgctgctgggcgacgtggccaccctgcccctgagaaaggtgctggccgtggtgggcaccgccgaggccagcagcgagcaccccctgggcgtggccgtgaccaagtactgcaaggaggagctgggcaccgagaccctgggctactgcaccgacttccaggccgtgcccggctgcggcatcggctgcaaggtgagcaacgtggagggcatcctggcccacagcgagagacccctgagcgcccccgccagccacctgaacgaggccggcagcctgcccgccgagaaggacgccgtgccccagaccttcagcgtgctgatcggcaacagagagtggctgagaagaaacggcctgaccatcagcagcgacgtgagcgacgccatgaccgaccacgagatgaagggccagaccgccatcctggtggccatcgacggcgtgctgtgcggcatgatcgccatcgccgacgccgtgaagcaggaggccgccctggccgtgcacaccctgcagagcatgggcgtggacgtggtgctgatcaccggcgacaacagaaagaccgccagagccatcgccacccaggtgggcatcaacaaggtgttcgccgaggtgctgcccagccacaaggtggccaaggtgcaggagctgcagaacaagggcaagaaggtggccatggtgggcgacggcgtgaacgacagccccgccctggcccaggccgacatgggcgtggccatcggcaccggcaccgacgtggccatcgaggccgccgacgtggtgctgatcagaaacgacctgctggacgtggtggccagcatccacctgagcaagagaaccgtgagaagaatcagaatcaacctggtgctggccctgatctacaacctggtgggcatccccatcgccgccggcgtgttcatgcccatcggcatcgtgctgcagccctggatgggcagcgccgccatggccgccagcagcgtgagcgtggtgctgagcagcctgcagctgaagtgctacaagaagcccgacctggagagatacgaggcccaggcccacggccacatgaagcccctgaccgccagccaggtgagcgtgcacatcggcatggacgacagatggagagacagccccagagccaccccctgggaccaggtgagctacgtgagccaggtgagcctgagcagcctgaccagcgacaagcccagcagacacagcgccgccgccgacgacgacggcgacaagtggagcctgctgctgaacggcagagacgaggagcagtacatctag

SEQ ID NO: 329517 - DNA, 4203 bp, Artificial Sequence
  derived and/or modified sequence
atgcccgagcaggagcggcagatcaccgcgcgcgagggcgccagtcgaaagatcctttcaaaactaagtctccctaccagagcttgggagccagcgatgaagaaatctttcgcctttgacaatgtgggctacgagggcggactggacggactgggccctagtagccaggtggctacctccaccgttcgtatcctgggcatgacctgccagagctgtgttaagtccatcgaagacagaatctcaaacctgaaaggcattatcagtatgaaagtgtcgttggagcaggggagcgcgaccgtgaagtacgtgcccagcgtcgtatgtctccagcaggtgtgccatcaaatcggagatatggggtttgaggctagcatcgccgaaggaaaagcggcctcttggcccagccgaagcctgccagcacaggaggcggtcgtcaagctgcgcgtagagggcatgacctgccagtcctgcgttagctctatagagggtaaagtccggaagcttcagggagttgtacgtgtcaaggtgtcgctttctaaccaagaagcggttatcacttatcagccttatctcatccagccggaagacctgagagatcatgtaaatgatatgggttttgaagccgctattaaatcaaaagtcgcccctctcagtttaggcccaattgatatcgaacgtctccaatccaccaatccaaagaggccactgagctctgctaatcagaacttcaacaattcagagactttaggacaccagggctctcatgttgtgactctgcaactgcggattgacggcatgcactgcaagtcatgtgtactgaatattgaggagaacatcgggcagcttttgggggttcagtctattcaggtctccctggaaaataaaaccgctcaagtgaaatacgacccttcgtgtaccagtccggttgcgttacaacgcgccatagaggctctacctcctggtaactttaaagtttctctgccagacggggcagaggggtctggcacagaccacaggtccagctcctctcactcccctggctccccaccgaggaatcaggtccaaggcacttgctcaactacactgatagccatcgcaggcatgacatgtgctagttgtgtacatagcattgagggcatgatatcccaactggagggcgtgcagcagatctccgtatctctagcagagggcaccgccacagtcttatataatccatctgtgattagtcctgaggagttgcgcgcagctattgaagacatggggttcgaggcctcagtggtttccgagagctgcagtacgaatccactgggcaaccactcagctggtaattctatggtgcagacaaccgatggcacgcctacgtctgtgcaagaagttgcgccacacactgggcgactgcctgccaaccacgcccccgacattctggcaaagtcaccccaaagcacaagggccgtggcaccacagaaatgctttctccagattaaaggaatgacttgtgcctcttgtgtgagtaacattgagcgaaatttgcagaaggaagctggggtgttgtcagtgctggtagccttgatggccggcaaagccgagatcaaatacgatcccgaggtgatccagcctctggagatagctcaatttattcaagacctgggtttcgaagccgctgtgatggaggattacgccggctccgacgggaacatcgagcttaccattaccggcatgacctgtgccagttgtgtgcataacattgagtctaagctgacccggactaatggtattacgtatgcctctgtggccttggccaccagtaaggcgctggtgaaattcgacccagagatcatcggtcctagggacattatcaaaataatcgaagagatagggttccacgcttcactggcccagaggaacccaaacgcacaccatcttgaccacaagatggagattaaacagtggaaaaaatcttttctgtgtagcctggtattcgggatacccgtcatggctctcatgatttacatgttaatcccaagtaacgaacctcaccaatccatggtcttggaccataatatcatacccggtcttagcatccttaacctgattttctttattttgtgcacattcgtccaactgctcgggggttggtatttttacgtccaggcctacaagtcgctccgccaccgatctgctaacatggatgtgcttattgtgctggctacctccattgcgtacgtgtactccctggtcattctcgtagtggcggtggctgagaaagctgaacggagccctgtcacctttttcgacacaccacccatgctcttcgtttttatcgctctagggcgttggttggaacatctggctaaatccaagaccagcgaggccctggccaagttaatgtctttgcaagccaccgaagctaccgtggtcactctgggcgaagataacttgataatcagggaggagcaggtcccgatggaactggtacagcgcggggatatcgtaaaggtggttcccggggggaaatttcccgtcgacggcaaagttttagaggggaacacaatggccgatgagtcccttatcaccggggaagccatgcccgttacaaagaagcctggttccactgttatagcaggaagtattaacgcccatggctcagtcctgattaaggcaactcatgtaggcaatgacacaaccctggctcagatcgtgaaactagtggaagaagcccagatgtcaaaggcccctattcagcagctggccgacaggttctcaggatacttcgtgcctttcattatcattatgagcactttgaccctggtggtttggatagtaatcggcttcattgatttcggagtggtgcagcgatatttccctatcaaaactgtgatgttcgataaaactgggacaatcacacacggagtgcccagagttatgcgcgtgctgctgcttggcgatgtggccacgctgccattaaggaaagttctggccgtggttggcaccgcagaggcctctagtgagcatcccctgggggtggccgtgactaaatactgcaaggaggagctgggcacagaaacacttggctattgcacggactttcaggctgtcccaggttgcggtattggttgcaaagtgtcaaatgtggaaggaattctggcacactccgagagacccctctccgccccggccagccatctgaacgaagctggatcgcttcctgcggaaaaggatgccgtgccacagacattctcggtactgatcggaaacagagagtggctccgccgaaacgggttgacaatatccagtgatgtgtcagacgcaatgacggaccatgagatgaaaggccagacagcgatcctcgtggctattgatggggtgctgtgtggtatgatcgcaatcgcagacgccgtcaaacaggaagccgccctggctgtgcatactctgcaatccatgggagtggacgttgtcctgattacaggagataaccgtaagaccgccagggctatcgcaacccaggtgggcataaataaagtgttcgctgaggtgctgccaagccataaggtggctaaggtgcaggaactacagaataaaggtaagaaggtggccatggtaggagacggagtgaacgactcccctgctttggcacaggcagatatgggagtcgctatcgggaccgggaccgacgtggccattgaagctgcagatgttgttctgataaggaacgacctgcttgacgttgtcgctagtatccacttaagcaagcggaccgtgagacgtatacgcataaacttagttttggccctgatttacaacctggtggggatacctatcgccgcaggagtctttatgcccattggcattgttctacagccatggatgggttcagcagctatggccgcctcatccgtatctgtcgtcctgagctcactccagctgaaatgttataagaagcctgatctggaaaggtacgaggcccaggctcacggccatatgaaaccacttacagcaagccaagtctccgtacacattgggatggacgacagatggcgggactcaccccgtgccaccccctgggatcaggtgagttacgtctcacaggtaagcttgtcctccttaacttcagacaaaccgtccaggcactccgcagcagccgacgacgacggcgacaaatggtcccttctgctcaacggtcgcgatgaagagcaatatatatag

SEQ ID NO: 329518 - DNA, 4340 bp, Artificial Sequence
  derived and/or modified sequence
cgctctcctccaccgaccaggtgaccttttgctctgagccagatcagagaagaattcggtgtccgtgcgggacgatgcctgagcaggagagacagatcacagccagagaaggggccagtcggaaaatcttatctaagctttctttgcctacccgtgcctgggaaccagcaatgaagaagagttttgcttttgacaatgttggctatgaaggtggtctggatggcctgggcccttcttctcaggtggccaccagcacagtcaggatcttgggcatgacttgccagtcatgtgtgaagtccattgaggacaggatttccaatttgaaaggcatcatcagcatgaaggtttccctggaacaaggcagtgccactgtgaaatatgtgccatcggttgtgtgcctgcaacaggtttgccatcaaattggggacatgggcttcgaggccagcattgcagaaggaaaggcagcctcctggccctcaaggtccttgcctgcccaggaggctgtggtcaagctccgggtggagggcatgacctgccagtcctgtgtcagctccattgaaggcaaggtccggaaactgcaaggagtagtgagagtcaaagtctcactcagcaaccaagaggccgtcatcacttatcagccttatctcattcagcccgaagacctcagggaccatgtaaatgacatgggatttgaagctgccatcaagagcaaagtggctcccttaagcctgggaccaattgatattgagcggttacaaagcactaacccaaagagacctttatcttctgctaaccagaattttaataattctgagaccttggggcaccaaggaagccatgtggtcaccctccaactgagaatagatggaatgcattgtaagtcttgcgtcttgaatattgaagaaaatattggccagctcctaggggttcaaagtattcaagtgtccttggagaacaaaactgcccaagtaaagtatgacccttcttgtaccagcccagtggctctgcagagggctatcgaggcacttccacctgggaattttaaagtttctcttcctgatggagccgaagggagtgggacagatcacaggtcttccagttctcattcccctggctccccaccgagaaaccaggtccagggcacatgcagtaccactctgattgccattgccggcatgacctgtgcatcctgtgtccattccattgaaggcatgatctcccaactggaaggggtgcagcaaatatcggtgtctttggccgaagggactgcaacagttctttataatccctctgtaattagcccagaagaactcagagctgctatagaagacatgggatttgaggcttcagtcgtttctgaaagctgttctactaaccctcttggaaaccacagtgctgggaattccatggtgcaaactacagatggtacacctacatctgtgcaggaagtggctccccacactgggaggctccctgcaaaccatgccccggacatcttggcaaagtccccacaatcaaccagagcagtggcaccgcagaagtgcttcttacagatcaaaggcatgacctgtgcatcctgtgtgtctaacatagaaaggaatctgcagaaagaagctggtgttctctccgtgttggttgccttgatggcaggaaaggcagagatcaagtatgacccagaggtcatccagcccctcgagatagctcagttcatccaggacctgggttttgaggcagcagtcatggaggactacgcaggctccgatggcaacattgagctgacaatcacagggatgacctgcgcgtcctgtgtccacaacatagagtccaaactcacgaggacaaatggcatcacttatgcctccgttgcccttgccaccagcaaagcccttgttaagtttgacccggaaattatcggtccacgggatattatcaaaattattgaggaaattggctttcatgcttccctggcccagagaaaccccaacgctcatcacttggaccacaagatggaaataaagcagtggaagaagtctttcctgtgcagcctggtgtttggcatccctgtcatggccttaatgatctatatgctgatacccagcaacgagccccaccagtccatggtcctggaccacaacatcattccaggactgtccattctaaatctcatcttctttatcttgtgtacctttgtccagctcctcggtgggtggtacttctacgttcaggcctacaaatctctgagacacaggtcagccaacatggacgtgctcatcgtcctggccacaagcattgcttatgtttattctctggtcatcctggtggttgctgtggctgagaaggcggagaggagccctgtgacattcttcgacacgccccccatgctctttgtgttcattgccctgggccggtggctggaacacttggcaaagagcaaaacctcagaagccctggctaaactcatgtctctccaagccacagaagccaccgttgtgacccttggtgaggacaatttaatcatcagggaggagcaagtccccatggagctggtgcagcggggcgatatcgtcaaggtggtccctgggggaaagtttccagtggatgggaaagtcctggaaggcaataccatggctgatgagtccctcatcacaggagaagccatgccagtcactaagaaacccggaagcactgtaattgcggggtctataaatgcacatggctctgtgctcattaaagctacccacgtgggcaatgacaccactttggctcagattgtgaaactggtggaagaggctcagatgtcaaaggcacccattcagcagctggctgaccggtttagtggatattttgtcccatttatcatcatcatgtcaactttgacgttggtggtatggattgtaatcggttttatcgattttggtgttgttcagagatactttcctataaagactgtgatgtttgacaagactggcaccattacccatggcgtccccagggtcatgcgggtgctcctgctgggggatgtggccacactgcccctcaggaaggttctggctgtggtggggactgcggaggccagcagtgaacaccccttgggcgtggcagtcaccaaatactgtaaagaggaacttggaacagagaccttgggatactgcacggacttccaggcagtgccaggctgtggaattgggtgcaaagtcagcaacgtggaaggcatcctggcccacagtgagcgccctttgagtgcaccggccagtcacctgaatgaggctggcagccttcccgcagaaaaagatgcagtcccccagaccttctctgtgctgattggaaaccgtgagtggctgaggcgcaacggtttaaccatttctagcgatgtcagtgacgctatgacagaccacgagatgaaaggacagacagccatcctggtggctattgacggtgtgctctgtgggatgatcgcaatcgcagacgctgtcaagcaggaggctgccctggctgtgcacacgctgcagagcatgggtgtggacgtggttctgatcacgggggacaaccggaagacagccagagctattgccacccaggttggcatcaacaaagtctttgcagaggtgctgccttcgcacaaggtggccaaggtccaggagctccagaataaagggaagaaagtcgccatggtgggggatggggtcaatgactccccggccttggcccaggcagacatgggtgtggccattggcaccggcacggatgtggccatcgaggcagccgacgtcgtccttatcagaaatgatttgctggatgtggtggctagcattcacctttccaagaggactgtccgaaggatacgcatcaacctggtcctggcactgatttataacctggttgggatacccattgcagcaggtgtcttcatgcccatcggcattgtgctgcagccctggatgggctcagcggccatggcagcctcctctgtgtctgtggtgctctcatccctgcagctcaagtgctataagaagcctgacctggagaggtatgaggcacaggcgcatggccacatgaagcccctgacggcatcccaggtcagtgtgcacataggcatggatgacaggtggcgggactcccccagggccacaccatgggaccaggtcagctatgtcagccaggtgtcgctgtcctccctgacgtccgacaagccatctcggcacagcgctgcagcagacgatgatggggacaagtggtctctgctcctgaatggcagggatgaggagcagtacatctgatgacttcaggcaggcgggccggggcagggacttgcctccactcaccacaagctgagcaggaca

SEQ ID NO: 329519 - DNA, 4203 bp, Artificial Sequence
  derived and/or modified sequence
atgcctgagcaggagcggcagatcacagcccgggagggcgccagcaggaagatcctgagcaagctgagcctgcccacccgggcctgggagcccgccatgaagaagagctttgcctttgacaacgtgggctatgagggcggcctggatggcctgggccccagcagccaggtggccaccagcacagtgcgcatcctgggcatgacctgccagagctgtgtgaagagcattgaagatcgcatcagcaacctgaagggcatcatctccatgaaggtgtccctggagcagggcagcgccaccgtgaagtatgtgcccagcgtggtgtgcctgcagcaggtgtgccaccagatcggggacatgggctttgaggccagcattgctgagggcaaggccgcctcctggcccagccgcagcctgcctgcccaggaggccgtggtgaagctgcgggtggagggcatgacctgccagagctgtgtgagcagcattgagggcaaggtgaggaagctgcagggcgtggtgcgggtgaaggtgtccctgagcaaccaggaggccgtcatcacctaccagccctacctgatccagcctgaggacctgcgggaccacgtgaatgacatgggctttgaggccgccatcaagagcaaggtggcccccctgagcctgggccccatcgacatcgagcggctgcagagcaccaaccccaagaggcccctgagcagcgccaaccagaacttcaacaacagcgagaccctgggccaccagggcagccacgtggtgaccctgcagctgagaattgatggcatgcactgcaagagctgtgtgctgaacattgaagaaaatattggccagctgctgggcgtgcagagcatccaggtgtccctggagaacaagacagcccaggtgaagtatgaccccagctgcaccagccctgtggccctgcagagggccatcgaggccctgcccccaggcaacttcaaggtgtccctgcctgatggagctgagggcagcggcacagaccacaggagcagcagcagccacagccctggcagccccccaagaaaccaggtgcagggcacctgcagcaccaccctgattgccatcgccggcatgacctgtgccagctgtgtgcacagcattgagggcatgatcagccagctggagggcgtgcagcagatctctgtgtccctggccgagggcacagccaccgtgctgtacaaccccagcgtcatcagccctgaggagctgcgggccgccatcgaggacatgggctttgaggcctctgtggtgtctgagagctgcagcaccaaccccctgggcaaccacagcgctggcaacagcatggtgcagaccacagatggcacccccacctctgtgcaggaggtggccccccacacaggccgcctgcctgccaaccacgccccagacatcctggccaagagcccccagagcaccagggctgtggccccccagaagtgcttcctgcagatcaagggcatgacctgtgccagctgtgtgagcaacatcgagaggaacctgcagaaggaggccggcgtgctgtctgtgctggtggccctgatggccggcaaggccgagatcaagtatgaccctgaggtgatccagcccctggagatcgcccagttcatccaggacctgggctttgaagctgctgtgatggaggactatgccggcagtgatggcaacatcgagctgaccatcaccggcatgacctgtgccagctgtgtgcacaacatcgagagcaagctgaccaggaccaacggcatcacctacgcctctgtggccctggccaccagcaaggccctggtgaagtttgatcctgagatcatcggcccccgggacatcatcaagatcatcgaggagatcggcttccacgccagcctggcccagaggaaccccaatgcccaccacctggaccacaagatggagatcaagcagtggaagaagagcttcctgtgcagcctggtgtttggcatccctgtgatggccctgatgatctacatgctgatccccagcaatgagccccaccagagcatggtgctggaccacaacatcatccctggcctgagcatcctgaacctgatcttcttcatcctgtgcacctttgtgcagctgctgggcggctggtacttctacgtgcaggcctacaagagcctgcggcacaggtctgccaacatggatgtgctgattgtgctggccaccagcatcgcctacgtgtacagcctggtgatcctggtggtggccgtggccgagaaggccgagaggagccctgtgaccttctttgacaccccacccatgctgtttgtgttcatcgccctgggccgctggctggagcacctggccaagagcaagaccagcgaggccctggccaagctgatgagcctgcaggccacagaggccaccgtggtgaccctgggggaggacaacctgatcatccgggaggagcaggtgcccatggagctggtgcagagaggagacatcgtgaaggtggtgcctgggggcaagtttcctgtggatggcaaggtgctggagggcaacaccatggctgatgagagcctcatcaccggggaggccatgcctgtgaccaagaagccaggcagcacagtgattgctggcagcatcaatgcccacggctctgtgctgatcaaggccacccacgtgggcaatgacaccaccctggcccagatcgtgaagctggtggaggaggcccagatgagcaaggcccccatccagcagctggccgaccgcttcagcggctactttgtgcccttcatcatcatcatgagcaccctgaccctggtggtgtggatcgtcatcggcttcatcgactttggagtggtgcagcgctacttccccatcaagacagtgatgtttgacaagacaggcaccatcacccatggagtgccccgggtgatgagggtgctgctgctgggagatgtggccaccctgcccctgaggaaggtgctggccgtggtgggcacagctgaggccagcagcgagcaccccctgggcgtggccgtgaccaagtactgcaaggaggagctgggcacagagaccctgggctactgcacagacttccaggccgtgcccggctgcggcatcggctgcaaggtgtccaatgtggagggcatcctggcccacagcgagcggcccctgagcgccccagccagccacctgaatgaagctggcagcctgcctgctgagaaggatgctgtgccccagaccttctctgtgctgattggcaaccgggagtggctgcggagaaatggcctgaccatcagcagtgatgtgtctgatgccatgacagaccacgagatgaagggccagacagccatcctggtggccattgatggagtgctgtgtggcatgattgccatcgcagatgctgtgaagcaggaggccgccctggccgtgcacaccctgcagagcatgggcgtggatgtggtgctgatcactggagacaacaggaagacagcccgggccatcgccacccaggtgggcatcaacaaggtgtttgctgaggtgctgcccagccacaaggtggccaaggtgcaggagctgcagaacaagggcaagaaggtggccatggtgggagatggagtgaatgacagccctgccctggcccaggccgacatgggcgtggccatcggcactggaacagatgtggccattgaagctgctgatgtggtgctgatcagaaatgacctgctggatgtggtggccagcatccacctgagcaagaggacagtgcggcgcatccgcatcaacctggtgctggccctgatctacaacctggtgggcatccccatcgctgctggggtcttcatgcccatcggcatcgtgctgcagccctggatgggcagcgctgccatggccgccagctctgtgtctgtggtgctgagcagcctgcagctgaagtgctacaagaagccagacctggagagatatgaggcccaggcccacggccacatgaagcccctgacagccagccaggtgtctgtgcacatcggcatggatgaccgctggagggacagcccccgggccaccccctgggaccaggtgtcctatgtgtcccaggtgtccctgagcagcctgaccagtgacaagcccagccgccacagcgctgctgctgatgatgatggagacaagtggagcctgctgctgaatggaagagatgaggagcagtacatctag

SEQ ID NO: 329520 - DNA, 4203 bp, Artificial Sequence
  derived and/or modified sequence
atgcccgagcaggagcggcagatcaccgcccgggagggcgccagccgaaagattctgtccaagctttcgctgccaacccgggcttgggagccagccatgaaaaaatccttcgcttttgacaatgtcgggtacgagggagggctggacggcctgggccctagttcccaagtagcaacttccacggttcgaattctgggaatgacatgtcagagttgcgtgaagtctattgaagaccgcattagcaacctgaaagggatcatatctatgaaagtcagtctcgagcaggggagcgcaaccgtcaagtacgtgccctctgtagtttgcctgcagcaggtctgtcaccagataggggatatgggttttgaggcttctattgctgagggcaaggccgcctcttggccctcacgctcactaccagcccaggaggcagtagtcaagctgagggtcgagggaatgacctgtcagagttgcgtctcctcaattgaagggaaagtgcggaaattacagggggtggttagagtcaaggtgtccctttccaatcaagaagccgtgatcacttaccaaccatatctgattcaacctgaagatctgcgagatcatgtaaatgatatgggattcgaagccgccattaagtcaaaagttgctcccttgagcttgggcccaatcgatatcgagaggctgcaatcaacaaacccaaagcgacccctatcaagtgccaatcagaactttaataactccgagacactgggccatcagggaagccacgtggtgacactgcagctccgtattgacgggatgcactgtaaatcatgtgtattgaatattgaggaaaatataggccagctcttgggtgtgcagtcaatccaagtttccttggagaataagactgctcaggttaagtacgatccctcgtgtacctctccggtggccctacagagggcaatcgaggcccttccccctgggaatttcaaagtctccttgcccgatggtgctgagggctccggaaccgaccaccgcagcagcagctctcattctcccggttctcctcctcgcaaccaggtacagggaacttgttcaaccacattgatcgccatcgctggaatgacctgcgcctcctgcgttcacagtatcgaaggcatgatctcccagctcgaaggagttcaacaaatatcagtgtctttggccgaaggcaccgcaacagttctgtataatccaagcgtgatttcccccgaggagcttagggccgctattgaggatatgggcttcgaagcctcagtggtgagtgaaagttgcagcactaacccactaggcaaccatagtgcgggaaatagcatggtgcagacaactgatggaacacccacttccgtgcaggaggtcgccccccacactggcaggttgcctgctaaccatgcacctgacatacttgccaagtcaccacagtccacccgggccgtggcgcctcagaagtgcttcctgcagatcaaggggatgacatgtgcttcttgtgtttccaatatcgagaggaatcttcagaaggaggcgggcgtgctgagtgtgcttgtggccctgatggcaggcaaggccgagattaagtacgatccagaggtgatacagccacttgagatagcccagttcattcaggacttgggcttcgaggctgccgtaatggaggactatgcaggtagtgacggcaacatcgaacttacaatcaccggcatgacatgcgcgtcatgcgttcataacatcgagagcaaacttaccaggaccaacggaatcacatacgcttctgttgccctagccacatcaaaagcccttgttaagtttgatccagaaatcataggacctagagacattataaagattattgaggaaatagggttccacgcatcgttggctcagagaaaccccaatgcacatcatctcgatcataaaatggaaataaagcagtggaaaaaaagtttcctttgttcactagtgtttggtatacccgtgatggccttaatgatctacatgcttatacccagtaatgaaccgcatcagagcatggttctcgatcacaatatcattcccgggctgagcatcctaaatctgattttctttatcctatgtacttttgtccagctcctcggggggtggtacttctacgtgcaggcatacaaaagccttcgacatcgtagtgccaatatggacgtcttgattgtgctggccacctcaatcgcctacgtttactcacttgttatactggtggtggccgtggccgagaaagcggagaggagcccagtgacattctttgatacaccccctatgctcttcgtttttatcgctctcggtaggtggctggagcacttggcaaaaagcaaaacttccgaagccctcgcgaagctgatgtccctgcaggccactgaggcaacagtcgtgactttgggtgaggacaatttgataatccgggaggaacaggtccccatggagctggttcaaagaggcgatattgtcaaggttgtgcccggaggaaaattccccgtcgacggcaaggtgctcgaggggaatacaatggccgatgagtctctgatcactggagaggctatgcccgtgacaaaaaaaccagggtctacggtaatcgccggctccataaatgcacatgggtcagtactgataaaagcaacgcatgtaggtaatgacacaaccctggcccagatcgtcaagctggttgaagaggcacaaatgtctaaagctcctatacagcagcttgcagaccgtttttccgggtatttcgtgccattcattatcattatgtcgacactgaccctggtggtgtggatagtaattggttttatcgactttggagtcgtgcagcgttactttcctatcaagactgttatgttcgataagactggaaccattacccatggggtgcccagagtgatgcgcgtgctgctcctcggcgacgttgccaccctacctctgagaaaggtgctagctgtagtcgggaccgctgaagcctcttccgagcatcctctaggcgttgccgtgaccaagtactgtaaggaggaattggggacagagactcttgggtactgtacagacttccaggctgtgcctgggtgcgggatagggtgtaaggttagtaacgtcgaaggcatcttagcccatagcgaacggcccctgtctgcccctgctagtcaccttaacgaggcagggagtctgcctgccgaaaaggacgccgtgcctcaaacgtttagcgtgctcattggaaatagagagtggctgagacgtaatgggctgactatttctagcgacgtgtctgatgctatgaccgaccacgaaatgaaaggccagactgcaatcctcgtagcgattgacggagtgctgtgtgggatgattgccatagctgacgcagtgaaacaggaagctgccctggcagtgcacacgctgcagtcaatgggcgtggatgtcgtgctcattacgggggacaacagaaagacggccagggctatcgccacgcaggtaggcattaacaaggttttcgccgaggtgctgccctctcacaaagtggctaaagtgcaggaactgcaaaataaaggcaagaaagtggcgatggtcggtgacggagtgaacgactctccagctctggcccaggccgacatgggcgtggctatcggaaccggaaccgatgtggcaattgaagccgccgacgtggtactcattagaaacgacctcttagatgtggtggcctccatacacctctcaaagcgtactgtgcggcgcattagaataaacctagtcttagctctgatctataacctggtaggcatccctatcgcggcaggggtgtttatgcctattggaatcgtgcttcagccctggatggggtcagcagcaatggcagcctcttcagtcagcgtggtcctatctagtctgcaactgaagtgttacaagaaacctgatcttgagcgatatgaagctcaggcccacggacacatgaaacctctcaccgccagtcaagtgtccgtacacattggtatggatgaccgatggagagattcccctagggctacaccatgggatcaggtaagctatgtttcccaggtctcactaagcagtttaaccagcgacaagcccagcagacactccgctgccgctgatgatgatggggacaagtggtctcttctgctgaatggtcgtgacgaagaacagtacatctag

SEQ ID NO: 329521 - DNA, 4203 bp, Artificial Sequence
  derived and/or modified sequence
atgcctgagcaggagaggcagatcactgcacgcgaaggagcctccaggaaaattctgtccaagctgagtctccctactcgtgcctgggagcctgctatgaagaaatcctttgcctttgacaacgtggggtacgaaggtgggcttgatggcttgggacctagctctcaggtcgcaaccagtaccgtacggatcctcggtatgacatgccaatcctgcgttaagtccatcgaggacagaatctctaatctgaaaggcatcatctccatgaaagtttccctagaacaggggagcgcaactgtgaagtatgtaccatctgtcgtctgcctgcagcaggtttgccaccagataggcgatatggggttcgaggcaagcattgccgaggggaaagctgcgagctggccatcacgatccctacctgctcaggaagctgttgtgaaactgcgggtcgaagggatgacctgccagtcgtgtgtctccagtatcgagggtaaggtgaggaaactgcagggagtggtccgggtgaaggtttccctgtctaaccaggaggccgttatcacctaccagccctacctcatccagcccgaggatctgagagatcatgttaacgatatggggtttgaggccgctattaaatccaaagtcgccccactgagtctcgggccaattgatattgagaggctacagtctaccaaccccaaacggccactgagctctgccaaccaaaactttaataattcggagacattaggccaccaggggtctcacgtagtgactcttcagttacgaattgacggaatgcactgtaagtcatgtgtccttaacatcgaggagaatatcggtcaactgctaggcgtccagagtattcaagtttccttggagaacaagactgcccaagtgaagtatgatccatcctgtacaagtcctgtggcactgcaaagggcaatagaggcactgccacccggaaattttaaggtcagcttgcccgacggcgctgaaggcagcggcaccgatcatagaagttctagttctcactcccccggaagtcccccaaggaaccaagtacaggggacctgctccacaacactaatcgctattgccggaatgacttgcgcctcttgtgtgcatagtatcgagggaatgatctcacagctggaaggggtccagcaaatatcagtcagcttggcggagggcacagctacggttctgtacaatccttcagttatcagtcccgaagaactgcgggcagcaatcgaggacatgggcttcgaagctagcgtagtatctgagtcctgctcaacaaatcccctgggtaatcattcggccggtaacagtatggtacaaaccacagatggtacccccacatcggtacaggaggtcgccccacatacggggagactgccggctaatcatgcaccagatatactggctaaaagcccacagtcgacgcgggctgtcgcaccgcaaaagtgtttcctacagatcaaaggtatgacctgcgcatcctgcgtttcgaacatcgagcggaacctccagaaggaagcaggcgtgttatctgtgctcgtggcactgatggcgggtaaggccgagataaagtatgaccccgaagtgatccagcccctggaaattgcccagttcattcaggatcttggattcgaggccgctgtgatggaggactatgcgggtagtgatggcaacattgaactgacaattaccggcatgacctgtgcatcatgtgttcataatattgagagcaagctcacccgtacgaatgggatcacatatgccagcgtggccttggccacttccaaggccctggttaagtttgatcctgaaatcattgggcctagagatatcatcaaaatcatcgaagagatcggttttcacgcctcactggctcagaggaatccaaacgcacatcacctggaccacaagatggaaatcaaacagtggaagaaatcctttctgtgttctttagtcttcggtatacctgttatggcattgatgatctatatgctgatcccgtctaatgaaccccaccaaagcatggtgctggatcacaatattattccgggattatccatactcaacctcattttttttattttatgcacgttcgtgcaactcctggggggatggtatttctacgtccaagcctacaagagtttaaggcatcggagtgctaatatggacgtcttgatcgtccttgccacgtctatagcctatgtctatagtctggtcattctggttgttgctgttgccgagaaagcagaaagaagtcctgtaacattctttgatacccccccaatgctgtttgtgttcatagccttgggccgatggctagaacacctggcaaagtccaagactagcgaggccttggcgaaattaatgtctttacaggctaccgaagccactgtcgtgactctcggagaagataacctcataatccgggaagagcaggtaccaatggagctggtgcagcggggagatatagttaaggtggtgcccggaggcaaattcccagtagacggaaaagttttagaaggaaacacgatggccgacgaaagcctcataaccggagaagcaatgccagtgaccaagaagccagggtccacagtcatcgccggaagtatcaatgctcacgggtcagtcctgatcaaagcgacccatgtagggaacgacacaaccctggcccagatcgtaaaattagtcgaggaagcacagatgagcaaagctcccattcagcagctggccgacagattctcagggtactttgtgcctttcattattatcatgagcaccctgaccctggtggtctggatcgtcattgggtttattgacttcggggtagtgcaacgctatttccccattaaaacagtaatgtttgacaaaaccggcaccatcactcatggcgtgccaagagtcatgcgggtcctcctcctgggtgacgtggctactctgcccctgagaaaggtgttagccgtggtgggaaccgccgaagcaagcagcgaacacccactgggggtggccgtcactaagtactgtaaagaagaattgggcaccgagaccctgggctactgtactgactttcaggcagtgccagggtgcggtattgggtgtaaagtgtcgaatgtcgagggtatactggcacattctgagcgccctcttagcgccccagcgtcccatctaaatgaggcgggatctttacccgctgaaaaagacgcagtgccccagaccttctctgtgctcatagggaatagagaatggctgagaagaaatggtctgacaattagctccgatgtgtcagacgcaatgacagaccacgaaatgaagggacagacagccatcctagttgccatcgacggagtgctgtgtgggatgatagctatcgctgacgccgtgaagcaggaggctgccctcgcagttcacaccctacagtctatgggcgtggacgtggtgctgattactggcgacaatcgcaagactgcccgagccattgcgacccaggtcggaattaacaaggtgttcgcagaggttctgcctagtcacaaagtggcgaaggtacaagaattgcaaaacaaaggaaagaaggtagcaatggtcggggacggagtgaatgattccccagctctggcccaggcagacatgggagtagccatcggaacgggtaccgacgtagctattgaggccgctgacgtggtgctgataaggaacgatctcctcgatgtggtggcatctattcacctgtctaaacggacagtccgcagaattaggatcaatctcgtactggctctcatatacaatttggtgggaattcccatcgcagcaggagtgttcatgccaataggcattgtcctacagccctggatgggatccgctgccatggctgcttcatctgtgagcgtggtgctttccagcctgcagctgaagtgctataagaagcccgacctcgaaaggtacgaagcccaggcgcatgggcatatgaagcccttgactgcatcccaagtgagcgtgcatattggtatggacgatcgctggcgggatagtcccagggccactccatgggaccaagtgtcttacgtgagccaggtttcattgtcttctttaacctccgataagccttctcgccacagcgccgctgccgacgatgatggtgataagtggtctttgttgctgaacggcagagacgaggagcagtatatctag

SEQ ID NO: 329522 - DNA, 4203 bp, Artificial Sequence
  derived and/or modified sequence
atgccagagcaggagcgtcagatcacagcacgcgagggcgcaagccgcaaaattctgagcaagctatcactaccgaccagggcctgggaacccgcgatgaagaaaagtttcgcatttgacaacgttggctatgaggggggcctggacggtcttggaccctcttcccaggtggcgacctcgacggtcagaattcttgggatgacgtgtcagtcatgcgtgaaatcaatcgaggaccggatcagtaatctcaagggaataatttccatgaaagtgagtctggagcagggctccgcgacagtgaagtacgtcccaagcgtcgtgtgccttcagcaggtgtgccatcagattggtgatatgggattcgaagcctcaatcgccgaaggcaaagcggcgagttggcccagcagatcgcttccagcacaggaggctgtggtcaagctccgggttgaagggatgacctgtcagagctgtgtaagctcaatagaaggaaaagtgcgaaaactacagggggtcgtgagagtaaaggtctcgttaagtaaccaagaagcagtcattacctaccagccctatttaattcaaccagaagacctgagagatcacgtgaacgacatgggctttgaagccgcaattaaatctaaggtcgcacctttgagtctgggccctatcgatatcgaaagactgcagtctaccaatccgaaaaggcccctttccagtgccaatcagaacttcaataatagcgaaaccctggggcatcaaggcagtcatgtggtgacgttgcagctacgtattgatggaatgcactgcaaaagctgcgtcctcaacatagaagaaaatatcggccagctgctgggagtgcagagtatccaggtgagtctggaaaataagactgctcaggtcaaatacgacccaagctgtacctcaccagttgcactgcagcgcgccatagaagcgctccctcctgggaacttcaaggtttcattgccagatggcgccgagggcagcggaactgatcaccgaagctccagttcccattccccagggagtccacccaggaatcaggtgcaaggcacttgctctaccacactcatcgctatcgctggaatgacatgcgcaagctgtgttcactcgattgaaggcatgatatctcagctcgagggcgtccagcaaattagtgtgtccctagctgaagggaccgctacagtgctttacaatcccagcgtaatctcccctgaggaactgcgcgcagcgattgaggatatgggttttgaagcctctgtggtgtctgaatcctgctcaacaaatcccttaggcaatcactcagcggggaacagcatggtacagacaacagacggaacacctaccagcgtgcaagaggttgccccccacacaggtaggttgcccgccaaccacgctccagacatcttagcaaagtctccacagtccacccgtgccgttgctccacaaaaatgtttcttacagattaaaggcatgacatgtgcttcttgcgtctccaatatagaacgcaacctgcaaaaggaagccggcgtactgtcagtgctggtggcccttatggctggcaaggccgagatcaaatatgacccagaggtaatacagccccttgaaattgctcagtttattcaggatcttggctttgaagctgccgttatggaggactacgcagggagtgacggcaatattgaattgaccattacaggaatgacttgtgcctcctgtgtgcacaacatcgagtccaagttaaccagaaccaatggcattacatatgcatccgtcgcactggctacaagtaaggccctcgttaagttcgatccagaaatcatcggacctcgcgacatcatcaagatcatcgaggagatcgggtttcatgctagcctcgcccaaagaaaccccaacgcgcatcatttggatcacaaaatggagatcaaacaatggaaaaaaagttttttatgtagccttgtctttgggatccccgtgatggccctaatgatttacatgctgatcccatcgaacgagccccatcagtctatggttctggaccacaatattatccccggcctgtcgattctcaacctgatcttcttcattctttgcacatttgtccagctgttagggggctggtacttctacgtgcaggcctataaaagcctgaggcaccgatctgcaaacatggacgtcctgattgtcctggctaccagcattgcctacgtgtactctctggtgattctcgtggtcgctgtggcagaaaaagcagagcgcagtccggtcaccttttttgacaccccccccatgttattcgtctttatcgcattgggacgatggttagagcatctggccaagtctaagacaagcgaggcattggccaagctcatgtctctgcaagctacggaagcaaccgtggtcactctaggcgaagacaacctgatcatacgggaggaacaggtgcctatggagctggttcagagaggtgatattgtcaaggttgtcccaggaggaaaatttccagttgacgggaaagtgctggagggaaacacaatggccgacgagtccctgatcacaggggaagcaatgcccgtgactaagaaaccgggctctacagtcatcgccggctcaataaacgcccacggctctgttctgataaaagcaacccacgttggaaatgatactacactcgcacagatcgttaagctggtcgaagaggcgcagatgtctaaggcaccaattcaacaactcgctgaccgatttagcggttacttcgttccttttatcatcatcatgtccacacttactttggtcgtgtggatcgtcattggtttcatcgatttcggcgtggtccaacgctacttccccatcaaaacggtgatgtttgacaagaccggaaccatcacccatggagttccccgtgtgatgagagtcctcctacttggagatgtggccactcttcctttacgaaaagtgttagccgtagtggggactgcagaggcaagcagcgagcaccctctgggcgtagccgtgaccaagtactgcaaggaagagctagggaccgaaacactggggtattgtaccgactttcaagccgtgccaggatgtgggattggctgtaaggtcagtaacgtcgaaggcatcttagctcacagtgagcgtcccctctcagcccccgccagtcacttaaacgaagctggctcccttcccgctgaaaaagatgcggttccacagacatttagcgtgctcatcgggaacagagaatggctccgtagaaacggtctcacgatcagtagcgatgtcagtgacgcgatgaccgatcacgaaatgaaaggccagacggctattctcgtggccatcgacggtgtcctttgcggaatgatcgctatcgcagacgccgtgaagcaggaagctgccctggctgttcacaccctccagtccatgggagtagacgttgtcttgatcaccggagataatcggaaaactgcaagggccatcgccacccaggtgggtatcaacaaagtgtttgctgaagtgcttccttctcacaaggtggccaaagttcaggagctgcagaacaaggggaagaaggttgcaatggtgggggacggtgttaatgactcaccagctctcgcccaggctgacatgggcgtggccatcggtactggaaccgatgtggcgattgaggcagctgacgtggttctcattaggaatgatctcctagacgtggtggcctccattcacctttcgaaacggaccgtgaggagaattagaataaacctggtcttagccttaatctataaccttgtagggataccaatcgctgctggtgtgttcatgcccattgggatcgttctgcaaccttggatgggaagcgctgcaatggcggcgagctccgtatccgtggtactttcctctctgcaactgaagtgttacaagaagcctgatctggaacggtacgaagctcaagcacatgggcacatgaagcccttaacagcctctcaggtcagcgttcacatcggcatggacgataggtggagggacagcccccgtgctaccccctgggaccaggtatcctacgtaagccaggtgtccttgtcaagcctgaccagcgataagccttctagacactctgccgccgccgacgacgacggtgacaaatggtcgctgcttctgaacggccgcgacgaagagcaatacatttag

SEQ ID NO: 329523 - DNA, 4203 bp, Artificial Sequence
  derived and/or modified sequence
atgcctgaacaagaacgacagatcaccgccagggaaggagcttcccggaagattctttctaaactgtcactgcctacaagagcatgggaacccgcaatgaaaaagagttttgccttcgacaatgtaggatacgagggcggcctcgacggcttaggcccaagttctcaagtcgcaaccagcacagtccggatccttggaatgacgtgccagtcctgtgtcaaatcaattgaggaccggatcagcaatttgaaagggatcatatctatgaaagtaagcctggagcagggatcagctactgtcaagtacgtcccaagcgtcgtgtgccttcagcaggtgtgccatcagattggtgatatgggattcgaagcctcaatcgccgaaggcaaagcggcgagttggcccagcagatcgcttccagcacaggaggctgtggtcaagctccgggttgaagggatgacctgtcagagctgtgtaagctcaatagaaggaaaagtgcgaaaactacagggggtcgtgagagtaaaggtctcgttaagtaaccaagaagcagtcattacctaccagccctatttaattcaaccagaagacctgagagatcacgtgaacgatatgggcttcgaagcagccattaagagcaaggtagctccacttagccttggcccaatagatatcgaacgacttcaatcaacaaacccaaagcgccccttgagctccgcaaatcaaaattttaacaattccgagaccctgggacaccaaggaagccacgtagtgaccttgcagctaaggatcgacggcatgcattgcaagtcatgtgtcctcaatattgaagaaaacatcggtcaactgctgggtgtccagtctattcaagtctcactggaaaataagaccgcccaggttaaatatgatcccagctgtaccagcccagtagcactgcagcgtgcaatagaagccttacctccagggaattttaaagtcagtttacccgatggggctgaggggagcggcaccgatcatcgttcttctagcagccatagcccaggaagccccccccggaaccaagtacagggaacctgttccacaacgttaattgctattgccggcatgacatgcgcatcttgtgtgcacagtatagaaggaatgatcagccaactggaaggagtacagcaaatcagcgtctcactcgcagaaggcacagctacggtactctacaacccatcagtgatatctccagaggaactaagagctgccatcgaggacatgggctttgaggccagcgtcgtctctgaatcgtgcagcacaaatcccttagggaatcactcagccggcaattctatggtgcaaaccaccgacggtactccaaccagcgtgcaagaagtcgcccctcatacaggaaggttgccagccaatcacgccccagacatcctggctaagtcaccacaatcaacccgcgctgtggcaccccagaagtgtttcttacaaattaagggcatgacatgcgcgagttgcgtatcaaacatcgaacgtaacttacagaaggaagccggagtactgtcagtgttggtggctcttatggctggaaaggccgagattaagtacgatccggaagtgatacagccgctcgagattgctcaattcattcaggaccttggatttgaggcggccgtcatggaagactatgcaggctcagacggaaacatagaattgaccattactggaatgacgtgcgctagctgcgtccacaacatcgaaagcaagcttacacgaactaacgggatcacttatgcctccgtcgcattagctacctccaaggcactcgtaaagtttgaccctgagatcatcgggccccgcgacattataaaaattatagaggaaattggatttcacgctagccttgcacagcgtaaccccaacgctcatcacttggaccacaaaatggaaattaagcagtggaaaaaatccttcctgtgctccctcgtgtttggcatacccgtaatggcactcatgatttacatgctcatcccttccaacgagcctcatcagtcaatggtgttagatcacaatattatacctggattgtctattctcaacctcatattctttattctgtgcacgtttgtccagctgctcggtgggtggtatttctatgtccaggcctacaaatccctcagacaccgctccgcgaacatggacgtgctgatagtgttagccacgagcatcgcatatgtatattcacttgtgatcctggtagtagccgtcgccgaaaaggcagaaagaagtcccgtaaccttcttcgatacaccacctatgttattcgtgttcattgcgttgggccggtggttggagcacctcgcaaagtctaagacgtcagaagctctggctaagctaatgagtcttcaagctacagaagcaactgtcgtcactctgggagaggacaaccttattattcgcgaagagcaagtccccatggagctggttcagagaggtgatatcgtgaaggtcgtccctggcggcaagtttcctgtcgacgggaaagtccttgaggggaacacaatggccgatgaaagtctgataaccggagaagctatgccggtaactaagaaacctggatccaccgtgatcgctggctcaataaacgcacatggcagtgtgttgatcaaagctacccatgtcggtaatgacaccactcttgcccaaattgttaaactggtggaagaagcacaaatgtcaaaggctcccatccaacagttagctgaccgattctctggctattttgtgccctttattattatcatgagcactttaacacttgttgtttggatagtcataggctttatcgattttggcgtggttcagagatatttcccgatcaaaaccgtgatgtttgataagacaggcacgatcacccatggcgtcccccgcgttatgcgtgtgctgctacttggggacgtggctactttgcccctacgaaaagtgctggccgtggttggaaccgccgaagctagtagtgaacaccccttaggtgtagctgttacgaagtactgcaaagaagagttaggcacggagactctgggatactgtaccgactttcaggctgtacctggctgtggaattggatgcaaggtttccaatgttgagggaattttggcacattcagagcgccccttgtccgctcccgcctctcaccttaatgaagccggcagtctaccagccgagaaggacgccgtgccacagacctttagcgtcctcattgggaatcgtgaatggctcaggagaaatggattgactattagtagcgacgtaagcgacgccatgacggatcacgagatgaagggacagacagctatattggtggcaatagatggcgtactgtgcgggatgatagcaatagcagacgctgtgaagcaggaagctgctctagccgttcacactctacagagtatgggtgtagacgtggtattgattacaggtgataataggaagaccgctcgggccattgccactcaagtgggtattaataaagtatttgcagaagtactaccgagtcataaagtggctaaggttcaggagctacaaaacaaaggaaaaaaggtcgccatggttggggatggagttaatgacagcccagcactcgctcaggcggacatgggagtagcaatcggcacgggaactgatgtggccatagaagccgccgacgtggtcctcatccgcaatgacctgctagacgttgtagccagcatccacttgtcaaagagaactgtgcgtaggattcgtatcaacttggtcttagcactgatttataacctggttgggatacccatcgccgccggggtgttcatgccaatcgggatagtactgcaaccatggatgggatctgccgcaatggcagccagcagcgtctccgtggttctgtccagcctgcaacttaaatgttataagaaacccgacctggaaaggtacgaagctcaagcccacggtcatatgaaacctctgaccgcaagtcaggtgtctgtgcacatcgggatggacgacaggtggagagattcgcctagggccaccccctgggatcaagtatcatacgtgtcccaagtttctttatccagcttaacatccgataagccatctcgccactcagccgcagctgatgatgacggagataaatggagcctcttgctaaacggcagagatgaggaacaatacatctag

SEQ ID NO: 329524 - RNA, 4203 nt, Artificial Sequence
  derived and/or modified sequence
augccagagcaggagcgucagaucacagcacgcgagggcgcaagccgcaaaauucugagcaagcuaucacuaccgaccagggccugggaacccgcgaugaagaaaaguuucgcauuugacaacguuggcuaugaggggggccuggacggucuuggacccucuucccagguggcgaccucgacggucagaauucuugggaugacgugucagucaugcgugaaaucaaucgaggaccggaucaguaaucucaagggaauaauuuccaugaaagugagucuggagcagggcuccgcgacagugaaguacgucccaagcgucgugugccuucagcaggugugccaucagauuggugauaugggauucgaagccucaaucgccgaaggcaaagcggcgaguuggcccagcagaucgcuuccagcacaggaggcuguggucaagcuccggguugaagggaugaccugucagagcuguguaagcucaauagaaggaaaagugcgaaaacuacagggggucgugagaguaaaggucucguuaaguaaccaagaagcagucauuaccuaccagcccuauuuaauucaaccagaagaccugagagaucacgugaacgacaugggcuuugaagccgcaauuaaaucuaaggucgcaccuuugagucugggcccuaucgauaucgaaagacugcagucuaccaauccgaaaaggccccuuuccagugccaaucagaacuucaauaauagcgaaacccuggggcaucaaggcagucauguggugacguugcagcuacguauugauggaaugcacugcaaaagcugcguccucaacauagaagaaaauaucggccagcugcugggagugcagaguauccaggugagucuggaaaauaagacugcucaggucaaauacgacccaagcuguaccucaccaguugcacugcagcgcgccauagaagcgcucccuccugggaacuucaagguuucauugccagauggcgccgagggcagcggaacugaucaccgaagcuccaguucccauuccccagggaguccacccaggaaucaggugcaaggcacuugcucuaccacacucaucgcuaucgcuggaaugacaugcgcaagcuguguucacucgauugaaggcaugauaucucagcucgagggcguccagcaaauuagugugucccuagcugaagggaccgcuacagugcuuuacaaucccagcguaaucuccccugaggaacugcgcgcagcgauugaggauauggguuuugaagccucuguggugucugaauccugcucaacaaaucccuuaggcaaucacucagcggggaacagcaugguacagacaacagacggaacaccuaccagcgugcaagagguugccccccacacagguagguugcccgccaaccacgcuccagacaucuuagcaaagucuccacaguccacccgugccguugcuccacaaaaauguuucuuacagauuaaaggcaugacaugugcuucuugcgucuccaauauagaacgcaaccugcaaaaggaagccggcguacugucagugcugguggcccuuauggcuggcaaggccgagaucaaauaugacccagagguaauacagccccuugaaauugcucaguuuauucaggaucuuggcuuugaagcugccguuauggaggacuacgcagggagugacggcaauauugaauugaccauuacaggaaugacuugugccuccugugugcacaacaucgaguccaaguuaaccagaaccaauggcauuacauaugcauccgucgcacuggcuacaaguaaggcccucguuaaguucgauccagaaaucaucggaccucgcgacaucaucaagaucaucgaggagaucggguuucaugcuagccucgcccaaagaaaccccaacgcgcaucauuuggaucacaaaauggagaucaaacaauggaaaaaaaguuuuuuauguagccuugucuuugggauccccgugauggcccuaaugauuuacaugcugaucccaucgaacgagccccaucagucuaugguucuggaccacaauauuauccccggccugucgauucucaaccugaucuucuucauucuuugcacauuuguccagcuguuagggggcugguacuucuacgugcaggccuauaaaagccugaggcaccgaucugcaaacauggacguccugauuguccuggcuaccagcauugccuacguguacucucuggugauucucguggucgcuguggcagaaaaagcagagcgcaguccggucaccuuuuuugacaccccccccauguuauucgucuuuaucgcauugggacgaugguuagagcaucuggccaagucuaagacaagcgaggcauuggccaagcucaugucucugcaagcuacggaagcaaccguggucacucuaggcgaagacaaccugaucauacgggaggaacaggugccuauggagcugguucagagaggugauauugucaagguugucccaggaggaaaauuuccaguugacgggaaagugcuggagggaaacacaauggccgacgagucccugaucacaggggaagcaaugcccgugacuaagaaaccgggcucuacagucaucgccggcucaauaaacgcccacggcucuguucugauaaaagcaacccacguuggaaaugauacuacacucgcacagaucguuaagcuggucgaagaggcgcagaugucuaaggcaccaauucaacaacucgcugaccgauuuagcgguuacuucguuccuuuuaucaucaucauguccacacuuacuuuggucguguggaucgucauugguuucaucgauuucggcgugguccaacgcuacuuccccaucaaaacggugauguuugacaagaccggaaccaucacccauggaguuccccgugugaugagaguccuccuacuuggagauguggccacucuuccuuuacgaaaaguguuagccguaguggggacugcagaggcaagcagcgagcacccucugggcguagccgugaccaaguacugcaaggaagagcuagggaccgaaacacugggguauuguaccgacuuucaagccgugccaggaugugggauuggcuguaaggucaguaacgucgaaggcaucuuagcucacagugagcguccccucucagcccccgccagucacuuaaacgaagcuggcucccuucccgcugaaaaagaugcgguuccacagacauuuagcgugcucaucgggaacagagaauggcuccguagaaacggucucacgaucaguagcgaugucagugacgcgaugaccgaucacgaaaugaaaggccagacggcuauucucguggccaucgacgguguccuuugcggaaugaucgcuaucgcagacgccgugaagcaggaagcugcccuggcuguucacacccuccaguccaugggaguagacguugucuugaucaccggagauaaucggaaaacugcaagggccaucgccacccagguggguaucaacaaaguguuugcugaagugcuuccuucucacaagguggccaaaguucaggagcugcagaacaaggggaagaagguugcaauggugggggacgguguuaaugacucaccagcucucgcccaggcugacaugggcguggccaucgguacuggaaccgauguggcgauugaggcagcugacgugguucucauuaggaaugaucuccuagacgugguggccuccauucaccuuucgaaacggaccgugaggagaauuagaauaaaccuggucuuagccuuaaucuauaaccuuguagggauaccaaucgcugcugguguguucaugcccauugggaucguucugcaaccuuggaugggaagcgcugcaauggcggcgagcuccguauccgugguacuuuccucucugcaacugaaguguuacaagaagccugaucuggaacgguacgaagcucaagcacaugggcacaugaagcccuuaacagccucucaggucagcguucacaucggcauggacgauagguggagggacagcccccgugcuacccccugggaccagguauccuacguaagccagguguccuugucaagccugaccagcgauaagccuucuagacacucugccgccgccgacgacgacggugacaaauggucgcugcuucugaacggccgcgacgaagagcaauacauuuag

SEQ ID NO: 329525 - RNA, 4203 nt, Artificial Sequence
  derived and/or modified sequence
augccugaacaagaacgacagaucaccgccagggaaggagcuucccggaagauucuuucuaaacugucacugccuacaagagcaugggaacccgcaaugaaaaagaguuuugccuucgacaauguaggauacgagggcggccucgacggcuuaggcccaaguucucaagucgcaaccagcacaguccggauccuuggaaugacgugccaguccugugucaaaucaauugaggaccggaucagcaauuugaaagggaucauaucuaugaaaguaagccuggagcagggaucagcuacugucaaguacgucccaagcgucgugugccuucagcaggugugccaucagauuggugauaugggauucgaagccucaaucgccgaaggcaaagcggcgaguuggcccagcagaucgcuuccagcacaggaggcuguggucaagcuccggguugaagggaugaccugucagagcuguguaagcucaauagaaggaaaagugcgaaaacuacagggggucgugagaguaaaggucucguuaaguaaccaagaagcagucauuaccuaccagcccuauuuaauucaaccagaagaccugagagaucacgugaacgauaugggcuucgaagcagccauuaagagcaagguagcuccacuuagccuuggcccaauagauaucgaacgacuucaaucaacaaacccaaagcgccccuugagcuccgcaaaucaaaauuuuaacaauuccgagacccugggacaccaaggaagccacguagugaccuugcagcuaaggaucgacggcaugcauugcaagucauguguccucaauauugaagaaaacaucggucaacugcuggguguccagucuauucaagucucacuggaaaauaagaccgcccagguuaaauaugaucccagcuguaccagcccaguagcacugcagcgugcaauagaagccuuaccuccagggaauuuuaaagucaguuuacccgauggggcugaggggagcggcaccgaucaucguucuucuagcagccauagcccaggaagccccccccggaaccaaguacagggaaccuguuccacaacguuaauugcuauugccggcaugacaugcgcaucuugugugcacaguauagaaggaaugaucagccaacuggaaggaguacagcaaaucagcgucucacucgcagaaggcacagcuacgguacucuacaacccaucagugauaucuccagaggaacuaagagcugccaucgaggacaugggcuuugaggccagcgucgucucugaaucgugcagcacaaaucccuuagggaaucacucagccggcaauucuauggugcaaaccaccgacgguacuccaaccagcgugcaagaagucgccccucauacaggaagguugccagccaaucacgccccagacauccuggcuaagucaccacaaucaacccgcgcuguggcaccccagaaguguuucuuacaaauuaagggcaugacaugcgcgaguugcguaucaaacaucgaacguaacuuacagaaggaagccggaguacugucaguguugguggcucuuauggcuggaaaggccgagauuaaguacgauccggaagugauacagccgcucgagauugcucaauucauucaggaccuuggauuugaggcggccgucauggaagacuaugcaggcucagacggaaacauagaauugaccauuacuggaaugacgugcgcuagcugcguccacaacaucgaaagcaagcuuacacgaacuaacgggaucacuuaugccuccgucgcauuagcuaccuccaaggcacucguaaaguuugacccugagaucaucgggccccgcgacauuauaaaaauuauagaggaaauuggauuucacgcuagccuugcacagcguaaccccaacgcucaucacuuggaccacaaaauggaaauuaagcaguggaaaaaauccuuccugugcucccucguguuuggcauacccguaauggcacucaugauuuacaugcucaucccuuccaacgagccucaucagucaaugguguuagaucacaauauuauaccuggauugucuauucucaaccucauauucuuuauucugugcacguuuguccagcugcucggugggugguauuucuauguccaggccuacaaaucccucagacaccgcuccgcgaacauggacgugcugauaguguuagccacgagcaucgcauauguauauucacuugugauccugguaguagccgucgccgaaaaggcagaaagaagucccguaaccuucuucgauacaccaccuauguuauucguguucauugcguugggccggugguuggagcaccucgcaaagucuaagacgucagaagcucuggcuaagcuaaugagucuucaagcuacagaagcaacugucgucacucugggagaggacaaccuuauuauucgcgaagagcaaguccccauggagcugguucagagaggugauaucgugaaggucgucccuggcggcaaguuuccugucgacgggaaaguccuugaggggaacacaauggccgaugaaagucugauaaccggagaagcuaugccgguaacuaagaaaccuggauccaccgugaucgcuggcucaauaaacgcacauggcaguguguugaucaaagcuacccaugucgguaaugacaccacucuugcccaaauuguuaaacugguggaagaagcacaaaugucaaaggcucccauccaacaguuagcugaccgauucucuggcuauuuugugcccuuuauuauuaucaugagcacuuuaacacuuguuguuuggauagucauaggcuuuaucgauuuuggcgugguucagagauauuucccgaucaaaaccgugauguuugauaagacaggcacgaucacccauggcgucccccgcguuaugcgugugcugcuacuuggggacguggcuacuuugccccuacgaaaagugcuggccgugguuggaaccgccgaagcuaguagugaacaccccuuagguguagcuguuacgaaguacugcaaagaagaguuaggcacggagacucugggauacuguaccgacuuucaggcuguaccuggcuguggaauuggaugcaagguuuccaauguugagggaauuuuggcacauucagagcgccccuuguccgcucccgccucucaccuuaaugaagccggcagucuaccagccgagaaggacgccgugccacagaccuuuagcguccucauugggaaucgugaauggcucaggagaaauggauugacuauuaguagcgacguaagcgacgccaugacggaucacgagaugaagggacagacagcuauauugguggcaauagauggcguacugugcgggaugauagcaauagcagacgcugugaagcaggaagcugcucuagccguucacacucuacagaguauggguguagacgugguauugauuacaggugauaauaggaagaccgcucgggccauugccacucaaguggguauuaauaaaguauuugcagaaguacuaccgagucauaaaguggcuaagguucaggagcuacaaaacaaaggaaaaaaggucgccaugguuggggauggaguuaaugacagcccagcacucgcucaggcggacaugggaguagcaaucggcacgggaacugauguggccauagaagccgccgacgugguccucauccgcaaugaccugcuagacguuguagccagcauccacuugucaaagagaacugugcguaggauucguaucaacuuggucuuagcacugauuuauaaccugguugggauacccaucgccgccgggguguucaugccaaucgggauaguacugcaaccauggaugggaucugccgcaauggcagccagcagcgucuccgugguucuguccagccugcaacuuaaauguuauaagaaacccgaccuggaaagguacgaagcucaagcccacggucauaugaaaccucugaccgcaagucaggugucugugcacaucgggauggacgacagguggagagauucgccuagggccacccccugggaucaaguaucauacgugucccaaguuucuuuauccagcuuaacauccgauaagccaucucgccacucagccgcagcugaugaugacggagauaaauggagccucuugcuaaacggcagagaugaggaacaauacaucuag

SEQ ID NO: 329526 - protein, 676 aa, Artificial Sequence
  derived and/or modified sequence
MDVLIVLATSIAYVYSLVILVVAVAEKAERSPVTFFDTPPMLFVFIALGRWLEHLAKSKTSEALAKLMSLQATEATVVTLGEDNLIIREEQVPMELVQRGDIVKVVPGGKFPVDGKVLEGNTMADESLITGEAMPVTKKPGSTVIAGSINAHGSVLIKATHVGNDTTLAQIVKLVEEAQMSKAPIQQLADRFSGYFVPFIIIMSTLTLVVWIVIGFIDFGVVQRYFPNPNKHISQTEVIIRFAFQTSITVLCIACPCSLGLATPTAVMVGTGVAAQNGILIKGGKPLEMAHKELGTETLGYCTDFQAVPGCGIGCKVSNVEGILAHSERPLSAPASHLNEAGSLPAEKDAVPQTFSVLIGNREWLRRNGLTISSDVSDAMTDHEMKGQTAILVAIDGVLCGMIAIADAVKQEAALAVHTLQSMGVDVVLITGDNRKTARAIATQVGINKVFAEVLPSHKVAKVQELQNKGKKVAMVGDGVNDSPALAQADMGVAIGTGTDVAIEAADVVLIRNDLLDVVASIHLSKRTVRRIRINLVLALIYNLVGIPIAAGVFMPIGIVLQPWMGSAAMAASSVSVVLSSLQLKCYKKPDLERYEAQAHGHMKPLTASQVSVHIGMDDRWRDSPRATPWDQVSYVSQVSLSSLTSDKPSRHSAAADDDGDKWSLLLNGRDEEQYI

SEQ ID NO: 329527 - DNA, 2325 bp, Artificial Sequence
  derived and/or modified sequence
aggaaattggctttcatgcttccctggcccagagaaaccccaacgctcatcacttggaccacaagatggaaataaagcactcctcggtgggtggtacttctacgttcaggcctacaaatctctgagacacaggtcagccaacatggacgtgctcatcgtcctggccacaagcattgcttatgtttattctctggtcatcctggtggttgctgtggctgagaaggcggagaggagccctgtgacattcttcgacacgccccccatgctctttgtgttcattgccctgggccggtggctggaacacttggcaaagagcaaaacctcagaagccctggctaaactcatgtctctccaagccacagaagccaccgttgtgacccttggtgaggacaatttaatcatcagggaggagcaagtccccatggagctggtgcagcggggcgatatcgtcaaggtggtccctgggggaaagtttccagtggatgggaaagtcctggaaggcaataccatggctgatgagtccctcatcacaggagaagccatgccagtcactaagaaacccggaagcactgtaattgcggggtctataaatgcacatggctctgtgctcattaaagctacccacgtgggcaatgacaccactttggctcagattgtgaaactggtggaagaggctcagatgtcaaaggcacccattcagcagctggctgaccggtttagtggatattttgtcccatttatcatcatcatgtcaactttgacgttggtggtatggattgtaatcggttttatcgattttggtgttgttcagagatactttcctaaccccaacaagcacatctcccagacagaggtgatcatccggtttgctttccagacgtccatcacggtgctgtgcattgcctgcccctgctccctggggctggccacgcccacggctgtcatggtgggcaccggggtggccgcgcagaacggcatcctcatcaagggaggcaagcccctggagatggcgcacaaggaacttggaacagagaccttgggatactgcacggacttccaggcagtgccaggctgtggaattgggtgcaaagtcagcaacgtggaaggcatcctggcccacagtgagcgccctttgagtgcaccggccagtcacctgaatgaggctggcagccttcccgcagaaaaagatgcagtcccccagaccttctctgtgctgattggaaaccgtgagtggctgaggcgcaacggtttaaccatttctagcgatgtcagtgacgctatgacagaccacgagatgaaaggacagacagccatcctggtggctattgacggtgtgctctgtgggatgatcgcaatcgcagacgctgtcaagcaggaggctgccctggctgtgcacacgctgcagagcatgggtgtggacgtggttctgatcacgggggacaaccggaagacagccagagctattgccacccaggttggcatcaacaaagtctttgcagaggtgctgccttcgcacaaggtggccaaggtccaggagctccagaataaagggaagaaagtcgccatggtgggggatggggtcaatgactccccggccttggcccaggcagacatgggtgtggccattggcaccggcacggatgtggccatcgaggcagccgacgtcgtccttatcagaaatgatttgctggatgtggtggctagcattcacctttccaagaggactgtccgaaggatacgcatcaacctggtcctggcactgatttataacctggttgggatacccattgcagcaggtgtcttcatgcccatcggcattgtgctgcagccctggatgggctcagcggccatggcagcctcctctgtgtctgtggtgctctcatccctgcagctcaagtgctataagaagcctgacctggagaggtatgaggcacaggcgcatggccacatgaagcccctgacggcatcccaggtcagtgtgcacataggcatggatgacaggtggcgggactcccccagggccacaccatgggaccaggtcagctatgtcagccaggtgtcgctgtcctccctgacgtccgacaagccatctcggcacagcgctgcagcagacgatgatggggacaagtggtctctgctcctgaatggcagggatgaggagcagtacatctgatgacttcaggcaggcgggccggggcagggacttgcctccactcaccacaagctgagcaggacagccagcagcaggatgggctgagctagcctccagctttggggacttccgctccctggatatgtccagtcatcctgccctgcagcacgcgg

SEQ ID NO: 329528 - DNA, 1587 bp, Artificial Sequence
  derived and/or modified sequence
atgaagaagagcttcgccttcgacaacgtgggctacgagggcggcctggacggcctgggccccagcagccaggtggccaccagcaccgtgagaatcctgggcatgacctgccagagctgcgtgaagagcatcgaggacagaatcagcaacctgaagggcatcatcagcatgaaggtgagcctggagcagggcagcgccaccgtgaagtacgtgcccagcgtggtgtgcctgcagcaggtgtgccaccagatcggcgacatgggcttcgaggccagcatcgccgagggcaaggccgccagctggcccagcagaagcctgcccgcccaggaggccgtggtgaagctgagagtggagggcatgacctgccagagctgcgtgagcagcatcgagggcaaggtgagaaagctgcagggcgtggtgagagtgaaggtgagcctgagcaaccaggaggccgtgatcacctaccagccctacctgatccagcccgaggacctgagagaccacgtgaacgacatgggcttcgaggccgccatcaagagcaaggtggcccccctgagcctgggccccatcgacatcgagagactgcagagcaccaaccccaagagacccctgagcagcgccaaccagaacttcaacaacagcgagaccctgggccaccagggcagccacgtggtgaccctgcagctgagaatcgacggcatgcactgcaagagctgcgtgctgaacatcgaggagaacatcggccagctgctgggcgtgcagagcatccaggtgagcctggagaacaagaccgcccaggtgaagtacgaccccagctgcaccagccccgtggccctgcagagagccatcgaggccctgccccccggcaacttcaaggtgagcctgcccgacggcgccgagggcagcggcaccgaccacagaagcagcagcagccacagccccggcagcccccccagaaaccaggtgcagggcacctgcagcaccaccctgatcgccatcgccggcatgacctgcgccagctgcgtgcacagcatcgagggcatgatcagccagctggagggcgtgcagcagatcagcgtgagcctggccgagggcaccgccaccgtgctgtacaaccccagcgtgatcagccccgaggagctgagagccgccatcgaggacatgggcttcgaggccagcgtggtgagcgagagctgcagcaccaaccccctgggcaaccacagcgccggcaacagcatggtgcagaccaccgacggcacccccaccagcgtgcaggaggtggccccccacaccggcagactgcccgccaaccacgcccccgacatcctggccaagagcccccagagcaccagagccgtggccccccagaagtgcttcctgcagatcaagggcatgacctgcgccagctgcgtgagcaacatcgagagaaacctgcagaaggaggccgcccccagatgggtggtgctgctgagaagcggcctgcagatcagcgagacccaggtgagccagcacggcagagcccacagacccggccacaagcactgcctgtgcctgttcagcggccaccccggcggctgctgcggctag

SEQ ID NO: 329529 - DNA, 1587 bp, Artificial Sequence
  derived and/or modified sequence
atgaagaagagtttcgcttttgataatgtaggatacgaagggggcctggacggcctgggcccgtcaagccaggtagctacctcaaccgtgcggatactgggcatgacttgtcagagttgcgtcaagagcatcgaggacagaatttcaaacctgaaggggattatctcaatgaaggtctcgctcgaacagggcagcgccaccgtaaagtacgttccaagtgttgtttgcctgcagcaagtttgtcaccagattggtgacatgggatttgaagcaagtatcgccgaggggaaggcagcaagttggccaagccgatccctgccggctcaggaagccgtcgtgaagctgcgcgtcgagggcatgacatgtcaaagctgcgtgtcttccatcgagggtaaggttcggaaactgcagggagtggtgcgagtcaaggtctccctgtccaaccaggaggcagtgatcacctatcaaccttacctgattcaacctgaagatctcagggatcatgttaatgatatgggtttcgaggccgccatcaagtcaaaggtagcccctctctccctcggcccaatcgatattgagagactgcagtcgacaaatccaaagcgaccgctttcatcagcgaatcagaactttaacaactctgagacattaggtcaccaagggtcccacgtcgtaacgctacagctgcgaattgatggcatgcactgcaagtcctgcgtacttaacatcgaggagaacattggccagctgttaggcgtgcagtccatccaggtcagcctggaaaataaaaccgcccaggtgaagtacgaccccagctgtacatccccggtagcgttacaacgggccattgaagctctacctcctggcaactttaaggtgtcccttcctgacggggcagagggaagcggaacagaccaccgctcgagtagttcacatagccccggatccccgcctaggaatcaggtgcagggaacctgctcaacaaccttgatagctatcgctggtatgacctgtgcttcctgcgtacattcaattgaaggtatgatttctcagctggagggtgttcagcagatcagcgtaagcttggccgaaggcaccgcgaccgtcctgtacaatccatccgtgattagtcctgaggagctacgtgcagcaatagaagatatggggttcgaggccagcgtggtgagcgagagctgtagtactaatcctctggggaaccattccgctgggaactctatggtacagactaccgatggtacaccaacttccgtgcaggaagtcgccccccacaccggtagattgcccgctaaccacgcacctgacatcctcgcaaaatccccacagtcaaccagggccgttgccccacagaagtgtttcctccagattaaagggatgacctgcgccagttgtgtaagcaacattgagaggaacttacaaaaggaagctgcccctaggtgggtcgtgcttttgaggtcaggactgcagatatcagagacacaggtctcccagcacggccgggcacaccggccaggccacaagcattgcctttgcctgttcagcggccaccccggagggtgctgcgggtag

SEQ ID NO: 329530 - DNA, 1673 bp, Artificial Sequence
  derived and/or modified sequence
atcttatctaagctttctttgcctacccgtgcctgggaaccagcaatgaagaagagttttgcttttgacaatgttggctatgaaggtggtctggatggcctgggcccttcttctcaggtggccaccagcacagtcaggatcttgggcatgacttgccagtcatgtgtgaagtccattgaggacaggatttccaatttgaaaggcatcatcagcatgaaggtttccctggaacaaggcagtgccactgtgaaatatgtgccatcggttgtgtgcctgcaacaggtttgccatcaaattggggacatgggcttcgaggccagcattgcagaaggaaaggcagcctcctggccctcaaggtccttgcctgcccaggaggctgtggtcaagctccgggtggagggcatgacctgccagtcctgtgtcagctccattgaaggcaaggtccggaaactgcaaggagtagtgagagtcaaagtctcactcagcaaccaagaggccgtcatcacttatcagccttatctcattcagcccgaagacctcagggaccatgtaaatgacatgggatttgaagctgccatcaagagcaaagtggctcccttaagcctgggaccaattgatattgagcggttacaaagcactaacccaaagagacctttatcttctgctaaccagaattttaataattctgagaccttggggcaccaaggaagccatgtggtcaccctccaactgagaatagatggaatgcattgtaagtcttgcgtcttgaatattgaagaaaatattggccagctcctaggggttcaaagtattcaagtgtccttggagaacaaaactgcccaagtaaagtatgacccttcttgtaccagcccagtggctctgcagagggctatcgaggcacttccacctgggaattttaaagtttctcttcctgatggagccgaagggagtgggacagatcacaggtcttccagttctcattcccctggctccccaccgagaaaccaggtccagggcacatgcagtaccactctgattgccattgccggcatgacctgtgcatcctgtgtccattccattgaaggcatgatctcccaactggaaggggtgcagcaaatatcggtgtctttggccgaagggactgcaacagttctttataatccctctgtaattagcccagaagaactcagagctgctatagaagacatgggatttgaggcttcagtcgtttctgaaagctgttctactaaccctcttggaaaccacagtgctgggaattccatggtgcaaactacagatggtacacctacatctgtgcaggaagtggctccccacactgggaggctccctgcaaaccatgccccggacatcttggcaaagtccccacaatcaaccagagcagtggcaccgcagaagtgcttcttacagatcaaaggcatgacctgtgcatcctgtgtgtctaacatagaaaggaatctgcagaaagaagctgctcctcggtgggtggtacttctacgttcaggcctacaaatctctgagacacaggtcagccaacatggacgtgctcatcgtcctggccacaagcattgcttatgtttattctctggtcatcctggtggttgctgtggctgagaaggcggagaggagccctgtgacattcttcgacacgcccc

SEQ ID NO: 329531 - DNA, 1587 bp, Artificial Sequence
  derived and/or modified sequence
atgaagaagagctttgcctttgacaacgtgggctatgagggcggcctggatggcctgggccccagcagccaggtggccaccagcacagtgcgcatcctgggcatgacctgccagagctgtgtgaagagcattgaagatcgcatcagcaacctgaagggcatcatctccatgaaggtgtccctggagcagggcagcgccaccgtgaagtatgtgcccagcgtggtgtgcctgcagcaggtgtgccaccagatcggggacatgggctttgaggccagcattgctgagggcaaggccgcctcctggcccagccgcagcctgcctgcccaggaggccgtggtgaagctgcgggtggagggcatgacctgccagagctgtgtgagcagcattgagggcaaggtgaggaagctgcagggcgtggtgcgggtgaaggtgtccctgagcaaccaggaggccgtcatcacctaccagccctacctgatccagcctgaggacctgcgggaccacgtgaatgacatgggctttgaggccgccatcaagagcaaggtggcccccctgagcctgggccccatcgacatcgagcggctgcagagcaccaaccccaagaggcccctgagcagcgccaaccagaacttcaacaacagcgagaccctgggccaccagggcagccacgtggtgaccctgcagctgagaattgatggcatgcactgcaagagctgtgtgctgaacattgaagaaaatattggccagctgctgggcgtgcagagcatccaggtgtccctggagaacaagacagcccaggtgaagtatgaccccagctgcaccagccctgtggccctgcagagggccatcgaggccctgcccccaggcaacttcaaggtgtccctgcctgatggagctgagggcagcggcacagaccacaggagcagcagcagccacagccctggcagccccccaagaaaccaggtgcagggcacctgcagcaccaccctgattgccatcgccggcatgacctgtgccagctgtgtgcacagcattgagggcatgatcagccagctggagggcgtgcagcagatctctgtgtccctggccgagggcacagccaccgtgctgtacaaccccagcgtcatcagccctgaggagctgcgggccgccatcgaggacatgggctttgaggcctctgtggtgtctgagagctgcagcaccaaccccctgggcaaccacagcgctggcaacagcatggtgcagaccacagatggcacccccacctctgtgcaggaggtggccccccacacaggccgcctgcctgccaaccacgccccagacatcctggccaagagcccccagagcaccagggctgtggccccccagaagtgcttcctgcagatcaagggcatgacctgtgccagctgtgtgagcaacatcgagaggaacctgcagaaggaggccgccccccgctgggtggtgctgctgcggagcggcctgcagatcagcgagacccaggtgtcccagcacggccgggcccaccggcccggccacaagcactgcctgtgcctcttcagcggccaccctgggggctgctgcggctag

SEQ ID NO: 329532 - DNA, 1587 bp, Artificial Sequence
  derived and/or modified sequence
atgaagaagagcttcgccttcgacaacgtgggctacgagggcggcctagacggactcggaccatctagtcaggtggccacctccactgtgcgaatcttaggcatgacttgccaatcttgcgttaaatctattgaggatcgaatcagcaacttgaaagggataatttcaatgaaagtgtcactggaacaagggtctgctacggtaaagtacgtgccatccgtggtgtgtctgcagcaagtgtgccatcagataggggatatggggttcgaggctagtattgccgaagggaaggccgcatcttggccatcgaggtccctgcccgcacaggaggcagtggttaaactgcgggtcgaggggatgacatgtcagtcctgtgtatcttccatcgaagggaaggttcggaaactgcagggtgtggtgcgggtgaaagtgtctcttagcaaccaggaggccgtcatcacttaccagccctacctaattcagcctgaggacctccgtgatcatgtgaatgacatgggttttgaggcggccatcaagtcaaaggttgcccccctgtcactcggacctatcgatattgaacgcctccagagcacaaaccccaagagaccactttctagcgccaatcaaaacttcaacaatagcgaaactctcggccaccagggctctcatgtggtgaccctacagttaaggatagacgggatgcattgtaagtcttgtgtactgaacatcgaggaaaacattgggcagctgctcggcgttcagtctattcaggtgagcctggagaacaaaacggcccaggtgaagtacgacccgagttgtacatcccccgtggccttgcaaagggcaattgaggctctgccaccaggaaacttcaaagtgagcttacctgacggagcggaaggttcaggcactgaccaccgctcaagttcctcacacagcccagggagtccacctaggaaccaggttcagggaacatgtagtaccacactgatagccatcgcagggatgacgtgtgcttcctgcgtacacagtattgagggcatgatctctcaactagaaggcgtacagcagatctcagtgtccctggctgaggggactgccaccgtcctttacaatcctagtgtgatttctcccgaagaactgagagccgcgatcgaagatatggggtttgaggcttccgtcgtgtctgaatcttgctccacaaaccctctcggcaatcacagcgcagggaactctatggtgcaaaccacagacggcacgcctaccagcgtgcaagaagtcgcacctcatacaggccggcttcccgctaatcacgcgcccgacatcttagcaaaaagtccccagtctacgcgggcggtggccccacagaagtgcttcctacagatcaagggcatgacctgcgcctcttgtgtctcgaatattgagcggaacttacagaaagaagcagcccctcggtgggttgtgctgctacggtcgggtctgcaaatcagcgagacccaggtgagccagcatgggagggcccaccggcctgggcacaagcactgcctttgccttttttcaggccatcccggtggttgctgcggttag

SEQ ID NO: 329533 - DNA, 1587 bp, Artificial Sequence
  derived and/or modified sequence
atgaagaagtctttcgcatttgataatgtcggatacgagggagggcttgacggcttagggccttcgagtcaagtcgcaacttccaccgtgcgcatcctcggcatgacctgccagagttgtgttaaaagtattgaagatcggattagtaatctgaaaggcatcattagcatgaaggtgagtttagagcaaggctctgccacggtgaagtatgtgccctcagtggtgtgtttacagcaggtgtgccaccagataggcgatatgggtttcgaagcctccatcgcggagggtaaggccgcaagttggccatccagatccctcccagcacaggaggccgtggtcaaactgcgggtggaaggtatgacatgtcagagttgtgtctccagtatcgagggtaaggtgagaaaactgcagggcgtcgtgagggtcaaggtgagtttgagcaatcaggaggctgtgatcacttaccaaccttacctgatccagcccgaagacctcagggaccatgtcaatgacatgggctttgaagccgcaatcaaatctaaggtggctccccttagcctcggacccattgatatcgagcggctccagagtaccaaccctaagagacccctgtcatcagctaatcagaacttcaacaactctgaaaccttgggccaccagggatcacacgtagtcactcttcagctgcgcattgacggcatgcattgcaagtcttgcgtgctgaacattgaggagaacatcggacaattgcttggagtacagtcaattcaggtgtccctggaaaacaaaaccgcccaggtgaaatatgaccctagctgcacctcaccagtcgccctccaaagggctatcgaggcattgcccccaggcaattttaaggtgtctcttcccgatggcgcagaggggtctggaacagaccatagatccagctcttcgcacagtcctgggagcccgccacggaatcaggtgcaaggcacctgttcaaccaccttgatagcaatcgccggtatgacctgcgcaagctgcgtgcattctatagagggaatgatatcacaactggagggcgtacaacagatcagcgtcagcctggcagagggaactgccacagttctatataacccatccgtgatctcccccgaggaactgcgggcagctattgaagacatgggctttgaagcttctgtagtgtctgagtcttgcagtacgaaccccctggggaaccacagcgcaggtaattccatggttcagacaactgatggaaccccaactagcgtacaagaggtagcaccacatacagggaggctgcccgcaaaccacgctcccgatatacttgctaagagcccacagtcaacccgcgcagtggccccacaaaagtgctttctgcagataaaggggatgacctgtgcttcctgtgtgtccaacattgagcgtaacctacagaaagaagccgctcctcgatgggtggtcctgttaagatccggcctgcaaattagtgagacgcaggtgagccagcacggacgggctcaccggcctggacacaagcattgtctctgcctgtttagtggacaccccggaggctgttgtggatag

SEQ ID NO: 329534 - DNA, 1587 bp, Artificial Sequence
  derived and/or modified sequence
atgaagaaaagtttcgcttttgacaacgtcggttatgaaggtgggttggatggcttgggaccgtccagccaagtggcgacatcaacagtcaggatcctgggtatgacatgccagagttgtgtgaaaagtatcgaggacagaatttctaacttgaaagggatcatatctatgaaagtctcacttgaacaaggttctgcgacggtgaagtacgtcccaagcgtggtgtgcctccagcaggtctgtcatcaaattggagatatgggctttgaggcctcaatcgccgaagggaaggcagcctcctggccatcaagaagcttaccggcccaggaagccgtggttaaactaagggtggaggggatgacatgtcaaagttgtgtgtcctccattgaaggaaaagtgcgcaaacttcagggagtggtgagagtgaaggtttcgttatccaatcaggaagctgtgatcacataccagccatacctcatccaaccagaggatctgcgggatcatgtcaatgacatggggttcgaggctgctattaaatccaaggtggcccccctcagtctgggtcctattgatatcgaacggctccagtctaccaaccctaagaggccactttcctccgcaaatcagaatttcaataatagcgaaacattgggtcaccagggaagtcacgtagtgaccctccagctgcggatagatggcatgcattgtaagtcttgcgttttgaatatagaagaaaatattggacagttgctgggagtccagagtatccaggtttccttggagaacaagaccgcccaagtgaaatacgatccaagctgcacctcccctgtggctttgcagagagctatcgaagctctaccccctgggaacttcaaagtctccttaccggatggggcagaagggtcaggtacagatcaccggtcgtcgtccagtcactcaccaggctccccaccccggaaccaagtacagggaacttgcagcacaacattgatcgctattgccggaatgacctgtgcctcgtgtgttcacagtatcgaaggaatgatctctcagttggagggggtgcagcagatcagcgtttctctggctgagggtactgccactgtgttgtacaatccgtccgtgatttcccccgaagaactgcgagccgcaatagaggatatgggcttcgaagcctccgtcgtttcagaaagctgttccaccaaccctctgggcaaccattccgccggcaattcaatggtgcaaaccacagacggtacgcccacatccgtgcaggaagttgctcctcatactggtaggcttcctgccaaccatgcccccgatatcctggccaaatcacctcagtccaccagggccgtcgctccccaaaagtgcttcttgcagattaaaggcatgacgtgcgcatcttgcgtcagtaatattgaacgaaacttacaaaaagaagcagcaccccgctgggttgtgctgttgcgctcaggtcttcagatatcggagacccaggtctcacagcatgggagagcccaccgccccggccataaacactgcctttgtcttttctcgggccatccaggcggctgctgtggttag

SEQ ID NO: 329535 - DNA, 1587 bp, Artificial Sequence
  derived and/or modified sequence
atgaagaagtcctttgcgtttgataacgtaggttacgagggtggtttggatggactgggaccttctagccaggtcgccacatctaccgtcaggatcctgggaatgacatgccagtcttgcgtgaagtctattgaggataggataagcaaccttaaaggtataatctccatgaaagtgtctctggaacagggctcagccactgtaaagtacgtgcccagcgttgtgtgtctccaacaggtatgtcatcagatcggtgatatggggtttgaagcgagtatcgctgaaggtaaggcagccagctggccatcccgttctcttcctgctcaggaagccgtggttaaactgcgagtcgaaggcatgacatgtcaaagctgtgtcagctctatagaaggaaaagttagaaagcttcagggcgtagtgcgtgtcaaagtttccctgagcaaccaagaagcagtaatcacctaccaaccatacctgatccagccagaggacctacgcgatcatgttaacgatatgggcttcgaagcagccatcaaatccaaagtggcgcccttaagcctgggacctattgatattgagagactccaatctacgaatcctaaaagacctttatcttccgccaatcaaaatttcaacaatagcgagaccttaggccatcagggcagtcatgtggtaacgctccagctgcgtattgacggaatgcattgtaagtcctgcgtccttaacatcgaggagaatatagggcagcttctaggagtgcagtcaattcaagtgtcacttgaaaataaaactgcacaagtgaaatacgatccctcttgtacaagcccagtagccctgcagcgcgcaatcgaagcgctgccccccggcaactttaaagtctcactccctgacggtgccgagggatccgggacagatcaccgttcttcctcatcacacagcccaggctcccccccaagaaaccaagttcaaggaacctgcagcacaaccctcattgccattgccggtatgacctgcgcatcctgtgtgcactcaattgaaggtatgatttcccaactcgagggtgtgcagcagatttccgtaagtctggccgagggaacagctaccgtcctgtacaaccctagcgtcattagcccagaagagctgcgcgccgccatagaagatatgggctttgaagcaagtgtcgtcagcgaatcctgtagtaccaaccccttggggaaccacagcgccggaaacagcatggtccaaaccaccgatggaaccccaacttccgtgcaagaagtggcccctcacaccggtaggctgcctgctaaccacgcccccgacattctggcaaagtccccgcaaagcactcgagcagtcgctccacagaaatgttttcttcagatcaagggtatgacatgtgcatcatgcgtcagtaatatcgaaagaaacttgcaaaaggaagccgccccacgttgggttgtgctgctaaggtcgggactgcaaatctccgaaacacaggttagccagcatggacgagctcaccggccaggacacaagcattgcctctgtcttttcagcggccatcctgggggatgttgcgggtag

SEQ ID NO: 329536 - RNA, 1587 nt, Artificial Sequence
  derived and/or modified sequence
augaagaaaaguuucgcuuuugacaacgucgguuaugaagguggguuggauggcuugggaccguccagccaaguggcgacaucaacagucaggauccuggguaugacaugccagaguugugugaaaaguaucgaggacagaauuucuaacuugaaagggaucauaucuaugaaagucucacuugaacaagguucugcgacggugaaguacgucccaagcguggugugccuccagcaggucugucaucaaauuggagauaugggcuuugaggccucaaucgccgaagggaaggcagccuccuggccaucaagaagcuuaccggcccaggaagccgugguuaaacuaaggguggaggggaugacaugucaaaguuguguguccuccauugaaggaaaagugcgcaaacuucagggaguggugagagugaagguuucguuauccaaucaggaagcugugaucacauaccagccauaccucauccaaccagaggaucugcgggaucaugucaaugacaugggguucgaggcugcuauuaaauccaagguggccccccucagucuggguccuauugauaucgaacggcuccagucuaccaacccuaagaggccacuuuccuccgcaaaucagaauuucaauaauagcgaaacauugggucaccagggaagucacguagugacccuccagcugcggauagauggcaugcauuguaagucuugcguuuugaauauagaagaaaauauuggacaguugcugggaguccagaguauccagguuuccuuggagaacaagaccgcccaagugaaauacgauccaagcugcaccuccccuguggcuuugcagagagcuaucgaagcucuacccccugggaacuucaaagucuccuuaccggauggggcagaagggucagguacagaucaccggucgucguccagucacucaccaggcuccccaccccggaaccaaguacagggaacuugcagcacaacauugaucgcuauugccggaaugaccugugccucguguguucacaguaucgaaggaaugaucucucaguuggagggggugcagcagaucagcguuucucuggcugaggguacugccacuguguuguacaauccguccgugauuucccccgaagaacugcgagccgcaauagaggauaugggcuucgaagccuccgucguuucagaaagcuguuccaccaacccucugggcaaccauuccgccggcaauucaauggugcaaaccacagacgguacgcccacauccgugcaggaaguugcuccucauacugguaggcuuccugccaaccaugcccccgauauccuggccaaaucaccucaguccaccagggccgucgcuccccaaaagugcuucuugcagauuaaaggcaugacgugcgcaucuugcgucaguaauauugaacgaaacuuacaaaaagaagcagcaccccgcuggguugugcuguugcgcucaggucuucagauaucggagacccaggucucacagcaugggagagcccaccgccccggccauaaacacugccuuugucuuuucucgggccauccaggcggcugcugugguuag

SEQ ID NO: 329537 - RNA, 1587 nt, Artificial Sequence
  derived and/or modified sequence
augaagaaguccuuugcguuugauaacguagguuacgagggugguuuggauggacugggaccuucuagccaggucgccacaucuaccgucaggauccugggaaugacaugccagucuugcgugaagucuauugaggauaggauaagcaaccuuaaagguauaaucuccaugaaagugucucuggaacagggcucagccacuguaaaguacgugcccagcguugugugucuccaacagguaugucaucagaucggugauaugggguuugaagcgaguaucgcugaagguaaggcagccagcuggccaucccguucucuuccugcucaggaagccgugguuaaacugcgagucgaaggcaugacaugucaaagcugugucagcucuauagaaggaaaaguuagaaagcuucagggcguagugcgugucaaaguuucccugagcaaccaagaagcaguaaucaccuaccaaccauaccugauccagccagaggaccuacgcgaucauguuaacgauaugggcuucgaagcagccaucaaauccaaaguggcgcccuuaagccugggaccuauugauauugagagacuccaaucuacgaauccuaaaagaccuuuaucuuccgccaaucaaaauuucaacaauagcgagaccuuaggccaucagggcagucaugugguaacgcuccagcugcguauugacggaaugcauuguaaguccugcguccuuaacaucgaggagaauauagggcagcuucuaggagugcagucaauucaagugucacuugaaaauaaaacugcacaagugaaauacgaucccucuuguacaagcccaguagcccugcagcgcgcaaucgaagcgcugccccccggcaacuuuaaagucucacucccugacggugccgagggauccgggacagaucaccguucuuccucaucacacagcccaggcucccccccaagaaaccaaguucaaggaaccugcagcacaacccucauugccauugccgguaugaccugcgcauccugugugcacucaauugaagguaugauuucccaacucgagggugugcagcagauuuccguaagucuggccgagggaacagcuaccguccuguacaacccuagcgucauuagcccagaagagcugcgcgccgccauagaagauaugggcuuugaagcaagugucgucagcgaauccuguaguaccaaccccuuggggaaccacagcgccggaaacagcaugguccaaaccaccgauggaaccccaacuuccgugcaagaaguggccccucacaccgguaggcugccugcuaaccacgcccccgacauucuggcaaaguccccgcaaagcacucgagcagucgcuccacagaaauguuuucuucagaucaaggguaugacaugugcaucaugcgucaguaauaucgaaagaaacuugcaaaaggaagccgccccacguuggguugugcugcuaaggucgggacugcaaaucuccgaaacacagguuagccagcauggacgagcucaccggccaggacacaagcauugccucugucuuuucagcggccauccugggggauguugcggguag

SEQ ID NO: 329538 - protein, 208 aa, Artificial Sequence
  derived and/or modified sequence
MKACKRGNSDIVRLVIECGADCNILSKHQNSALHFAKQSNNVLVYDLLKNHLETLSRVAEETIKDYFEARLALLEPVFPIACHRLCEGPDFSTDFNYKPPQNIPEGSGILLFIFHANFLGKEVIARLCGPCSVQAVVLNDKFQLPVFLTGSRSVVQAGVQWRGLQLTGVLTSQAQAILPPQPPNYLGLKMTVILFTHSALLQVPINSS

SEQ ID NO: 329539 - protein, 867 aa, Artificial Sequence
  derived and/or modified sequence
MEQVAEGARVTAVPVSAADSTEELAEVEEGVGVVGEDNDAAARGAEAFGDSEEDGEDVFEVEKILDMKTEGGKVLYKVRWKGYTSDDDTWEPEIHLEDCKEVLLEFRKKIAENKAKAVRKDIQRLSLNNDIFEANSDSDQQSETKEDTSPKKKKKKLRQREEKSPDDLKKKKAKAGKLKDKSKPDLESSLESLVFDLRTKKRISEAKEELKESKKPKKDEVKETKELKKVKKGEIRDLKTKTREDPKENRKTKKEKFVESQVESESSVLNDSPFPEDDSEGLHSDSREEKQNTKSARERAGQDMGLEHGFEKPLDSAMSAEEDTDVRGRRKKKTPRKAEDTRENRKLENKNAFLEKKTVPKKQRNQDRSKSAAELEKLMPVSAQTPKGRRLSGEERGLWSTDSAEEDKETKRNESKEKYQKRHDSDKEEKGRKEPKGLKTLKEIRNAFDLFKLTPEEKNDVSENNRKREEIPLDFKTIDDHKTKENKQSLKERRNTRDETDTWAYIAAEGDQEVLDSVCQADENSDGRQQILSLGMDLQLEWMKLEDFQKHLDGKDENFAATDAIPSNVLRDAVKNGDYITVKVALNSNEEYNLDQEDSSGMTLVMLAAAGGQDDLLRLLITKGAKVNGRQKNGTTALIHAAEKNFLTTVAILLEAGAFVNVQQSNGETALMKACKRGNSDIVRLVIECGADCNILSKHQNSALHFAKQSNNVLVYDLLKNHLETLSRVAEETIKDYFEARLALLEPVFPIACHRLCEGPDFSTDFNYKPPQNIPEGSGILLFIFHANFLGKEVIARLCGPCSVQAVVLNDKFQLPVFLTGSRSVVQAGVQWRGLQLTGVLTSQAQAILPPQPPNYLGLKMHATTSG

SEQ ID NO: 329540 - DNA, 627 bp, Artificial Sequence
  derived and/or modified sequence
atgaaggcctgcaaacgcggcaactcagatattgtgagactggttatagaatgcggagcagattgtaacattctgagcaagcatcagaactctgcactgcactttgctaagcagtcaaataatgtgctggtgtacgacctgctgaagaaccatctcgagactctttcacgcgtggccgaagagaccattaaggactactttgaggcaagacttgcgctcctagagccagtttttcctatagcgtgccatcgactgtgtgaaggcccagatttcagcaccgactttaactataagcctccccagaacatcccggaagggtccggtattttgctgttcatcttccatgcaaatttcctagggaaggaagttatcgcccggctgtgtggcccttgtagcgtgcaagctgtcgtccttaatgataaatttcagttaccggtgttcttgaccggcagtcgttccgtagttcaggccggagtgcagtggcggggcctacagctgactggggtgctcactagtcaggcgcaggccatcctgcccccacaaccacctaattatttaggtttgaaaatgaccgttatacttttcacacacagcgccctgttgcaggtgccaatcaattcaagctag

SEQ ID NO: 329541 - DNA, 2604 bp, Artificial Sequence
  derived and/or modified sequence
atggagcaggtcgctgaaggcgctagagttactgccgtgccagtctccgctgcagacagtaccgaggaactggcagaagtagaggagggtgtcggagtagttggagaggacaacgacgcagccgcccggggggctgaagcatttggcgatagtgaggaagacggggaagacgtgttcgaagtcgagaagatactcgatatgaagaccgaagggggaaaagtgttgtacaaagtgcgctggaaaggctacacctccgacgacgacacttgggaaccagagatccatctggaggactgcaaagaggttctcttggaatttagaaaaaagattgccgaaaacaaggctaaagctgtgcggaaggatattcagagactgagtttgaacaatgacatatttgaagcaaactccgactccgatcagcagtcagagacaaaggaggacactagccccaagaaaaagaagaaaaaactgcgacaaagggaggaaaagtcaccagatgatcttaagaaaaaaaaagctaaagcaggaaaactgaaggacaagtccaagcctgacctggaatcctcactcgagtctttggttttcgaccttcgtaccaaaaagcggatctccgaagccaaggaggagctgaaagagtctaagaagccaaaaaaggatgaggtgaaggagaccaaggaattaaagaaggtaaaaaagggcgaaattagggatcttaagaccaagacccgcgaggaccctaaggagaaccgcaagaccaagaaggagaagtttgtggaatcccaggtggaaagcgaaagctccgtccttaatgactcgccatttcccgaagacgattccgagggacttcacagtgatagcagggaggagaaacaaaacacaaagagcgccagggaaagagcaggacaagatatgggactggagcatgggttcgagaagcctctggacagtgcgatgtctgccgaagaagatacagatgtgcgtggccgacgcaagaaaaagacccctcgcaaggccgaagatacccgagagaatcgcaaattggagaacaaaaacgccttcctcgagaaaaagacagtgccaaagaagcaacgaaaccaagataggagtaagtccgctgctgaactggagaagctgatgcccgtgtctgcgcagactcccaaggggaggcggctctccggggaagagcgcggtctgtggagtaccgacagtgccgaagaagacaaggagacaaagcgaaatgagagtaaagagaagtaccagaagcgacacgattcagacaaggaggagaagggtcgcaaggagcccaaaggcctgaaaacactaaaggagattcggaacgcattcgaccttttcaaactgacgcccgaagaaaagaatgacgtttcagagaacaatcggaaaagagaggagatccccctcgacttcaaaactattgacgatcacaagactaaagaaaataaacagtcacttaaagagcgccgcaatacacgcgacgagacagacacctgggcttacatagctgcagaaggagaccaagaagtgcttgactccgtgtgtcaggccgacgagaatagcgacggtcgtcagcagatcctgtccttggggatggacctccaacttgagtggatgaaactggaagatttccagaagcacctggatggcaaggacgaaaatttcgcagccactgatgccattccaagtaatgtcctgcgtgacgcagttaagaatggagattacatcacagtaaaggtagctcttaactccaatgaagagtataatttagaccaggaagacagctccggcatgacactggttatgctggccgctgcaggcgggcaggacgatttactgcgcctgctgataacaaagggtgcgaaggtgaacggtaggcagaaaaatggtactacagcgttaattcatgcagcggagaaaaatttcctcacaacagtggctatcctgctcgaggccggtgccttcgtgaatgtgcagcaatcaaatggcgaaacggcactgatgaaggcctgcaagcgaggaaacagcgacatcgtacgactggtcattgagtgcggggccgattgtaatatcctgtctaaacaccagaattctgctttacacttcgccaaacagagtaataatgtgctagtgtatgacctcctcaagaaccatcttgaaacattgtcacgggtcgcggaagagactatcaaagattacttcgaggctcggctggcactgttggagccagtgttcccaatagcctgccacaggctatgcgaaggcccggacttttctacagactttaactataaacctccccagaacatcccagagggctcaggcattcttctgtttatcttccatgcaaatttcttgggtaaggaggtgatcgcccggctctgcgggccatgctccgttcaagcggtggtcctgaatgataaattccagttaccagtgttcctcaccggtagcagatcagtggtgcaagccggtgtacagtggagaggcctccagctgacgggcgtcctgactagccaggctcaggctattttgcctccacagccacccaactacctcgggctaaagatgcatgctactacgtccgggtag

SEQ ID NO: 329542 - DNA, 627 bp, Artificial Sequence
  derived and/or modified sequence
atgaaggcctgcaagaggggcaacagcgacatcgtgcggctggtgattgaatgtggggctgactgcaacatcctgagcaagcaccagaacagcgccctgcactttgccaagcagagcaacaacgtgctggtgtatgacctgctgaagaaccacctggagaccctgagccgggtggccgaggagaccatcaaggactactttgaggcccggctggccctgctggagcccgtcttccccatcgcctgccaccggctgtgtgagggccctgacttcagcacagacttcaactacaagccaccccagaacatccctgagggcagcggcatcctgctcttcatcttccacgccaacttcctgggcaaggaggtgattgcccggctgtgtggcccctgcagcgtgcaggccgtggtgctgaatgacaagttccagctgcctgtgttcctgaccggcagccgctctgtggtgcaggccggcgtgcagtggaggggcctgcagctgactggagtgctgaccagccaggcccaggccatcctgcccccccagccccccaactacctgggcctgaagatgaccgtcatcctcttcacccacagcgccctgctgcaggtgcccatcaacagcagctag

SEQ ID NO: 329543 - DNA, 2604 bp, Artificial Sequence
  derived and/or modified sequence
atggagcaggtggccgagggcgcccgggtgacagctgtgcctgtgtctgctgctgacagcacagaggagctggccgaggtggaggagggcgtgggcgtggtgggggaggacaatgatgctgctgcccggggagctgaggccttcggggacagtgaagaagatggagaagatgtgtttgaggtggagaagatcctggacatgaagacagaaggaggcaaggtgctgtacaaggtgcgctggaagggctacaccagtgatgatgacacctgggagcctgagatccacctggaggactgcaaggaggtgctgctggagttcaggaagaagattgctgagaacaaggccaaggctgtgaggaaggacatccagaggctgagcctgaacaatgacatctttgaggccaacagcgacagcgaccagcagagcgagaccaaggaggacaccagccccaagaagaagaagaagaagctgcggcagcgggaggagaagagcccagatgacctgaagaagaagaaggccaaggccggcaagctgaaggacaagagcaagccagacctggagagcagcctggagagcctggtgtttgacctgcggaccaagaagaggatcagcgaggccaaggaggagctgaaggagagcaagaagcccaagaaggatgaggtgaaggagaccaaggagctgaagaaggtgaagaagggggagatccgggacctgaagaccaagacccgggaggaccccaaggagaacaggaagaccaagaaggagaagtttgtggagagccaggtggagagcgagagctctgtgctgaatgacagccccttcccagaagatgattctgagggcctgcacagcgacagccgggaggagaagcagaacaccaagagcgcccgggagcgggccggccaggacatgggcctggagcacggctttgagaagcccctggacagcgccatgtctgctgaggaggacacagatgtgcggggccgcaggaagaagaagacccccaggaaggccgaggacaccagagaaaataggaagctggagaacaagaatgccttcctggagaagaagacagtgcccaagaagcagaggaaccaggacaggagcaagtctgctgctgagctggagaagctgatgcctgtgtctgcccagacccccaagggccgccgcctgagcggggaggagcggggcctgtggagcacagattctgctgaggaggacaaggagaccaagagaaatgaaagcaaggagaagtaccagaagagacatgacagcgacaaggaggagaagggcaggaaggagcccaagggcctgaagaccctgaaggagatcagaaatgcctttgacctcttcaagctgaccccagaggagaagaatgatgtgtctgagaacaacaggaagcgggaggagatccccctggacttcaagaccattgatgaccacaagaccaaggagaacaagcagagcctgaaggagaggaggaacaccagagatgaaacagacacctgggcctacatcgctgctgagggggaccaggaggtgctggacagcgtgtgccaggctgatgaaaattctgatggccggcagcagatcctgagcctgggcatggacctgcagctggagtggatgaagctggaggacttccagaagcacctggatggcaaggatgaaaattttgctgccacagatgccatccccagcaatgtgctgagagatgctgtgaagaatggagactacatcaccgtgaaggtggccctgaacagcaatgaggagtacaacctggaccaggaggacagcagcggcatgaccctggtgatgctggccgccgccggcggccaggatgacctgctgcggctgctgatcaccaagggggccaaggtgaatggccggcagaagaatggcaccacagccctgattcatgctgctgagaagaacttcctgaccaccgtggccatcctgctggaggccggggcctttgtgaatgtgcagcagagcaatggagaaacagccctgatgaaggcctgcaagaggggcaacagcgacatcgtgcggctggtgattgaatgtggggctgactgcaacatcctgagcaagcaccagaacagcgccctgcactttgccaagcagagcaacaacgtgctggtgtatgacctgctgaagaaccacctggagaccctgagccgggtggccgaggagaccatcaaggactactttgaggcccggctggccctgctggagcctgtgttccccatcgcctgccaccggctgtgtgagggccctgacttcagcacagacttcaactacaagccaccccagaacatccctgagggcagcggcatcctgctcttcatcttccacgccaacttcctgggcaaggaggtgattgcccggctgtgtggcccctgcagcgtgcaggccgtggtgctgaatgacaagttccagctgcccgtcttcctgaccggcagccgctctgtggtgcaggccggcgtgcagtggaggggcctgcagctgactggagtgctgaccagccaggcccaggccatcctgcccccccagccccccaactacctgggcctgaagatgcacgccaccaccagcggctag

SEQ ID NO: 329544 - DNA, 4390 bp, Artificial Sequence
  derived and/or modified sequence
gttacgccgctgatgtggagtagggccgagcgcggaacgcgaggggctgctggggtgtttgtcgcagcgggttttcctcggcggtttgcggagctgctaggatggagcaggttgcggagggagcaagggtgaccgcagtccctgtgtcagctgccgacagcactgaggagttggccgaagtcgaagaaggagttggagtagtgggcgaagataatgacgcagccgcgagaggagcggaggcctttggcgacagtgaggaggacggagaggatgtgttcgaggtggagaagatcctggacatgaagaccgaggggggtaaagttctttacaaagttcgctggaaaggctatacatcggatgatgatacctgggagcccgagattcacctggaggactgtaaagaagtgcttcttgaatttaggaagaaaattgcagagaacaaagccaaagcagtcaggaaggatattcagagactatccttaaataacgacatatttgaggcgaactctgatagcgatcagcaaagtgagacaaaagaagatacttccccaaagaagaaaaagaaaaaattgaggcagagagaagagaaaagcccagatgatctgaaaaagaaaaaagcaaaggccgggaagctaaaagacaagtccaaaccagacctggagagctccttggaaagtttagtttttgatttaaggacaaagaaaagaatttctgaagccaaagaagaactaaaggagtccaaaaagcccaaaaaagatgaagtaaaagaaacaaaagaattaaagaaagttaaaaagggtgaaataagagatttaaagacgaaaacaagagaagatcccaaagaaaatagaaaaacaaaaaaagaaaaatttgtcgaatcccaggtggaatctgaatcaagtgtacttaatgattctccctttccagaggatgacagtgaagggctacattccgacagcagagaagagaaacaaaacactaaaagtgcaagagagagagcagggcaggacatggggctggagcatggctttgagaagcccctagacagtgccatgagtgctgaggaggataccgatgtcagaggcaggaggaaaaagaagaccccgagaaaggctgaggacactagagagaacaggaagctagagaacaagaacgctttcttagagaagaaaactgtgcctaaaaagcagaggaatcaagacagaagcaaaagtgctgcagagttagagaagctgatgcctgtatctgcccaaacgccaaagggccggaggttgagcggggaagagagaggcctctggtccacggactcagccgaggaggacaaagaaaccaaaagaaatgaatccaaagaaaaatatcagaaaaggcatgattctgacaaggaagaaaaaggcagaaaagagccaaaaggattaaagacacttaaggaaatcagaaatgcatttgatttatttaaattaactccagaagaaaaaaatgatgtttctgagaataatcggaaaagggaagaaataccactggattttaaaaccatagacgatcacaaaaccaaggaaaacaaacagtcacttaaagaaaggagaaacaccagagacgaaacggatacttgggcatacattgctgcagaaggtgatcaggaggttttagacagcgtgtgccaagcagatgagaattcagatggcaggcagcagattctgagtttgggcatggacctgcagttggaatggatgaagttggaagatttccaaaagcaccttgatgggaaagatgagaattttgctgcaacagatgcaattccaagtaatgtgttaagggatgctgtgaaaaatggggattatattactgtaaaagttgcacttaattcaaatgaagaatataacctggaccaagaggattccagtggaatgacactggtgatgcttgccgccgccggagggcaggacgacctcctgcgactcctcatcacaaaaggcgcgaaagtgaacggtcggcagaagaacgggaccaccgccctcattcatgctgcagagaagaactttttaacaacagtggctattcttttggaagcaggagcttttgtaaatgtccagcaaagcaatggtgagactgcactgatgaaggcctgtaaaagaggaaattcagacatcgtacgactcgtaattgaatgtggagctgactgcaatattttgtcaaagcaccagaatagtgccctgcactttgcgaagcagtctaacaatgtgcttgtgtacgacttgctgaagaaccatttagagacactttcaagagtagcagaagagacaataaaggattactttgaagctcgccttgctctgctagaaccagtttttccaatcgcatgtcatcgactctgtgagggtccagatttttcaacagatttcaattacaaacccccacagaacataccagaaggctctggcatcctgctgtttatcttccatgcaaactttttgggtaaagaagttattgctcggctctgtggaccgtgtagtgtacaagctgtagttctgaatgataaatttcagcttcctgtttttctgacagggtctcgctctgttgtccaggctggagtgcagtggcgcggattacagctcactggagtcttgacttcccaggcacaagcaatcctcccacctcagcctcctaactacctgggactaaaaatgacagtcattttgtttactcattcagccctgttgcaggtcccaataaactcttcataaggttgacagaagcaccctctgccaaggttaagttgctaataggtgcatacagagtgcagctgcagtgaccaaacagaagggactgggcggagttctcttcagaccgattcctatactctctttgacagcagtttggaattcttctagcacatctatgtaaagttttgtctgtaaacctcttgcagttaagcctgttgtctgttgtagtctgtaagatgcgacatagctgtgtctgtgccagtatgccggaatctcagtgcagtgtccagactgcgtatttcagtttttccacaatgtggatagtacatatgaggattatttaagaaaattaaagacttcactttcttttttctggagacggagtttcgctcttgttgcccaggctggagtgcaatggtgcgatctcggctcactgcaagctctgcctcctgggttcaagtgattctcctgcctcagcctcctgagtagctgggattacagacacccgccatggcacccagctaattttgtatttttagtagagatggggtttatccatgttggtcaggctggtcttgaactcctgacctcaggtgatccgcccgcctcggcctcccaaagtgcttggattacaggcatgagccaccgcacccagcaagagttattttcttaacttgaaattttctactagccctggtgaacttctgtgcttaaaaaaaaaaaaaaaaaaaggaaaaattcagctctaaaacatttgcttacagcaagggagccatgttatattcaagttacccaagcaccaaataaagtgtgggtttgctgcccttgaaagggttgggaggcctgatctttttctagtagacagttgccacacattccccaagcacaaaaggtggagatggcagtcactttgtaaatatgctgtagtcacttatcatcttttcaaagggtaacaagagaatctaagatgtagtaagaatgtaaaccagtacactatgagacctaaaagagagtattaaatgtgaacttttagcagagcgtggtggctcacacctataatcccagcgctttggaggctgaggttggaggattgcttaagtccaggagttcaagaccagcctgggtaacatggggtggaacaagcctgtagtcccagatactcaggaggctgaggtgaaaggattgcttgagccagggaggtcaaggctgcagtgagccgtgaaaggccactgcactccagcctgagtgacagaatgagaccttgtctcaaaaaaaaaaaaaagtttcttggaacctatacggtttttttttgttttttttttttgaaaagccagaccttgtgcccttgttttgaacaccgactgggaagatggggcttaggtaacagccaaacctggctgtcagctgtgtgggagccaccaccctctctgggaagagttcctgcttctgtatggcaagcataaatcaagctcagtctgggttatggagaagttgaaaattgttttgttcctcattagtttataattgtatgaaatacgattttaatgaaaacttttcagaattcacgtttgtgtagatatttcagagaaccatttttactttacatcctaaaactgccttttcctatggttttgtcaataaaacactatgatgttggtctgtttcctttt

SEQ ID NO: 329545 - DNA, 2705 bp, Artificial Sequence
  derived and/or modified sequence
gttacgccgctgatgtggagtagggccgagcgcggaacgcgaggggctgctggggtgtttgtcgcagcgggttttcctcggcggtttgcggagctgctaggatggagcaggttgcggagggagcaagggtgaccgcagtccctgtgtcagctgccgacagcactgaggagttggccgaagtcgaagaaggagttggagtagtgggcgaagataatgacgcagccgcgagaggagcggaggcctttggcgacagtgaggaggacggagaggatgtgttcgaggtggagaagatcctggacatgaagaccgaggggggtaaagttctttacaaagttcgctggaaaggctatacatcggatgatgatacctgggagcccgagattcacctggaggactgtaaagaagtgcttcttgaatttaggaagaaaattgcagagaacaaagccaaagcagtcaggaaggatattcagagactatccttaaataacgacatatttgaggcgaactctgatagcgatcagcaaagtgagacaaaagaagatacttccccaaagaagaaaaagaaaaaattgaggcagagagaagagaaaagcccagatgatctgaaaaagaaaaaagcaaaggccgggaagctaaaagacaagtccaaaccagacctggagagctccttggaaagtttagtttttgatttaaggacaaagaaaagaatttctgaagccaaagaagaactaaaggagtccaaaaagcccaaaaaagatgaagtaaaagaaacaaaagaattaaagaaagttaaaaagggtgaaataagagatttaaagacgaaaacaagagaagatcccaaagaaaatagaaaaacaaaaaaagaaaaatttgtcgaatcccaggtggaatctgaatcaagtgtacttaatgattctccctttccagaggatgacagtgaagggctacattccgacagcagagaagagaaacaaaacactaaaagtgcaagagagagagcagggcaggacatggggctggagcatggctttgagaagcccctagacagtgccatgagtgctgaggaggataccgatgtcagaggcaggaggaaaaagaagaccccgagaaaggctgaggacactagagagaacaggaagctagagaacaagaacgctttcttagagaagaaaactgtgcctaaaaagcagaggaatcaagacagaagcaaaagtgctgcagagttagagaagctgatgcctgtatctgcccaaacgccaaagggccggaggttgagcggggaagagagaggcctctggtccacggactcagccgaggaggacaaagaaaccaaaagaaatgaatccaaagaaaaatatcagaaaaggcatgattctgacaaggaagaaaaaggcagaaaagagccaaaaggattaaagacacttaaggaaatcagaaatgcatttgatttatttaaattaactccagaagaaaaaaatgatgtttctgagaataatcggaaaagggaagaaataccactggattttaaaaccatagacgatcacaaaaccaaggaaaacaaacagtcacttaaagaaaggagaaacaccagagacgaaacggatacttgggcatacattgctgcagaaggtgatcaggaggttttagacagcgtgtgccaagcagatgagaattcagatggcaggcagcagattctgagtttgggcatggacctgcagttggaatggatgaagttggaagatttccaaaagcaccttgatgggaaagatgagaattttgctgcaacagatgcaattccaagtaatgtgttaagggatgctgtgaaaaatggggattatattactgtaaaagttgcacttaattcaaatgaagaatataacctggaccaagaggattccagtggaatgacactggtgatgcttgccgccgccggagggcaggacgacctcctgcgactcctcatcacaaaaggcgcgaaagtgaacggtcggcagaagaacgggaccaccgccctcattcatgctgcagagaagaactttttaacaacagtggctattcttttggaagcaggagcttttgtaaatgtccagcaaagcaatggtgagactgcactgatgaaggcctgtaaaagaggaaattcagacatcgtacgactcgtaattgaatgtggagctgactgcaatattttgtcaaagcaccagaatagtgccctgcactttgcgaagcagtctaacaatgtgcttgtgtacgacttgctgaagaaccatttagagacactttcaagagtagcagaagagacaataaaggattactttgaagctcgccttgctctgctagaaccagtttttccaatcgcatgtcatcgactctgtgagggtccagatttttcaacagatttcaattacaaacccccacagaacataccagaaggctctggcatcctgctgtttatcttccatgcaaactttttgggtaaagaagttattgctcggctctgtggaccgtgtagtgtacaagctgtagttctgaatgataaatttcagcttcctgtttttctgacagggtctcgctctgttgtccaggctggagtgcagtggcgcggattacagctcactggagtcttgacttcccaggcacaagcaatcctcccacctcagcctcctaactacctgggactaaaaatgcacgccaccacatccggctaa

SEQ ID NO: 329546 - DNA, 627 bp, Artificial Sequence
  derived and/or modified sequence
atgaaggcctgcaagcggggcaacagcgacatcgtgcggctggtgatagagtgcggcgcagattgcaacatcttgagcaaacaccagaatagtgccctgcacttcgccaaacaatccaataatgtcctggtgtacgacctcttaaagaatcacctggaaactctcagtagagtcgcggaagagaccatcaaggactactttgaggcccgccttgccctgcttgagccagtctttcctattgcatgccatagattgtgtgagggacccgatttttctaccgatttcaactacaagcccccccagaacatcccagagggctctggcatactgctgttcatctttcatgcaaatttcctgggcaaggaggttatcgcaaggctctgcgggccatgtagcgtccaagcggtcgtgcttaacgataaattccagctccccgtcttcttgaccggatctcgaagcgtggtgcaagcgggcgttcagtggcgcggcctgcagctgacgggagtccttacttcgcaagctcaggcaattttgcccccacagcctccgaactacctagggctcaagatgaccgtgatactgttcacccattcagctttgctccaggtgccgatcaactcgagctag

SEQ ID NO: 329547 - DNA, 2604 bp, Artificial Sequence
  derived and/or modified sequence
atggagcaggtggccgagggcgcccgggtgaccgccgtgcccgtgagtgcggctgactctacagaagagctcgctgaggttgaggaaggggttggagttgtcggtgaggacaacgacgctgctgcaaggggagccgaggccttcggcgatagcgaggaagatggtgaagatgtgttcgaagtggagaaaattctggatatgaagaccgaaggcggtaaggtgctgtacaaagtccgctggaaggggtacacaagtgacgacgacacctgggaaccagagatccacctggaggattgcaaagaggttctgctggagtttcgaaaaaaaatcgcagagaacaaagcgaaggcggtccgtaaggatatccagaggctgagtcttaataacgacatttttgaggctaactctgactcggatcagcagtctgagaccaaggaagacacaagccccaaaaaaaagaaaaagaaacttaggcagcgggaagagaaatcccctgacgacttgaaaaagaaaaaggccaaggccggcaaactaaaagacaagtcaaaaccggatctggaaagtagtctagaatcactcgttttcgacctgcggacaaaaaagcggatcagtgaagccaaagaggagttgaaagagtcaaaaaaacccaaaaaggatgaagtgaaagagactaaggaattgaaaaaggtgaagaaaggcgaaatcagggacctgaaaactaaaacgcgggaggaccccaaggagaataggaagactaaaaaggaaaaattcgtcgagagtcaagtggagtccgagtcctccgtgctgaacgacagtccctttcctgaggacgatagcgaaggcttgcatagtgattccagagaagagaaacagaatacgaaatccgcccgggagagggcggggcaagacatgggattagaacacgggttcgagaaacctttagacagcgccatgtccgctgaggaggacaccgacgtacggggacgccgaaaaaaaaagacacccaggaaggctgaagatacgcgcgagaatcgtaaattggaaaataaaaacgcttttctggagaaaaagactgttcccaagaagcagagaaatcaggaccggtccaagtccgccgctgagctggaaaaattgatgcccgttagcgcacagaccccaaaggggaggaggctgagcggcgaagagcgcggattatggtctactgactccgcggaagaggacaaggagacaaaaaggaacgagagcaaggagaagtatcagaaacggcatgattctgacaaggaagagaagggtaggaaagaaccgaagggcttgaaaacccttaaagaaatacggaacgctttcgacctgttcaagttaacccctgaggagaaaaatgacgtgagcgagaacaacagaaaacgggaggagatacctctcgatttcaagacaatcgacgatcacaagactaaagagaacaagcaatccctgaaggaacggaggaacacacgggacgagactgacacctgggcttatatcgcagctgagggagatcaagaggtcctggatagcgtgtgccaggcagacgagaatagcgatggcaggcagcagatactgtcactaggaatggaccttcagttggaatggatgaaattggaggacttccaaaaacacctggacggaaaggacgagaacttcgccgccacagatgccataccaagcaatgtgctacgcgacgcagtcaagaacggtgattatatcaccgttaaagtagctctgaactctaacgaagagtataacctcgatcaggaagacagtagcggaatgacactggtgatgctagccgcagcaggcgggcaggatgacctccttcggctgctgatcactaaaggcgctaaggtgaacgggcggcagaaaaatggaacgaccgctctcatacatgctgcggagaagaattttcttaccacagtggccattctcctggaggccggggcctttgtgaatgtccagcagagtaacggagagaccgctctgatgaaagcctgcaaacgagggaatagcgacatcgttaggctggtgatcgagtgtggtgccgactgcaacattttaagcaaacaccaaaacagcgctcttcactttgctaagcagagcaataatgtgctagtatacgacctgctgaagaaccatctggagaccctttcccgagtggcagaagagactataaaggactacttcgaagctcgacttgccttgctggagcctgtctttccaattgcttgtcaccgcctttgtgagggcccagacttcagtaccgacttcaattataagccaccgcagaatattcccgagggaagcggaatcttgctgtttatcttccatgccaacttccttggtaaggaagtgatcgcacgtctctgcggcccttgttcagtgcaggctgttgtgctcaatgataaattccagctgccagtttttcttacaggctctcggagcgttgtccaggctggggtgcagtggcgtgggcttcaactgacaggagtgcttacctcccaggctcaggccatccttcctccacagcctcctaactatctgggattgaagatgcacgctaccaccagcggatag

SEQ ID NO: 329548 - DNA, 627 bp, Artificial Sequence
  derived and/or modified sequence
atgaaagcatgtaagcgcggtaactccgacattgtgagattggtgatcgagtgtggggcagattgcaatattttgtctaagcaccagaattccgccttgcatttcgccaaacagagtaataatgtgttggtgtatgacttactgaagaatcaccttgagactctttccagagtcgccgaggaaacaattaaagactacttcgaggcccgtttagcgttactcgaaccagtgttccctattgcttgccacaggctctgcgagggacccgactttagtaccgacttcaattataagcctccacaaaacatccccgaaggttccgggattcttctgtttatttttcacgctaactttctgggaaaagaagtgatcgcacgcctttgcgggccatgctcagttcaggcagtagtattgaacgataaatttcagctgcccgttttcctgacaggctccagatcagttgtccaagccggtgtccagtggaggggccttcagttaacgggagtcctcacatcccaggctcaagccatcctccctccccaaccgcctaactatctgggcctcaagatgaccgtgatcctgttcactcactctgccctgttacaagtcccaattaacagcagttag

SEQ ID NO: 329549 - DNA, 2604 bp, Artificial Sequence
  derived and/or modified sequence
atggaacaggtggccgagggggctcgcgttaccgcggtgccagtaagcgccgctgactcgaccgaagaattggctgaggtcgaggaaggagtgggcgtggtgggcgaggacaatgacgctgctgccagaggggctgaggcttttggcgatagcgaggaagatggagaggatgtgtttgaggtagagaaaattctcgacatgaaaaccgaagggggaaaagtgttatacaaagtgcgctggaaagggtatacctcagatgacgacacctgggagcctgaaatccacctggaggactgcaaggaagttctgctcgagttcagaaaaaagatcgctgagaacaaggccaaagctgtgaggaaggacatccagcgcctcagcttgaacaatgacatattcgaagccaacagcgattcagaccagcagtctgaaacaaaagaggacactagccctaaaaagaagaaaaagaaactgcgacagagagaggaaaagtctcctgatgacctcaagaaaaagaaggccaaggccggaaaactgaaggacaagtctaaacccgacttagagagtagcctcgagtccctggtgtttgatcttcggactaagaagcgtatttcagaagccaaagaggagttgaaggagagcaagaaacctaagaaggacgaagtgaaggagactaaggagctgaaaaaggtaaagaaaggcgaaattagagacttgaaaactaagacccgcgaagatcccaaggaaaacaggaagacaaaaaaagagaaattcgtcgagtcgcaggtggagagcgaatcttcagttctgaatgattcaccgtttcctgaggacgactcagaggggctgcattccgactcccgggaggaaaaacaaaatacgaaaagcgccagagaaagagctgggcaagacatggggctagaacatggatttgaaaagccactggatagcgccatgagtgccgaggaggacactgacgtgcggggtaggagaaagaaaaagactccccgaaaggccgaagacacacgtgagaacaggaagcttgagaataaaaacgctttcctggaaaagaagaccgttccaaagaagcaacgcaaccaggaccggtccaaatccgcagccgaactggagaaactaatgcccgtgtccgcccagacaccaaaagggcgacggctgtccggcgaggagaggggcctttggagcactgactctgcagaggaggacaaagaaacaaagcgcaatgagtccaaagaaaagtaccagaagaggcacgactccgataaggaggagaaaggcaggaaggagcccaaggggttgaagacattaaaggagattagaaacgcctttgatctctttaagttgacaccagaggagaagaacgatgtcagtgaaaacaaccgtaagcgcgaagaaattcctttagatttcaaaactatcgacgatcataagacaaaagaaaataaacaaagcctgaaagagaggcggaatacacgcgacgagaccgatacttgggcttacatcgctgccgagggtgaccaggaggtcttggatagcgtttgtcaagcagatgagaatagcgacgggagacagcagattctgagcctgggcatggacttgcagttggaatggatgaagctcgaagatttccaaaagcacctggatggcaaggacgagaacttcgcagcgaccgacgccatcccatctaacgttctcagggacgctgtgaaaaacggtgattacattacggtgaaagtcgctctaaacagcaatgaagaatacaacctagatcaggaagactcctcagggatgaccctggtaatgctggctgccgctggagggcaggacgatctgttgaggctgctcatcacaaaaggcgctaaggtcaatgggagacaaaagaatggaaccactgctttgatccacgcagccgaaaagaattttctgaccaccgtagcaattcttttggaagctggagccttcgtgaacgtccagcaatccaatggggagactgcgctgatgaaggcctgtaagagaggcaacagcgatatagttcggcttgtgatagaatgcggagcagactgcaacatcctgtcaaagcaccagaacagcgcacttcatttcgctaaacagtctaataacgtgttggtctacgaccttttaaagaaccacttggagacactctctcgtgtcgcagaggaaaccattaaggattacttcgaagcaaggctggcactattagagcccgtgttcccgatcgcgtgtcaccgcctgtgcgagggcccagacttttccactgacttcaactataagccccctcagaatatcccagagggaagtggcattttgctctttattttccacgccaacttcctgggcaaggaagtaattgctcgtttgtgcggcccttgctccgttcaagccgtcgtgctcaacgacaaattccaactccctgtctttcttacaggctcacgttcagttgtccaggctggagtgcagtggcggggtctccagctcactggagtcctaacatctcaggcacaggccatcttaccgccacagcccccaaattatttagggctgaaaatgcatgctacaactagcggctag

SEQ ID NO: 329550 - DNA, 627 bp, Artificial Sequence
  derived and/or modified sequence
atgaaggcctgcaagagaggcaacagcgacatcgtgagactggtgatcgagtgcggcgccgactgcaacatcctgagcaagcaccagaacagcgccctgcacttcgccaagcagagcaacaacgtgctggtgtacgacctgctgaagaaccacctggagaccctgagcagagtggccgaggagaccatcaaggactacttcgaggccagactggccctgctggagcccgtgttccccatcgcctgccacagactgtgcgagggccccgacttcagcaccgacttcaactacaagcccccccagaacatccccgagggcagcggcatcctgctgttcatcttccacgccaacttcctgggcaaggaggtgatcgccagactgtgcggcccctgcagcgtgcaggccgtggtgctgaacgacaagttccagctgcccgtgttcctgaccggcagcagaagcgtggtgcaggccggcgtgcagtggagaggcctgcagctgaccggcgtgctgaccagccaggcccaggccatcctgcccccccagccccccaactacctgggcctgaagatgaccgtgatcctgttcacccacagcgccctgctgcaggtgcccatcaacagcagctag

SEQ ID NO: 329551 - DNA, 2604 bp, Artificial Sequence
  derived and/or modified sequence
atggagcaggtggccgagggcgccagagtgaccgccgtgcccgtgagcgccgccgacagcaccgaggagctggccgaggtggaggagggcgtgggcgtggtgggcgaggacaacgacgccgccgccagaggcgccgaggccttcggcgacagcgaggaggacggcgaggacgtgttcgaggtggagaagatcctggacatgaagaccgagggcggcaaggtgctgtacaaggtgagatggaagggctacaccagcgacgacgacacctgggagcccgagatccacctggaggactgcaaggaggtgctgctggagttcagaaagaagatcgccgagaacaaggccaaggccgtgagaaaggacatccagagactgagcctgaacaacgacatcttcgaggccaacagcgacagcgaccagcagagcgagaccaaggaggacaccagccccaagaagaagaagaagaagctgagacagagagaggagaagagccccgacgacctgaagaagaagaaggccaaggccggcaagctgaaggacaagagcaagcccgacctggagagcagcctggagagcctggtgttcgacctgagaaccaagaagagaatcagcgaggccaaggaggagctgaaggagagcaagaagcccaagaaggacgaggtgaaggagaccaaggagctgaagaaggtgaagaagggcgagatcagagacctgaagaccaagaccagagaggaccccaaggagaacagaaagaccaagaaggagaagttcgtggagagccaggtggagagcgagagcagcgtgctgaacgacagccccttccccgaggacgacagcgagggcctgcacagcgacagcagagaggagaagcagaacaccaagagcgccagagagagagccggccaggacatgggcctggagcacggcttcgagaagcccctggacagcgccatgagcgccgaggaggacaccgacgtgagaggcagaagaaagaagaagacccccagaaaggccgaggacaccagagagaacagaaagctggagaacaagaacgccttcctggagaagaagaccgtgcccaagaagcagagaaaccaggacagaagcaagagcgccgccgagctggagaagctgatgcccgtgagcgcccagacccccaagggcagaagactgagcggcgaggagagaggcctgtggagcaccgacagcgccgaggaggacaaggagaccaagagaaacgagagcaaggagaagtaccagaagagacacgacagcgacaaggaggagaagggcagaaaggagcccaagggcctgaagaccctgaaggagatcagaaacgccttcgacctgttcaagctgacccccgaggagaagaacgacgtgagcgagaacaacagaaagagagaggagatccccctggacttcaagaccatcgacgaccacaagaccaaggagaacaagcagagcctgaaggagagaagaaacaccagagacgagaccgacacctgggcctacatcgccgccgagggcgaccaggaggtgctggacagcgtgtgccaggccgacgagaacagcgacggcagacagcagatcctgagcctgggcatggacctgcagctggagtggatgaagctggaggacttccagaagcacctggacggcaaggacgagaacttcgccgccaccgacgccatccccagcaacgtgctgagagacgccgtgaagaacggcgactacatcaccgtgaaggtggccctgaacagcaacgaggagtacaacctggaccaggaggacagcagcggcatgaccctggtgatgctggccgccgccggcggccaggacgacctgctgagactgctgatcaccaagggcgccaaggtgaacggcagacagaagaacggcaccaccgccctgatccacgccgccgagaagaacttcctgaccaccgtggccatcctgctggaggccggcgccttcgtgaacgtgcagcagagcaacggcgagaccgccctgatgaaggcctgcaagagaggcaacagcgacatcgtgagactggtgatcgagtgcggcgccgactgcaacatcctgagcaagcaccagaacagcgccctgcacttcgccaagcagagcaacaacgtgctggtgtacgacctgctgaagaaccacctggagaccctgagcagagtggccgaggagaccatcaaggactacttcgaggccagactggccctgctggagcccgtgttccccatcgcctgccacagactgtgcgagggccccgacttcagcaccgacttcaactacaagcccccccagaacatccccgagggcagcggcatcctgctgttcatcttccacgccaacttcctgggcaaggaggtgatcgccagactgtgcggcccctgcagcgtgcaggccgtggtgctgaacgacaagttccagctgcccgtgttcctgaccggcagcagaagcgtggtgcaggccggcgtgcagtggagaggcctgcagctgaccggcgtgctgaccagccaggcccaggccatcctgcccccccagccccccaactacctgggcctgaagatgcacgccaccaccagcggctag

SEQ ID NO: 329552 - DNA, 2982 bp, Artificial Sequence
  derived and/or modified sequence
gcagatccccgctctcccgggcgccgctactcacacaggcttccagccgccacggggcgtcctctgtctgctgcagcggcggcggcagcagagggaacggcgactgcagcccggccgcgtctcccagctccgtgcccgggacagagtccgggagaagcaaaggaggaggaggacgccgaggctaggaggagccgcgccgcgcccggcgccccactccgcgcagcgggttgcctccgctccccatacggcggccccaggtcctttgctgccagcatgatgtcgtatttataatatgtggaggagagagagctcaccatgctcaggtaaagggatggtatgtgcaccacaaataacaagcagaagcctctgatatgtcagaaccatgctgtcttccatgagacttcctttgtgaagagcatccatttaaaagacttttatgaatacatggtttcaatcaagtccccagagaacacatttgtcttctgagctgctggcagttttgagaatctgatgacctccgaggggaccctgcactcagccatcaaagtgttcctgcccctctggacactcataattcaatggtagatgcaggtggagttgagaacatcacccagcttccccaggagcttcctcagatgatggctgcagcagccgatggtttggggagtatagcgatagacacgacccagctcaacatgtccgtgacagatcccacagcctgggctacagccatgaataacctgggcatggttcccgtagggttgcctggacagcagctcgtgtctgactcaatctgtgtcccaggctttgatccaagcctcaacatgatgactggaatcacccccattaacccaatgataccaggccttggactggtacctcccccaccaccaacagaagtggctgttgtcaaagaaataatccactgcaaaagctgtactctttttcctcaaaatccaaatcttccacctccttccacaagagaacgacctcctgggtgtaagaccgtgtttgtcggaggattaccagaaaatgctactgaggaaattattcaagaagtctttgaacagtgcggtgatattacagcaattcggaaaagcaagaagaatttttgtcacattcgctttgcagaggaattcatggttgataaagccatttacctttctggttataggatgcgattagggtctagcaccgacaaaaaggattcaggccgccttcatgtggactttgcccaggccagggatgacttctatgagtgggaatgcaagcagaggatgcgtgcccgggaggagcggcaccggcgcaagctggaggaggaccggctcaggcccccatccccgcctgccataatgcactactcggagcacgaagccgctctgctggctgaaaagctgaaagatgatagcaagttttcagaggctatcacagtgctgctttcctggattgaacgaggggaagtgaatcggcgctctgcaaaccagttctattccatggtgcagtcggccaacagccacgtccgccggctaatgaatgaaaaagccacccatgagcaagagatggaggaagccaaggagaattttaaaaatgccttaactgggattctcactcaatttgagcagattgtggccgttttcaacgcttctaccagacaaaaagcttgggaccatttctcgaaagcccagcgcaagaacatagacatttggcgaaagcattctgaggagctccggaatgctcaaagtgagcagctcatgggcatccgccgcgaagaagaaatggaaatgtctgatgatgagaactgtgacagccctacaaagaaaatgagagtcgatgaatcagccctggctgcccaggcctacgctctgaaagaggagaatgacagtctccgctggcagctggatgcctacaggaatgaggtggagctgctgaaacaagaaaaagaacagcttttccgaacagaagaaaacctcaccaaggaccagcaactgcagtttctgcagcaaaccatgcaaggcatgcagcagcaattgctaaccatccaggaggagttaaacaacaaaaagtcagaattggaacaagcaaaggaagagcagtcccatacacaagcgttactaaaagtcctgcaggaacaattaaaaggtaccaaggaattggtcgagaccaatggccacagccatgaggattcaaatgaaatcaatgtgttgacagttgcattagtcaaccaagaccgagagaacaatattgagaaaagaagccaaggcttaaaatcagagaaagaagctctgctaataggtatcatatcaacgtttcttcacgtccatccttttggagccaacatagaatatctttggtcatacatgcagcagctggactccaagatatctgcaaatgaaatagaaatgcttttgatgaggctgccacgcatgttcaaacaggaattcacgggtgtgggagccacgctggaaaaaagatggaagctgtgtgcctttgaaggaattaaaactacctaactgcgaagagcaaagcatctctggaaatgaaaccatgtgaacctggccagggcggtgcgacggggaagcaggaggtgtggggttggtccagcacgcaacctttgtggagccatcgaagcctgcctttagttatatctgtggcgttctcttgtaagtggaaatgtaattgtgtaccagtttcttaaaataaacaaagcttcatactgtgacagatctgtttcctatgaaaaccaaacaatgattccacagtcataatgatggcaaaatcttaaaatgtgctacatttgagaatagctcaccaagcaaaatatttaaagttaatgatggtgtagcaatgattgttgctaggctacagagttgtatatgtaatgtatagctgaaatcattaaatgacattttcctgaaagtctttctgttttagtaaaaaaaaaaaaaaaaaaaaaaagaaaaagaaaaagaaaaaaagaaaaaa

SEQ ID NO: 329553 - DNA, 2610 bp, Artificial Sequence
  derived and/or modified sequence
gatggacagaagatggaaaaatttcttacatgaatgaaaagcctctgatatgtcagaaccatgctgtcttccatgagacttcctttgtgaagagcatccatttaaaagacttttatgaatacatggtttcaatcaagtccccagagaacacatttgtcttctgagctgctggcagttttgagaatctgatgacctccgaggggaccctgcactcagccatcaaagtgttcctgcccctctggacactcataattcaatggtagatgcaggtggagttgagaacatcacccagcttccccaggagcttcctcagatgatggctgcagcagccgatggtttggggagtatagcgatagacacgacccagctcaacatgtccgtgacagatcccacagcctgggctacagccatgaataacctgggcatggttcccgtagggttgcctggacagcagctcgtgtctgactcaatctgtgtcccaggctttgatccaagcctcaacatgatgactggaatcacccccattaacccaatgataccaggccttggactggtacctcccccaccaccaacagaagtggctgttgtcaaagaaataatccactgcaaaagctgtactctttttcctcaaaatccaaatcttccacctccttccacaagagaacgacctcctgggtgtaagaccgtgtttgtcggaggattaccagaaaatgctactgaggaaattattcaagaagtctttgaacagtgcggtgatattacagcaattcggaaaagcaagaagaatttttgtcacattcgctttgcagaggaattcatggttgataaagccatttacctttctggttataggatgcgattagggtctagcaccgacaaaaaggattcaggccgccttcatgtggactttgcccaggccagggatgacttctatgagtgggaatgcaagcagaggatgcgtgcccgggaggagcggcaccggcgcaagctggaggaggaccggctcaggcccccatccccgcctgccataatgcactactcggagcacgaagccgctctgctggctgaaaagctgaaagatgatagcaagttttcagaggctatcacagtgctgctttcctggattgaacgaggggaagtgaatcggcgctctgcaaaccagttctattccatggtgcagtcggccaacagccacgtccgccggctaatgaatgaaaaagccacccatgagcaagagatggaggaagccaaggagaattttaaaaatgccttaactgggattctcactcaatttgagcagattgtggccgttttcaacgcttctaccagacaaaaagcttgggaccatttctcgaaagcccagcgcaagaacatagacatttggcgaaagcattctgaggagctccggaatgctcaaagtgagcagctcatgggcatccgccgcgaagaagaaatggaaatgtctgatgatgagaactgtgacagccctacaaagaaaatgagagtcgatgaatcagccctggctgcccaggcctacgctctgaaagaggagaatgacagtctccgctggcagctggatgcctacaggaatgaggtggagctgctgaaacaagaaaaagaacagcttttccgaacagaagaaaacctcaccaaggaccagcaactgcagtttctgcagcaaaccatgcaaggcatgcagcagcaattgctaaccatccaggaggagttaaacaacaaaaagtcagaattggaacaagcaaaggaagagcagtcccatacacaagcgttactaaaagtcctgcaggaacaattaaaaggtaccaaggaattggtcgagaccaatggccacagccatgaggattcaaatgaaatcaatgtgttgacagttgcattagtcaaccaagaccgagagaacaatattgagaaaagaagccaaggcttaaaatcagagaaagaagctctgctaataggtatcatatcaacgtttcttcacgtccatccttttggagccaacatagaatatctttggtcatacatgcagcagctggactccaagatatctgcaaatgaaatagaaatgcttttgatgaggctgccacgcatgttcaaacaggaattcacgggtgtgggagccacgctggaaaaaagatggaagctgtgtgcctttgaaggaattaaaactacctaactgcgaagagcaaagcatctctggaaatgaaaccatgtgaacctggccagggcggtgcgacggggaagcaggaggtgtggggttggtccagcacgcaacctttgtggagccatcgaagcctgcctttagttatatctgtggcgttctcttgtaagtggaaatgtaattgtgtaccagtttcttaaaataaacaaagcttcatactgtgacagatctgtttcctatgaaaaccaaacaatgattccacagtcataatgatggcaaaatcttaaaatgtgctacatttgagaatagctcaccaagcaaaatatttaaagttaatgatggtgtagcaatgattgttgctaggctacagagttgtatatgtaatgtatagctgaaatcattaaatgacattttcctgaaagtctttctgttttagt

SEQ ID NO: 329554 - DNA, 708 bp, Artificial Sequence
  derived and/or modified sequence
atggtggacaaggccatctacctgtctggatataggatgagactgggcagctctaccgacaagaaagacagcggacgacttcatgtagactttgctcaagccagagacgatttctacgaatgggagtgcaaacaacggatgcgtgctcgcgaagagaggcatcggcgcaagctagaagaggaccggctccgtcctcctagtcccccggccatcatgcactactccgagcatgaagcagccctcctggccgagaagctgaaggacgactcaaaattctcagaggccattaccgtcctgctaagctggatcgagaggggcgaggtaaatcgccgctctgcaaatcagttctactctatggttcagagcgccaatagccacgtccgcagactcatgaacgagaaagctactcacgagcaagaaatggaagaggcgaaagagaatttcaaaaacgccctgacggggattctgacccagtttgagcagattgttgcagttttcaatgcctctaccaggcagaaggcctgggaccatttctcaaaagcccagagaaagaacatcgatatatggaggaaacattccgaggagctgagaaacgctcaaagcgaacaactcatgggcatacggagggaggaggaaatggagatgtcagatgacgaaaactgcgatagtccaactaagaaaatgcgggtggatgagagcggggcatag

SEQ ID NO: 329555 - DNA, 708 bp, Artificial Sequence
  derived and/or modified sequence
atggtggacaaggccatctacctgagcggctacaggatgaggctgggcagcagcacagacaagaaggacagcggccgcctgcacgtggactttgcccaggccagagatgacttctatgagtgggagtgcaagcagaggatgagggcccgggaggagcggcacaggaggaagctggaggaggaccggctgcggccccccagccccccagccatcatgcactacagcgagcatgaagctgccctgctggccgagaagctgaaggatgacagcaagttcagcgaggccatcaccgtgctgctgtcctggattgagcggggggaggtgaacagaagaagtgccaaccagttctacagcatggtgcagagcgccaacagccacgtgcggcggctgatgaatgagaaggccacccatgagcaggagatggaggaggccaaggagaacttcaagaatgccctgaccggcatcctgacccagtttgagcagatcgtggccgtgttcaatgccagcacccggcagaaggcctgggaccacttcagcaaggcccagaggaagaacatcgacatctggaggaagcacagcgaggagctgagaaatgcccagagcgagcagctgatgggcatccggcgggaggaggagatggagatgtctgatgatgagaactgtgacagccccaccaagaagatgagggtggatgaaagtggggcctag

SEQ ID NO: 329556 - DNA, 708 bp, Artificial Sequence
  derived and/or modified sequence
atggtggacaaggccatctacctgagcggctaccggatgcggctggggtccagcacagataagaaagattcgggcaggctccacgtggacttcgcccaagccagggatgacttctacgagtgggaatgtaagcaacggatgcgggcacgggaagagaggcaccggcgaaagttggaagaggatcgactgcggcccccgagtccacccgcgattatgcattattctgaacatgaggccgctcttctggctgagaaactgaaggacgactcgaagttctcagaagctatcaccgtcctgctcagttggatcgaacggggcgaggtgaatagaaggagcgccaatcagttttacagtatggtccagtccgccaattctcatgtgaggaggctcatgaatgaaaaggccactcatgagcaggaaatggaagaggccaaagagaactttaaaaacgctctaacagggatcctgacccagtttgaacagatagtggcagtttttaatgccagcacccgccagaaggcctgggaccacttttctaaggcacaaaggaagaacatcgatatctggagaaagcattcagaagagctacgcaacgcccagagtgagcagttgatggggatccgaagggaggaagagatggaaatgtcagacgacgagaactgtgactcaccgactaaaaaaatgagggtggatgagagtggagcatag

SEQ ID NO: 329557 - DNA, 708 bp, Artificial Sequence
  derived and/or modified sequence
atggtggacaaggccatctacctctctggataccgcatgaggctaggctccagcactgacaaaaaggatagcggacggttacatgtagactttgcccaagcccgtgatgacttctacgagtgggagtgcaagcagcggatgagagcccgagaggaacgccacaggagaaaacttgaagaagacagattgcgccctccttcaccacccgcaatcatgcactactcagagcacgaagccgcactgctcgctgagaaactgaaggacgattccaaatttagtgaggccatcaccgtgctcttgtcctggatagaacgaggtgaggtgaaccgacggtccgccaatcagttttactccatggtccagtccgctaacagtcacgtgaggcgccttatgaacgaaaaggccacccacgagcaagagatggaggaagcaaaggagaattttaagaatgcgctgacgggcatactcacacagtttgaacagattgtcgccgtctttaacgcatctacacggcagaaggcctgggaccatttcagcaaagcccaacggaaaaatatcgacatttggagaaaacactccgaggaattgcgtaatgcccagtctgaacaactgatggggatccggagagaagaggaaatggagatgagtgacgatgaaaattgcgacagtcctactaagaagatgagagtggatgaatccggggcatag

SEQ ID NO: 329558 - DNA, 708 bp, Artificial Sequence
  derived and/or modified sequence
atggtggacaaggccatctacctgagcggctacagaatgagactgggcagcagcaccgacaagaaggacagcggcagactgcacgtggacttcgcccaggccagagacgacttctacgagtgggagtgcaagcagagaatgagagccagagaggagagacacagaagaaagctggaggaggacagactgagaccccccagcccccccgccatcatgcactacagcgagcacgaggccgccctgctggccgagaagctgaaggacgacagcaagttcagcgaggccatcaccgtgctgctgagctggatcgagagaggcgaggtgaacagaagaagcgccaaccagttctacagcatggtgcagagcgccaacagccacgtgagaagactgatgaacgagaaggccacccacgagcaggagatggaggaggccaaggagaacttcaagaacgccctgaccggcatcctgacccagttcgagcagatcgtggccgtgttcaacgccagcaccagacagaaggcctgggaccacttcagcaaggcccagagaaagaacatcgacatctggagaaagcacagcgaggagctgagaaacgcccagagcgagcagctgatgggcatcagaagagaggaggagatggagatgagcgacgacgagaactgcgacagccccaccaagaagatgagagtggacgagagcggcgcctag

SEQ ID NO: 329559 - DNA, 1258 bp, Artificial Sequence
  derived and/or modified sequence
actataaagccagtatgtgggatttagggatgtgtatccagcgttaagactttttgcatgcagtgaagcctagtgtttgccggagaacacagtgtgaaatatgtgagcatttccatccatcttcacaaatatcttccacctccttccacaagagaacgacctcctgggtgtaagaccgtgtttgtcggaggattaccagaaaatgctactgaggaaattattcaagaagtctttgaacagtgcggtgatattacagcaattcggaaaagcaagaagaatttttgtcacattcgctttgcagaggaattcatggttgataaagccatttacctttctggttataggatgcgattagggtctagcaccgacaaaaaggattcaggccgccttcatgtggactttgcccaggccagggatgacttctatgagtgggaatgcaagcagaggatgcgtgcccgggaggagcggcaccggcgcaagctggaggaggaccggctcaggcccccatccccgcctgccataatgcactactcggagcacgaagccgctctgctggctgaaaagctgaaagatgatagcaagttttcagaggctatcacagtgctgctttcctggattgaacgaggggaagtgaatcggcgctctgcaaaccagttctattccatggtgcagtcggccaacagccacgtccgccggctaatgaatgaaaaagccacccatgagcaagagatggaggaagccaaggagaattttaaaaatgccttaactgggattctcactcaatttgagcagattgtggccgttttcaacgcttctaccagacaaaaagcttgggaccatttctcgaaagcccagcgcaagaacatagacatttggcgaaagcattctgaggagctccggaatgctcaaagtgagcagctcatgggcatccgccgcgaagaagaaatggaaatgtctgatgatgagaactgtgacagccctacaaagaaaatgagagtcgatgaatcaggtgcttaacatacaagtaggcaccatgccactattttctgaagccatatatcccttgtctgaaaaatgaacccagcacttatgtgtcaatgatgtatgtctcctgctaagcccagatcagattcctcaggactgctttactcttgggtttgtttatttgaggagaccaccttcctcacaggatttctattctacaaaccttcacatagcaaaagaagggggcaaggatttgtgtgaatttcttaagttc

SEQ ID NO: 329560 - protein, 248 aa, Artificial Sequence
  derived and/or modified sequence
MMLRGNLKQVRIEKNPARLRALESAVGESEPAAAAAMALALAGEPAPPAPAPPEDHPDEEMGFTIDIKSFLKPGEKTYTQRCRLFVGNLPTDITEEDFKRLFERYGEPSEVFINRDRGFGFIRLESRTLAEIAKAELDGTILKSRPLRIRFATHGAALTVKNLSPVVSNELLEQAFSQFGPVEKAVVVVDDRGRATGKGFVEFAAKPPARKALERCGDGAFLLTTTPRPVIVEPMEQFDDEDGLPEKL

SEQ ID NO: 329561 - DNA, 747 bp, Artificial Sequence
  derived and/or modified sequence
atgatgttacgcggtaacctgaaacaggtgcggatcgaaaaaaatcccgcccgcttgcgcgcacttgagtccgctgtcggggaatctgaacctgcggccgcagcagctatggctctggcgctggccggagagcccgcaccccctgcaccagctccgcctgaagatcacccagatgaggagatggggttcactatagacattaaaagttttctgaaacctggtgaaaaaacttatacacaacggtgcaggttatttgtggggaacctgcccaccgacatcaccgaagaagactttaaacgcctgtttgaacggtacggcgaaccgtcggaggtgtttattaatagagaccgcgggttcgggtttatcaggctggagagtcgtacgttagccgaaattgcaaaggcagaattagacggaactatcctgaaaagtcgccccctgcgaattcgattcgccacacacggtgccgccctgaccgttaagaatctatctcctgtcgttagtaacgaactgctggagcaggccttctcacagttcgggcccgtggagaaggccgtcgtcgtcgtcgatgatcgcggtagggcaacaggaaagggattcgtagagttcgctgcaaagccacccgctagaaaggccttggaacgctgcggcgacggagcttttcttctgaccactactcccagaccagttatcgtggaacccatggagcagttcgatgatgaagatggcttaccagagaaactgtag

SEQ ID NO: 329562 - DNA, 747 bp, Artificial Sequence
  derived and/or modified sequence
atgatgctgcggggcaacctgaagcaggtgcgcatcgagaagaacccagcccggctgcgggccctggagagcgctgtgggggagagcgagcctgctgctgctgctgccatggccctggccctggccggggagcccgcccccccagccccagcccctcctgaggaccacccagatgaggagatgggcttcaccatcgacatcaagagcttcctgaagccaggagagaagacctacacccagcgctgccgcctgtttgtgggcaacctgcccacagacatcacagaggaggacttcaagaggctgtttgaaagatatggagagcccagcgaggtgttcatcaacagagaccggggcttcggcttcatccggctggagagcaggaccctggccgagatcgccaaggccgagctggatggcaccatcctgaagagccggcccctgcgcatccgctttgccacccacggggccgccctgactgtgaagaacctgagccctgtggtgtccaatgagctgctggagcaggccttcagccagtttggacctgtggagaaggctgtggtggtggtggatgaccggggccgggccaccgggaagggctttgtggagtttgctgccaagcccccagccaggaaggccctggagcgctgtggagatggagccttcctgctgaccaccacccccaggcctgtgattgtggagcccatggagcagtttgatgatgaagatggcctgcctgagaagctgtag

SEQ ID NO: 329563 - DNA, 747 bp, Artificial Sequence
  derived and/or modified sequence
atgatgctgcggggcaacctgaagcaggtgcggatcgagaagaacccagcgcggctgcgagcattggagtctgcagtgggcgagagcgagcccgccgcagccgcagccatggcactcgcactggccggtgagccagcaccacccgcccctgctccccccgaagaccatcctgacgaggaaatgggattcaccattgacattaaaagcttcctgaagccaggggaaaaaacctacactcaaaggtgcaggcttttcgtcggtaacctgcccaccgacattaccgaggaggatttcaaacgattatttgaaaggtatggggagccaagtgaggttttcattaatagagaccggggattcggttttattcggcttgagagcaggacactggctgagatcgccaaagctgaactggacggtacaattcttaagtctcgccccctgaggatcaggttcgccactcatggagccgctctgaccgttaagaacctttctccagtagtgtctaatgagcttcttgaacaggcattttcacaattcgggcccgttgaaaaggccgtcgtggtagtcgacgaccggggacgggctaccgggaaggggtttgttgaattcgctgccaagccacccgcaaggaaggccttggagcggtgcggcgatggggctttcctccttaccactacccctcgccctgtgatcgtggaacctatggagcagttcgatgatgaagacggactgccggagaaactatag

SEQ ID NO: 329564 - DNA, 866 bp, Artificial Sequence
  derived and/or modified sequence
ggcggaggggtgggacttgcaccggcgtctcttcttctaactgcagtttgtggcagcgccattttgaatgtgcagctgcagcgggcgcctgtatccggtgtccgaggcgaactcagtaagatgatgttaagaggaaacctgaagcaagtgcgcattgagaaaaacccggcccgccttcgcgccctggagtccgcggtgggcgagagcgagccggcggccgcggcagccatggcgctcgctcttgccggggagccggcaccgcccgcgcccgcgcctccagaggaccacccggacgaggagatggggttcactatcgacatcaagagtttcctcaagccgggcgagaagacgtacacgcagcgctgccgcctcttcgtgggaaatctgcccaccgacatcacggaggaggacttcaagaggctcttcgaacgctatggcgagcccagcgaagtcttcatcaaccgggaccgtggcttcggcttcatccgcttggaatccagaaccctggctgaaattgcaaaagcagagctggacggcaccattctcaagagcagacctctacggattcgcttcgctacacatggagcagccttgactgtcaagaacctttctccagttgtttccaatgagctgctagagcaagcattttctcagtttggtccagtagagaaagctgttgtggttgtggatgatcgcggtagagctacaggaaaaggttttgtagagtttgcagcaaaacctcctgcacgaaaggctctggaaagatgtggtgatggggcattcttgctaacaacgacccctcgtccagtcattgtggaacccatggagcagtttgatgatgaagatggcttgccagagaagctgat

SEQ ID NO: 329565 - DNA, 747 bp, Artificial Sequence
  derived and/or modified sequence
atgatgcttaggggaaacttaaagcaggttaggatcgaaaagaatcccgcaagattacgagccctggaatccgcggttggtgaatcggagcctgcagcagctgcagctatggcgctggctctcgcgggtgagcccgcaccaccggctcctgcacccccagaggaccacccagacgaggagatggggttcacaatcgacataaaatcgtttctcaaaccaggggagaagacctacacccagagatgtagactgtttgtgggcaatctgcctactgacatcactgaggaggacttcaagcgattgttcgagagatacggggagccatcagaggtcttcatcaaccgcgaccggggatttggatttattcgacttgaatccaggacgctcgctgagatcgccaaggctgaactcgacggtactatcctcaaatctagaccactgagaatccggtttgccacgcatggagccgcactgaccgtgaagaatttgagccctgttgtgtcaaacgaattgctggaacaggccttttctcaatttgggcctgtcgagaaagctgttgtggtagtagacgacagaggcagggctacgggtaagggatttgtggagtttgctgctaagccacctgcccgaaaagcgctcgagcgctgcggggacggggcattccttctaacaactactcctcgcccagtgatagtggagcctatggaacaattcgatgatgaagatggtctgcccgagaagctctag

SEQ ID NO: 329566 - DNA, 747 bp, Artificial Sequence
  derived and/or modified sequence
atgatgctgagaggcaacctgaagcaggtgagaatcgagaagaaccccgccagactgagagccctggagagcgccgtgggcgagagcgagcccgccgccgccgccgccatggccctggccctggccggcgagcccgccccccccgcccccgccccccccgaggaccaccccgacgaggagatgggcttcaccatcgacatcaagagcttcctgaagcccggcgagaagacctacacccagagatgcagactgttcgtgggcaacctgcccaccgacatcaccgaggaggacttcaagagactgttcgagagatacggcgagcccagcgaggtgttcatcaacagagacagaggcttcggcttcatcagactggagagcagaaccctggccgagatcgccaaggccgagctggacggcaccatcctgaagagcagacccctgagaatcagattcgccacccacggcgccgccctgaccgtgaagaacctgagccccgtggtgagcaacgagctgctggagcaggccttcagccagttcggccccgtggagaaggccgtggtggtggtggacgacagaggcagagccaccggcaagggcttcgtggagttcgccgccaagccccccgccagaaaggccctggagagatgcggcgacggcgccttcctgctgaccaccacccccagacccgtgatcgtggagcccatggagcagttcgacgacgaggacggcctgcccgagaagctgtag

SEQ ID NO: 329567 - protein, 1136 aa, Artificial Sequence
  derived and/or modified sequence
MFLMPTSSELNSGQNFLTQWMTNPSRAGVILNRGFPILEADKEKRAAVDISTSFPIKGTHFSDSFSFINEEDSLLEEQKLESNNPYKPQSDKSETHTAFPCIKKGPQVAACHSAPGHQEENKNDFIPDLASEFKEGAYKDPLFKKLEQLKEVQQKKQEQLKRQQLEQLQRLMEEQEKLLTMVSGQCTLPGLSLLPDDQSQKHRSPGNTTTGERATCCFPSYVYPDPTQEETYPSNILSHEQSNFCRTAHGDFVLTSKRASPNLFSEAQYQEAPVEKNNLKEENRNHPTGESILCWEKVTEQIQEANDKNLQKHDDSSEVANIEERPIKAAIGERKQTFEDYLEEQIQLEEQELKQKQLKEAEGPLPIKAKPKQPFLKRGEGLARFTNAKSKFQKGKESKLVTNQSTSEDQPLFKMDRQQLQRKTALKNKELCADNPILKKDSKARTKSGSVTLSQKPKMLKCSNRKSLSPSGLKIQTGKKCDGQFRDQIKFENKVTSNNKENVTECPKPCDTGCTGWNKTQGKDRLPLSTGPASRLAAKSPIRETMKESESSLDVSLQKKLETWEREKEKENLELDEFLFLEQAADEISFSSNSSFVLKILERDQQICKGHRMSSTPVKAVPQKTNPADPISHCNRSEDLDHTAREKESECEVAPKQLHSLSSADELREQPCKIRKAVQKSTSENQTEWNARDDEGVPNSDSSTDSEEQLDVTIKPSTEDRERGISSREDSPQVCDDKGPFKDTRTQEDKRRDVDLDLSDKDYSSDESIMESIKHKVSEPSRSSSLSLSKMDFDDERTWTDLEENLCNHDVVLGNESTYGTPQTCYPNNEIGILDKTIKRKIAPVKRGEDLSKSRRSRSPPTSELMMKFFPSLKPKPKSDSHLGNELKLNISQDQPPGDNARSQVLREKIIELETEIEKFKAENASLAKLRIERESALEKLRKEIADFEQQKAKELARIEEFKKEEMRKLQKERKVFEKYTTAARTFPDKKEREEIQTLKQQIADLREDLKRKETKWSSTHSRLRSQIQMLVRENTDLREEIKVMERFRLDAWKRAEAIESSLEVEKKDKLANTSVRFQNSQISSGTQVEKYKKNYLPMQGTAQPPHTPSSLLADHLPPLSSFRPFSRNIQLCYTF

SEQ ID NO: 329568 - protein, 1086 aa, Artificial Sequence
  derived and/or modified sequence
MFLMPTSSELNSGQNFLTQWMTNPSRAGVILNRGFPILEADKEKRAAVDISTSFPIKGTHFSDSFSFINEEDSLLEEQKLESNNPYKPQSDKSETHTAFPCIKKGPQVAACHSAPGHQEENKNDFIPDLASEFKEGAYKDPLFKKLEQLKEVQQKKQEQLKRQQLEQLQRLMEEQEKLLTMVSGQCTLPGLSLLPDDQSQKHRSPGNTTTGERATCCFPSYVYPDPTQEETYPSNILSHEQSNFCRTAHGDFVLTSKRASPNLFSEAQYQEAPVEKNNLKEENRNHPTGESILCWEKVTEQIQEANDKNLQKHDDSSEVANIEERPIKAAIGERKQTFEDYLEEQIQLEEQELKQKQLKEAEGPLPIKAKPKQPFLKRGEGLARFTNAKSKFQKGKESKLVTNQSTSEDQPLFKMDRQQLQRKTALKNKELCADNPILKKDSKARTKSGSVTLSQKPKMLKCSNRKSLSPSGLKIQTGKKCDGQFRDQIKFENKVTSNNKENVTECPKPCDTGCTGWNKTQGKDRLPLSTGPASRLAAKSPIRETMKESESSLDVSLQKKLETWEREKEKENLELDEFLFLEQAADEISFSSNSSFVLKILERDQQICKGHRMSSTPVKAVPQKTNPADPISHCNRSEDLDHTAREKESECEVAPKQLHSLSSADELREQPCKIRKAVQKSTSENQTEWNARDDEGVPNSDSSTDSEEQLDVTIKPSTEDRERGISSREDSPQVCDDKGPFKDTRTQEDKRRDVDLDLSDKDYSSDESIMESIKHKVSEPSRSSSLSLSKMDFDDERTWTDLEENLCNHDVVLGNESTYGTPQTCYPNNEIGILDKTIKRKIAPVKRGEDLSKSRRSRSPPTSELMMKFFPSLKPKPKSDSHLGNELKLNISQDQPPGDNARSQVLREKIIELETEIEKFKAENASLAKLRIERESALEKLRKEIADFEQQKAKELARIEEFKKEEMRKLQKERKVFEKYTTAARTFPDKKEREEIQTLKQQIADLREDLKRKETKWSSTHSRLRSQIQMLVRENTDLREEIKVMERFRLDAWKRAEAIESSLEVEKKDKLAAIHLEDPSLHLLVI

SEQ ID NO: 329569 - DNA, 3411 bp, Artificial Sequence
  derived and/or modified sequence
atgtttctgatgccaacctcttccgagttgaattccggccagaacttcctgactcagtggatgactaatccatctagggcaggcgtgatcctaaaccgggggttccctattcttgaagccgataaagagaaacgggcagcggtggacatatcgacgtcattcccaattaagggcactcacttttctgactccttttcatttatcaacgaagaagatagcttactggaggagcagaagttggaaagcaataacccttacaagccccagagtgacaaatctgagacccacaccgccttcccctgcattaagaagggcccacaggtggctgcatgtcatagtgccccagggcatcaggaagaaaataaaaacgatttcattccagatctcgcctcagagtttaaggaaggggcctataaagatcccctgtttaagaagctcgaacagctgaaggaagttcagcaaaagaagcaagaacaactgaaaagacagcaattagagcagttgcaacggctcatggaggaacaggaaaaactccttactatggtgtctggtcagtgcacgcttccaggattgagccttttacctgacgaccagagtcaaaagcaccgatcccctggcaacaccaccaccggagagcgggcaacatgctgctttccctcctacgtttatcccgaccccactcaagaagaaacctacccttccaacatcctctcccacgagcagtccaacttttgccgcactgcccatggggactttgtgctgacgagcaagcgcgcctcacctaacctcttttctgaagcccaataccaggaagcaccggtcgaaaagaacaatctaaaggaggagaaccgaaaccacccgactggcgagagcatcctttgctgggagaaggtgaccgaacaaatccaggaagctaacgacaagaacctgcagaaacacgacgatagctcagaagtggccaacatcgaagaacgccctatcaaggcagccattggagaacgtaaacagacctttgaggactatctcgaggagcagatccaactggaagagcaagaactcaaacaaaagcagcttaaggaggctgaggggccgctgccaatcaaggctaaacctaaacaaccctttctgaagaggggggaaggccttgcacgctttaccaatgccaaatcaaaatttcaaaaaggtaaggagagcaagctggtcaccaatcaatccacaagcgaagaccagcctctcttcaagatggatcgacagcagctgcagagaaagacagccctgaagaataaggagctctgcgcggacaatcccatactgaaaaaagactctaaggcccgtaccaagtctggttccgtcacactgtctcagaaacctaagatgttgaagtgtagtaacagaaagtccttgtcgccttccggactcaaaatacaaacagggaagaaatgtgacggtcaatttcgcgaccaaattaagttcgaaaacaaagtcacttctaacaacaaggagaacgtaacggagtgccctaaaccatgtgatactggttgtactgggtggaataaaactcaggggaaggatcggctccctctgagcacgggccctgctagccgactggctgctaaaagtcccattcgggagaccatgaaagaatctgagtcctccctcgatgtctccctgcagaaaaagttagagacttgggagcgagagaaggaaaaggaaaacctagaactcgatgaattcctattccttgagcaggccgcggacgaaataagcttttccagcaatagcagctttgtgctgaagatcctagaaagagaccaacagatatgtaagggccaccgaatgtccagtacgccagttaaggcagtgcctcaaaaaacaaaccccgctgatcccatctcccattgcaataggagcgaggatttggatcatactgctagagaaaaggagtctgaatgtgaagttgctcccaaacaactgcatagcttgtccagcgcagatgagctgcgggaacagccttgtaagataaggaaggccgtgcagaaaagcacctcagaaaatcagacggaatggaatgcgagagatgatgaaggagtccctaactctgatagtagtactgattctgaggaacaactggacgtcactatcaagccatctaccgaggaccgtgagcggggtatctctagccgggaagactctcctcaagtctgtgacgataaaggcccctttaaagacacccgcactcaggaggataaacgtcgcgatgtggacctggacctgtcagataaagactattcctccgatgaatccatcatggagtccatcaaacataaggtgtctgaaccatctcggtccagctccctctcgttaagtaaaatggacttcgacgacgaaaggacatggaccgatctggaagagaacctttgcaaccacgacgtggtgctgggaaatgagtcaacttacggtacgccccagacctgttatccaaacaacgaaattggtatactagacaagacaatcaagagaaaaatcgcgcccgtcaagcggggtgaagatctgagcaaatccaggcggagcaggtcaccgcccacctccgaacttatgatgaaattttttccctcacttaaacctaaaccaaaaagcgattctcacttggggaatgagctgaagcttaatatttctcaggaccaaccaccgggcgataacgctcggtctcaggttctgagggagaaaataatcgaactcgagacagagatagaaaagtttaaagctgagaacgcttctctggccaaactcagaatcgagagggaaagtgctttggagaaactgcggaaggaaatcgcagactttgagcagcagaaggcaaaagaactggcccgcatcgaagagtttaagaaggaggagatgcgaaagctgcaaaaagagcgcaaggtgttcgaaaagtataccactgcggcacggaccttccctgacaagaaagagcgagaagaaatccagacgctgaaacagcagattgccgaccttcgtgaggacttgaagcgaaaggaaaccaagtggtcctcaactcactctcgcctgcggagccagattcagatgctggtcagggaaaacacagacctccgggaagagatcaaggttatggaacgatttcggctggacgcctggaaacgagccgaggcgattgagtcttccctggaagtcgagaagaaggacaaattagcaaatacgtctgttcgttttcagaattcacagatcagcagcgggacacaggtggagaaatacaagaaaaactatctacccatgcagggcaccgcccagcctccccacactccatcgtctctgctagccgaccacctgcctcccctgtcttcattccgaccatttagccgaaatatacagctctgttataccttttag

SEQ ID NO: 329570 - DNA, 3411 bp, Artificial Sequence
  derived and/or modified sequence
atgttcctgatgcccaccagcagcgagctgaacagcggccagaacttcctgacccagtggatgaccaaccccagcagagctggggtcatcctgaacagaggcttccccatcctggaggccgacaaggagaagagagctgctgtggacatcagcaccagcttccccatcaagggcacccacttcagtgacagcttctccttcatcaatgaggaggacagcctgctggaggagcagaagctggagagcaacaacccctacaagccccagagcgacaagtctgagacccacacagccttcccctgcatcaagaagggcccccaggtggccgcctgccacagcgcccctggccaccaggaggagaacaagaatgacttcatcccagacctggccagcgagttcaaggagggcgcctacaaggaccccctcttcaagaagctggagcagctgaaggaggtgcagcagaagaagcaggagcagctgaagaggcagcagctggagcagctgcagaggctgatggaggagcaggagaagctgctgaccatggtgtctggccagtgcaccctgcccggcctgagcctgctgcctgatgaccagagccagaagcacaggagccctggcaacaccaccaccggggagcgggccacctgctgcttccccagctatgtgtacccagaccccacccaggaggagacctaccccagcaacatcctgagccatgagcagagcaacttctgcaggacagcccatggagactttgtgctgaccagcaagagggccagccccaacctcttcagcgaggcccagtaccaggaggcccctgtggagaagaacaacctgaaggaggagaacagaaaccaccccaccggggagagcatcctgtgctgggagaaggtgacagagcagatccaggaggccaatgacaagaacctgcagaagcatgatgacagcagcgaggtggccaacatcgaggagcggcccatcaaggccgccatcggggagaggaagcagacctttgaggactacctggaggagcagatccagctggaggagcaggagctgaagcagaagcagctgaaggaggccgagggccccctgcccatcaaggccaagcccaagcagcccttcctgaagagaggagagggcctggcccgcttcaccaatgccaagagcaagttccagaagggcaaggagagcaagctggtgaccaaccagagcaccagcgaggaccagcccctcttcaagatggaccggcagcagctgcagaggaagacagccctgaagaacaaggagctgtgtgccgacaaccccatcctgaagaaggacagcaaggcccggaccaagagcggctctgtgaccctgagccagaagcccaagatgctgaagtgcagcaacaggaagagcctgagccccagcggcctgaagatccagacaggcaagaagtgtgatggccagttccgggaccagatcaagtttgagaacaaggtgaccagcaacaacaaggaaaatgtgacagaatgtcccaagccctgtgacaccggctgcaccggctggaacaagacccagggcaaggaccggctgcccctgagcacaggccctgccagccggctggccgccaagagccccatccgggagaccatgaaggagagcgagagcagcctggatgtgtccctgcagaagaagctggagacctgggagcgggagaaggagaaggagaacctggagctggatgagttcctgttcctggagcaggccgcagatgagatctccttcagcagcaacagcagctttgtgctgaagatcctggagcgggaccagcagatctgcaagggccacaggatgagcagcacccctgtgaaggctgtgccccagaagaccaacccagctgaccccatcagccactgcaacagaagtgaggacctggaccacacagcccgggagaaggagagtgaatgtgaggtggcccccaagcagctgcacagcctgagcagcgcagatgagctgcgggagcagccctgcaagatcaggaaggctgtgcagaagagcaccagcgagaaccagacagagtggaatgccagagatgatgagggcgtgcccaacagcgacagcagcacagacagcgaggagcagctggatgtgaccatcaagcccagcacagaagatcgggagcggggcatcagcagccgggaggacagcccccaggtgtgtgatgacaagggccccttcaaggacaccaggacccaggaggacaagagaagagatgtggacctggacctgagtgacaaggactacagcagtgatgagagcatcatggagagcatcaagcacaaggtgtctgagcccagccgcagcagcagcctgagcctgagcaagatggactttgatgatgagaggacctggacagacctggaggagaacctgtgcaaccatgatgtggtgctgggcaatgaaagcacctacggcaccccccagacctgctaccccaacaatgaaattggcatcctggacaagaccatcaagaggaagatcgcccctgtgaagagaggagaggacctgagcaagagcagaagaagccgcagcccccccaccagcgagctgatgatgaagttcttccccagcctgaagcccaagcccaagagtgacagccacctgggcaatgagctgaagctgaacatcagccaggaccagcccccaggggacaatgcccggagccaggtgctgcgggagaagatcatcgagctggagacagaaattgagaagttcaaggcagaaaatgccagcctggccaagctgcgcatcgagcgggagagcgccctggagaagctgaggaaggagattgctgactttgagcagcagaaggccaaggagctggccagaattgaggagttcaagaaggaggagatgaggaagctgcagaaggagaggaaggtgtttgagaagtacaccacagctgcccggaccttcccagacaagaaggagcgggaggagatccagaccctgaagcagcagattgctgacctgcgggaggacctgaagaggaaggagaccaagtggagcagcacccacagccggctgcggagccagatccagatgctggtgcgggagaacacagacctgcgggaggagatcaaggtgatggagcgcttccggctggatgcctggaagagagctgaggccatcgagagcagcctggaggtggagaagaaggacaagctggccaacacctctgtgcgcttccagaacagccagatcagcagcggcacccaggtggagaagtacaagaagaactacctgcccatgcagggcacagcccagcccccccacacccccagcagcctgctggccgaccacctgccccccctgagcagcttccggcccttcagcaggaacatccagctgtgctacaccttctag

SEQ ID NO: 329571 - DNA, 3411 bp, Artificial Sequence
  derived and/or modified sequence
atgttcctgatgcccaccagcagcgagctgaacagcggccagaactttctgacccaatggatgacaaacccatctagagccggagtgatcctaaaccggggattcccaattctggaagccgataaggaaaaaagagcagcggttgatatcagcacctctttccctattaagggtacccattttagcgacagcttttcctttattaacgaagaagattcgctgctggaagagcagaagctggagagcaacaacccatataagcctcaatcagacaagtccgaaacccataccgccttcccttgtataaaaaaggggcctcaggttgctgcttgccactccgcgcccggccatcaggaggagaacaaaaacgattttatcccggatttggcaagcgagtttaaagaaggggcctacaaggatccgctgttcaagaagctggaacagctcaaagaagttcaacaaaagaagcaggagcagctgaaaagacagcagctcgaacaacttcagagactgatggaggaacaggaaaagcttctcactatggttagtggccagtgcaccctgccaggactgtctcttctgcccgatgatcagagccaaaaacacagatctccaggcaataccaccacaggcgagcgtgccacttgctgcttcccaagttatgtctatcctgaccccacacaggaagaaacctatccttcaaatatcctcagtcatgagcagagcaatttttgcagaaccgcacacggagactttgtattgacgtctaaaagagctagcccgaatttatttagcgaggcccagtaccaggaggcacccgtggagaagaataacttgaaagaggagaatcgcaatcatcccacgggggagagcattctgtgctgggagaaagttacagagcaaattcaggaggcaaacgataagaacttacaaaagcacgacgattccagcgaagtagccaacattgaggagaggcccataaaagcagcaattggcgagcgaaagcagactttcgaggattacctggaagaacagatccagcttgaagagcaggagctgaaacagaagcagctcaaggaggcagaggggccattgccgattaaagcgaagcctaaacaacccttcttaaagcgaggagaagggctggcgagatttaccaacgcgaagagtaagttccagaagggcaaagagagcaaactggtcacgaaccagagcaccagtgaggaccaaccgctttttaaaatggatagacagcagctgcagaggaagaccgcccttaaaaataaggagctgtgcgccgataatccaatccttaaaaaagattccaaggctcgcacaaaaagcggatccgtaaccctgtcccagaagcccaagatgctgaagtgcagcaaccgcaaaagtctgtctccaagcgggctcaaaattcagacagggaagaagtgtgacgggcagttccgcgaccagataaagttcgaaaacaaggtgacctcaaataataaggaaaacgtaactgagtgccctaaaccatgtgacactggatgcacagggtggaataagacccagggtaaagatcgactgcccctgagtaccggtcctgcgagtagactggcagcaaaaagcccaattagagagacaatgaaggagtctgaaagtagcctggacgtgtctctgcagaagaagctggagacttgggagcgagagaaggagaaggaaaatttagagctcgatgaattcctgtttctggaacaggccgcggacgaaatcagtttctcgagcaactctagcttcgtgctgaaaatcctggaacgggaccaacagatctgtaagggtcaccggatgtcaagcacacccgtcaaagccgtgccacaaaagaccaatccagcggacccaatcagtcattgcaatcgctccgaggacctcgaccatacagctagagaaaaagagagtgaatgcgaagtggctccaaaacagctccatagcctgtcttccgccgacgagcttagggagcagccttgcaagatccgtaaagccgtccagaaaagcacctcagagaatcagaccgagtggaacgcaagggatgatgaaggtgtcccaaactcagacagctctacagacagtgaagaacagctggatgtgaccataaagccgtccacggaggacagggaacgcggaatttctagtcgagaggacagccctcaggtgtgtgatgacaagggaccttttaaggacacgcgcacgcaagaggacaaacggagggatgtggatttggatctcagcgataaagactattcctcagatgagtccatcatggaatcgattaaacataaagtctccgaacccagtagatccagcagtttatccctgagtaaaatggacttcgatgatgagcggacatggacagacctcgaggagaatctctgtaatcacgatgtcgttctgggcaatgagtccacttacggcactccacagacctgttatcccaataacgagatcggcatcctggataagactataaagagaaaaattgctcccgttaaaaggggcgaagatctctccaagagtcgcaggtccaggagtccacccacctctgaactcatgatgaagttcttcccgagcctgaaacctaagcctaaatcggacagccacctgggcaatgaactcaaactgaatatttcacaggaccagcccccgggggataacgcccgctcacaggtcctgagagaaaagataatcgagctagagaccgagattgaaaaattcaaggctgagaacgcctcgcttgcaaagcttcggatcgagcgcgagagcgcgctagagaagctgcgcaaagagatagccgactttgagcagcagaaggcaaaggagttagcgaggattgaggaatttaagaaggaagagatgcggaagctgcagaaagagcgaaaagttttcgagaaatatacgactgcggcacgaacctttccagacaagaaagaaagagaagagatccagacgctcaagcaacagattgcagatttacgggaagatctcaagcggaaggaaacgaaatggtcctccacacattcccggctgcgatcccagattcagatgctagtgcgagaaaacacagatttgagagaggagatcaaagtgatggaacgttttagactggatgcttggaagagggccgaagccatcgaatcttcgcttgaggtcgaaaagaaggataaacttgcaaataccagcgtgaggtttcaaaacagccaaatctcttcggggacacaggtagagaagtacaaaaagaactacctgccgatgcaggggacagctcagcccccacatacccctagtagcctgctagccgatcacctccctccgttgagctcgtttcggccatttagcagaaatatacagctgtgttacaccttttag

SEQ ID NO: 329572 - DNA, 3411 bp, Artificial Sequence
  derived and/or modified sequence
atgtttctgatgcccaccagctccgagctgaatagcggccaaaacttcctgacccaatggatgaccaacccttctagagccggtgtcatcttaaatcgaggcttcccaattctcgaggccgacaaagagaagagggccgctgtggacattagtacttcttttccaattaagggcactcatttttccgacagcttctcctttatcaatgaggaggactccctgctggaagaacagaaactggaatcaaacaacccgtataaaccacagtctgataagagcgaaacacacaccgcgttcccctgtattaagaagggtccacaggtcgcggcttgtcattccgctccaggccaccaggaagaaaacaaaaacgatttcattcccgatttggcaagtgaattcaaggagggagcatacaaggacccgctgttcaaaaaactcgaacaacttaaggaggtccagcagaaaaaacaggaacagctcaagcggcagcagctggaacagctgcaacgcctgatggaagagcaagaaaagttactgacaatggtgtccggacaatgcaccctcccaggcttgagtctcctacccgatgaccagtcccagaaacacaggagtcccggaaatactacaaccggcgagcgggcaacttgctgctttccctcctacgtgtaccctgatccaacccaggaggagacatatccatctaatatcttatcccacgaacaaagtaatttctgccgtacagcccacggtgattttgtcttgacctctaaacgcgcaagcccaaacctgttttcagaggcccaataccaggaagcacccgtagagaagaataacctcaaagaggaaaatagaaaccatccaacaggtgagagtatcctgtgctgggaaaaagttactgaacaaatacaggaggcaaatgacaaaaacttacaaaaacatgatgactcaagcgaagttgcgaacatagaggagaggcctatcaaggcagctataggcgaacgaaagcagactttcgaagactatttagaagaacaaatccaactggaagaacaggaactgaagcagaagcagcttaaggaagcagaaggccctctgcctattaaagccaaaccaaagcagccctttctgaagcgcggtgaaggcctcgcgcgatttaccaacgctaagtctaagtttcagaagggtaaagaatccaaactggtgaccaatcaaagtacatcagaggaccagcccctgtttaagatggatcgacagcaactgcagagaaagacggcattgaagaataaagagttatgcgcagataaccccattttaaagaaagacagcaaagcgcgtacaaaatctgggtccgtcaccttaagccagaaacctaaaatgctgaaatgctccaaccgtaagtcactgtcaccctcaggccttaagatacagacaggcaaaaaatgcgatggtcagttcagagaccagataaagttcgagaacaaagtgacttcaaataacaaggagaatgtcactgagtgtccaaaaccctgcgatacaggttgtacaggttggaacaagactcagggaaaagacaggctgccactgtctactggacctgcttcccgtctggcagccaagtcaccgatccgggagaccatgaaggaatcagagtcttctctggatgtctctttacagaagaagctcgaaacctgggagagggaaaaagagaaagaaaacctggaactggacgaattcctattcctcgaacaggctgccgacgagatctcttttagcagcaatagttcttttgtgctgaaaattttggagcgcgaccagcaaatatgtaaaggacacagaatgtcatcaacccctgtgaaggctgtgccccagaaaaccaacccggctgatccaatttcacactgcaatagatccgaggatctcgatcacaccgcgagagaaaaagagagtgagtgcgaagtagctccgaaacagctgcactctcttagcagtgccgacgagttgcgagagcagccctgcaaaattagaaaagctgttcagaaatcaacttctgaaaaccagacagaatggaacgccagggatgatgaaggcgtgcccaacagcgacagctccactgactcggaagagcagctggacgtcacgatcaaaccgtccactgaggatcgagagaggggaatctcaagcagagaggatagtccccaggtgtgcgatgacaaagggcctttcaaggacacgcgcactcaggaagacaagcggagggacgtggatcttgacctgtccgacaaagactactcctccgacgaaagtatcatggagtctatcaagcacaaagtcagtgaaccgagtaggtcatccagccttagtctatcgaagatggatttcgatgacgagcgcacatggacagacctagaagaaaatttgtgcaatcatgacgtcgttctgggcaatgaaagcacatacggcactcctcagacatgctatccaaacaacgaaatcgggatacttgataagactattaagcggaagatagcccctgttaaacgtggtgaggatctaagcaagtcaaggcggagccgctctccccctacatccgagttgatgatgaaattcttcccttccctgaagccaaaaccgaaaagcgacagccacctgggcaatgaactgaagttgaatatatcacaggatcaacctccaggggacaacgcaaggtctcaagttttgagggaaaaaattatcgagctggagacagaaatagagaagtttaaggccgagaatgcttccctggccaaactaagaattgaacgagagtctgcgctagaaaagctaagaaaggagatcgctgattttgagcaacaaaaagccaaggaactggctcggatcgaggagttcaaaaaagaagaaatgagaaaacttcagaaagagcgaaaggtattcgaaaagtacaccaccgccgctaggacctttccagacaagaaggagcgggaagagatccagacgctaaagcaacagattgcagatttgagagaagacttaaagagaaaggaaaccaagtggagcagtactcactctcgattacggtcgcagatccaaatgctggtccgcgaaaatacggatctgagagaagaaatcaaggtcatggagagattccggctggatgcttggaagcgggcagaggctatagagtccagcctggaagtggaaaaaaaggacaagttggccaacacatctgttaggttccagaattcacagatctcttccggaacccaggtggaaaaatataagaagaactacttgcctatgcagggaaccgcgcaacctccacacacaccatcaagcttgttggctgatcatttacctccactctcatcttttagacctttttctaggaatattcagttgtgttacaccttctag

SEQ ID NO: 329573 - DNA, 4299 bp, Artificial Sequence
  derived and/or modified sequence
agattgaggtgtcggttcgtgctgctgagctgcccaggcttcacggagcggtgttggaaatcaatagctcttctagcctttgcattgtttaaatataatagtgtcattggactaagatgttcctgatgccaacctcttcagagttaaacagtgggcagaacttcctaacccagtggatgaccaatccttctcgggctggggtcatattaaatcgtggatttcctattttggaagcagacaaagagaagcgagcagctgtggacatttctaccagctttcctattaaaggcacacatttttctgatagcttcagctttataaatgaagaagattcacttcttgaagaacagaagttggagtcaaacaacccttacaaaccacagtcagataaatctgaaacccatacagcctttccttgcattaaaaagggaccacaggtagcggcatgtcacagtgctcctggacaccaggaagaaaacaaaaatgacttcatcccagatcttgcgagtgaattcaaagaaggggcttataaagacccactttttaaaaaacttgaacagctgaaagaagtacaacagaagaagcaggaacaattgaagaggcaacagttggagcaactacagagactcatggaagaacaagagaagctgctcaccatggtgtctgggcagtgcacacttccaggtttgagtttactgcctgatgatcagagccagaagcacaggtctccaggaaataccaccactggagagagagccacatgctgcttcccatcatatgtctacccggacccaacccaggaagaaacatacccgtccaacattttatcccatgagcaaagcaacttctgtagaactgctcatggagattttgtcttaacttcaaaacgtgcgtctcctaatttattttctgaggcacagtatcaagaagcacctgtggaaaaaaataatttaaaagaagaaaaccgtaaccatcctacaggagaaagtatcttatgttgggagaaagtgacagaacagattcaggaagcaaatgataagaacttacaaaaacatgatgattcctcagaagtggctaatattgaagaaaggcccattaaagctgctattggagaaaggaaacagacctttgaagattacttagaagaacaaattcagttggaagagcaagaactgaagcaaaaacagctgaaggaagcagaaggaccattgccaatcaaagcaaaaccaaaacaaccatttttaaaacgaggagaaggtttagctagatttactaatgccaaatctaagtttcaaaaaggcaaagaaagtaaactagtgactaaccagagcacttccgaggaccagccgctgtttaaaatggatagacagcaactccagcggaaaaccgctcttaaaaataaagagctgtgtgcagacaaccctatccttaaaaaggacagtaaagctagaaccaagagtggttctgtcaccctcagtcagaagccgaaaatgctgaagtgtagtaacaggaaaagtctttctccgtcaggattgaaaatacagacggggaagaaatgtgatgggcagtttagagaccagatcaaatttgaaaacaaagtcacatctaataataaagaaaatgtaactgagtgtccaaaaccttgcgatactggctgcacagggtggaataagacacaaggtaaagacagacttcctctttcaacagggccggccagccggctggctgctaagagccccataagggagaccatgaaagagtctgaatcttctcttgacgtttctcttcagaaaaagttagagacttgggaacgagaaaaggaaaaggaaaatttggaattagatgaatttttgtttttagaacaagctgctgatgaaatatcattttctagtaattcctcatttgtactgaaaatcttagaaagggatcaacagatctgcaaaggtcaccggatgtcttccacccctgtcaaagctgtgccacagaagacaaatccggcagatcccattagtcattgtaaccgcagtgaggatttggaccacactgcacgtgagaaggagagtgagtgtgaagtcgcacccaaacaacttcattcattgtcctcagctgatgaattgagggaacagccttgtaaaatcaggaaagccgtccaaaagagcacttctgaaaatcagactgaatggaatgcacgtgacgatgaaggtgttccaaatagtgacagtagcactgactctgaggaacagcttgatgttaccataaaaccatcgactgaggatagagagaggggcatcagcagcagagaggatagcccacaagtctgtgatgataaggggccttttaaggacaccaggacccaagaagataaaaggagagatgttgatctggatttgtctgataaagattacagtagcgatgagtctatcatggaaagcataaaacataaagtgtctgagccctcgagatcctcatccctaagtctgagtaaaatggactttgatgatgaaagaacttggactgaccttgaagagaatttgtgtaaccatgatgttgttcttgggaatgaatccacttatgggacgccgcagacatgctaccctaataatgaaataggtatcctggacaaaacaataaaaaggaagattgcaccagtcaagaggggagaagacttgagcaagtccaggaggagcagaagtcctcctacatcggagctgatgatgaaattctttccttctttgaaaccaaaaccaaagtcagattcacacttgggaaatgaactcaagttaaacataagtcaagaccaaccacctggtgacaatgctcgatcccaggttttgagagagaaaattattgaattggaaacagaaatagaaaagtttaaagctgagaacgcatctttagctaaacttcgcattgaacgagaaagtgccttggaaaaactcaggaaagaaattgcagacttcgaacaacagaaagcaaaagaattagctcgaatagaagagtttaaaaaggaggagatgaggaagctacaaaaggaacgtaaagtttttgaaaagtatactacagctgcaagaacttttccagataaaaaggaacgtgaagaaatacagactttaaaacagcaaatagcagatttacgggaagatttgaaaagaaaggaaaccaaatggtcaagtacacacagccgtctcagaagccagatacaaatgttagtcagagagaacacagacctccgggaagaaataaaagtgatggaaagattccgactggatgcctggaagagagcagaagccatagagagcagcctcgaggtggagaagaaggacaagcttgcgaacacatctgttcgatttcaaaacagtcagatttcttcaggaacccaggtagaaaaatacaagaaaaattatcttccaatgcaaggcacagcacagccgcctcacacgcccagcagcttgttggctgaccacctgcctccgctctcctccttcaggccattctcccgtaacatccagctctgttacactttttaacatggaggtcagattctggcacttgctcgagacccttccaaggcaatccacctcgaagatccaagtctgcacctcctcgtgatttaggcaatttggataagggacaagctgcctctcccagggagccacttgaaccactgaacttcccagatcctgaatataaagaggaggaggaagaccaagacatacagggagaaatcagtcatcctgatggaaaggtggaaaaggtttataagaatgggtgccgtgttatactgtttcccaatggaactcgaaaggaagtgagtgcagatgggaagaccatcactgtcactttctttaatggtgacgtgaagcaggtcatgccagaccaaagagtgatctactactatgcagctgcccagaccactcacacgacatacccggagggactggaagtcttacatttctcaagtggacaaatagaaaaacattacccagatggaagaaaagaaatcacgtttcctgaccagactgttaaaaacttatttcctgatggacaagaagaaagcattttcccagatggtacaattgtcagagtacaacgtgatggcaacaaactcatagagtttaataatggccaaagagaactacatactgcccagttcaagagacgggaatacccagatggcactgttaaaaccgtatatgcaaacggtcatcaagaaacgaagtacagatccggtcggataagagttaaggacaaggagggtaatgtgctaatggacacggagctgtgacgatcctcatgtga

SEQ ID NO: 329574 - DNA, 3411 bp, Artificial Sequence
  derived and/or modified sequence
atgttcctgatgcccaccagcagcgagctgaacagcggccagaacttcctgacccagtggatgaccaaccccagcagagccggcgtgatcctgaacagaggcttccccatcctggaggccgacaaggagaagagagccgccgtggacatcagcaccagcttccccatcaagggcacccacttcagcgacagcttcagcttcatcaacgaggaggacagcctgctggaggagcagaagctggagagcaacaacccctacaagccccagagcgacaagagcgagacccacaccgccttcccctgcatcaagaagggcccccaggtggccgcctgccacagcgcccccggccaccaggaggagaacaagaacgacttcatccccgacctggccagcgagttcaaggagggcgcctacaaggaccccctgttcaagaagctggagcagctgaaggaggtgcagcagaagaagcaggagcagctgaagagacagcagctggagcagctgcagagactgatggaggagcaggagaagctgctgaccatggtgagcggccagtgcaccctgcccggcctgagcctgctgcccgacgaccagagccagaagcacagaagccccggcaacaccaccaccggcgagagagccacctgctgcttccccagctacgtgtaccccgaccccacccaggaggagacctaccccagcaacatcctgagccacgagcagagcaacttctgcagaaccgcccacggcgacttcgtgctgaccagcaagagagccagccccaacctgttcagcgaggcccagtaccaggaggcccccgtggagaagaacaacctgaaggaggagaacagaaaccaccccaccggcgagagcatcctgtgctgggagaaggtgaccgagcagatccaggaggccaacgacaagaacctgcagaagcacgacgacagcagcgaggtggccaacatcgaggagagacccatcaaggccgccatcggcgagagaaagcagaccttcgaggactacctggaggagcagatccagctggaggagcaggagctgaagcagaagcagctgaaggaggccgagggccccctgcccatcaaggccaagcccaagcagcccttcctgaagagaggcgagggcctggccagattcaccaacgccaagagcaagttccagaagggcaaggagagcaagctggtgaccaaccagagcaccagcgaggaccagcccctgttcaagatggacagacagcagctgcagagaaagaccgccctgaagaacaaggagctgtgcgccgacaaccccatcctgaagaaggacagcaaggccagaaccaagagcggcagcgtgaccctgagccagaagcccaagatgctgaagtgcagcaacagaaagagcctgagccccagcggcctgaagatccagaccggcaagaagtgcgacggccagttcagagaccagatcaagttcgagaacaaggtgaccagcaacaacaaggagaacgtgaccgagtgccccaagccctgcgacaccggctgcaccggctggaacaagacccagggcaaggacagactgcccctgagcaccggccccgccagcagactggccgccaagagccccatcagagagaccatgaaggagagcgagagcagcctggacgtgagcctgcagaagaagctggagacctgggagagagagaaggagaaggagaacctggagctggacgagttcctgttcctggagcaggccgccgacgagatcagcttcagcagcaacagcagcttcgtgctgaagatcctggagagagaccagcagatctgcaagggccacagaatgagcagcacccccgtgaaggccgtgccccagaagaccaaccccgccgaccccatcagccactgcaacagaagcgaggacctggaccacaccgccagagagaaggagagcgagtgcgaggtggcccccaagcagctgcacagcctgagcagcgccgacgagctgagagagcagccctgcaagatcagaaaggccgtgcagaagagcaccagcgagaaccagaccgagtggaacgccagagacgacgagggcgtgcccaacagcgacagcagcaccgacagcgaggagcagctggacgtgaccatcaagcccagcaccgaggacagagagagaggcatcagcagcagagaggacagcccccaggtgtgcgacgacaagggccccttcaaggacaccagaacccaggaggacaagagaagagacgtggacctggacctgagcgacaaggactacagcagcgacgagagcatcatggagagcatcaagcacaaggtgagcgagcccagcagaagcagcagcctgagcctgagcaagatggacttcgacgacgagagaacctggaccgacctggaggagaacctgtgcaaccacgacgtggtgctgggcaacgagagcacctacggcaccccccagacctgctaccccaacaacgagatcggcatcctggacaagaccatcaagagaaagatcgcccccgtgaagagaggcgaggacctgagcaagagcagaagaagcagaagcccccccaccagcgagctgatgatgaagttcttccccagcctgaagcccaagcccaagagcgacagccacctgggcaacgagctgaagctgaacatcagccaggaccagccccccggcgacaacgccagaagccaggtgctgagagagaagatcatcgagctggagaccgagatcgagaagttcaaggccgagaacgccagcctggccaagctgagaatcgagagagagagcgccctggagaagctgagaaaggagatcgccgacttcgagcagcagaaggccaaggagctggccagaatcgaggagttcaagaaggaggagatgagaaagctgcagaaggagagaaaggtgttcgagaagtacaccaccgccgccagaaccttccccgacaagaaggagagagaggagatccagaccctgaagcagcagatcgccgacctgagagaggacctgaagagaaaggagaccaagtggagcagcacccacagcagactgagaagccagatccagatgctggtgagagagaacaccgacctgagagaggagatcaaggtgatggagagattcagactggacgcctggaagagagccgaggccatcgagagcagcctggaggtggagaagaaggacaagctggccaacaccagcgtgagattccagaacagccagatcagcagcggcacccaggtggagaagtacaagaagaactacctgcccatgcagggcaccgcccagcccccccacacccccagcagcctgctggccgaccacctgccccccctgagcagcttcagacccttcagcagaaacatccagctgtgctacaccttctag

SEQ ID NO: 329575 - DNA, 3261 bp, Artificial Sequence
  derived and/or modified sequence
atgtttttaatgcctactagtagtgagcttaacagcggccaaaacttcctgacccagtggatgacgaacccgtctcgtgctggcgttatcctcaacaggggttttcctatcctcgaggccgataaagagaaacgcgcggctgtggacatcagtacaagctttcccatcaaaggaacccatttcagcgattccttcagcttcatcaacgaggaagactcattactggaagaacagaaacttgaatctaacaacccctataaaccacagagcgacaagagtgagacccataccgccttcccatgtataaaaaaggggccccaagtggcggcctgccacagcgctccaggacaccaggaggagaataagaacgactttattcccgatctggcctcggagttcaaggagggagcatacaaagatcctcttttcaaaaaactggagcagctgaaagaggtgcagcagaagaaacaggaacagctgaagcgccagcagctggagcagctgcagagattgatggaggaacaggaaaaactgctcaccatggtgtctgggcagtgcactttacctggcttgtcgctcctgcccgacgatcagagccaaaagcataggagcccaggtaacaccactacaggtgagcgagcgacatgctgttttccctcatacgtatacccagaccctacacaggaagaaacatatccatccaacatcctgtctcacgagcaaagcaatttctgtaggactgcccacggagattttgtactcacatctaagagagccagtcccaaccttttctccgaggctcagtatcaagaagccccagtcgagaagaacaatttgaaagaagagaatcggaatcacccgacgggtgaatccatactgtgctgggaaaaagtgaccgaacagattcaagaagccaatgacaaaaatctgcagaaacatgacgattcttcagaggtcgcaaatatcgaggaacgacctatcaaggcggccatcggggaacggaagcaaacatttgaagactatctcgaggaacaaatccagttggaggaacaggagctgaaacagaaacagctcaaggaggctgagggccctctcccgattaaggccaaaccgaagcaacctttcctgaagcgcggtgaggggctagccagattcactaacgcgaagagcaagttccagaagggaaaggagtcgaagttggtaactaatcagtctacctctgaagaccagccgctgtttaagatggaccggcagcagctgcagcggaaaactgccttgaaaaataaggagctgtgcgccgataatccaattttgaaaaaagactctaaagcccgcactaaaagcggcagcgttactctttctcagaagccaaagatgctgaagtgcagtaataggaaaagtctgtcacctagcggtcttaaaatccaaacaggtaagaagtgtgacggacagttccgggatcaaataaaattcgagaataaggttacaagcaataataaggaaaatgtgaccgagtgtccaaagccctgcgatactggctgtaccggatggaacaaaacccaaggaaaggacagattacctctgagcacagggcccgcctcccgcctggctgctaagagccctattagagaaacaatgaaggagtccgagagttccctggatgttagcctgcagaagaaactggagacctgggaacgagagaaagagaaggagaacctggagctagacgagtttttgtttctggaacaggcagcagatgagataagcttctcatcgaactctagcttcgtactcaaaattctggaacgagatcagcagatttgtaaaggacatcggatgagcagcacacccgtgaaagcagtgccccagaagactaatcccgcggatcctattagccactgcaaccgaagtgaagacctggatcacacggccagagaaaaggaatctgagtgtgaggtagcccccaaacagctgcatagcctttcatcagcagatgaactgcgggagcagccctgcaaaatccgcaaggccgtacagaaatctacaagcgaaaatcagactgagtggaatgcaagagatgacgaaggcgtgcctaatagcgattcctccactgactcagaggagcagcttgatgtgacaatcaaaccctctacagaagatagagaacgtggcatctctagtagggaagactctccccaggtttgcgacgataagggccctttcaaagatactcgcacccaggaagacaagcgccgcgacgttgatttagatctatcagataaagactattctagtgacgaatccattatggagagcataaagcacaaggtttctgagcccagtagatcaagttcactcagtctgagcaaaatggatttcgatgacgagcggacttggaccgatctggaagagaacctgtgtaatcatgacgtagtgctcggtaacgagtccacctacggcacgccccagacttgttacccaaacaatgagatcggaatactggataaaacaatcaagcgcaagatagcccctgtcaaacgcggagaggacctgagcaaatcccgtagaagtcggagcccccctacctccgagctcatgatgaagttctttccctccttaaagccaaaacctaaatctgattctcatctcggtaatgagttgaagcttaatatttcccaggaccagccaccgggggataatgctcgctcccaagtgctgagagaaaagatcatagagctggagacagagatcgaaaagttcaaggccgagaacgccagtctcgcgaaactcagaatcgagagggaatccgccctggaaaaactccggaaggaaattgctgactttgagcaacagaaagccaaagaactggctcgcatcgaggaatttaagaaagaggagatgcgcaagcttcagaaagaacgcaaggtgttcgaaaaatataccactgcagctcggactttccccgacaaaaaagaacgagaagagatacagacgttgaagcaacaaattgccgatctcagggaagatctgaaacgcaaggagactaaatggagctctacccactcacgcctgagatctcagatacagatgctggtcagagagaatacagatctcagggaggagatcaaagtgatggagcgatttcgccttgacgcctggaaacgcgctgaggccatcgagtctagcttggaagtggagaaaaaagataaactcgcagcaatccacctcgaagatccttcactacacctgctggtgatttag

SEQ ID NO: 329576 - DNA, 3261 bp, Artificial Sequence
  derived and/or modified sequence
atgttcctgatgcccaccagcagcgagctgaacagcggccagaacttcctgacccagtggatgaccaaccccagcagagctggggtcatcctgaacagaggcttccccatcctggaggccgacaaggagaagagagctgctgtggacatcagcaccagcttccccatcaagggcacccacttcagtgacagcttctccttcatcaatgaggaggacagcctgctggaggagcagaagctggagagcaacaacccctacaagccccagagcgacaagtctgagacccacacagccttcccctgcatcaagaagggcccccaggtggccgcctgccacagcgcccctggccaccaggaggagaacaagaatgacttcatcccagacctggccagcgagttcaaggagggcgcctacaaggaccccctcttcaagaagctggagcagctgaaggaggtgcagcagaagaagcaggagcagctgaagaggcagcagctggagcagctgcagaggctgatggaggagcaggagaagctgctgaccatggtgtctggccagtgcaccctgcccggcctgagcctgctgcctgatgaccagagccagaagcacaggagccctggcaacaccaccaccggggagcgggccacctgctgcttccccagctatgtgtacccagaccccacccaggaggagacctaccccagcaacatcctgagccatgagcagagcaacttctgcaggacagcccatggagactttgtgctgaccagcaagagggccagccccaacctcttcagcgaggcccagtaccaggaggcccctgtggagaagaacaacctgaaggaggagaacagaaaccaccccaccggggagagcatcctgtgctgggagaaggtgacagagcagatccaggaggccaatgacaagaacctgcagaagcatgatgacagcagcgaggtggccaacatcgaggagcggcccatcaaggccgccatcggggagaggaagcagacctttgaggactacctggaggagcagatccagctggaggagcaggagctgaagcagaagcagctgaaggaggccgagggccccctgcccatcaaggccaagcccaagcagcccttcctgaagagaggagagggcctggcccgcttcaccaatgccaagagcaagttccagaagggcaaggagagcaagctggtgaccaaccagagcaccagcgaggaccagcccctcttcaagatggaccggcagcagctgcagaggaagacagccctgaagaacaaggagctgtgtgccgacaaccccatcctgaagaaggacagcaaggcccggaccaagagcggctctgtgaccctgagccagaagcccaagatgctgaagtgcagcaacaggaagagcctgagccccagcggcctgaagatccagacaggcaagaagtgtgatggccagttccgggaccagatcaagtttgagaacaaggtgaccagcaacaacaaggaaaatgtgacagaatgtcccaagccctgtgacaccggctgcaccggctggaacaagacccagggcaaggaccggctgcccctgagcacaggccctgccagccggctggccgccaagagccccatccgggagaccatgaaggagagcgagagcagcctggatgtgtccctgcagaagaagctggagacctgggagcgggagaaggagaaggagaacctggagctggatgagttcctgttcctggagcaggccgcagatgagatctccttcagcagcaacagcagctttgtgctgaagatcctggagcgggaccagcagatctgcaagggccacaggatgagcagcacccctgtgaaggctgtgccccagaagaccaacccagctgaccccatcagccactgcaacagaagtgaggacctggaccacacagcccgggagaaggagagtgaatgtgaggtggcccccaagcagctgcacagcctgagcagcgcagatgagctgcgggagcagccctgcaagatcaggaaggctgtgcagaagagcaccagcgagaaccagacagagtggaatgccagagatgatgagggcgtgcccaacagcgacagcagcacagacagcgaggagcagctggatgtgaccatcaagcccagcacagaagatcgggagcggggcatcagcagccgggaggacagcccccaggtgtgtgatgacaagggccccttcaaggacaccaggacccaggaggacaagagaagagatgtggacctggacctgagtgacaaggactacagcagtgatgagagcatcatggagagcatcaagcacaaggtgtctgagcccagccgcagcagcagcctgagcctgagcaagatggactttgatgatgagaggacctggacagacctggaggagaacctgtgcaaccatgatgtggtgctgggcaatgaaagcacctacggcaccccccagacctgctaccccaacaatgaaattggcatcctggacaagaccatcaagaggaagatcgcccctgtgaagagaggagaggacctgagcaagagcagaagaagccgcagcccccccaccagcgagctgatgatgaagttcttccccagcctgaagcccaagcccaagagtgacagccacctgggcaatgagctgaagctgaacatcagccaggaccagcccccaggggacaatgcccggagccaggtgctgcgggagaagatcatcgagctggagacagaaattgagaagttcaaggcagaaaatgccagcctggccaagctgcgcatcgagcgggagagcgccctggagaagctgaggaaggagattgctgactttgagcagcagaaggccaaggagctggccagaattgaggagttcaagaaggaggagatgaggaagctgcagaaggagaggaaggtgtttgagaagtacaccacagctgcccggaccttcccagacaagaaggagcgggaggagatccagaccctgaagcagcagattgctgacctgcgggaggacctgaagaggaaggagaccaagtggagcagcacccacagccggctgcggagccagatccagatgctggtgcgggagaacacagacctgcgggaggagatcaaggtgatggagcgcttccggctggatgcctggaagagagctgaggccatcgagagcagcctggaggtggagaagaaggacaagctggccgccatccacctggaggaccccagcctgcacctgctggtgatctag

SEQ ID NO: 329577 - DNA, 3261 bp, Artificial Sequence
  derived and/or modified sequence
atgttcctgatgcccaccagcagcgagctgaacagcggccagaactttctgacccagtggatgaccaatccatcccgggccggcgttatcttaaatcgcgggtttccaatcctggaggctgacaaagagaaaagggcagcagtagatatcagcacttctttccccatcaagggaacacatttttcagattcattcagtttcatcaatgaagaggatagcttgctcgaagaacaaaaactggagagcaacaacccatataagcctcaatcagataagtcagaaacacacacggctttcccttgcatcaagaagggaccccaggtcgctgcttgtcacagcgcccctggacaccaggaggagaataagaatgactttatccctgatcttgcatcggagtttaaagaaggtgcttataaagacccactgtttaagaagctggagcagttaaaggaggttcagcagaaaaagcaggagcaattgaagaggcagcaacttgagcagctgcagaggcttatggaggaacaggaaaagctgcttaccatggtgagcggacagtgtacccttccagggctaagtctcctgcccgacgatcaaagccaaaaacaccgatccccaggcaatactacaacgggggaaagagcgacttgttgcttcccatcatacgtgtatcccgacccgactcaagaggaaacatacccctctaacattctatcacatgagcaaagtaacttttgccgaaccgcccatggagactttgtgttgacaagtaaaagagccagccccaatctcttctccgaggcccagtaccaggaagctccagtcgagaagaacaacttgaaggaagaaaaccggaaccaccctacaggcgagagcattttatgctgggagaaggtcaccgagcagatacaggaagccaacgataaaaacctgcaaaaacatgacgatagcagtgaggtagccaacattgaagaacggcccatcaaggcagccattggggaaaggaagcagaccttcgaggattacctggaggaacaaatccagttggaagagcaagagctcaagcagaaacaactgaaggaggctgaagggccacttccaattaaagcaaagcccaagcagcctttcctgaaacgcggcgaggggttggctcggttcaccaacgctaaaagcaagttccaaaaggggaaggaaagtaagctagtgaccaatcagtctacatccgaggatcagcctctgttcaaaatggatcgccaacagcttcagcgcaagacggcactgaagaacaaagagctgtgcgccgacaacccaatccttaagaaagactcaaaggcgagaacaaagagcgggagcgtgaccttgtcacagaaacccaaaatgcttaaatgtagcaatcggaaatctctctctcctagtgggttaaaaatacaaaccggaaagaagtgcgacgggcagtttcgagatcagataaagtttgaaaataaagtcacaagtaataataaggaaaacgtgacagagtgtcccaaaccttgtgatactggatgtactgggtggaacaaaactcagggaaaggacagacttcccttgagcaccggccccgccagtaggctagccgctaagtcacccatcagggagaccatgaaagagtcagaaagcagcctggatgtttctctgcagaagaaactggaaacctgggagcgcgagaaggagaaagagaacctcgagctggatgagttcctgtttctggagcaggcagctgatgagataagcttctcttctaattcttctttcgtgctaaaaatcttggagcgcgaccagcagatttgtaagggacaccgaatgtcgagcacccccgtcaaagcggtcccccaaaagacaaatcccgccgaccctattagtcattgtaatcgctctgaggatctggatcatacggcacgtgagaaagaatctgagtgcgaggtcgcccccaagcagttacacagtttatcttccgccgacgagttacgcgagcagccgtgcaagatacgcaaagctgtgcagaaatcaaccagcgaaaatcagaccgagtggaatgcaagggatgatgagggggtgcctaactcagactcctccactgacagcgaggagcagctggacgtgaccattaaaccctcaactgaggaccgtgaacgtggtatttcttcccgcgaagatagtccacaggtctgtgacgacaagggcccgttcaaggatacaaggacacaggaagacaaacgaagggatgtagacttagacctttctgacaaggattacagttccgacgaatctataatggagagtatcaagcataaagtttcagagcccagcaggtcaagcagtctgtctttgagcaagatggattttgacgacgagcggacgtggactgatcttgaggagaacctttgtaaccacgacgtcgtattagggaacgagtccacctacgggactccccagacatgttatccaaataatgaaataggtattctggataagactatcaagcgaaagattgcccctgttaaaagaggcgaggacctgtcaaagtcacggcgctctcggtctccacctacctcggagctaatgatgaagttttttccatcccttaagcctaaacctaaatcggatagccacctaggaaacgaattgaagcttaacatcagccaagaccagccccccggagataatgctcggagccaggtgttgcgagaaaagataattgaactggaaacggaaatcgagaagtttaaagcggaaaacgcaagcctcgccaaactccggatcgaacgtgaatctgctctcgagaaactgagaaaggaaatagcggattttgagcagcagaaagcaaaagagctggcacgtatagaggaatttaagaaagaggagatgcgtaagctgcaaaaagagcggaaagtttttgagaaatatacaaccgccgcgcgtacatttcctgataaaaaagagagagaagaaattcagaccctgaaacagcagatcgctgacttgcgggaagacctgaaacgcaaggaaacaaaatggtctagcacacatagccgtttaagaagtcagatccagatgctcgtccgcgaaaacacagacctaagagaggagatcaaggttatggagagattcagacttgatgcatggaagcgcgccgaggccattgagagcagccttgaagtggaaaaaaaggacaagttggcggcgatccaccttgaggatccatctctgcacttactggttatttag

SEQ ID NO: 329578 - DNA, 3261 bp, Artificial Sequence
  derived and/or modified sequence
atgtttctgatgcctacctctagcgagcttaattcaggccaaaacttcctgacacagtggatgactaacccctctcgagctggcgtgatactgaaccgtgggttcccaatactggaggcagacaaagaaaagcgggctgccgttgatatctccacatcattccccatcaaagggacacatttcagcgattccttttccttcatcaacgaagaggactctcttcttgaggagcaaaaattagaatctaataacccctataagcctcagtccgacaagtcagaaacacataccgccttcccctgcataaagaagggaccgcaggtagccgcatgccattccgcgccaggccaccaggaggaaaataagaatgatttcatacctgaccttgccagtgagtttaaagaaggagcttataaggatcctctgtttaaaaagcttgaacagctcaaggaagtgcagcaaaagaaacaggaacaactcaaacgacaacagcttgagcagctccaacggctgatggaagagcaggaaaaactcttgaccatggtgtctggccagtgcactctccccggtctttcccttctgcctgatgaccaatcccagaagcataggagccctggcaatacgaccaccggggaaagagccacatgctgctttccttcttatgtttacccagaccccacccaagaagaaacctatccctcaaacattctttcgcacgagcaatccaatttctgcagaaccgcccacggcgactttgtgctgaccagcaagagagcctcccctaatctcttcagtgaagcccagtatcaggaagcacccgtggagaaaaacaatctcaaagaagaaaacaggaaccaccccaccggagagtctatattatgttgggagaaggtaacagagcagatccaggaggcaaacgacaagaacttgcaaaagcacgatgattcgagtgaagtggccaatatcgaggaacgtccaattaaggccgcaatcggtgagagaaagcagacattcgaggactacctggaagagcaaattcagctggaggagcaagagctgaagcagaagcaactgaaagaagccgaggggccacttccgatcaaggctaaacctaagcagccattcctgaaacgcggagaaggcctagccaggtttaccaatgccaaaagcaagttccaaaaaggtaaagaatctaaattggtcacgaaccagtctacaagtgaggaccagcctctatttaagatggaccgacagcagctgcagcgtaaaacagcgcttaagaataaagagctgtgcgccgataatcccatactgaaaaaagactccaaggctcgaaccaagagcggttcagtgaccctgtctcagaagcctaaaatgttgaagtgctccaaccgtaagtcactgtcaccctccgggttgaaaattcaaacaggaaagaagtgtgacgggcaattcagggatcagatcaaattcgagaataaagtaaccagcaataacaaagaaaacgtgacggaatgccctaagccatgcgacaccggctgcactgggtggaataaaacccaggggaaagatcgactgcccctcagtacaggccctgctagcaggctcgcagctaagtctccaattcgcgagactatgaaggagagcgaatctagtttagacgtgagtctgcagaaaaagctggaaacttgggaacgggaaaaagagaaagagaacctagagctggatgagtttttgttcctcgaacaggcagcggatgaaatctccttctcctccaatagctcatttgtgttaaaaattctggagcgtgatcagcaaatttgcaaaggccaccgaatgagttctactccggttaaggccgtgccccaaaagactaacccagccgaccctatcagccactgtaatcgcagcgaagatctggatcacacagcccgagagaaggaaagcgaatgcgaagtggcgccaaaacagctgcactcactgtcaagcgccgacgagcttcgtgaacagccctgtaaaatccggaaggccgttcaaaaaagtacatctgagaaccagacggagtggaacgcgagggacgacgaaggcgtgccgaactccgacagttctaccgatagcgaagagcaactggacgtcacgatcaagcccagcacagaggaccgagagcgcggtatttcatctagagaggattctccacaggtctgtgacgacaaaggcccttttaaagacacacgaacgcaagaggataaaagaagagacgtggacttggatttgagcgataaagattacagttccgacgagtcaattatggagagcatcaagcacaaggtgtccgaaccgtcccgctcctccagcctgtccctctctaagatggactttgacgatgagagaacttggactgacctggaggagaatctttgtaaccacgacgtggttctcggcaacgaatccacctatggtaccccccagacctgctaccccaataatgagattggtatcttggataagacgattaaacgcaaaattgccccagtcaagcggggagaagatctgtccaagtctcgaagaagccggtcacctcccacttcggaactgatgatgaagtttttcccatccttaaagccaaaacctaagtcagacagccatctggggaacgagctcaagctgaacatctcgcaggaccagcccccaggagacaatgcgaggtctcaggtcctgcgcgaaaagataattgaattggaaaccgagatcgagaagtttaaggccgagaatgcctcactcgcaaagctaaggatcgaacgggagtccgctctggagaaattgcggaaagaaatcgcagatttcgagcagcaaaaggccaaagaactggcacgaatcgaggagtttaaaaaggaggagatgcgcaagctgcagaaggaacgcaaagtttttgagaaatatactacagcagcccgtacttttcccgacaaaaaggagagagaagagatccagacattgaaacagcagatcgctgacctgcgtgaggacctgaaaaggaaggagactaaatggtcttccacgcacagccggctgcgaagccagatccagatgttagtgcgagaaaatacagacctccgcgaggaaatcaaagtgatggagcgattcaggctagacgcttggaaaagggccgaagccatagagtcgtctttagaagtggaaaagaaagacaagttagctgctattcatctggaagatccatcactgcaccttctggttatttag

SEQ ID NO: 329579 - DNA, 4211 bp, Artificial Sequence
  derived and/or modified sequence
tggcggcccatttgtaaatgctgcggagattgaggtgtcggttcgtgctgctgagctgcccaggcttcacggagcggtgttggaaatcaatagctcttctagcctttgcattgtttaaatataatagtgtcattggactaagatgttcctgatgccaacctcttcagagttaaacagtgggcagaacttcctaacccagtggatgaccaatccttctcgggctggggtcatattaaatcgtggatttcctattttggaagcagacaaagagaagcgagcagctgtggacatttctaccagctttcctattaaaggcacacatttttctgatagcttcagctttataaatgaagaagattcacttcttgaagaacagaagttggagtcaaacaacccttacaaaccacagtcagataaatctgaaacccatacagcctttccttgcattaaaaagggaccacaggtagcggcatgtcacagtgctcctggacaccaggaagaaaacaaaaatgacttcatcccagatcttgcgagtgaattcaaagaaggggcttataaagacccactttttaaaaaacttgaacagctgaaagaagtacaacagaagaagcaggaacaattgaagaggcaacagttggagcaactacagagactcatggaagaacaagagaagctgctcaccatggtgtctgggcagtgcacacttccaggtttgagtttactgcctgatgatcagagccagaagcacaggtctccaggaaataccaccactggagagagagccacatgctgcttcccatcatatgtctacccggacccaacccaggaagaaacatacccgtccaacattttatcccatgagcaaagcaacttctgtagaactgctcatggagattttgtcttaacttcaaaacgtgcgtctcctaatttattttctgaggcacagtatcaagaagcacctgtggaaaaaaataatttaaaagaagaaaaccgtaaccatcctacaggagaaagtatcttatgttgggagaaagtgacagaacagattcaggaagcaaatgataagaacttacaaaaacatgatgattcctcagaagtggctaatattgaagaaaggcccattaaagctgctattggagaaaggaaacagacctttgaagattacttagaagaacaaattcagttggaagagcaagaactgaagcaaaaacagctgaaggaagcagaaggaccattgccaatcaaagcaaaaccaaaacaaccatttttaaaacgaggagaaggtttagctagatttactaatgccaaatctaagtttcaaaaaggcaaagaaagtaaactagtgactaaccagagcacttccgaggaccagccgctgtttaaaatggatagacagcaactccagcggaaaaccgctcttaaaaataaagagctgtgtgcagacaaccctatccttaaaaaggacagtaaagctagaaccaagagtggttctgtcaccctcagtcagaagccgaaaatgctgaagtgtagtaacaggaaaagtctttctccgtcaggattgaaaatacagacggggaagaaatgtgatgggcagtttagagaccagatcaaatttgaaaacaaagtcacatctaataataaagaaaatgtaactgagtgtccaaaaccttgcgatactggctgcacagggtggaataagacacaaggtaaagacagacttcctctttcaacagggccggccagccggctggctgctaagagccccataagggagaccatgaaagagtctgaatcttctcttgacgtttctcttcagaaaaagttagagacttgggaacgagaaaaggaaaaggaaaatttggaattagatgaatttttgtttttagaacaagctgctgatgaaatatcattttctagtaattcctcatttgtactgaaaatcttagaaagggatcaacagatctgcaaaggtcaccggatgtcttccacccctgtcaaagctgtgccacagaagacaaatccggcagatcccattagtcattgtaaccgcagtgaggatttggaccacactgcacgtgagaaggagagtgagtgtgaagtcgcacccaaacaacttcattcattgtcctcagctgatgaattgagggaacagccttgtaaaatcaggaaagccgtccaaaagagcacttctgaaaatcagactgaatggaatgcacgtgacgatgaaggtgttccaaatagtgacagtagcactgactctgaggaacagcttgatgttaccataaaaccatcgactgaggatagagagaggggcatcagcagcagagaggatagcccacaagtctgtgatgataaggggccttttaaggacaccaggacccaagaagataaaaggagagatgttgatctggatttgtctgataaagattacagtagcgatgagtctatcatggaaagcataaaacataaagtgtctgagccctcgagatcctcatccctaagtctgagtaaaatggactttgatgatgaaagaacttggactgaccttgaagagaatttgtgtaaccatgatgttgttcttgggaatgaatccacttatgggacgccgcagacatgctaccctaataatgaaataggtatcctggacaaaacaataaaaaggaagattgcaccagtcaagaggggagaagacttgagcaagtccaggaggagcagaagtcctcctacatcggagctgatgatgaaattctttccttctttgaaaccaaaaccaaagtcagattcacacttgggaaatgaactcaagttaaacataagtcaagaccaaccacctggtgacaatgctcgatcccaggttttgagagagaaaattattgaattggaaacagaaatagaaaagtttaaagctgagaacgcatctttagctaaacttcgcattgaacgagaaagtgccttggaaaaactcaggaaagaaattgcagacttcgaacaacagaaagcaaaagaattagctcgaatagaagagtttaaaaaggaggagatgaggaagctacaaaaggaacgtaaagtttttgaaaagtatactacagctgcaagaacttttccagataaaaaggaacgtgaagaaatacagactttaaaacagcaaatagcagatttacgggaagatttgaaaagaaaggaaaccaaatggtcaagtacacacagccgtctcagaagccagatacaaatgttagtcagagagaacacagacctccgggaagaaataaaagtgatggaaagattccgactggatgcctggaagagagcagaagccatagagagcagcctcgaggtggagaagaaggacaagcttgcggcaatccacctcgaagatccaagtctgcacctcctcgtgatttaggcaatttggataagggacaagctgcctctcccagggagccacttgaaccactgaacttcccagatcctgaatataaagaggaggaggaagaccaagacatacagggagaaatcagtcatcctgatggaaaggtggaaaaggtttataagaatgggtgccgtgttatactgtttcccaatggaactcgaaaggaagtgagtgcagatgggaagaccatcactgtcactttctttaatggtgacgtgaagcaggtcatgccagaccaaagagtgatctactactatgcagctgcccagaccactcacacgacatacccggagggactggaagtcttacatttctcaagtggacaaatagaaaaacattacccagatggaagaaaagaaatcacgtttcctgaccagactgttaaaaacttatttcctgatggacaagaagaaagcattttcccagatggtacaattgtcagagtacaacgtgatggcaacaaactcatagagtttaataatggccaaagagaactacatactgcccagttcaagagacgggaatacccagatggcactgttaaaaccgtatatgcaaacggtcatcaagaaacgaagtacagatccggtcggataagagttaaggacaaggagggtaatgtgctaatggacacggagctgtgacgatcctcatgtgatcatgaagtaacagtaactgactttttatgttaaaaaatgtacatttactgtggattctgtttaatttattgtgtatgtgtggggaaaagattagattctaaaataaaagtttaccctgtggc

SEQ ID NO: 329580 - DNA, 3261 bp, Artificial Sequence
  derived and/or modified sequence
atgttcctgatgcccaccagcagcgagctgaacagcggccagaacttcctgacccagtggatgaccaaccccagcagagccggcgtgatcctgaacagaggcttccccatcctggaggccgacaaggagaagagagccgccgtggacatcagcaccagcttccccatcaagggcacccacttcagcgacagcttcagcttcatcaacgaggaggacagcctgctggaggagcagaagctggagagcaacaacccctacaagccccagagcgacaagagcgagacccacaccgccttcccctgcatcaagaagggcccccaggtggccgcctgccacagcgcccccggccaccaggaggagaacaagaacgacttcatccccgacctggccagcgagttcaaggagggcgcctacaaggaccccctgttcaagaagctggagcagctgaaggaggtgcagcagaagaagcaggagcagctgaagagacagcagctggagcagctgcagagactgatggaggagcaggagaagctgctgaccatggtgagcggccagtgcaccctgcccggcctgagcctgctgcccgacgaccagagccagaagcacagaagccccggcaacaccaccaccggcgagagagccacctgctgcttccccagctacgtgtaccccgaccccacccaggaggagacctaccccagcaacatcctgagccacgagcagagcaacttctgcagaaccgcccacggcgacttcgtgctgaccagcaagagagccagccccaacctgttcagcgaggcccagtaccaggaggcccccgtggagaagaacaacctgaaggaggagaacagaaaccaccccaccggcgagagcatcctgtgctgggagaaggtgaccgagcagatccaggaggccaacgacaagaacctgcagaagcacgacgacagcagcgaggtggccaacatcgaggagagacccatcaaggccgccatcggcgagagaaagcagaccttcgaggactacctggaggagcagatccagctggaggagcaggagctgaagcagaagcagctgaaggaggccgagggccccctgcccatcaaggccaagcccaagcagcccttcctgaagagaggcgagggcctggccagattcaccaacgccaagagcaagttccagaagggcaaggagagcaagctggtgaccaaccagagcaccagcgaggaccagcccctgttcaagatggacagacagcagctgcagagaaagaccgccctgaagaacaaggagctgtgcgccgacaaccccatcctgaagaaggacagcaaggccagaaccaagagcggcagcgtgaccctgagccagaagcccaagatgctgaagtgcagcaacagaaagagcctgagccccagcggcctgaagatccagaccggcaagaagtgcgacggccagttcagagaccagatcaagttcgagaacaaggtgaccagcaacaacaaggagaacgtgaccgagtgccccaagccctgcgacaccggctgcaccggctggaacaagacccagggcaaggacagactgcccctgagcaccggccccgccagcagactggccgccaagagccccatcagagagaccatgaaggagagcgagagcagcctggacgtgagcctgcagaagaagctggagacctgggagagagagaaggagaaggagaacctggagctggacgagttcctgttcctggagcaggccgccgacgagatcagcttcagcagcaacagcagcttcgtgctgaagatcctggagagagaccagcagatctgcaagggccacagaatgagcagcacccccgtgaaggccgtgccccagaagaccaaccccgccgaccccatcagccactgcaacagaagcgaggacctggaccacaccgccagagagaaggagagcgagtgcgaggtggcccccaagcagctgcacagcctgagcagcgccgacgagctgagagagcagccctgcaagatcagaaaggccgtgcagaagagcaccagcgagaaccagaccgagtggaacgccagagacgacgagggcgtgcccaacagcgacagcagcaccgacagcgaggagcagctggacgtgaccatcaagcccagcaccgaggacagagagagaggcatcagcagcagagaggacagcccccaggtgtgcgacgacaagggccccttcaaggacaccagaacccaggaggacaagagaagagacgtggacctggacctgagcgacaaggactacagcagcgacgagagcatcatggagagcatcaagcacaaggtgagcgagcccagcagaagcagcagcctgagcctgagcaagatggacttcgacgacgagagaacctggaccgacctggaggagaacctgtgcaaccacgacgtggtgctgggcaacgagagcacctacggcaccccccagacctgctaccccaacaacgagatcggcatcctggacaagaccatcaagagaaagatcgcccccgtgaagagaggcgaggacctgagcaagagcagaagaagcagaagcccccccaccagcgagctgatgatgaagttcttccccagcctgaagcccaagcccaagagcgacagccacctgggcaacgagctgaagctgaacatcagccaggaccagccccccggcgacaacgccagaagccaggtgctgagagagaagatcatcgagctggagaccgagatcgagaagttcaaggccgagaacgccagcctggccaagctgagaatcgagagagagagcgccctggagaagctgagaaaggagatcgccgacttcgagcagcagaaggccaaggagctggccagaatcgaggagttcaagaaggaggagatgagaaagctgcagaaggagagaaaggtgttcgagaagtacaccaccgccgccagaaccttccccgacaagaaggagagagaggagatccagaccctgaagcagcagatcgccgacctgagagaggacctgaagagaaaggagaccaagtggagcagcacccacagcagactgagaagccagatccagatgctggtgagagagaacaccgacctgagagaggagatcaaggtgatggagagattcagactggacgcctggaagagagccgaggccatcgagagcagcctggaggtggagaagaaggacaagctggccgccatccacctggaggaccccagcctgcacctgctggtgatctag

SEQ ID NO: 329581 - DNA, 480 bp, Artificial Sequence
  derived and/or modified sequence
tccggtttttctcaggggacgttgaaattatttttgtaacgggagtcgggagaggacggggcgtgccccgacgtgcgcgcgcgtcgtcctccccggcgctcctccacagctcgctggctcccgccgcggaaaggcgtcatgccgcccaaaaccccccgaaaaacggccgccaccgccgccgctgccgccgcggaacccccggcaccgccgccgccgccccctcctgaggaggacccagagcaggacagcggcccggaggacctgcctctcgtcaggggaagtattacaaatggaagatgatctggtgatttcatttcagttaatgctatgtgtccttgactattttattaaactctcacctcccatgttgctcaaagaaccatataaaacagctgttatacccattaatggttcacctcgaacacccaggcgaggtcagaacaggagtgcacggatagcaaaacaactagaaaatgatac
